United States Patent Application Publication US 2026/0347805 A1, published November 5, 2026 (application 19/555,579).

The application's sequence listing, which the Patent Office published only in electronic form, follows.

SEQUENCE LISTING (3419 sequences)

SEQ ID NO: 1 - protein, 774 aa, Thermococcus kodakarensis
MILDTDYITEDGKPVIRIFKKENGEFKIEYDRTFEPYFYALLKDDSAIEEVKKITAERHGTVVTVKRVEKVQKKFLGRPVEVWKLYFTHPQDVPAIRDKIREHPAVIDIYEYDIPFAKRYLIDKGLVPMEGDEELKMLAFDIETLYHEGEEFAEGPILMISYADEEGARVITWKNVDLPYVDVVSTEREMIKRFLRVVKEKDPDVLITYNGDNFDFAYLKKRCEKLGINFALGRDGSEPKIQRMGDRFAVEVKGRIHFDLYPVIRRTINLPTYTLEAVYEAVFGQPKEKVYAEEITTAWETGENLERVARYSMEDAKVTYELGKEFLPMEAQLSRLIGQSLWDVSRSSTGNLVEWFLLRKAYERNELAPNKPDEKELARRRQSYEGGYVKEPERGLWENIVYLDFRSLYPSIIITHNVSPDTLNREGCKEYDVAPQVGHRFCKDFPGFIPSLLGDLLEERQKIKKKMKATIDPIERKLLDYRQRAIKILANSYYGYYGYARARWYCKECAESVTAWGREYITMTIKEIEEKYGFKVIYSDTDGFFATIPGADAETVKKKAMEFLKYINAKLPGALELEYEGFYKRGFFVTKKKYAVIDEEGKITTRGLEIVRRDWSEIAKETQARVLEALLKDGDVEKAVRIVKEVTEKLSKYEVPPEKLVIHEQITRDLKDYKATGPHVAVAKRLAARGVKIRPGTVISYIVLKGSGRIGDRAIPFDEFDPTKHKYDAEYYIENQVLPAVERILRAFGYRKEDLRYQKTRQVGLSAWLKPKGT

SEQ ID NO: 2 - protein, 774 aa, synthetic construct
MDLDTDYITEDGKPVIRIFKKENGEFKIEYDRTFEPYFYALLKDDSAIEEVKKITAERHGTVVTVKRVEKVQKKFLGRPVEVWKLYFTHPQDVPAIRDKIREHPAVIDIYEYDIPFAKRYLIDKGLVPMEGDEELKMLAFDIETLYHEGEEFAEGPILMISYADEEGARVITWKNVDLPYVDVVSTEREMIKRFLRVVKEKDPDVLITYNGDNFDFAYLKKRCEKLGINFALGRDGSEPKIQRMGDRFAVEVKGRIHFDLYPVIRRTINLPTYTLEAVYEAVFGQPKEKVYAEEITTAWETGENLERVARYSMEDAKVTYELGKEFLPMEAQLSRLIGQSLWDVSRSSTGNLVEWFLLRKAYERNELAPNKPDEKELARRRQSYEGGYVKEPERGLWENIVYLDFRSLYPSIIITHNVSPDTLNREGCKEYDVAPQVGHRFCKDFPGFIPSLLGDLLEERQKIKKKMKATIDPIERKLLDYRQRAIKILANSYYGYYGYARARWYCKECAESVTAWGREYITMTIKEIEEKYGFKVIYSDTDGFFATIPGADAETVKKKAMEFLKYINAKLPGALELEYEGFYKRGFFVTKKKYAVIDEEGKITTRGLEIVRRDWSEIAKETQARVLEALLKDGDVEKAVRIVKEVTEKLSKYEVPPEKLVIHEQITRDLKDYKATGPHVAVAKRLAARGVKIRPGTVISYIVLKGSGRIGDRAIPFDEFDPTKHKYDAEYYIENQVLPAVERILRAFGYRKEDLRYQKTRQVGLSAWLKPKGT

SEQ ID NO: 3 - protein, 774 aa, synthetic construct
MELDTDYITEDGKPVIRIFKKENGEFKIEYDRTFEPYFYALLKDDSAIEEVKKITAERHGTVVTVKRVEKVQKKFLGRPVEVWKLYFTHPQDVPAIRDKIREHPAVIDIYEYDIPFAKRYLIDKGLVPMEGDEELKMLAFDIETLYHEGEEFAEGPILMISYADEEGARVITWKNVDLPYVDVVSTEREMIKRFLRVVKEKDPDVLITYNGDNFDFAYLKKRCEKLGINFALGRDGSEPKIQRMGDRFAVEVKGRIHFDLYPVIRRTINLPTYTLEAVYEAVFGQPKEKVYAEEITTAWETGENLERVARYSMEDAKVTYELGKEFLPMEAQLSRLIGQSLWDVSRSSTGNLVEWFLLRKAYERNELAPNKPDEKELARRRQSYEGGYVKEPERGLWENIVYLDFRSLYPSIIITHNVSPDTLNREGCKEYDVAPQVGHRFCKDFPGFIPSLLGDLLEERQKIKKKMKATIDPIERKLLDYRQRAIKILANSYYGYYGYARARWYCKECAESVTAWGREYITMTIKEIEEKYGFKVIYSDTDGFFATIPGADAETVKKKAMEFLKYINAKLPGALELEYEGFYKRGFFVTKKKYAVIDEEGKITTRGLEIVRRDWSEIAKETQARVLEALLKDGDVEKAVRIVKEVTEKLSKYEVPPEKLVIHEQITRDLKDYKATGPHVAVAKRLAARGVKIRPGTVISYIVLKGSGRIGDRAIPFDEFDPTKHKYDAEYYIENQVLPAVERILRAFGYRKEDLRYQKTRQVGLSAWLKPKGT

SEQ ID NO: 4 - protein, 774 aa, synthetic construct
MFLDTDYITEDGKPVIRIFKKENGEFKIEYDRTFEPYFYALLKDDSAIEEVKKITAERHGTVVTVKRVEKVQKKFLGRPVEVWKLYFTHPQDVPAIRDKIREHPAVIDIYEYDIPFAKRYLIDKGLVPMEGDEELKMLAFDIETLYHEGEEFAEGPILMISYADEEGARVITWKNVDLPYVDVVSTEREMIKRFLRVVKEKDPDVLITYNGDNFDFAYLKKRCEKLGINFALGRDGSEPKIQRMGDRFAVEVKGRIHFDLYPVIRRTINLPTYTLEAVYEAVFGQPKEKVYAEEITTAWETGENLERVARYSMEDAKVTYELGKEFLPMEAQLSRLIGQSLWDVSRSSTGNLVEWFLLRKAYERNELAPNKPDEKELARRRQSYEGGYVKEPERGLWENIVYLDFRSLYPSIIITHNVSPDTLNREGCKEYDVAPQVGHRFCKDFPGFIPSLLGDLLEERQKIKKKMKATIDPIERKLLDYRQRAIKILANSYYGYYGYARARWYCKECAESVTAWGREYITMTIKEIEEKYGFKVIYSDTDGFFATIPGADAETVKKKAMEFLKYINAKLPGALELEYEGFYKRGFFVTKKKYAVIDEEGKITTRGLEIVRRDWSEIAKETQARVLEALLKDGDVEKAVRIVKEVTEKLSKYEVPPEKLVIHEQITRDLKDYKATGPHVAVAKRLAARGVKIRPGTVISYIVLKGSGRIGDRAIPFDEFDPTKHKYDAEYYIENQVLPAVERILRAFGYRKEDLRYQKTRQVGLSAWLKPKGT

SEQ ID NO: 5 - protein, 774 aa, synthetic construct
MHLDTDYITEDGKPVIRIFKKENGEFKIEYDRTFEPYFYALLKDDSAIEEVKKITAERHGTVVTVKRVEKVQKKFLGRPVEVWKLYFTHPQDVPAIRDKIREHPAVIDIYEYDIPFAKRYLIDKGLVPMEGDEELKMLAFDIETLYHEGEEFAEGPILMISYADEEGARVITWKNVDLPYVDVVSTEREMIKRFLRVVKEKDPDVLITYNGDNFDFAYLKKRCEKLGINFALGRDGSEPKIQRMGDRFAVEVKGRIHFDLYPVIRRTINLPTYTLEAVYEAVFGQPKEKVYAEEITTAWETGENLERVARYSMEDAKVTYELGKEFLPMEAQLSRLIGQSLWDVSRSSTGNLVEWFLLRKAYERNELAPNKPDEKELARRRQSYEGGYVKEPERGLWENIVYLDFRSLYPSIIITHNVSPDTLNREGCKEYDVAPQVGHRFCKDFPGFIPSLLGDLLEERQKIKKKMKATIDPIERKLLDYRQRAIKILANSYYGYYGYARARWYCKECAESVTAWGREYITMTIKEIEEKYGFKVIYSDTDGFFATIPGADAETVKKKAMEFLKYINAKLPGALELEYEGFYKRGFFVTKKKYAVIDEEGKITTRGLEIVRRDWSEIAKETQARVLEALLKDGDVEKAVRIVKEVTEKLSKYEVPPEKLVIHEQITRDLKDYKATGPHVAVAKRLAARGVKIRPGTVISYIVLKGSGRIGDRAIPFDEFDPTKHKYDAEYYIENQVLPAVERILRAFGYRKEDLRYQKTRQVGLSAWLKPKGT

SEQ ID NO: 6 - protein, 774 aa, synthetic construct
MKLDTDYITEDGKPVIRIFKKENGEFKIEYDRTFEPYFYALLKDDSAIEEVKKITAERHGTVVTVKRVEKVQKKFLGRPVEVWKLYFTHPQDVPAIRDKIREHPAVIDIYEYDIPFAKRYLIDKGLVPMEGDEELKMLAFDIETLYHEGEEFAEGPILMISYADEEGARVITWKNVDLPYVDVVSTEREMIKRFLRVVKEKDPDVLITYNGDNFDFAYLKKRCEKLGINFALGRDGSEPKIQRMGDRFAVEVKGRIHFDLYPVIRRTINLPTYTLEAVYEAVFGQPKEKVYAEEITTAWETGENLERVARYSMEDAKVTYELGKEFLPMEAQLSRLIGQSLWDVSRSSTGNLVEWFLLRKAYERNELAPNKPDEKELARRRQSYEGGYVKEPERGLWENIVYLDFRSLYPSIIITHNVSPDTLNREGCKEYDVAPQVGHRFCKDFPGFIPSLLGDLLEERQKIKKKMKATIDPIERKLLDYRQRAIKILANSYYGYYGYARARWYCKECAESVTAWGREYITMTIKEIEEKYGFKVIYSDTDGFFATIPGADAETVKKKAMEFLKYINAKLPGALELEYEGFYKRGFFVTKKKYAVIDEEGKITTRGLEIVRRDWSEIAKETQARVLEALLKDGDVEKAVRIVKEVTEKLSKYEVPPEKLVIHEQITRDLKDYKATGPHVAVAKRLAARGVKIRPGTVISYIVLKGSGRIGDRAIPFDEFDPTKHKYDAEYYIENQVLPAVERILRAFGYRKEDLRYQKTRQVGLSAWLKPKGT

SEQ ID NO: 7 - protein, 774 aa, synthetic construct
MLLDTDYITEDGKPVIRIFKKENGEFKIEYDRTFEPYFYALLKDDSAIEEVKKITAERHGTVVTVKRVEKVQKKFLGRPVEVWKLYFTHPQDVPAIRDKIREHPAVIDIYEYDIPFAKRYLIDKGLVPMEGDEELKMLAFDIETLYHEGEEFAEGPILMISYADEEGARVITWKNVDLPYVDVVSTEREMIKRFLRVVKEKDPDVLITYNGDNFDFAYLKKRCEKLGINFALGRDGSEPKIQRMGDRFAVEVKGRIHFDLYPVIRRTINLPTYTLEAVYEAVFGQPKEKVYAEEITTAWETGENLERVARYSMEDAKVTYELGKEFLPMEAQLSRLIGQSLWDVSRSSTGNLVEWFLLRKAYERNELAPNKPDEKELARRRQSYEGGYVKEPERGLWENIVYLDFRSLYPSIIITHNVSPDTLNREGCKEYDVAPQVGHRFCKDFPGFIPSLLGDLLEERQKIKKKMKATIDPIERKLLDYRQRAIKILANSYYGYYGYARARWYCKECAESVTAWGREYITMTIKEIEEKYGFKVIYSDTDGFFATIPGADAETVKKKAMEFLKYINAKLPGALELEYEGFYKRGFFVTKKKYAVIDEEGKITTRGLEIVRRDWSEIAKETQARVLEALLKDGDVEKAVRIVKEVTEKLSKYEVPPEKLVIHEQITRDLKDYKATGPHVAVAKRLAARGVKIRPGTVISYIVLKGSGRIGDRAIPFDEFDPTKHKYDAEYYIENQVLPAVERILRAFGYRKEDLRYQKTRQVGLSAWLKPKGT

SEQ ID NO: 8 - protein, 774 aa, synthetic construct
MNLDTDYITEDGKPVIRIFKKENGEFKIEYDRTFEPYFYALLKDDSAIEEVKKITAERHGTVVTVKRVEKVQKKFLGRPVEVWKLYFTHPQDVPAIRDKIREHPAVIDIYEYDIPFAKRYLIDKGLVPMEGDEELKMLAFDIETLYHEGEEFAEGPILMISYADEEGARVITWKNVDLPYVDVVSTEREMIKRFLRVVKEKDPDVLITYNGDNFDFAYLKKRCEKLGINFALGRDGSEPKIQRMGDRFAVEVKGRIHFDLYPVIRRTINLPTYTLEAVYEAVFGQPKEKVYAEEITTAWETGENLERVARYSMEDAKVTYELGKEFLPMEAQLSRLIGQSLWDVSRSSTGNLVEWFLLRKAYERNELAPNKPDEKELARRRQSYEGGYVKEPERGLWENIVYLDFRSLYPSIIITHNVSPDTLNREGCKEYDVAPQVGHRFCKDFPGFIPSLLGDLLEERQKIKKKMKATIDPIERKLLDYRQRAIKILANSYYGYYGYARARWYCKECAESVTAWGREYITMTIKEIEEKYGFKVIYSDTDGFFATIPGADAETVKKKAMEFLKYINAKLPGALELEYEGFYKRGFFVTKKKYAVIDEEGKITTRGLEIVRRDWSEIAKETQARVLEALLKDGDVEKAVRIVKEVTEKLSKYEVPPEKLVIHEQITRDLKDYKATGPHVAVAKRLAARGVKIRPGTVISYIVLKGSGRIGDRAIPFDEFDPTKHKYDAEYYIENQVLPAVERILRAFGYRKEDLRYQKTRQVGLSAWLKPKGT

SEQ ID NO: 9 - protein, 774 aa, synthetic construct
MTLDTDYITEDGKPVIRIFKKENGEFKIEYDRTFEPYFYALLKDDSAIEEVKKITAERHGTVVTVKRVEKVQKKFLGRPVEVWKLYFTHPQDVPAIRDKIREHPAVIDIYEYDIPFAKRYLIDKGLVPMEGDEELKMLAFDIETLYHEGEEFAEGPILMISYADEEGARVITWKNVDLPYVDVVSTEREMIKRFLRVVKEKDPDVLITYNGDNFDFAYLKKRCEKLGINFALGRDGSEPKIQRMGDRFAVEVKGRIHFDLYPVIRRTINLPTYTLEAVYEAVFGQPKEKVYAEEITTAWETGENLERVARYSMEDAKVTYELGKEFLPMEAQLSRLIGQSLWDVSRSSTGNLVEWFLLRKAYERNELAPNKPDEKELARRRQSYEGGYVKEPERGLWENIVYLDFRSLYPSIIITHNVSPDTLNREGCKEYDVAPQVGHRFCKDFPGFIPSLLGDLLEERQKIKKKMKATIDPIERKLLDYRQRAIKILANSYYGYYGYARARWYCKECAESVTAWGREYITMTIKEIEEKYGFKVIYSDTDGFFATIPGADAETVKKKAMEFLKYINAKLPGALELEYEGFYKRGFFVTKKKYAVIDEEGKITTRGLEIVRRDWSEIAKETQARVLEALLKDGDVEKAVRIVKEVTEKLSKYEVPPEKLVIHEQITRDLKDYKATGPHVAVAKRLAARGVKIRPGTVISYIVLKGSGRIGDRAIPFDEFDPTKHKYDAEYYIENQVLPAVERILRAFGYRKEDLRYQKTRQVGLSAWLKPKGT

SEQ ID NO: 10 - protein, 774 aa, synthetic construct
MVLDTDYITEDGKPVIRIFKKENGEFKIEYDRTFEPYFYALLKDDSAIEEVKKITAERHGTVVTVKRVEKVQKKFLGRPVEVWKLYFTHPQDVPAIRDKIREHPAVIDIYEYDIPFAKRYLIDKGLVPMEGDEELKMLAFDIETLYHEGEEFAEGPILMISYADEEGARVITWKNVDLPYVDVVSTEREMIKRFLRVVKEKDPDVLITYNGDNFDFAYLKKRCEKLGINFALGRDGSEPKIQRMGDRFAVEVKGRIHFDLYPVIRRTINLPTYTLEAVYEAVFGQPKEKVYAEEITTAWETGENLERVARYSMEDAKVTYELGKEFLPMEAQLSRLIGQSLWDVSRSSTGNLVEWFLLRKAYERNELAPNKPDEKELARRRQSYEGGYVKEPERGLWENIVYLDFRSLYPSIIITHNVSPDTLNREGCKEYDVAPQVGHRFCKDFPGFIPSLLGDLLEERQKIKKKMKATIDPIERKLLDYRQRAIKILANSYYGYYGYARARWYCKECAESVTAWGREYITMTIKEIEEKYGFKVIYSDTDGFFATIPGADAETVKKKAMEFLKYINAKLPGALELEYEGFYKRGFFVTKKKYAVIDEEGKITTRGLEIVRRDWSEIAKETQARVLEALLKDGDVEKAVRIVKEVTEKLSKYEVPPEKLVIHEQITRDLKDYKATGPHVAVAKRLAARGVKIRPGTVISYIVLKGSGRIGDRAIPFDEFDPTKHKYDAEYYIENQVLPAVERILRAFGYRKEDLRYQKTRQVGLSAWLKPKGT

SEQ ID NO: 11 - protein, 774 aa, synthetic construct
MWLDTDYITEDGKPVIRIFKKENGEFKIEYDRTFEPYFYALLKDDSAIEEVKKITAERHGTVVTVKRVEKVQKKFLGRPVEVWKLYFTHPQDVPAIRDKIREHPAVIDIYEYDIPFAKRYLIDKGLVPMEGDEELKMLAFDIETLYHEGEEFAEGPILMISYADEEGARVITWKNVDLPYVDVVSTEREMIKRFLRVVKEKDPDVLITYNGDNFDFAYLKKRCEKLGINFALGRDGSEPKIQRMGDRFAVEVKGRIHFDLYPVIRRTINLPTYTLEAVYEAVFGQPKEKVYAEEITTAWETGENLERVARYSMEDAKVTYELGKEFLPMEAQLSRLIGQSLWDVSRSSTGNLVEWFLLRKAYERNELAPNKPDEKELARRRQSYEGGYVKEPERGLWENIVYLDFRSLYPSIIITHNVSPDTLNREGCKEYDVAPQVGHRFCKDFPGFIPSLLGDLLEERQKIKKKMKATIDPIERKLLDYRQRAIKILANSYYGYYGYARARWYCKECAESVTAWGREYITMTIKEIEEKYGFKVIYSDTDGFFATIPGADAETVKKKAMEFLKYINAKLPGALELEYEGFYKRGFFVTKKKYAVIDEEGKITTRGLEIVRRDWSEIAKETQARVLEALLKDGDVEKAVRIVKEVTEKLSKYEVPPEKLVIHEQITRDLKDYKATGPHVAVAKRLAARGVKIRPGTVISYIVLKGSGRIGDRAIPFDEFDPTKHKYDAEYYIENQVLPAVERILRAFGYRKEDLRYQKTRQVGLSAWLKPKGT

SEQ ID NO: 12 - protein, 774 aa, synthetic construct
MIDDTDYITEDGKPVIRIFKKENGEFKIEYDRTFEPYFYALLKDDSAIEEVKKITAERHGTVVTVKRVEKVQKKFLGRPVEVWKLYFTHPQDVPAIRDKIREHPAVIDIYEYDIPFAKRYLIDKGLVPMEGDEELKMLAFDIETLYHEGEEFAEGPILMISYADEEGARVITWKNVDLPYVDVVSTEREMIKRFLRVVKEKDPDVLITYNGDNFDFAYLKKRCEKLGINFALGRDGSEPKIQRMGDRFAVEVKGRIHFDLYPVIRRTINLPTYTLEAVYEAVFGQPKEKVYAEEITTAWETGENLERVARYSMEDAKVTYELGKEFLPMEAQLSRLIGQSLWDVSRSSTGNLVEWFLLRKAYERNELAPNKPDEKELARRRQSYEGGYVKEPERGLWENIVYLDFRSLYPSIIITHNVSPDTLNREGCKEYDVAPQVGHRFCKDFPGFIPSLLGDLLEERQKIKKKMKATIDPIERKLLDYRQRAIKILANSYYGYYGYARARWYCKECAESVTAWGREYITMTIKEIEEKYGFKVIYSDTDGFFATIPGADAETVKKKAMEFLKYINAKLPGALELEYEGFYKRGFFVTKKKYAVIDEEGKITTRGLEIVRRDWSEIAKETQARVLEALLKDGDVEKAVRIVKEVTEKLSKYEVPPEKLVIHEQITRDLKDYKATGPHVAVAKRLAARGVKIRPGTVISYIVLKGSGRIGDRAIPFDEFDPTKHKYDAEYYIENQVLPAVERILRAFGYRKEDLRYQKTRQVGLSAWLKPKGT

SEQ ID NO: 13 - protein, 774 aa, synthetic construct
MIHDTDYITEDGKPVIRIFKKENGEFKIEYDRTFEPYFYALLKDDSAIEEVKKITAERHGTVVTVKRVEKVQKKFLGRPVEVWKLYFTHPQDVPAIRDKIREHPAVIDIYEYDIPFAKRYLIDKGLVPMEGDEELKMLAFDIETLYHEGEEFAEGPILMISYADEEGARVITWKNVDLPYVDVVSTEREMIKRFLRVVKEKDPDVLITYNGDNFDFAYLKKRCEKLGINFALGRDGSEPKIQRMGDRFAVEVKGRIHFDLYPVIRRTINLPTYTLEAVYEAVFGQPKEKVYAEEITTAWETGENLERVARYSMEDAKVTYELGKEFLPMEAQLSRLIGQSLWDVSRSSTGNLVEWFLLRKAYERNELAPNKPDEKELARRRQSYEGGYVKEPERGLWENIVYLDFRSLYPSIIITHNVSPDTLNREGCKEYDVAPQVGHRFCKDFPGFIPSLLGDLLEERQKIKKKMKATIDPIERKLLDYRQRAIKILANSYYGYYGYARARWYCKECAESVTAWGREYITMTIKEIEEKYGFKVIYSDTDGFFATIPGADAETVKKKAMEFLKYINAKLPGALELEYEGFYKRGFFVTKKKYAVIDEEGKITTRGLEIVRRDWSEIAKETQARVLEALLKDGDVEKAVRIVKEVTEKLSKYEVPPEKLVIHEQITRDLKDYKATGPHVAVAKRLAARGVKIRPGTVISYIVLKGSGRIGDRAIPFDEFDPTKHKYDAEYYIENQVLPAVERILRAFGYRKEDLRYQKTRQVGLSAWLKPKGT

SEQ ID NO: 14 - protein, 774 aa, synthetic construct
MIIDTDYITEDGKPVIRIFKKENGEFKIEYDRTFEPYFYALLKDDSAIEEVKKITAERHGTVVTVKRVEKVQKKFLGRPVEVWKLYFTHPQDVPAIRDKIREHPAVIDIYEYDIPFAKRYLIDKGLVPMEGDEELKMLAFDIETLYHEGEEFAEGPILMISYADEEGARVITWKNVDLPYVDVVSTEREMIKRFLRVVKEKDPDVLITYNGDNFDFAYLKKRCEKLGINFALGRDGSEPKIQRMGDRFAVEVKGRIHFDLYPVIRRTINLPTYTLEAVYEAVFGQPKEKVYAEEITTAWETGENLERVARYSMEDAKVTYELGKEFLPMEAQLSRLIGQSLWDVSRSSTGNLVEWFLLRKAYERNELAPNKPDEKELARRRQSYEGGYVKEPERGLWENIVYLDFRSLYPSIIITHNVSPDTLNREGCKEYDVAPQVGHRFCKDFPGFIPSLLGDLLEERQKIKKKMKATIDPIERKLLDYRQRAIKILANSYYGYYGYARARWYCKECAESVTAWGREYITMTIKEIEEKYGFKVIYSDTDGFFATIPGADAETVKKKAMEFLKYINAKLPGALELEYEGFYKRGFFVTKKKYAVIDEEGKITTRGLEIVRRDWSEIAKETQARVLEALLKDGDVEKAVRIVKEVTEKLSKYEVPPEKLVIHEQITRDLKDYKATGPHVAVAKRLAARGVKIRPGTVISYIVLKGSGRIGDRAIPFDEFDPTKHKYDAEYYIENQVLPAVERILRAFGYRKEDLRYQKTRQVGLSAWLKPKGT

SEQ ID NO: 15 - protein, 774 aa, synthetic construct
MISDTDYITEDGKPVIRIFKKENGEFKIEYDRTFEPYFYALLKDDSAIEEVKKITAERHGTVVTVKRVEKVQKKFLGRPVEVWKLYFTHPQDVPAIRDKIREHPAVIDIYEYDIPFAKRYLIDKGLVPMEGDEELKMLAFDIETLYHEGEEFAEGPILMISYADEEGARVITWKNVDLPYVDVVSTEREMIKRFLRVVKEKDPDVLITYNGDNFDFAYLKKRCEKLGINFALGRDGSEPKIQRMGDRFAVEVKGRIHFDLYPVIRRTINLPTYTLEAVYEAVFGQPKEKVYAEEITTAWETGENLERVARYSMEDAKVTYELGKEFLPMEAQLSRLIGQSLWDVSRSSTGNLVEWFLLRKAYERNELAPNKPDEKELARRRQSYEGGYVKEPERGLWENIVYLDFRSLYPSIIITHNVSPDTLNREGCKEYDVAPQVGHRFCKDFPGFIPSLLGDLLEERQKIKKKMKATIDPIERKLLDYRQRAIKILANSYYGYYGYARARWYCKECAESVTAWGREYITMTIKEIEEKYGFKVIYSDTDGFFATIPGADAETVKKKAMEFLKYINAKLPGALELEYEGFYKRGFFVTKKKYAVIDEEGKITTRGLEIVRRDWSEIAKETQARVLEALLKDGDVEKAVRIVKEVTEKLSKYEVPPEKLVIHEQITRDLKDYKATGPHVAVAKRLAARGVKIRPGTVISYIVLKGSGRIGDRAIPFDEFDPTKHKYDAEYYIENQVLPAVERILRAFGYRKEDLRYQKTRQVGLSAWLKPKGT

SEQ ID NO: 16 - protein, 774 aa, synthetic construct
MITDTDYITEDGKPVIRIFKKENGEFKIEYDRTFEPYFYALLKDDSAIEEVKKITAERHGTVVTVKRVEKVQKKFLGRPVEVWKLYFTHPQDVPAIRDKIREHPAVIDIYEYDIPFAKRYLIDKGLVPMEGDEELKMLAFDIETLYHEGEEFAEGPILMISYADEEGARVITWKNVDLPYVDVVSTEREMIKRFLRVVKEKDPDVLITYNGDNFDFAYLKKRCEKLGINFALGRDGSEPKIQRMGDRFAVEVKGRIHFDLYPVIRRTINLPTYTLEAVYEAVFGQPKEKVYAEEITTAWETGENLERVARYSMEDAKVTYELGKEFLPMEAQLSRLIGQSLWDVSRSSTGNLVEWFLLRKAYERNELAPNKPDEKELARRRQSYEGGYVKEPERGLWENIVYLDFRSLYPSIIITHNVSPDTLNREGCKEYDVAPQVGHRFCKDFPGFIPSLLGDLLEERQKIKKKMKATIDPIERKLLDYRQRAIKILANSYYGYYGYARARWYCKECAESVTAWGREYITMTIKEIEEKYGFKVIYSDTDGFFATIPGADAETVKKKAMEFLKYINAKLPGALELEYEGFYKRGFFVTKKKYAVIDEEGKITTRGLEIVRRDWSEIAKETQARVLEALLKDGDVEKAVRIVKEVTEKLSKYEVPPEKLVIHEQITRDLKDYKATGPHVAVAKRLAARGVKIRPGTVISYIVLKGSGRIGDRAIPFDEFDPTKHKYDAEYYIENQVLPAVERILRAFGYRKEDLRYQKTRQVGLSAWLKPKGT

SEQ ID NO: 17 - protein, 774 aa, synthetic construct
MIYDTDYITEDGKPVIRIFKKENGEFKIEYDRTFEPYFYALLKDDSAIEEVKKITAERHGTVVTVKRVEKVQKKFLGRPVEVWKLYFTHPQDVPAIRDKIREHPAVIDIYEYDIPFAKRYLIDKGLVPMEGDEELKMLAFDIETLYHEGEEFAEGPILMISYADEEGARVITWKNVDLPYVDVVSTEREMIKRFLRVVKEKDPDVLITYNGDNFDFAYLKKRCEKLGINFALGRDGSEPKIQRMGDRFAVEVKGRIHFDLYPVIRRTINLPTYTLEAVYEAVFGQPKEKVYAEEITTAWETGENLERVARYSMEDAKVTYELGKEFLPMEAQLSRLIGQSLWDVSRSSTGNLVEWFLLRKAYERNELAPNKPDEKELARRRQSYEGGYVKEPERGLWENIVYLDFRSLYPSIIITHNVSPDTLNREGCKEYDVAPQVGHRFCKDFPGFIPSLLGDLLEERQKIKKKMKATIDPIERKLLDYRQRAIKILANSYYGYYGYARARWYCKECAESVTAWGREYITMTIKEIEEKYGFKVIYSDTDGFFATIPGADAETVKKKAMEFLKYINAKLPGALELEYEGFYKRGFFVTKKKYAVIDEEGKITTRGLEIVRRDWSEIAKETQARVLEALLKDGDVEKAVRIVKEVTEKLSKYEVPPEKLVIHEQITRDLKDYKATGPHVAVAKRLAARGVKIRPGTVISYIVLKGSGRIGDRAIPFDEFDPTKHKYDAEYYIENQVLPAVERILRAFGYRKEDLRYQKTRQVGLSAWLKPKGT

SEQ ID NO: 18 - protein, 774 aa, synthetic construct
MILITDYITEDGKPVIRIFKKENGEFKIEYDRTFEPYFYALLKDDSAIEEVKKITAERHGTVVTVKRVEKVQKKFLGRPVEVWKLYFTHPQDVPAIRDKIREHPAVIDIYEYDIPFAKRYLIDKGLVPMEGDEELKMLAFDIETLYHEGEEFAEGPILMISYADEEGARVITWKNVDLPYVDVVSTEREMIKRFLRVVKEKDPDVLITYNGDNFDFAYLKKRCEKLGINFALGRDGSEPKIQRMGDRFAVEVKGRIHFDLYPVIRRTINLPTYTLEAVYEAVFGQPKEKVYAEEITTAWETGENLERVARYSMEDAKVTYELGKEFLPMEAQLSRLIGQSLWDVSRSSTGNLVEWFLLRKAYERNELAPNKPDEKELARRRQSYEGGYVKEPERGLWENIVYLDFRSLYPSIIITHNVSPDTLNREGCKEYDVAPQVGHRFCKDFPGFIPSLLGDLLEERQKIKKKMKATIDPIERKLLDYRQRAIKILANSYYGYYGYARARWYCKECAESVTAWGREYITMTIKEIEEKYGFKVIYSDTDGFFATIPGADAETVKKKAMEFLKYINAKLPGALELEYEGFYKRGFFVTKKKYAVIDEEGKITTRGLEIVRRDWSEIAKETQARVLEALLKDGDVEKAVRIVKEVTEKLSKYEVPPEKLVIHEQITRDLKDYKATGPHVAVAKRLAARGVKIRPGTVISYIVLKGSGRIGDRAIPFDEFDPTKHKYDAEYYIENQVLPAVERILRAFGYRKEDLRYQKTRQVGLSAWLKPKGT

SEQ ID NO: 19 - protein, 774 aa, synthetic construct
MILLTDYITEDGKPVIRIFKKENGEFKIEYDRTFEPYFYALLKDDSAIEEVKKITAERHGTVVTVKRVEKVQKKFLGRPVEVWKLYFTHPQDVPAIRDKIREHPAVIDIYEYDIPFAKRYLIDKGLVPMEGDEELKMLAFDIETLYHEGEEFAEGPILMISYADEEGARVITWKNVDLPYVDVVSTEREMIKRFLRVVKEKDPDVLITYNGDNFDFAYLKKRCEKLGINFALGRDGSEPKIQRMGDRFAVEVKGRIHFDLYPVIRRTINLPTYTLEAVYEAVFGQPKEKVYAEEITTAWETGENLERVARYSMEDAKVTYELGKEFLPMEAQLSRLIGQSLWDVSRSSTGNLVEWFLLRKAYERNELAPNKPDEKELARRRQSYEGGYVKEPERGLWENIVYLDFRSLYPSIIITHNVSPDTLNREGCKEYDVAPQVGHRFCKDFPGFIPSLLGDLLEERQKIKKKMKATIDPIERKLLDYRQRAIKILANSYYGYYGYARARWYCKECAESVTAWGREYITMTIKEIEEKYGFKVIYSDTDGFFATIPGADAETVKKKAMEFLKYINAKLPGALELEYEGFYKRGFFVTKKKYAVIDEEGKITTRGLEIVRRDWSEIAKETQARVLEALLKDGDVEKAVRIVKEVTEKLSKYEVPPEKLVIHEQITRDLKDYKATGPHVAVAKRLAARGVKIRPGTVISYIVLKGSGRIGDRAIPFDEFDPTKHKYDAEYYIENQVLPAVERILRAFGYRKEDLRYQKTRQVGLSAWLKPKGT

SEQ ID NO: 20 - protein, 774 aa, synthetic construct
MILMTDYITEDGKPVIRIFKKENGEFKIEYDRTFEPYFYALLKDDSAIEEVKKITAERHGTVVTVKRVEKVQKKFLGRPVEVWKLYFTHPQDVPAIRDKIREHPAVIDIYEYDIPFAKRYLIDKGLVPMEGDEELKMLAFDIETLYHEGEEFAEGPILMISYADEEGARVITWKNVDLPYVDVVSTEREMIKRFLRVVKEKDPDVLITYNGDNFDFAYLKKRCEKLGINFALGRDGSEPKIQRMGDRFAVEVKGRIHFDLYPVIRRTINLPTYTLEAVYEAVFGQPKEKVYAEEITTAWETGENLERVARYSMEDAKVTYELGKEFLPMEAQLSRLIGQSLWDVSRSSTGNLVEWFLLRKAYERNELAPNKPDEKELARRRQSYEGGYVKEPERGLWENIVYLDFRSLYPSIIITHNVSPDTLNREGCKEYDVAPQVGHRFCKDFPGFIPSLLGDLLEERQKIKKKMKATIDPIERKLLDYRQRAIKILANSYYGYYGYARARWYCKECAESVTAWGREYITMTIKEIEEKYGFKVIYSDTDGFFATIPGADAETVKKKAMEFLKYINAKLPGALELEYEGFYKRGFFVTKKKYAVIDEEGKITTRGLEIVRRDWSEIAKETQARVLEALLKDGDVEKAVRIVKEVTEKLSKYEVPPEKLVIHEQITRDLKDYKATGPHVAVAKRLAARGVKIRPGTVISYIVLKGSGRIGDRAIPFDEFDPTKHKYDAEYYIENQVLPAVERILRAFGYRKEDLRYQKTRQVGLSAWLKPKGT

SEQ ID NO: 21 - protein, 774 aa, synthetic construct
MILPTDYITEDGKPVIRIFKKENGEFKIEYDRTFEPYFYALLKDDSAIEEVKKITAERHGTVVTVKRVEKVQKKFLGRPVEVWKLYFTHPQDVPAIRDKIREHPAVIDIYEYDIPFAKRYLIDKGLVPMEGDEELKMLAFDIETLYHEGEEFAEGPILMISYADEEGARVITWKNVDLPYVDVVSTEREMIKRFLRVVKEKDPDVLITYNGDNFDFAYLKKRCEKLGINFALGRDGSEPKIQRMGDRFAVEVKGRIHFDLYPVIRRTINLPTYTLEAVYEAVFGQPKEKVYAEEITTAWETGENLERVARYSMEDAKVTYELGKEFLPMEAQLSRLIGQSLWDVSRSSTGNLVEWFLLRKAYERNELAPNKPDEKELARRRQSYEGGYVKEPERGLWENIVYLDFRSLYPSIIITHNVSPDTLNREGCKEYDVAPQVGHRFCKDFPGFIPSLLGDLLEERQKIKKKMKATIDPIERKLLDYRQRAIKILANSYYGYYGYARARWYCKECAESVTAWGREYITMTIKEIEEKYGFKVIYSDTDGFFATIPGADAETVKKKAMEFLKYINAKLPGALELEYEGFYKRGFFVTKKKYAVIDEEGKITTRGLEIVRRDWSEIAKETQARVLEALLKDGDVEKAVRIVKEVTEKLSKYEVPPEKLVIHEQITRDLKDYKATGPHVAVAKRLAARGVKIRPGTVISYIVLKGSGRIGDRAIPFDEFDPTKHKYDAEYYIENQVLPAVERILRAFGYRKEDLRYQKTRQVGLSAWLKPKGT

SEQ ID NO: 22 - protein, 774 aa, synthetic construct
MILYTDYITEDGKPVIRIFKKENGEFKIEYDRTFEPYFYALLKDDSAIEEVKKITAERHGTVVTVKRVEKVQKKFLGRPVEVWKLYFTHPQDVPAIRDKIREHPAVIDIYEYDIPFAKRYLIDKGLVPMEGDEELKMLAFDIETLYHEGEEFAEGPILMISYADEEGARVITWKNVDLPYVDVVSTEREMIKRFLRVVKEKDPDVLITYNGDNFDFAYLKKRCEKLGINFALGRDGSEPKIQRMGDRFAVEVKGRIHFDLYPVIRRTINLPTYTLEAVYEAVFGQPKEKVYAEEITTAWETGENLERVARYSMEDAKVTYELGKEFLPMEAQLSRLIGQSLWDVSRSSTGNLVEWFLLRKAYERNELAPNKPDEKELARRRQSYEGGYVKEPERGLWENIVYLDFRSLYPSIIITHNVSPDTLNREGCKEYDVAPQVGHRFCKDFPGFIPSLLGDLLEERQKIKKKMKATIDPIERKLLDYRQRAIKILANSYYGYYGYARARWYCKECAESVTAWGREYITMTIKEIEEKYGFKVIYSDTDGFFATIPGADAETVKKKAMEFLKYINAKLPGALELEYEGFYKRGFFVTKKKYAVIDEEGKITTRGLEIVRRDWSEIAKETQARVLEALLKDGDVEKAVRIVKEVTEKLSKYEVPPEKLVIHEQITRDLKDYKATGPHVAVAKRLAARGVKIRPGTVISYIVLKGSGRIGDRAIPFDEFDPTKHKYDAEYYIENQVLPAVERILRAFGYRKEDLRYQKTRQVGLSAWLKPKGT

SEQ ID NO: 23 - protein, 774 aa, synthetic construct
MILDDDYITEDGKPVIRIFKKENGEFKIEYDRTFEPYFYALLKDDSAIEEVKKITAERHGTVVTVKRVEKVQKKFLGRPVEVWKLYFTHPQDVPAIRDKIREHPAVIDIYEYDIPFAKRYLIDKGLVPMEGDEELKMLAFDIETLYHEGEEFAEGPILMISYADEEGARVITWKNVDLPYVDVVSTEREMIKRFLRVVKEKDPDVLITYNGDNFDFAYLKKRCEKLGINFALGRDGSEPKIQRMGDRFAVEVKGRIHFDLYPVIRRTINLPTYTLEAVYEAVFGQPKEKVYAEEITTAWETGENLERVARYSMEDAKVTYELGKEFLPMEAQLSRLIGQSLWDVSRSSTGNLVEWFLLRKAYERNELAPNKPDEKELARRRQSYEGGYVKEPERGLWENIVYLDFRSLYPSIIITHNVSPDTLNREGCKEYDVAPQVGHRFCKDFPGFIPSLLGDLLEERQKIKKKMKATIDPIERKLLDYRQRAIKILANSYYGYYGYARARWYCKECAESVTAWGREYITMTIKEIEEKYGFKVIYSDTDGFFATIPGADAETVKKKAMEFLKYINAKLPGALELEYEGFYKRGFFVTKKKYAVIDEEGKITTRGLEIVRRDWSEIAKETQARVLEALLKDGDVEKAVRIVKEVTEKLSKYEVPPEKLVIHEQITRDLKDYKATGPHVAVAKRLAARGVKIRPGTVISYIVLKGSGRIGDRAIPFDEFDPTKHKYDAEYYIENQVLPAVERILRAFGYRKEDLRYQKTRQVGLSAWLKPKGT

SEQ ID NO: 24 - protein, 774 aa, synthetic construct
MILDEDYITEDGKPVIRIFKKENGEFKIEYDRTFEPYFYALLKDDSAIEEVKKITAERHGTVVTVKRVEKVQKKFLGRPVEVWKLYFTHPQDVPAIRDKIREHPAVIDIYEYDIPFAKRYLIDKGLVPMEGDEELKMLAFDIETLYHEGEEFAEGPILMISYADEEGARVITWKNVDLPYVDVVSTEREMIKRFLRVVKEKDPDVLITYNGDNFDFAYLKKRCEKLGINFALGRDGSEPKIQRMGDRFAVEVKGRIHFDLYPVIRRTINLPTYTLEAVYEAVFGQPKEKVYAEEITTAWETGENLERVARYSMEDAKVTYELGKEFLPMEAQLSRLIGQSLWDVSRSSTGNLVEWFLLRKAYERNELAPNKPDEKELARRRQSYEGGYVKEPERGLWENIVYLDFRSLYPSIIITHNVSPDTLNREGCKEYDVAPQVGHRFCKDFPGFIPSLLGDLLEERQKIKKKMKATIDPIERKLLDYRQRAIKILANSYYGYYGYARARWYCKECAESVTAWGREYITMTIKEIEEKYGFKVIYSDTDGFFATIPGADAETVKKKAMEFLKYINAKLPGALELEYEGFYKRGFFVTKKKYAVIDEEGKITTRGLEIVRRDWSEIAKETQARVLEALLKDGDVEKAVRIVKEVTEKLSKYEVPPEKLVIHEQITRDLKDYKATGPHVAVAKRLAARGVKIRPGTVISYIVLKGSGRIGDRAIPFDEFDPTKHKYDAEYYIENQVLPAVERILRAFGYRKEDLRYQKTRQVGLSAWLKPKGT

SEQ ID NO: 25 - protein, 774 aa, synthetic construct
MILDFDYITEDGKPVIRIFKKENGEFKIEYDRTFEPYFYALLKDDSAIEEVKKITAERHGTVVTVKRVEKVQKKFLGRPVEVWKLYFTHPQDVPAIRDKIREHPAVIDIYEYDIPFAKRYLIDKGLVPMEGDEELKMLAFDIETLYHEGEEFAEGPILMISYADEEGARVITWKNVDLPYVDVVSTEREMIKRFLRVVKEKDPDVLITYNGDNFDFAYLKKRCEKLGINFALGRDGSEPKIQRMGDRFAVEVKGRIHFDLYPVIRRTINLPTYTLEAVYEAVFGQPKEKVYAEEITTAWETGENLERVARYSMEDAKVTYELGKEFLPMEAQLSRLIGQSLWDVSRSSTGNLVEWFLLRKAYERNELAPNKPDEKELARRRQSYEGGYVKEPERGLWENIVYLDFRSLYPSIIITHNVSPDTLNREGCKEYDVAPQVGHRFCKDFPGFIPSLLGDLLEERQKIKKKMKATIDPIERKLLDYRQRAIKILANSYYGYYGYARARWYCKECAESVTAWGREYITMTIKEIEEKYGFKVIYSDTDGFFATIPGADAETVKKKAMEFLKYINAKLPGALELEYEGFYKRGFFVTKKKYAVIDEEGKITTRGLEIVRRDWSEIAKETQARVLEALLKDGDVEKAVRIVKEVTEKLSKYEVPPEKLVIHEQITRDLKDYKATGPHVAVAKRLAARGVKIRPGTVISYIVLKGSGRIGDRAIPFDEFDPTKHKYDAEYYIENQVLPAVERILRAFGYRKEDLRYQKTRQVGLSAWLKPKGT

SEQ ID NO: 26 - protein, 774 aa, synthetic construct
MILDGDYITEDGKPVIRIFKKENGEFKIEYDRTFEPYFYALLKDDSAIEEVKKITAERHGTVVTVKRVEKVQKKFLGRPVEVWKLYFTHPQDVPAIRDKIREHPAVIDIYEYDIPFAKRYLIDKGLVPMEGDEELKMLAFDIETLYHEGEEFAEGPILMISYADEEGARVITWKNVDLPYVDVVSTEREMIKRFLRVVKEKDPDVLITYNGDNFDFAYLKKRCEKLGINFALGRDGSEPKIQRMGDRFAVEVKGRIHFDLYPVIRRTINLPTYTLEAVYEAVFGQPKEKVYAEEITTAWETGENLERVARYSMEDAKVTYELGKEFLPMEAQLSRLIGQSLWDVSRSSTGNLVEWFLLRKAYERNELAPNKPDEKELARRRQSYEGGYVKEPERGLWENIVYLDFRSLYPSIIITHNVSPDTLNREGCKEYDVAPQVGHRFCKDFPGFIPSLLGDLLEERQKIKKKMKATIDPIERKLLDYRQRAIKILANSYYGYYGYARARWYCKECAESVTAWGREYITMTIKEIEEKYGFKVIYSDTDGFFATIPGADAETVKKKAMEFLKYINAKLPGALELEYEGFYKRGFFVTKKKYAVIDEEGKITTRGLEIVRRDWSEIAKETQARVLEALLKDGDVEKAVRIVKEVTEKLSKYEVPPEKLVIHEQITRDLKDYKATGPHVAVAKRLAARGVKIRPGTVISYIVLKGSGRIGDRAIPFDEFDPTKHKYDAEYYIENQVLPAVERILRAFGYRKEDLRYQKTRQVGLSAWLKPKGT

SEQ ID NO: 27 - protein, 774 aa, synthetic construct
MILDHDYITEDGKPVIRIFKKENGEFKIEYDRTFEPYFYALLKDDSAIEEVKKITAERHGTVVTVKRVEKVQKKFLGRPVEVWKLYFTHPQDVPAIRDKIREHPAVIDIYEYDIPFAKRYLIDKGLVPMEGDEELKMLAFDIETLYHEGEEFAEGPILMISYADEEGARVITWKNVDLPYVDVVSTEREMIKRFLRVVKEKDPDVLITYNGDNFDFAYLKKRCEKLGINFALGRDGSEPKIQRMGDRFAVEVKGRIHFDLYPVIRRTINLPTYTLEAVYEAVFGQPKEKVYAEEITTAWETGENLERVARYSMEDAKVTYELGKEFLPMEAQLSRLIGQSLWDVSRSSTGNLVEWFLLRKAYERNELAPNKPDEKELARRRQSYEGGYVKEPERGLWENIVYLDFRSLYPSIIITHNVSPDTLNREGCKEYDVAPQVGHRFCKDFPGFIPSLLGDLLEERQKIKKKMKATIDPIERKLLDYRQRAIKILANSYYGYYGYARARWYCKECAESVTAWGREYITMTIKEIEEKYGFKVIYSDTDGFFATIPGADAETVKKKAMEFLKYINAKLPGALELEYEGFYKRGFFVTKKKYAVIDEEGKITTRGLEIVRRDWSEIAKETQARVLEALLKDGDVEKAVRIVKEVTEKLSKYEVPPEKLVIHEQITRDLKDYKATGPHVAVAKRLAARGVKIRPGTVISYIVLKGSGRIGDRAIPFDEFDPTKHKYDAEYYIENQVLPAVERILRAFGYRKEDLRYQKTRQVGLSAWLKPKGT

SEQ ID NO: 28 - protein, 774 aa, synthetic construct
MILDLDYITEDGKPVIRIFKKENGEFKIEYDRTFEPYFYALLKDDSAIEEVKKITAERHGTVVTVKRVEKVQKKFLGRPVEVWKLYFTHPQDVPAIRDKIREHPAVIDIYEYDIPFAKRYLIDKGLVPMEGDEELKMLAFDIETLYHEGEEFAEGPILMISYADEEGARVITWKNVDLPYVDVVSTEREMIKRFLRVVKEKDPDVLITYNGDNFDFAYLKKRCEKLGINFALGRDGSEPKIQRMGDRFAVEVKGRIHFDLYPVIRRTINLPTYTLEAVYEAVFGQPKEKVYAEEITTAWETGENLERVARYSMEDAKVTYELGKEFLPMEAQLSRLIGQSLWDVSRSSTGNLVEWFLLRKAYERNELAPNKPDEKELARRRQSYEGGYVKEPERGLWENIVYLDFRSLYPSIIITHNVSPDTLNREGCKEYDVAPQVGHRFCKDFPGFIPSLLGDLLEERQKIKKKMKATIDPIERKLLDYRQRAIKILANSYYGYYGYARARWYCKECAESVTAWGREYITMTIKEIEEKYGFKVIYSDTDGFFATIPGADAETVKKKAMEFLKYINAKLPGALELEYEGFYKRGFFVTKKKYAVIDEEGKITTRGLEIVRRDWSEIAKETQARVLEALLKDGDVEKAVRIVKEVTEKLSKYEVPPEKLVIHEQITRDLKDYKATGPHVAVAKRLAARGVKIRPGTVISYIVLKGSGRIGDRAIPFDEFDPTKHKYDAEYYIENQVLPAVERILRAFGYRKEDLRYQKTRQVGLSAWLKPKGT

SEQ ID NO: 29 - protein, 774 aa, synthetic construct
MILDWDYITEDGKPVIRIFKKENGEFKIEYDRTFEPYFYALLKDDSAIEEVKKITAERHGTVVTVKRVEKVQKKFLGRPVEVWKLYFTHPQDVPAIRDKIREHPAVIDIYEYDIPFAKRYLIDKGLVPMEGDEELKMLAFDIETLYHEGEEFAEGPILMISYADEEGARVITWKNVDLPYVDVVSTEREMIKRFLRVVKEKDPDVLITYNGDNFDFAYLKKRCEKLGINFALGRDGSEPKIQRMGDRFAVEVKGRIHFDLYPVIRRTINLPTYTLEAVYEAVFGQPKEKVYAEEITTAWETGENLERVARYSMEDAKVTYELGKEFLPMEAQLSRLIGQSLWDVSRSSTGNLVEWFLLRKAYERNELAPNKPDEKELARRRQSYEGGYVKEPERGLWENIVYLDFRSLYPSIIITHNVSPDTLNREGCKEYDVAPQVGHRFCKDFPGFIPSLLGDLLEERQKIKKKMKATIDPIERKLLDYRQRAIKILANSYYGYYGYARARWYCKECAESVTAWGREYITMTIKEIEEKYGFKVIYSDTDGFFATIPGADAETVKKKAMEFLKYINAKLPGALELEYEGFYKRGFFVTKKKYAVIDEEGKITTRGLEIVRRDWSEIAKETQARVLEALLKDGDVEKAVRIVKEVTEKLSKYEVPPEKLVIHEQITRDLKDYKATGPHVAVAKRLAARGVKIRPGTVISYIVLKGSGRIGDRAIPFDEFDPTKHKYDAEYYIENQVLPAVERILRAFGYRKEDLRYQKTRQVGLSAWLKPKGT

SEQ ID NO: 30 - protein, 774 aa, synthetic construct
MILDYDYITEDGKPVIRIFKKENGEFKIEYDRTFEPYFYALLKDDSAIEEVKKITAERHGTVVTVKRVEKVQKKFLGRPVEVWKLYFTHPQDVPAIRDKIREHPAVIDIYEYDIPFAKRYLIDKGLVPMEGDEELKMLAFDIETLYHEGEEFAEGPILMISYADEEGARVITWKNVDLPYVDVVSTEREMIKRFLRVVKEKDPDVLITYNGDNFDFAYLKKRCEKLGINFALGRDGSEPKIQRMGDRFAVEVKGRIHFDLYPVIRRTINLPTYTLEAVYEAVFGQPKEKVYAEEITTAWETGENLERVARYSMEDAKVTYELGKEFLPMEAQLSRLIGQSLWDVSRSSTGNLVEWFLLRKAYERNELAPNKPDEKELARRRQSYEGGYVKEPERGLWENIVYLDFRSLYPSIIITHNVSPDTLNREGCKEYDVAPQVGHRFCKDFPGFIPSLLGDLLEERQKIKKKMKATIDPIERKLLDYRQRAIKILANSYYGYYGYARARWYCKECAESVTAWGREYITMTIKEIEEKYGFKVIYSDTDGFFATIPGADAETVKKKAMEFLKYINAKLPGALELEYEGFYKRGFFVTKKKYAVIDEEGKITTRGLEIVRRDWSEIAKETQARVLEALLKDGDVEKAVRIVKEVTEKLSKYEVPPEKLVIHEQITRDLKDYKATGPHVAVAKRLAARGVKIRPGTVISYIVLKGSGRIGDRAIPFDEFDPTKHKYDAEYYIENQVLPAVERILRAFGYRKEDLRYQKTRQVGLSAWLKPKGT

SEQ ID NO: 31 - protein, 774 aa, synthetic construct
MILDTLYITEDGKPVIRIFKKENGEFKIEYDRTFEPYFYALLKDDSAIEEVKKITAERHGTVVTVKRVEKVQKKFLGRPVEVWKLYFTHPQDVPAIRDKIREHPAVIDIYEYDIPFAKRYLIDKGLVPMEGDEELKMLAFDIETLYHEGEEFAEGPILMISYADEEGARVITWKNVDLPYVDVVSTEREMIKRFLRVVKEKDPDVLITYNGDNFDFAYLKKRCEKLGINFALGRDGSEPKIQRMGDRFAVEVKGRIHFDLYPVIRRTINLPTYTLEAVYEAVFGQPKEKVYAEEITTAWETGENLERVARYSMEDAKVTYELGKEFLPMEAQLSRLIGQSLWDVSRSSTGNLVEWFLLRKAYERNELAPNKPDEKELARRRQSYEGGYVKEPERGLWENIVYLDFRSLYPSIIITHNVSPDTLNREGCKEYDVAPQVGHRFCKDFPGFIPSLLGDLLEERQKIKKKMKATIDPIERKLLDYRQRAIKILANSYYGYYGYARARWYCKECAESVTAWGREYITMTIKEIEEKYGFKVIYSDTDGFFATIPGADAETVKKKAMEFLKYINAKLPGALELEYEGFYKRGFFVTKKKYAVIDEEGKITTRGLEIVRRDWSEIAKETQARVLEALLKDGDVEKAVRIVKEVTEKLSKYEVPPEKLVIHEQITRDLKDYKATGPHVAVAKRLAARGVKIRPGTVISYIVLKGSGRIGDRAIPFDEFDPTKHKYDAEYYIENQVLPAVERILRAFGYRKEDLRYQKTRQVGLSAWLKPKGT

SEQ ID NO: 32 - protein, 774 aa, synthetic construct
MILDTDAITEDGKPVIRIFKKENGEFKIEYDRTFEPYFYALLKDDSAIEEVKKITAERHGTVVTVKRVEKVQKKFLGRPVEVWKLYFTHPQDVPAIRDKIREHPAVIDIYEYDIPFAKRYLIDKGLVPMEGDEELKMLAFDIETLYHEGEEFAEGPILMISYADEEGARVITWKNVDLPYVDVVSTEREMIKRFLRVVKEKDPDVLITYNGDNFDFAYLKKRCEKLGINFALGRDGSEPKIQRMGDRFAVEVKGRIHFDLYPVIRRTINLPTYTLEAVYEAVFGQPKEKVYAEEITTAWETGENLERVARYSMEDAKVTYELGKEFLPMEAQLSRLIGQSLWDVSRSSTGNLVEWFLLRKAYERNELAPNKPDEKELARRRQSYEGGYVKEPERGLWENIVYLDFRSLYPSIIITHNVSPDTLNREGCKEYDVAPQVGHRFCKDFPGFIPSLLGDLLEERQKIKKKMKATIDPIERKLLDYRQRAIKILANSYYGYYGYARARWYCKECAESVTAWGREYITMTIKEIEEKYGFKVIYSDTDGFFATIPGADAETVKKKAMEFLKYINAKLPGALELEYEGFYKRGFFVTKKKYAVIDEEGKITTRGLEIVRRDWSEIAKETQARVLEALLKDGDVEKAVRIVKEVTEKLSKYEVPPEKLVIHEQITRDLKDYKATGPHVAVAKRLAARGVKIRPGTVISYIVLKGSGRIGDRAIPFDEFDPTKHKYDAEYYIENQVLPAVERILRAFGYRKEDLRYQKTRQVGLSAWLKPKGT

SEQ ID NO: 33 - protein, 774 aa, synthetic construct
MILDTDCITEDGKPVIRIFKKENGEFKIEYDRTFEPYFYALLKDDSAIEEVKKITAERHGTVVTVKRVEKVQKKFLGRPVEVWKLYFTHPQDVPAIRDKIREHPAVIDIYEYDIPFAKRYLIDKGLVPMEGDEELKMLAFDIETLYHEGEEFAEGPILMISYADEEGARVITWKNVDLPYVDVVSTEREMIKRFLRVVKEKDPDVLITYNGDNFDFAYLKKRCEKLGINFALGRDGSEPKIQRMGDRFAVEVKGRIHFDLYPVIRRTINLPTYTLEAVYEAVFGQPKEKVYAEEITTAWETGENLERVARYSMEDAKVTYELGKEFLPMEAQLSRLIGQSLWDVSRSSTGNLVEWFLLRKAYERNELAPNKPDEKELARRRQSYEGGYVKEPERGLWENIVYLDFRSLYPSIIITHNVSPDTLNREGCKEYDVAPQVGHRFCKDFPGFIPSLLGDLLEERQKIKKKMKATIDPIERKLLDYRQRAIKILANSYYGYYGYARARWYCKECAESVTAWGREYITMTIKEIEEKYGFKVIYSDTDGFFATIPGADAETVKKKAMEFLKYINAKLPGALELEYEGFYKRGFFVTKKKYAVIDEEGKITTRGLEIVRRDWSEIAKETQARVLEALLKDGDVEKAVRIVKEVTEKLSKYEVPPEKLVIHEQITRDLKDYKATGPHVAVAKRLAARGVKIRPGTVISYIVLKGSGRIGDRAIPFDEFDPTKHKYDAEYYIENQVLPAVERILRAFGYRKEDLRYQKTRQVGLSAWLKPKGT

SEQ ID NO: 34 - protein, 774 aa, synthetic construct
MILDTDDITEDGKPVIRIFKKENGEFKIEYDRTFEPYFYALLKDDSAIEEVKKITAERHGTVVTVKRVEKVQKKFLGRPVEVWKLYFTHPQDVPAIRDKIREHPAVIDIYEYDIPFAKRYLIDKGLVPMEGDEELKMLAFDIETLYHEGEEFAEGPILMISYADEEGARVITWKNVDLPYVDVVSTEREMIKRFLRVVKEKDPDVLITYNGDNFDFAYLKKRCEKLGINFALGRDGSEPKIQRMGDRFAVEVKGRIHFDLYPVIRRTINLPTYTLEAVYEAVFGQPKEKVYAEEITTAWETGENLERVARYSMEDAKVTYELGKEFLPMEAQLSRLIGQSLWDVSRSSTGNLVEWFLLRKAYERNELAPNKPDEKELARRRQSYEGGYVKEPERGLWENIVYLDFRSLYPSIIITHNVSPDTLNREGCKEYDVAPQVGHRFCKDFPGFIPSLLGDLLEERQKIKKKMKATIDPIERKLLDYRQRAIKILANSYYGYYGYARARWYCKECAESVTAWGREYITMTIKEIEEKYGFKVIYSDTDGFFATIPGADAETVKKKAMEFLKYINAKLPGALELEYEGFYKRGFFVTKKKYAVIDEEGKITTRGLEIVRRDWSEIAKETQARVLEALLKDGDVEKAVRIVKEVTEKLSKYEVPPEKLVIHEQITRDLKDYKATGPHVAVAKRLAARGVKIRPGTVISYIVLKGSGRIGDRAIPFDEFDPTKHKYDAEYYIENQVLPAVERILRAFGYRKEDLRYQKTRQVGLSAWLKPKGT

SEQ ID NO: 35 - protein, 774 aa, synthetic construct
MILDTDEITEDGKPVIRIFKKENGEFKIEYDRTFEPYFYALLKDDSAIEEVKKITAERHGTVVTVKRVEKVQKKFLGRPVEVWKLYFTHPQDVPAIRDKIREHPAVIDIYEYDIPFAKRYLIDKGLVPMEGDEELKMLAFDIETLYHEGEEFAEGPILMISYADEEGARVITWKNVDLPYVDVVSTEREMIKRFLRVVKEKDPDVLITYNGDNFDFAYLKKRCEKLGINFALGRDGSEPKIQRMGDRFAVEVKGRIHFDLYPVIRRTINLPTYTLEAVYEAVFGQPKEKVYAEEITTAWETGENLERVARYSMEDAKVTYELGKEFLPMEAQLSRLIGQSLWDVSRSSTGNLVEWFLLRKAYERNELAPNKPDEKELARRRQSYEGGYVKEPERGLWENIVYLDFRSLYPSIIITHNVSPDTLNREGCKEYDVAPQVGHRFCKDFPGFIPSLLGDLLEERQKIKKKMKATIDPIERKLLDYRQRAIKILANSYYGYYGYARARWYCKECAESVTAWGREYITMTIKEIEEKYGFKVIYSDTDGFFATIPGADAETVKKKAMEFLKYINAKLPGALELEYEGFYKRGFFVTKKKYAVIDEEGKITTRGLEIVRRDWSEIAKETQARVLEALLKDGDVEKAVRIVKEVTEKLSKYEVPPEKLVIHEQITRDLKDYKATGPHVAVAKRLAARGVKIRPGTVISYIVLKGSGRIGDRAIPFDEFDPTKHKYDAEYYIENQVLPAVERILRAFGYRKEDLRYQKTRQVGLSAWLKPKGT

SEQ ID NO: 36 - protein, 774 aa, synthetic construct
MILDTDFITEDGKPVIRIFKKENGEFKIEYDRTFEPYFYALLKDDSAIEEVKKITAERHGTVVTVKRVEKVQKKFLGRPVEVWKLYFTHPQDVPAIRDKIREHPAVIDIYEYDIPFAKRYLIDKGLVPMEGDEELKMLAFDIETLYHEGEEFAEGPILMISYADEEGARVITWKNVDLPYVDVVSTEREMIKRFLRVVKEKDPDVLITYNGDNFDFAYLKKRCEKLGINFALGRDGSEPKIQRMGDRFAVEVKGRIHFDLYPVIRRTINLPTYTLEAVYEAVFGQPKEKVYAEEITTAWETGENLERVARYSMEDAKVTYELGKEFLPMEAQLSRLIGQSLWDVSRSSTGNLVEWFLLRKAYERNELAPNKPDEKELARRRQSYEGGYVKEPERGLWENIVYLDFRSLYPSIIITHNVSPDTLNREGCKEYDVAPQVGHRFCKDFPGFIPSLLGDLLEERQKIKKKMKATIDPIERKLLDYRQRAIKILANSYYGYYGYARARWYCKECAESVTAWGREYITMTIKEIEEKYGFKVIYSDTDGFFATIPGADAETVKKKAMEFLKYINAKLPGALELEYEGFYKRGFFVTKKKYAVIDEEGKITTRGLEIVRRDWSEIAKETQARVLEALLKDGDVEKAVRIVKEVTEKLSKYEVPPEKLVIHEQITRDLKDYKATGPHVAVAKRLAARGVKIRPGTVISYIVLKGSGRIGDRAIPFDEFDPTKHKYDAEYYIENQVLPAVERILRAFGYRKEDLRYQKTRQVGLSAWLKPKGT

SEQ ID NO: 37 - protein, 774 aa, synthetic construct
MILDTDGITEDGKPVIRIFKKENGEFKIEYDRTFEPYFYALLKDDSAIEEVKKITAERHGTVVTVKRVEKVQKKFLGRPVEVWKLYFTHPQDVPAIRDKIREHPAVIDIYEYDIPFAKRYLIDKGLVPMEGDEELKMLAFDIETLYHEGEEFAEGPILMISYADEEGARVITWKNVDLPYVDVVSTEREMIKRFLRVVKEKDPDVLITYNGDNFDFAYLKKRCEKLGINFALGRDGSEPKIQRMGDRFAVEVKGRIHFDLYPVIRRTINLPTYTLEAVYEAVFGQPKEKVYAEEITTAWETGENLERVARYSMEDAKVTYELGKEFLPMEAQLSRLIGQSLWDVSRSSTGNLVEWFLLRKAYERNELAPNKPDEKELARRRQSYEGGYVKEPERGLWENIVYLDFRSLYPSIIITHNVSPDTLNREGCKEYDVAPQVGHRFCKDFPGFIPSLLGDLLEERQKIKKKMKATIDPIERKLLDYRQRAIKILANSYYGYYGYARARWYCKECAESVTAWGREYITMTIKEIEEKYGFKVIYSDTDGFFATIPGADAETVKKKAMEFLKYINAKLPGALELEYEGFYKRGFFVTKKKYAVIDEEGKITTRGLEIVRRDWSEIAKETQARVLEALLKDGDVEKAVRIVKEVTEKLSKYEVPPEKLVIHEQITRDLKDYKATGPHVAVAKRLAARGVKIRPGTVISYIVLKGSGRIGDRAIPFDEFDPTKHKYDAEYYIENQVLPAVERILRAFGYRKEDLRYQKTRQVGLSAWLKPKGT

SEQ ID NO: 38 - protein, 774 aa, synthetic construct
MILDTDHITEDGKPVIRIFKKENGEFKIEYDRTFEPYFYALLKDDSAIEEVKKITAERHGTVVTVKRVEKVQKKFLGRPVEVWKLYFTHPQDVPAIRDKIREHPAVIDIYEYDIPFAKRYLIDKGLVPMEGDEELKMLAFDIETLYHEGEEFAEGPILMISYADEEGARVITWKNVDLPYVDVVSTEREMIKRFLRVVKEKDPDVLITYNGDNFDFAYLKKRCEKLGINFALGRDGSEPKIQRMGDRFAVEVKGRIHFDLYPVIRRTINLPTYTLEAVYEAVFGQPKEKVYAEEITTAWETGENLERVARYSMEDAKVTYELGKEFLPMEAQLSRLIGQSLWDVSRSSTGNLVEWFLLRKAYERNELAPNKPDEKELARRRQSYEGGYVKEPERGLWENIVYLDFRSLYPSIIITHNVSPDTLNREGCKEYDVAPQVGHRFCKDFPGFIPSLLGDLLEERQKIKKKMKATIDPIERKLLDYRQRAIKILANSYYGYYGYARARWYCKECAESVTAWGREYITMTIKEIEEKYGFKVIYSDTDGFFATIPGADAETVKKKAMEFLKYINAKLPGALELEYEGFYKRGFFVTKKKYAVIDEEGKITTRGLEIVRRDWSEIAKETQARVLEALLKDGDVEKAVRIVKEVTEKLSKYEVPPEKLVIHEQITRDLKDYKATGPHVAVAKRLAARGVKIRPGTVISYIVLKGSGRIGDRAIPFDEFDPTKHKYDAEYYIENQVLPAVERILRAFGYRKEDLRYQKTRQVGLSAWLKPKGT

SEQ ID NO: 39 - protein, 774 aa, synthetic construct
MILDTDIITEDGKPVIRIFKKENGEFKIEYDRTFEPYFYALLKDDSAIEEVKKITAERHGTVVTVKRVEKVQKKFLGRPVEVWKLYFTHPQDVPAIRDKIREHPAVIDIYEYDIPFAKRYLIDKGLVPMEGDEELKMLAFDIETLYHEGEEFAEGPILMISYADEEGARVITWKNVDLPYVDVVSTEREMIKRFLRVVKEKDPDVLITYNGDNFDFAYLKKRCEKLGINFALGRDGSEPKIQRMGDRFAVEVKGRIHFDLYPVIRRTINLPTYTLEAVYEAVFGQPKEKVYAEEITTAWETGENLERVARYSMEDAKVTYELGKEFLPMEAQLSRLIGQSLWDVSRSSTGNLVEWFLLRKAYERNELAPNKPDEKELARRRQSYEGGYVKEPERGLWENIVYLDFRSLYPSIIITHNVSPDTLNREGCKEYDVAPQVGHRFCKDFPGFIPSLLGDLLEERQKIKKKMKATIDPIERKLLDYRQRAIKILANSYYGYYGYARARWYCKECAESVTAWGREYITMTIKEIEEKYGFKVIYSDTDGFFATIPGADAETVKKKAMEFLKYINAKLPGALELEYEGFYKRGFFVTKKKYAVIDEEGKITTRGLEIVRRDWSEIAKETQARVLEALLKDGDVEKAVRIVKEVTEKLSKYEVPPEKLVIHEQITRDLKDYKATGPHVAVAKRLAARGVKIRPGTVISYIVLKGSGRIGDRAIPFDEFDPTKHKYDAEYYIENQVLPAVERILRAFGYRKEDLRYQKTRQVGLSAWLKPKGT

SEQ ID NO: 40 - protein, 774 aa, synthetic construct
MILDTDKITEDGKPVIRIFKKENGEFKIEYDRTFEPYFYALLKDDSAIEEVKKITAERHGTVVTVKRVEKVQKKFLGRPVEVWKLYFTHPQDVPAIRDKIREHPAVIDIYEYDIPFAKRYLIDKGLVPMEGDEELKMLAFDIETLYHEGEEFAEGPILMISYADEEGARVITWKNVDLPYVDVVSTEREMIKRFLRVVKEKDPDVLITYNGDNFDFAYLKKRCEKLGINFALGRDGSEPKIQRMGDRFAVEVKGRIHFDLYPVIRRTINLPTYTLEAVYEAVFGQPKEKVYAEEITTAWETGENLERVARYSMEDAKVTYELGKEFLPMEAQLSRLIGQSLWDVSRSSTGNLVEWFLLRKAYERNELAPNKPDEKELARRRQSYEGGYVKEPERGLWENIVYLDFRSLYPSIIITHNVSPDTLNREGCKEYDVAPQVGHRFCKDFPGFIPSLLGDLLEERQKIKKKMKATIDPIERKLLDYRQRAIKILANSYYGYYGYARARWYCKECAESVTAWGREYITMTIKEIEEKYGFKVIYSDTDGFFATIPGADAETVKKKAMEFLKYINAKLPGALELEYEGFYKRGFFVTKKKYAVIDEEGKITTRGLEIVRRDWSEIAKETQARVLEALLKDGDVEKAVRIVKEVTEKLSKYEVPPEKLVIHEQITRDLKDYKATGPHVAVAKRLAARGVKIRPGTVISYIVLKGSGRIGDRAIPFDEFDPTKHKYDAEYYIENQVLPAVERILRAFGYRKEDLRYQKTRQVGLSAWLKPKGT

SEQ ID NO: 41 - protein, 774 aa, synthetic construct
MILDTDLITEDGKPVIRIFKKENGEFKIEYDRTFEPYFYALLKDDSAIEEVKKITAERHGTVVTVKRVEKVQKKFLGRPVEVWKLYFTHPQDVPAIRDKIREHPAVIDIYEYDIPFAKRYLIDKGLVPMEGDEELKMLAFDIETLYHEGEEFAEGPILMISYADEEGARVITWKNVDLPYVDVVSTEREMIKRFLRVVKEKDPDVLITYNGDNFDFAYLKKRCEKLGINFALGRDGSEPKIQRMGDRFAVEVKGRIHFDLYPVIRRTINLPTYTLEAVYEAVFGQPKEKVYAEEITTAWETGENLERVARYSMEDAKVTYELGKEFLPMEAQLSRLIGQSLWDVSRSSTGNLVEWFLLRKAYERNELAPNKPDEKELARRRQSYEGGYVKEPERGLWENIVYLDFRSLYPSIIITHNVSPDTLNREGCKEYDVAPQVGHRFCKDFPGFIPSLLGDLLEERQKIKKKMKATIDPIERKLLDYRQRAIKILANSYYGYYGYARARWYCKECAESVTAWGREYITMTIKEIEEKYGFKVIYSDTDGFFATIPGADAETVKKKAMEFLKYINAKLPGALELEYEGFYKRGFFVTKKKYAVIDEEGKITTRGLEIVRRDWSEIAKETQARVLEALLKDGDVEKAVRIVKEVTEKLSKYEVPPEKLVIHEQITRDLKDYKATGPHVAVAKRLAARGVKIRPGTVISYIVLKGSGRIGDRAIPFDEFDPTKHKYDAEYYIENQVLPAVERILRAFGYRKEDLRYQKTRQVGLSAWLKPKGT

SEQ ID NO: 42 - protein, 774 aa, synthetic construct
MILDTDMITEDGKPVIRIFKKENGEFKIEYDRTFEPYFYALLKDDSAIEEVKKITAERHGTVVTVKRVEKVQKKFLGRPVEVWKLYFTHPQDVPAIRDKIREHPAVIDIYEYDIPFAKRYLIDKGLVPMEGDEELKMLAFDIETLYHEGEEFAEGPILMISYADEEGARVITWKNVDLPYVDVVSTEREMIKRFLRVVKEKDPDVLITYNGDNFDFAYLKKRCEKLGINFALGRDGSEPKIQRMGDRFAVEVKGRIHFDLYPVIRRTINLPTYTLEAVYEAVFGQPKEKVYAEEITTAWETGENLERVARYSMEDAKVTYELGKEFLPMEAQLSRLIGQSLWDVSRSSTGNLVEWFLLRKAYERNELAPNKPDEKELARRRQSYEGGYVKEPERGLWENIVYLDFRSLYPSIIITHNVSPDTLNREGCKEYDVAPQVGHRFCKDFPGFIPSLLGDLLEERQKIKKKMKATIDPIERKLLDYRQRAIKILANSYYGYYGYARARWYCKECAESVTAWGREYITMTIKEIEEKYGFKVIYSDTDGFFATIPGADAETVKKKAMEFLKYINAKLPGALELEYEGFYKRGFFVTKKKYAVIDEEGKITTRGLEIVRRDWSEIAKETQARVLEALLKDGDVEKAVRIVKEVTEKLSKYEVPPEKLVIHEQITRDLKDYKATGPHVAVAKRLAARGVKIRPGTVISYIVLKGSGRIGDRAIPFDEFDPTKHKYDAEYYIENQVLPAVERILRAFGYRKEDLRYQKTRQVGLSAWLKPKGT

SEQ ID NO: 43 - protein, 774 aa, synthetic construct
MILDTDNITEDGKPVIRIFKKENGEFKIEYDRTFEPYFYALLKDDSAIEEVKKITAERHGTVVTVKRVEKVQKKFLGRPVEVWKLYFTHPQDVPAIRDKIREHPAVIDIYEYDIPFAKRYLIDKGLVPMEGDEELKMLAFDIETLYHEGEEFAEGPILMISYADEEGARVITWKNVDLPYVDVVSTEREMIKRFLRVVKEKDPDVLITYNGDNFDFAYLKKRCEKLGINFALGRDGSEPKIQRMGDRFAVEVKGRIHFDLYPVIRRTINLPTYTLEAVYEAVFGQPKEKVYAEEITTAWETGENLERVARYSMEDAKVTYELGKEFLPMEAQLSRLIGQSLWDVSRSSTGNLVEWFLLRKAYERNELAPNKPDEKELARRRQSYEGGYVKEPERGLWENIVYLDFRSLYPSIIITHNVSPDTLNREGCKEYDVAPQVGHRFCKDFPGFIPSLLGDLLEERQKIKKKMKATIDPIERKLLDYRQRAIKILANSYYGYYGYARARWYCKECAESVTAWGREYITMTIKEIEEKYGFKVIYSDTDGFFATIPGADAETVKKKAMEFLKYINAKLPGALELEYEGFYKRGFFVTKKKYAVIDEEGKITTRGLEIVRRDWSEIAKETQARVLEALLKDGDVEKAVRIVKEVTEKLSKYEVPPEKLVIHEQITRDLKDYKATGPHVAVAKRLAARGVKIRPGTVISYIVLKGSGRIGDRAIPFDEFDPTKHKYDAEYYIENQVLPAVERILRAFGYRKEDLRYQKTRQVGLSAWLKPKGT

SEQ ID NO: 44 - protein, 774 aa, synthetic construct
MILDTDPITEDGKPVIRIFKKENGEFKIEYDRTFEPYFYALLKDDSAIEEVKKITAERHGTVVTVKRVEKVQKKFLGRPVEVWKLYFTHPQDVPAIRDKIREHPAVIDIYEYDIPFAKRYLIDKGLVPMEGDEELKMLAFDIETLYHEGEEFAEGPILMISYADEEGARVITWKNVDLPYVDVVSTEREMIKRFLRVVKEKDPDVLITYNGDNFDFAYLKKRCEKLGINFALGRDGSEPKIQRMGDRFAVEVKGRIHFDLYPVIRRTINLPTYTLEAVYEAVFGQPKEKVYAEEITTAWETGENLERVARYSMEDAKVTYELGKEFLPMEAQLSRLIGQSLWDVSRSSTGNLVEWFLLRKAYERNELAPNKPDEKELARRRQSYEGGYVKEPERGLWENIVYLDFRSLYPSIIITHNVSPDTLNREGCKEYDVAPQVGHRFCKDFPGFIPSLLGDLLEERQKIKKKMKATIDPIERKLLDYRQRAIKILANSYYGYYGYARARWYCKECAESVTAWGREYITMTIKEIEEKYGFKVIYSDTDGFFATIPGADAETVKKKAMEFLKYINAKLPGALELEYEGFYKRGFFVTKKKYAVIDEEGKITTRGLEIVRRDWSEIAKETQARVLEALLKDGDVEKAVRIVKEVTEKLSKYEVPPEKLVIHEQITRDLKDYKATGPHVAVAKRLAARGVKIRPGTVISYIVLKGSGRIGDRAIPFDEFDPTKHKYDAEYYIENQVLPAVERILRAFGYRKEDLRYQKTRQVGLSAWLKPKGT

SEQ ID NO: 45 - protein, 774 aa, synthetic construct
MILDTDQITEDGKPVIRIFKKENGEFKIEYDRTFEPYFYALLKDDSAIEEVKKITAERHGTVVTVKRVEKVQKKFLGRPVEVWKLYFTHPQDVPAIRDKIREHPAVIDIYEYDIPFAKRYLIDKGLVPMEGDEELKMLAFDIETLYHEGEEFAEGPILMISYADEEGARVITWKNVDLPYVDVVSTEREMIKRFLRVVKEKDPDVLITYNGDNFDFAYLKKRCEKLGINFALGRDGSEPKIQRMGDRFAVEVKGRIHFDLYPVIRRTINLPTYTLEAVYEAVFGQPKEKVYAEEITTAWETGENLERVARYSMEDAKVTYELGKEFLPMEAQLSRLIGQSLWDVSRSSTGNLVEWFLLRKAYERNELAPNKPDEKELARRRQSYEGGYVKEPERGLWENIVYLDFRSLYPSIIITHNVSPDTLNREGCKEYDVAPQVGHRFCKDFPGFIPSLLGDLLEERQKIKKKMKATIDPIERKLLDYRQRAIKILANSYYGYYGYARARWYCKECAESVTAWGREYITMTIKEIEEKYGFKVIYSDTDGFFATIPGADAETVKKKAMEFLKYINAKLPGALELEYEGFYKRGFFVTKKKYAVIDEEGKITTRGLEIVRRDWSEIAKETQARVLEALLKDGDVEKAVRIVKEVTEKLSKYEVPPEKLVIHEQITRDLKDYKATGPHVAVAKRLAARGVKIRPGTVISYIVLKGSGRIGDRAIPFDEFDPTKHKYDAEYYIENQVLPAVERILRAFGYRKEDLRYQKTRQVGLSAWLKPKGT

SEQ ID NO: 46 - protein, 774 aa, synthetic construct
MILDTDRITEDGKPVIRIFKKENGEFKIEYDRTFEPYFYALLKDDSAIEEVKKITAERHGTVVTVKRVEKVQKKFLGRPVEVWKLYFTHPQDVPAIRDKIREHPAVIDIYEYDIPFAKRYLIDKGLVPMEGDEELKMLAFDIETLYHEGEEFAEGPILMISYADEEGARVITWKNVDLPYVDVVSTEREMIKRFLRVVKEKDPDVLITYNGDNFDFAYLKKRCEKLGINFALGRDGSEPKIQRMGDRFAVEVKGRIHFDLYPVIRRTINLPTYTLEAVYEAVFGQPKEKVYAEEITTAWETGENLERVARYSMEDAKVTYELGKEFLPMEAQLSRLIGQSLWDVSRSSTGNLVEWFLLRKAYERNELAPNKPDEKELARRRQSYEGGYVKEPERGLWENIVYLDFRSLYPSIIITHNVSPDTLNREGCKEYDVAPQVGHRFCKDFPGFIPSLLGDLLEERQKIKKKMKATIDPIERKLLDYRQRAIKILANSYYGYYGYARARWYCKECAESVTAWGREYITMTIKEIEEKYGFKVIYSDTDGFFATIPGADAETVKKKAMEFLKYINAKLPGALELEYEGFYKRGFFVTKKKYAVIDEEGKITTRGLEIVRRDWSEIAKETQARVLEALLKDGDVEKAVRIVKEVTEKLSKYEVPPEKLVIHEQITRDLKDYKATGPHVAVAKRLAARGVKIRPGTVISYIVLKGSGRIGDRAIPFDEFDPTKHKYDAEYYIENQVLPAVERILRAFGYRKEDLRYQKTRQVGLSAWLKPKGT

SEQ ID NO: 47 - protein, 774 aa, synthetic construct
MILDTDSITEDGKPVIRIFKKENGEFKIEYDRTFEPYFYALLKDDSAIEEVKKITAERHGTVVTVKRVEKVQKKFLGRPVEVWKLYFTHPQDVPAIRDKIREHPAVIDIYEYDIPFAKRYLIDKGLVPMEGDEELKMLAFDIETLYHEGEEFAEGPILMISYADEEGARVITWKNVDLPYVDVVSTEREMIKRFLRVVKEKDPDVLITYNGDNFDFAYLKKRCEKLGINFALGRDGSEPKIQRMGDRFAVEVKGRIHFDLYPVIRRTINLPTYTLEAVYEAVFGQPKEKVYAEEITTAWETGENLERVARYSMEDAKVTYELGKEFLPMEAQLSRLIGQSLWDVSRSSTGNLVEWFLLRKAYERNELAPNKPDEKELARRRQSYEGGYVKEPERGLWENIVYLDFRSLYPSIIITHNVSPDTLNREGCKEYDVAPQVGHRFCKDFPGFIPSLLGDLLEERQKIKKKMKATIDPIERKLLDYRQRAIKILANSYYGYYGYARARWYCKECAESVTAWGREYITMTIKEIEEKYGFKVIYSDTDGFFATIPGADAETVKKKAMEFLKYINAKLPGALELEYEGFYKRGFFVTKKKYAVIDEEGKITTRGLEIVRRDWSEIAKETQARVLEALLKDGDVEKAVRIVKEVTEKLSKYEVPPEKLVIHEQITRDLKDYKATGPHVAVAKRLAARGVKIRPGTVISYIVLKGSGRIGDRAIPFDEFDPTKHKYDAEYYIENQVLPAVERILRAFGYRKEDLRYQKTRQVGLSAWLKPKGT

SEQ ID NO: 48 - protein, 774 aa, synthetic construct
MILDTDTITEDGKPVIRIFKKENGEFKIEYDRTFEPYFYALLKDDSAIEEVKKITAERHGTVVTVKRVEKVQKKFLGRPVEVWKLYFTHPQDVPAIRDKIREHPAVIDIYEYDIPFAKRYLIDKGLVPMEGDEELKMLAFDIETLYHEGEEFAEGPILMISYADEEGARVITWKNVDLPYVDVVSTEREMIKRFLRVVKEKDPDVLITYNGDNFDFAYLKKRCEKLGINFALGRDGSEPKIQRMGDRFAVEVKGRIHFDLYPVIRRTINLPTYTLEAVYEAVFGQPKEKVYAEEITTAWETGENLERVARYSMEDAKVTYELGKEFLPMEAQLSRLIGQSLWDVSRSSTGNLVEWFLLRKAYERNELAPNKPDEKELARRRQSYEGGYVKEPERGLWENIVYLDFRSLYPSIIITHNVSPDTLNREGCKEYDVAPQVGHRFCKDFPGFIPSLLGDLLEERQKIKKKMKATIDPIERKLLDYRQRAIKILANSYYGYYGYARARWYCKECAESVTAWGREYITMTIKEIEEKYGFKVIYSDTDGFFATIPGADAETVKKKAMEFLKYINAKLPGALELEYEGFYKRGFFVTKKKYAVIDEEGKITTRGLEIVRRDWSEIAKETQARVLEALLKDGDVEKAVRIVKEVTEKLSKYEVPPEKLVIHEQITRDLKDYKATGPHVAVAKRLAARGVKIRPGTVISYIVLKGSGRIGDRAIPFDEFDPTKHKYDAEYYIENQVLPAVERILRAFGYRKEDLRYQKTRQVGLSAWLKPKGT

SEQ ID NO: 49 - protein, 774 aa, synthetic construct
MILDTDVITEDGKPVIRIFKKENGEFKIEYDRTFEPYFYALLKDDSAIEEVKKITAERHGTVVTVKRVEKVQKKFLGRPVEVWKLYFTHPQDVPAIRDKIREHPAVIDIYEYDIPFAKRYLIDKGLVPMEGDEELKMLAFDIETLYHEGEEFAEGPILMISYADEEGARVITWKNVDLPYVDVVSTEREMIKRFLRVVKEKDPDVLITYNGDNFDFAYLKKRCEKLGINFALGRDGSEPKIQRMGDRFAVEVKGRIHFDLYPVIRRTINLPTYTLEAVYEAVFGQPKEKVYAEEITTAWETGENLERVARYSMEDAKVTYELGKEFLPMEAQLSRLIGQSLWDVSRSSTGNLVEWFLLRKAYERNELAPNKPDEKELARRRQSYEGGYVKEPERGLWENIVYLDFRSLYPSIIITHNVSPDTLNREGCKEYDVAPQVGHRFCKDFPGFIPSLLGDLLEERQKIKKKMKATIDPIERKLLDYRQRAIKILANSYYGYYGYARARWYCKECAESVTAWGREYITMTIKEIEEKYGFKVIYSDTDGFFATIPGADAETVKKKAMEFLKYINAKLPGALELEYEGFYKRGFFVTKKKYAVIDEEGKITTRGLEIVRRDWSEIAKETQARVLEALLKDGDVEKAVRIVKEVTEKLSKYEVPPEKLVIHEQITRDLKDYKATGPHVAVAKRLAARGVKIRPGTVISYIVLKGSGRIGDRAIPFDEFDPTKHKYDAEYYIENQVLPAVERILRAFGYRKEDLRYQKTRQVGLSAWLKPKGT

SEQ ID NO: 50 - protein, 774 aa, synthetic construct
MILDTDWITEDGKPVIRIFKKENGEFKIEYDRTFEPYFYALLKDDSAIEEVKKITAERHGTVVTVKRVEKVQKKFLGRPVEVWKLYFTHPQDVPAIRDKIREHPAVIDIYEYDIPFAKRYLIDKGLVPMEGDEELKMLAFDIETLYHEGEEFAEGPILMISYADEEGARVITWKNVDLPYVDVVSTEREMIKRFLRVVKEKDPDVLITYNGDNFDFAYLKKRCEKLGINFALGRDGSEPKIQRMGDRFAVEVKGRIHFDLYPVIRRTINLPTYTLEAVYEAVFGQPKEKVYAEEITTAWETGENLERVARYSMEDAKVTYELGKEFLPMEAQLSRLIGQSLWDVSRSSTGNLVEWFLLRKAYERNELAPNKPDEKELARRRQSYEGGYVKEPERGLWENIVYLDFRSLYPSIIITHNVSPDTLNREGCKEYDVAPQVGHRFCKDFPGFIPSLLGDLLEERQKIKKKMKATIDPIERKLLDYRQRAIKILANSYYGYYGYARARWYCKECAESVTAWGREYITMTIKEIEEKYGFKVIYSDTDGFFATIPGADAETVKKKAMEFLKYINAKLPGALELEYEGFYKRGFFVTKKKYAVIDEEGKITTRGLEIVRRDWSEIAKETQARVLEALLKDGDVEKAVRIVKEVTEKLSKYEVPPEKLVIHEQITRDLKDYKATGPHVAVAKRLAARGVKIRPGTVISYIVLKGSGRIGDRAIPFDEFDPTKHKYDAEYYIENQVLPAVERILRAFGYRKEDLRYQKTRQVGLSAWLKPKGT

SEQ ID NO: 51 - protein, 774 aa, synthetic construct
MILDTDYDTEDGKPVIRIFKKENGEFKIEYDRTFEPYFYALLKDDSAIEEVKKITAERHGTVVTVKRVEKVQKKFLGRPVEVWKLYFTHPQDVPAIRDKIREHPAVIDIYEYDIPFAKRYLIDKGLVPMEGDEELKMLAFDIETLYHEGEEFAEGPILMISYADEEGARVITWKNVDLPYVDVVSTEREMIKRFLRVVKEKDPDVLITYNGDNFDFAYLKKRCEKLGINFALGRDGSEPKIQRMGDRFAVEVKGRIHFDLYPVIRRTINLPTYTLEAVYEAVFGQPKEKVYAEEITTAWETGENLERVARYSMEDAKVTYELGKEFLPMEAQLSRLIGQSLWDVSRSSTGNLVEWFLLRKAYERNELAPNKPDEKELARRRQSYEGGYVKEPERGLWENIVYLDFRSLYPSIIITHNVSPDTLNREGCKEYDVAPQVGHRFCKDFPGFIPSLLGDLLEERQKIKKKMKATIDPIERKLLDYRQRAIKILANSYYGYYGYARARWYCKECAESVTAWGREYITMTIKEIEEKYGFKVIYSDTDGFFATIPGADAETVKKKAMEFLKYINAKLPGALELEYEGFYKRGFFVTKKKYAVIDEEGKITTRGLEIVRRDWSEIAKETQARVLEALLKDGDVEKAVRIVKEVTEKLSKYEVPPEKLVIHEQITRDLKDYKATGPHVAVAKRLAARGVKIRPGTVISYIVLKGSGRIGDRAIPFDEFDPTKHKYDAEYYIENQVLPAVERILRAFGYRKEDLRYQKTRQVGLSAWLKPKGT

SEQ ID NO: 52 - protein, 774 aa, synthetic construct
MILDTDYETEDGKPVIRIFKKENGEFKIEYDRTFEPYFYALLKDDSAIEEVKKITAERHGTVVTVKRVEKVQKKFLGRPVEVWKLYFTHPQDVPAIRDKIREHPAVIDIYEYDIPFAKRYLIDKGLVPMEGDEELKMLAFDIETLYHEGEEFAEGPILMISYADEEGARVITWKNVDLPYVDVVSTEREMIKRFLRVVKEKDPDVLITYNGDNFDFAYLKKRCEKLGINFALGRDGSEPKIQRMGDRFAVEVKGRIHFDLYPVIRRTINLPTYTLEAVYEAVFGQPKEKVYAEEITTAWETGENLERVARYSMEDAKVTYELGKEFLPMEAQLSRLIGQSLWDVSRSSTGNLVEWFLLRKAYERNELAPNKPDEKELARRRQSYEGGYVKEPERGLWENIVYLDFRSLYPSIIITHNVSPDTLNREGCKEYDVAPQVGHRFCKDFPGFIPSLLGDLLEERQKIKKKMKATIDPIERKLLDYRQRAIKILANSYYGYYGYARARWYCKECAESVTAWGREYITMTIKEIEEKYGFKVIYSDTDGFFATIPGADAETVKKKAMEFLKYINAKLPGALELEYEGFYKRGFFVTKKKYAVIDEEGKITTRGLEIVRRDWSEIAKETQARVLEALLKDGDVEKAVRIVKEVTEKLSKYEVPPEKLVIHEQITRDLKDYKATGPHVAVAKRLAARGVKIRPGTVISYIVLKGSGRIGDRAIPFDEFDPTKHKYDAEYYIENQVLPAVERILRAFGYRKEDLRYQKTRQVGLSAWLKPKGT

SEQ ID NO: 53 - protein, 774 aa, synthetic construct
MILDTDYHTEDGKPVIRIFKKENGEFKIEYDRTFEPYFYALLKDDSAIEEVKKITAERHGTVVTVKRVEKVQKKFLGRPVEVWKLYFTHPQDVPAIRDKIREHPAVIDIYEYDIPFAKRYLIDKGLVPMEGDEELKMLAFDIETLYHEGEEFAEGPILMISYADEEGARVITWKNVDLPYVDVVSTEREMIKRFLRVVKEKDPDVLITYNGDNFDFAYLKKRCEKLGINFALGRDGSEPKIQRMGDRFAVEVKGRIHFDLYPVIRRTINLPTYTLEAVYEAVFGQPKEKVYAEEITTAWETGENLERVARYSMEDAKVTYELGKEFLPMEAQLSRLIGQSLWDVSRSSTGNLVEWFLLRKAYERNELAPNKPDEKELARRRQSYEGGYVKEPERGLWENIVYLDFRSLYPSIIITHNVSPDTLNREGCKEYDVAPQVGHRFCKDFPGFIPSLLGDLLEERQKIKKKMKATIDPIERKLLDYRQRAIKILANSYYGYYGYARARWYCKECAESVTAWGREYITMTIKEIEEKYGFKVIYSDTDGFFATIPGADAETVKKKAMEFLKYINAKLPGALELEYEGFYKRGFFVTKKKYAVIDEEGKITTRGLEIVRRDWSEIAKETQARVLEALLKDGDVEKAVRIVKEVTEKLSKYEVPPEKLVIHEQITRDLKDYKATGPHVAVAKRLAARGVKIRPGTVISYIVLKGSGRIGDRAIPFDEFDPTKHKYDAEYYIENQVLPAVERILRAFGYRKEDLRYQKTRQVGLSAWLKPKGT

SEQ ID NO: 54 - protein, 774 aa, synthetic construct
MILDTDYTTEDGKPVIRIFKKENGEFKIEYDRTFEPYFYALLKDDSAIEEVKKITAERHGTVVTVKRVEKVQKKFLGRPVEVWKLYFTHPQDVPAIRDKIREHPAVIDIYEYDIPFAKRYLIDKGLVPMEGDEELKMLAFDIETLYHEGEEFAEGPILMISYADEEGARVITWKNVDLPYVDVVSTEREMIKRFLRVVKEKDPDVLITYNGDNFDFAYLKKRCEKLGINFALGRDGSEPKIQRMGDRFAVEVKGRIHFDLYPVIRRTINLPTYTLEAVYEAVFGQPKEKVYAEEITTAWETGENLERVARYSMEDAKVTYELGKEFLPMEAQLSRLIGQSLWDVSRSSTGNLVEWFLLRKAYERNELAPNKPDEKELARRRQSYEGGYVKEPERGLWENIVYLDFRSLYPSIIITHNVSPDTLNREGCKEYDVAPQVGHRFCKDFPGFIPSLLGDLLEERQKIKKKMKATIDPIERKLLDYRQRAIKILANSYYGYYGYARARWYCKECAESVTAWGREYITMTIKEIEEKYGFKVIYSDTDGFFATIPGADAETVKKKAMEFLKYINAKLPGALELEYEGFYKRGFFVTKKKYAVIDEEGKITTRGLEIVRRDWSEIAKETQARVLEALLKDGDVEKAVRIVKEVTEKLSKYEVPPEKLVIHEQITRDLKDYKATGPHVAVAKRLAARGVKIRPGTVISYIVLKGSGRIGDRAIPFDEFDPTKHKYDAEYYIENQVLPAVERILRAFGYRKEDLRYQKTRQVGLSAWLKPKGT

SEQ ID NO: 55 - protein, 774 aa, synthetic construct
MILDTDYIAEDGKPVIRIFKKENGEFKIEYDRTFEPYFYALLKDDSAIEEVKKITAERHGTVVTVKRVEKVQKKFLGRPVEVWKLYFTHPQDVPAIRDKIREHPAVIDIYEYDIPFAKRYLIDKGLVPMEGDEELKMLAFDIETLYHEGEEFAEGPILMISYADEEGARVITWKNVDLPYVDVVSTEREMIKRFLRVVKEKDPDVLITYNGDNFDFAYLKKRCEKLGINFALGRDGSEPKIQRMGDRFAVEVKGRIHFDLYPVIRRTINLPTYTLEAVYEAVFGQPKEKVYAEEITTAWETGENLERVARYSMEDAKVTYELGKEFLPMEAQLSRLIGQSLWDVSRSSTGNLVEWFLLRKAYERNELAPNKPDEKELARRRQSYEGGYVKEPERGLWENIVYLDFRSLYPSIIITHNVSPDTLNREGCKEYDVAPQVGHRFCKDFPGFIPSLLGDLLEERQKIKKKMKATIDPIERKLLDYRQRAIKILANSYYGYYGYARARWYCKECAESVTAWGREYITMTIKEIEEKYGFKVIYSDTDGFFATIPGADAETVKKKAMEFLKYINAKLPGALELEYEGFYKRGFFVTKKKYAVIDEEGKITTRGLEIVRRDWSEIAKETQARVLEALLKDGDVEKAVRIVKEVTEKLSKYEVPPEKLVIHEQITRDLKDYKATGPHVAVAKRLAARGVKIRPGTVISYIVLKGSGRIGDRAIPFDEFDPTKHKYDAEYYIENQVLPAVERILRAFGYRKEDLRYQKTRQVGLSAWLKPKGT

SEQ ID NO: 56 - protein, 774 aa, synthetic construct
MILDTDYICEDGKPVIRIFKKENGEFKIEYDRTFEPYFYALLKDDSAIEEVKKITAERHGTVVTVKRVEKVQKKFLGRPVEVWKLYFTHPQDVPAIRDKIREHPAVIDIYEYDIPFAKRYLIDKGLVPMEGDEELKMLAFDIETLYHEGEEFAEGPILMISYADEEGARVITWKNVDLPYVDVVSTEREMIKRFLRVVKEKDPDVLITYNGDNFDFAYLKKRCEKLGINFALGRDGSEPKIQRMGDRFAVEVKGRIHFDLYPVIRRTINLPTYTLEAVYEAVFGQPKEKVYAEEITTAWETGENLERVARYSMEDAKVTYELGKEFLPMEAQLSRLIGQSLWDVSRSSTGNLVEWFLLRKAYERNELAPNKPDEKELARRRQSYEGGYVKEPERGLWENIVYLDFRSLYPSIIITHNVSPDTLNREGCKEYDVAPQVGHRFCKDFPGFIPSLLGDLLEERQKIKKKMKATIDPIERKLLDYRQRAIKILANSYYGYYGYARARWYCKECAESVTAWGREYITMTIKEIEEKYGFKVIYSDTDGFFATIPGADAETVKKKAMEFLKYINAKLPGALELEYEGFYKRGFFVTKKKYAVIDEEGKITTRGLEIVRRDWSEIAKETQARVLEALLKDGDVEKAVRIVKEVTEKLSKYEVPPEKLVIHEQITRDLKDYKATGPHVAVAKRLAARGVKIRPGTVISYIVLKGSGRIGDRAIPFDEFDPTKHKYDAEYYIENQVLPAVERILRAFGYRKEDLRYQKTRQVGLSAWLKPKGT

SEQ ID NO: 57 - protein, 774 aa, synthetic construct
MILDTDYIDEDGKPVIRIFKKENGEFKIEYDRTFEPYFYALLKDDSAIEEVKKITAERHGTVVTVKRVEKVQKKFLGRPVEVWKLYFTHPQDVPAIRDKIREHPAVIDIYEYDIPFAKRYLIDKGLVPMEGDEELKMLAFDIETLYHEGEEFAEGPILMISYADEEGARVITWKNVDLPYVDVVSTEREMIKRFLRVVKEKDPDVLITYNGDNFDFAYLKKRCEKLGINFALGRDGSEPKIQRMGDRFAVEVKGRIHFDLYPVIRRTINLPTYTLEAVYEAVFGQPKEKVYAEEITTAWETGENLERVARYSMEDAKVTYELGKEFLPMEAQLSRLIGQSLWDVSRSSTGNLVEWFLLRKAYERNELAPNKPDEKELARRRQSYEGGYVKEPERGLWENIVYLDFRSLYPSIIITHNVSPDTLNREGCKEYDVAPQVGHRFCKDFPGFIPSLLGDLLEERQKIKKKMKATIDPIERKLLDYRQRAIKILANSYYGYYGYARARWYCKECAESVTAWGREYITMTIKEIEEKYGFKVIYSDTDGFFATIPGADAETVKKKAMEFLKYINAKLPGALELEYEGFYKRGFFVTKKKYAVIDEEGKITTRGLEIVRRDWSEIAKETQARVLEALLKDGDVEKAVRIVKEVTEKLSKYEVPPEKLVIHEQITRDLKDYKATGPHVAVAKRLAARGVKIRPGTVISYIVLKGSGRIGDRAIPFDEFDPTKHKYDAEYYIENQVLPAVERILRAFGYRKEDLRYQKTRQVGLSAWLKPKGT

SEQ ID NO: 58 - protein, 774 aa, synthetic construct
MILDTDYIEEDGKPVIRIFKKENGEFKIEYDRTFEPYFYALLKDDSAIEEVKKITAERHGTVVTVKRVEKVQKKFLGRPVEVWKLYFTHPQDVPAIRDKIREHPAVIDIYEYDIPFAKRYLIDKGLVPMEGDEELKMLAFDIETLYHEGEEFAEGPILMISYADEEGARVITWKNVDLPYVDVVSTEREMIKRFLRVVKEKDPDVLITYNGDNFDFAYLKKRCEKLGINFALGRDGSEPKIQRMGDRFAVEVKGRIHFDLYPVIRRTINLPTYTLEAVYEAVFGQPKEKVYAEEITTAWETGENLERVARYSMEDAKVTYELGKEFLPMEAQLSRLIGQSLWDVSRSSTGNLVEWFLLRKAYERNELAPNKPDEKELARRRQSYEGGYVKEPERGLWENIVYLDFRSLYPSIIITHNVSPDTLNREGCKEYDVAPQVGHRFCKDFPGFIPSLLGDLLEERQKIKKKMKATIDPIERKLLDYRQRAIKILANSYYGYYGYARARWYCKECAESVTAWGREYITMTIKEIEEKYGFKVIYSDTDGFFATIPGADAETVKKKAMEFLKYINAKLPGALELEYEGFYKRGFFVTKKKYAVIDEEGKITTRGLEIVRRDWSEIAKETQARVLEALLKDGDVEKAVRIVKEVTEKLSKYEVPPEKLVIHEQITRDLKDYKATGPHVAVAKRLAARGVKIRPGTVISYIVLKGSGRIGDRAIPFDEFDPTKHKYDAEYYIENQVLPAVERILRAFGYRKEDLRYQKTRQVGLSAWLKPKGT

SEQ ID NO: 59 - protein, 774 aa, synthetic construct
MILDTDYIFEDGKPVIRIFKKENGEFKIEYDRTFEPYFYALLKDDSAIEEVKKITAERHGTVVTVKRVEKVQKKFLGRPVEVWKLYFTHPQDVPAIRDKIREHPAVIDIYEYDIPFAKRYLIDKGLVPMEGDEELKMLAFDIETLYHEGEEFAEGPILMISYADEEGARVITWKNVDLPYVDVVSTEREMIKRFLRVVKEKDPDVLITYNGDNFDFAYLKKRCEKLGINFALGRDGSEPKIQRMGDRFAVEVKGRIHFDLYPVIRRTINLPTYTLEAVYEAVFGQPKEKVYAEEITTAWETGENLERVARYSMEDAKVTYELGKEFLPMEAQLSRLIGQSLWDVSRSSTGNLVEWFLLRKAYERNELAPNKPDEKELARRRQSYEGGYVKEPERGLWENIVYLDFRSLYPSIIITHNVSPDTLNREGCKEYDVAPQVGHRFCKDFPGFIPSLLGDLLEERQKIKKKMKATIDPIERKLLDYRQRAIKILANSYYGYYGYARARWYCKECAESVTAWGREYITMTIKEIEEKYGFKVIYSDTDGFFATIPGADAETVKKKAMEFLKYINAKLPGALELEYEGFYKRGFFVTKKKYAVIDEEGKITTRGLEIVRRDWSEIAKETQARVLEALLKDGDVEKAVRIVKEVTEKLSKYEVPPEKLVIHEQITRDLKDYKATGPHVAVAKRLAARGVKIRPGTVISYIVLKGSGRIGDRAIPFDEFDPTKHKYDAEYYIENQVLPAVERILRAFGYRKEDLRYQKTRQVGLSAWLKPKGT

SEQ ID NO: 60 - protein, 774 aa, synthetic construct
MILDTDYIHEDGKPVIRIFKKENGEFKIEYDRTFEPYFYALLKDDSAIEEVKKITAERHGTVVTVKRVEKVQKKFLGRPVEVWKLYFTHPQDVPAIRDKIREHPAVIDIYEYDIPFAKRYLIDKGLVPMEGDEELKMLAFDIETLYHEGEEFAEGPILMISYADEEGARVITWKNVDLPYVDVVSTEREMIKRFLRVVKEKDPDVLITYNGDNFDFAYLKKRCEKLGINFALGRDGSEPKIQRMGDRFAVEVKGRIHFDLYPVIRRTINLPTYTLEAVYEAVFGQPKEKVYAEEITTAWETGENLERVARYSMEDAKVTYELGKEFLPMEAQLSRLIGQSLWDVSRSSTGNLVEWFLLRKAYERNELAPNKPDEKELARRRQSYEGGYVKEPERGLWENIVYLDFRSLYPSIIITHNVSPDTLNREGCKEYDVAPQVGHRFCKDFPGFIPSLLGDLLEERQKIKKKMKATIDPIERKLLDYRQRAIKILANSYYGYYGYARARWYCKECAESVTAWGREYITMTIKEIEEKYGFKVIYSDTDGFFATIPGADAETVKKKAMEFLKYINAKLPGALELEYEGFYKRGFFVTKKKYAVIDEEGKITTRGLEIVRRDWSEIAKETQARVLEALLKDGDVEKAVRIVKEVTEKLSKYEVPPEKLVIHEQITRDLKDYKATGPHVAVAKRLAARGVKIRPGTVISYIVLKGSGRIGDRAIPFDEFDPTKHKYDAEYYIENQVLPAVERILRAFGYRKEDLRYQKTRQVGLSAWLKPKGT

SEQ ID NO: 61 - protein, 774 aa, synthetic construct
MILDTDYIIEDGKPVIRIFKKENGEFKIEYDRTFEPYFYALLKDDSAIEEVKKITAERHGTVVTVKRVEKVQKKFLGRPVEVWKLYFTHPQDVPAIRDKIREHPAVIDIYEYDIPFAKRYLIDKGLVPMEGDEELKMLAFDIETLYHEGEEFAEGPILMISYADEEGARVITWKNVDLPYVDVVSTEREMIKRFLRVVKEKDPDVLITYNGDNFDFAYLKKRCEKLGINFALGRDGSEPKIQRMGDRFAVEVKGRIHFDLYPVIRRTINLPTYTLEAVYEAVFGQPKEKVYAEEITTAWETGENLERVARYSMEDAKVTYELGKEFLPMEAQLSRLIGQSLWDVSRSSTGNLVEWFLLRKAYERNELAPNKPDEKELARRRQSYEGGYVKEPERGLWENIVYLDFRSLYPSIIITHNVSPDTLNREGCKEYDVAPQVGHRFCKDFPGFIPSLLGDLLEERQKIKKKMKATIDPIERKLLDYRQRAIKILANSYYGYYGYARARWYCKECAESVTAWGREYITMTIKEIEEKYGFKVIYSDTDGFFATIPGADAETVKKKAMEFLKYINAKLPGALELEYEGFYKRGFFVTKKKYAVIDEEGKITTRGLEIVRRDWSEIAKETQARVLEALLKDGDVEKAVRIVKEVTEKLSKYEVPPEKLVIHEQITRDLKDYKATGPHVAVAKRLAARGVKIRPGTVISYIVLKGSGRIGDRAIPFDEFDPTKHKYDAEYYIENQVLPAVERILRAFGYRKEDLRYQKTRQVGLSAWLKPKGT

SEQ ID NO: 62 - protein, 774 aa, synthetic construct
MILDTDYILEDGKPVIRIFKKENGEFKIEYDRTFEPYFYALLKDDSAIEEVKKITAERHGTVVTVKRVEKVQKKFLGRPVEVWKLYFTHPQDVPAIRDKIREHPAVIDIYEYDIPFAKRYLIDKGLVPMEGDEELKMLAFDIETLYHEGEEFAEGPILMISYADEEGARVITWKNVDLPYVDVVSTEREMIKRFLRVVKEKDPDVLITYNGDNFDFAYLKKRCEKLGINFALGRDGSEPKIQRMGDRFAVEVKGRIHFDLYPVIRRTINLPTYTLEAVYEAVFGQPKEKVYAEEITTAWETGENLERVARYSMEDAKVTYELGKEFLPMEAQLSRLIGQSLWDVSRSSTGNLVEWFLLRKAYERNELAPNKPDEKELARRRQSYEGGYVKEPERGLWENIVYLDFRSLYPSIIITHNVSPDTLNREGCKEYDVAPQVGHRFCKDFPGFIPSLLGDLLEERQKIKKKMKATIDPIERKLLDYRQRAIKILANSYYGYYGYARARWYCKECAESVTAWGREYITMTIKEIEEKYGFKVIYSDTDGFFATIPGADAETVKKKAMEFLKYINAKLPGALELEYEGFYKRGFFVTKKKYAVIDEEGKITTRGLEIVRRDWSEIAKETQARVLEALLKDGDVEKAVRIVKEVTEKLSKYEVPPEKLVIHEQITRDLKDYKATGPHVAVAKRLAARGVKIRPGTVISYIVLKGSGRIGDRAIPFDEFDPTKHKYDAEYYIENQVLPAVERILRAFGYRKEDLRYQKTRQVGLSAWLKPKGT

SEQ ID NO: 63 - protein, 774 aa, synthetic construct
MILDTDYINEDGKPVIRIFKKENGEFKIEYDRTFEPYFYALLKDDSAIEEVKKITAERHGTVVTVKRVEKVQKKFLGRPVEVWKLYFTHPQDVPAIRDKIREHPAVIDIYEYDIPFAKRYLIDKGLVPMEGDEELKMLAFDIETLYHEGEEFAEGPILMISYADEEGARVITWKNVDLPYVDVVSTEREMIKRFLRVVKEKDPDVLITYNGDNFDFAYLKKRCEKLGINFALGRDGSEPKIQRMGDRFAVEVKGRIHFDLYPVIRRTINLPTYTLEAVYEAVFGQPKEKVYAEEITTAWETGENLERVARYSMEDAKVTYELGKEFLPMEAQLSRLIGQSLWDVSRSSTGNLVEWFLLRKAYERNELAPNKPDEKELARRRQSYEGGYVKEPERGLWENIVYLDFRSLYPSIIITHNVSPDTLNREGCKEYDVAPQVGHRFCKDFPGFIPSLLGDLLEERQKIKKKMKATIDPIERKLLDYRQRAIKILANSYYGYYGYARARWYCKECAESVTAWGREYITMTIKEIEEKYGFKVIYSDTDGFFATIPGADAETVKKKAMEFLKYINAKLPGALELEYEGFYKRGFFVTKKKYAVIDEEGKITTRGLEIVRRDWSEIAKETQARVLEALLKDGDVEKAVRIVKEVTEKLSKYEVPPEKLVIHEQITRDLKDYKATGPHVAVAKRLAARGVKIRPGTVISYIVLKGSGRIGDRAIPFDEFDPTKHKYDAEYYIENQVLPAVERILRAFGYRKEDLRYQKTRQVGLSAWLKPKGT

SEQ ID NO: 64 - protein, 774 aa, synthetic construct
MILDTDYIREDGKPVIRIFKKENGEFKIEYDRTFEPYFYALLKDDSAIEEVKKITAERHGTVVTVKRVEKVQKKFLGRPVEVWKLYFTHPQDVPAIRDKIREHPAVIDIYEYDIPFAKRYLIDKGLVPMEGDEELKMLAFDIETLYHEGEEFAEGPILMISYADEEGARVITWKNVDLPYVDVVSTEREMIKRFLRVVKEKDPDVLITYNGDNFDFAYLKKRCEKLGINFALGRDGSEPKIQRMGDRFAVEVKGRIHFDLYPVIRRTINLPTYTLEAVYEAVFGQPKEKVYAEEITTAWETGENLERVARYSMEDAKVTYELGKEFLPMEAQLSRLIGQSLWDVSRSSTGNLVEWFLLRKAYERNELAPNKPDEKELARRRQSYEGGYVKEPERGLWENIVYLDFRSLYPSIIITHNVSPDTLNREGCKEYDVAPQVGHRFCKDFPGFIPSLLGDLLEERQKIKKKMKATIDPIERKLLDYRQRAIKILANSYYGYYGYARARWYCKECAESVTAWGREYITMTIKEIEEKYGFKVIYSDTDGFFATIPGADAETVKKKAMEFLKYINAKLPGALELEYEGFYKRGFFVTKKKYAVIDEEGKITTRGLEIVRRDWSEIAKETQARVLEALLKDGDVEKAVRIVKEVTEKLSKYEVPPEKLVIHEQITRDLKDYKATGPHVAVAKRLAARGVKIRPGTVISYIVLKGSGRIGDRAIPFDEFDPTKHKYDAEYYIENQVLPAVERILRAFGYRKEDLRYQKTRQVGLSAWLKPKGT

SEQ ID NO: 65 - protein, 774 aa, synthetic construct
MILDTDYIYEDGKPVIRIFKKENGEFKIEYDRTFEPYFYALLKDDSAIEEVKKITAERHGTVVTVKRVEKVQKKFLGRPVEVWKLYFTHPQDVPAIRDKIREHPAVIDIYEYDIPFAKRYLIDKGLVPMEGDEELKMLAFDIETLYHEGEEFAEGPILMISYADEEGARVITWKNVDLPYVDVVSTEREMIKRFLRVVKEKDPDVLITYNGDNFDFAYLKKRCEKLGINFALGRDGSEPKIQRMGDRFAVEVKGRIHFDLYPVIRRTINLPTYTLEAVYEAVFGQPKEKVYAEEITTAWETGENLERVARYSMEDAKVTYELGKEFLPMEAQLSRLIGQSLWDVSRSSTGNLVEWFLLRKAYERNELAPNKPDEKELARRRQSYEGGYVKEPERGLWENIVYLDFRSLYPSIIITHNVSPDTLNREGCKEYDVAPQVGHRFCKDFPGFIPSLLGDLLEERQKIKKKMKATIDPIERKLLDYRQRAIKILANSYYGYYGYARARWYCKECAESVTAWGREYITMTIKEIEEKYGFKVIYSDTDGFFATIPGADAETVKKKAMEFLKYINAKLPGALELEYEGFYKRGFFVTKKKYAVIDEEGKITTRGLEIVRRDWSEIAKETQARVLEALLKDGDVEKAVRIVKEVTEKLSKYEVPPEKLVIHEQITRDLKDYKATGPHVAVAKRLAARGVKIRPGTVISYIVLKGSGRIGDRAIPFDEFDPTKHKYDAEYYIENQVLPAVERILRAFGYRKEDLRYQKTRQVGLSAWLKPKGT

SEQ ID NO: 66 - protein, 774 aa, synthetic construct
MILDTDYITPDGKPVIRIFKKENGEFKIEYDRTFEPYFYALLKDDSAIEEVKKITAERHGTVVTVKRVEKVQKKFLGRPVEVWKLYFTHPQDVPAIRDKIREHPAVIDIYEYDIPFAKRYLIDKGLVPMEGDEELKMLAFDIETLYHEGEEFAEGPILMISYADEEGARVITWKNVDLPYVDVVSTEREMIKRFLRVVKEKDPDVLITYNGDNFDFAYLKKRCEKLGINFALGRDGSEPKIQRMGDRFAVEVKGRIHFDLYPVIRRTINLPTYTLEAVYEAVFGQPKEKVYAEEITTAWETGENLERVARYSMEDAKVTYELGKEFLPMEAQLSRLIGQSLWDVSRSSTGNLVEWFLLRKAYERNELAPNKPDEKELARRRQSYEGGYVKEPERGLWENIVYLDFRSLYPSIIITHNVSPDTLNREGCKEYDVAPQVGHRFCKDFPGFIPSLLGDLLEERQKIKKKMKATIDPIERKLLDYRQRAIKILANSYYGYYGYARARWYCKECAESVTAWGREYITMTIKEIEEKYGFKVIYSDTDGFFATIPGADAETVKKKAMEFLKYINAKLPGALELEYEGFYKRGFFVTKKKYAVIDEEGKITTRGLEIVRRDWSEIAKETQARVLEALLKDGDVEKAVRIVKEVTEKLSKYEVPPEKLVIHEQITRDLKDYKATGPHVAVAKRLAARGVKIRPGTVISYIVLKGSGRIGDRAIPFDEFDPTKHKYDAEYYIENQVLPAVERILRAFGYRKEDLRYQKTRQVGLSAWLKPKGT

SEQ ID NO: 67 - protein, 774 aa, synthetic construct
MILDTDYITQDGKPVIRIFKKENGEFKIEYDRTFEPYFYALLKDDSAIEEVKKITAERHGTVVTVKRVEKVQKKFLGRPVEVWKLYFTHPQDVPAIRDKIREHPAVIDIYEYDIPFAKRYLIDKGLVPMEGDEELKMLAFDIETLYHEGEEFAEGPILMISYADEEGARVITWKNVDLPYVDVVSTEREMIKRFLRVVKEKDPDVLITYNGDNFDFAYLKKRCEKLGINFALGRDGSEPKIQRMGDRFAVEVKGRIHFDLYPVIRRTINLPTYTLEAVYEAVFGQPKEKVYAEEITTAWETGENLERVARYSMEDAKVTYELGKEFLPMEAQLSRLIGQSLWDVSRSSTGNLVEWFLLRKAYERNELAPNKPDEKELARRRQSYEGGYVKEPERGLWENIVYLDFRSLYPSIIITHNVSPDTLNREGCKEYDVAPQVGHRFCKDFPGFIPSLLGDLLEERQKIKKKMKATIDPIERKLLDYRQRAIKILANSYYGYYGYARARWYCKECAESVTAWGREYITMTIKEIEEKYGFKVIYSDTDGFFATIPGADAETVKKKAMEFLKYINAKLPGALELEYEGFYKRGFFVTKKKYAVIDEEGKITTRGLEIVRRDWSEIAKETQARVLEALLKDGDVEKAVRIVKEVTEKLSKYEVPPEKLVIHEQITRDLKDYKATGPHVAVAKRLAARGVKIRPGTVISYIVLKGSGRIGDRAIPFDEFDPTKHKYDAEYYIENQVLPAVERILRAFGYRKEDLRYQKTRQVGLSAWLKPKGT

SEQ ID NO: 68 - protein, 774 aa, synthetic construct
MILDTDYITEQGKPVIRIFKKENGEFKIEYDRTFEPYFYALLKDDSAIEEVKKITAERHGTVVTVKRVEKVQKKFLGRPVEVWKLYFTHPQDVPAIRDKIREHPAVIDIYEYDIPFAKRYLIDKGLVPMEGDEELKMLAFDIETLYHEGEEFAEGPILMISYADEEGARVITWKNVDLPYVDVVSTEREMIKRFLRVVKEKDPDVLITYNGDNFDFAYLKKRCEKLGINFALGRDGSEPKIQRMGDRFAVEVKGRIHFDLYPVIRRTINLPTYTLEAVYEAVFGQPKEKVYAEEITTAWETGENLERVARYSMEDAKVTYELGKEFLPMEAQLSRLIGQSLWDVSRSSTGNLVEWFLLRKAYERNELAPNKPDEKELARRRQSYEGGYVKEPERGLWENIVYLDFRSLYPSIIITHNVSPDTLNREGCKEYDVAPQVGHRFCKDFPGFIPSLLGDLLEERQKIKKKMKATIDPIERKLLDYRQRAIKILANSYYGYYGYARARWYCKECAESVTAWGREYITMTIKEIEEKYGFKVIYSDTDGFFATIPGADAETVKKKAMEFLKYINAKLPGALELEYEGFYKRGFFVTKKKYAVIDEEGKITTRGLEIVRRDWSEIAKETQARVLEALLKDGDVEKAVRIVKEVTEKLSKYEVPPEKLVIHEQITRDLKDYKATGPHVAVAKRLAARGVKIRPGTVISYIVLKGSGRIGDRAIPFDEFDPTKHKYDAEYYIENQVLPAVERILRAFGYRKEDLRYQKTRQVGLSAWLKPKGT

SEQ ID NO: 69 - protein, 774 aa, synthetic construct
MILDTDYITETGKPVIRIFKKENGEFKIEYDRTFEPYFYALLKDDSAIEEVKKITAERHGTVVTVKRVEKVQKKFLGRPVEVWKLYFTHPQDVPAIRDKIREHPAVIDIYEYDIPFAKRYLIDKGLVPMEGDEELKMLAFDIETLYHEGEEFAEGPILMISYADEEGARVITWKNVDLPYVDVVSTEREMIKRFLRVVKEKDPDVLITYNGDNFDFAYLKKRCEKLGINFALGRDGSEPKIQRMGDRFAVEVKGRIHFDLYPVIRRTINLPTYTLEAVYEAVFGQPKEKVYAEEITTAWETGENLERVARYSMEDAKVTYELGKEFLPMEAQLSRLIGQSLWDVSRSSTGNLVEWFLLRKAYERNELAPNKPDEKELARRRQSYEGGYVKEPERGLWENIVYLDFRSLYPSIIITHNVSPDTLNREGCKEYDVAPQVGHRFCKDFPGFIPSLLGDLLEERQKIKKKMKATIDPIERKLLDYRQRAIKILANSYYGYYGYARARWYCKECAESVTAWGREYITMTIKEIEEKYGFKVIYSDTDGFFATIPGADAETVKKKAMEFLKYINAKLPGALELEYEGFYKRGFFVTKKKYAVIDEEGKITTRGLEIVRRDWSEIAKETQARVLEALLKDGDVEKAVRIVKEVTEKLSKYEVPPEKLVIHEQITRDLKDYKATGPHVAVAKRLAARGVKIRPGTVISYIVLKGSGRIGDRAIPFDEFDPTKHKYDAEYYIENQVLPAVERILRAFGYRKEDLRYQKTRQVGLSAWLKPKGT

SEQ ID NO: 70 - protein, 774 aa, synthetic construct
MILDTDYITEDCKPVIRIFKKENGEFKIEYDRTFEPYFYALLKDDSAIEEVKKITAERHGTVVTVKRVEKVQKKFLGRPVEVWKLYFTHPQDVPAIRDKIREHPAVIDIYEYDIPFAKRYLIDKGLVPMEGDEELKMLAFDIETLYHEGEEFAEGPILMISYADEEGARVITWKNVDLPYVDVVSTEREMIKRFLRVVKEKDPDVLITYNGDNFDFAYLKKRCEKLGINFALGRDGSEPKIQRMGDRFAVEVKGRIHFDLYPVIRRTINLPTYTLEAVYEAVFGQPKEKVYAEEITTAWETGENLERVARYSMEDAKVTYELGKEFLPMEAQLSRLIGQSLWDVSRSSTGNLVEWFLLRKAYERNELAPNKPDEKELARRRQSYEGGYVKEPERGLWENIVYLDFRSLYPSIIITHNVSPDTLNREGCKEYDVAPQVGHRFCKDFPGFIPSLLGDLLEERQKIKKKMKATIDPIERKLLDYRQRAIKILANSYYGYYGYARARWYCKECAESVTAWGREYITMTIKEIEEKYGFKVIYSDTDGFFATIPGADAETVKKKAMEFLKYINAKLPGALELEYEGFYKRGFFVTKKKYAVIDEEGKITTRGLEIVRRDWSEIAKETQARVLEALLKDGDVEKAVRIVKEVTEKLSKYEVPPEKLVIHEQITRDLKDYKATGPHVAVAKRLAARGVKIRPGTVISYIVLKGSGRIGDRAIPFDEFDPTKHKYDAEYYIENQVLPAVERILRAFGYRKEDLRYQKTRQVGLSAWLKPKGT

SEQ ID NO: 71 - protein, 774 aa, synthetic construct
MILDTDYITEDQKPVIRIFKKENGEFKIEYDRTFEPYFYALLKDDSAIEEVKKITAERHGTVVTVKRVEKVQKKFLGRPVEVWKLYFTHPQDVPAIRDKIREHPAVIDIYEYDIPFAKRYLIDKGLVPMEGDEELKMLAFDIETLYHEGEEFAEGPILMISYADEEGARVITWKNVDLPYVDVVSTEREMIKRFLRVVKEKDPDVLITYNGDNFDFAYLKKRCEKLGINFALGRDGSEPKIQRMGDRFAVEVKGRIHFDLYPVIRRTINLPTYTLEAVYEAVFGQPKEKVYAEEITTAWETGENLERVARYSMEDAKVTYELGKEFLPMEAQLSRLIGQSLWDVSRSSTGNLVEWFLLRKAYERNELAPNKPDEKELARRRQSYEGGYVKEPERGLWENIVYLDFRSLYPSIIITHNVSPDTLNREGCKEYDVAPQVGHRFCKDFPGFIPSLLGDLLEERQKIKKKMKATIDPIERKLLDYRQRAIKILANSYYGYYGYARARWYCKECAESVTAWGREYITMTIKEIEEKYGFKVIYSDTDGFFATIPGADAETVKKKAMEFLKYINAKLPGALELEYEGFYKRGFFVTKKKYAVIDEEGKITTRGLEIVRRDWSEIAKETQARVLEALLKDGDVEKAVRIVKEVTEKLSKYEVPPEKLVIHEQITRDLKDYKATGPHVAVAKRLAARGVKIRPGTVISYIVLKGSGRIGDRAIPFDEFDPTKHKYDAEYYIENQVLPAVERILRAFGYRKEDLRYQKTRQVGLSAWLKPKGT

SEQ ID NO: 72 - protein, 774 aa, synthetic construct
MILDTDYITEDTKPVIRIFKKENGEFKIEYDRTFEPYFYALLKDDSAIEEVKKITAERHGTVVTVKRVEKVQKKFLGRPVEVWKLYFTHPQDVPAIRDKIREHPAVIDIYEYDIPFAKRYLIDKGLVPMEGDEELKMLAFDIETLYHEGEEFAEGPILMISYADEEGARVITWKNVDLPYVDVVSTEREMIKRFLRVVKEKDPDVLITYNGDNFDFAYLKKRCEKLGINFALGRDGSEPKIQRMGDRFAVEVKGRIHFDLYPVIRRTINLPTYTLEAVYEAVFGQPKEKVYAEEITTAWETGENLERVARYSMEDAKVTYELGKEFLPMEAQLSRLIGQSLWDVSRSSTGNLVEWFLLRKAYERNELAPNKPDEKELARRRQSYEGGYVKEPERGLWENIVYLDFRSLYPSIIITHNVSPDTLNREGCKEYDVAPQVGHRFCKDFPGFIPSLLGDLLEERQKIKKKMKATIDPIERKLLDYRQRAIKILANSYYGYYGYARARWYCKECAESVTAWGREYITMTIKEIEEKYGFKVIYSDTDGFFATIPGADAETVKKKAMEFLKYINAKLPGALELEYEGFYKRGFFVTKKKYAVIDEEGKITTRGLEIVRRDWSEIAKETQARVLEALLKDGDVEKAVRIVKEVTEKLSKYEVPPEKLVIHEQITRDLKDYKATGPHVAVAKRLAARGVKIRPGTVISYIVLKGSGRIGDRAIPFDEFDPTKHKYDAEYYIENQVLPAVERILRAFGYRKEDLRYQKTRQVGLSAWLKPKGT

SEQ ID NO: 73 - protein, 774 aa, synthetic construct
MILDTDYITEDVKPVIRIFKKENGEFKIEYDRTFEPYFYALLKDDSAIEEVKKITAERHGTVVTVKRVEKVQKKFLGRPVEVWKLYFTHPQDVPAIRDKIREHPAVIDIYEYDIPFAKRYLIDKGLVPMEGDEELKMLAFDIETLYHEGEEFAEGPILMISYADEEGARVITWKNVDLPYVDVVSTEREMIKRFLRVVKEKDPDVLITYNGDNFDFAYLKKRCEKLGINFALGRDGSEPKIQRMGDRFAVEVKGRIHFDLYPVIRRTINLPTYTLEAVYEAVFGQPKEKVYAEEITTAWETGENLERVARYSMEDAKVTYELGKEFLPMEAQLSRLIGQSLWDVSRSSTGNLVEWFLLRKAYERNELAPNKPDEKELARRRQSYEGGYVKEPERGLWENIVYLDFRSLYPSIIITHNVSPDTLNREGCKEYDVAPQVGHRFCKDFPGFIPSLLGDLLEERQKIKKKMKATIDPIERKLLDYRQRAIKILANSYYGYYGYARARWYCKECAESVTAWGREYITMTIKEIEEKYGFKVIYSDTDGFFATIPGADAETVKKKAMEFLKYINAKLPGALELEYEGFYKRGFFVTKKKYAVIDEEGKITTRGLEIVRRDWSEIAKETQARVLEALLKDGDVEKAVRIVKEVTEKLSKYEVPPEKLVIHEQITRDLKDYKATGPHVAVAKRLAARGVKIRPGTVISYIVLKGSGRIGDRAIPFDEFDPTKHKYDAEYYIENQVLPAVERILRAFGYRKEDLRYQKTRQVGLSAWLKPKGT

SEQ ID NO: 74 - protein, 774 aa, synthetic construct
MILDTDYITEDGGPVIRIFKKENGEFKIEYDRTFEPYFYALLKDDSAIEEVKKITAERHGTVVTVKRVEKVQKKFLGRPVEVWKLYFTHPQDVPAIRDKIREHPAVIDIYEYDIPFAKRYLIDKGLVPMEGDEELKMLAFDIETLYHEGEEFAEGPILMISYADEEGARVITWKNVDLPYVDVVSTEREMIKRFLRVVKEKDPDVLITYNGDNFDFAYLKKRCEKLGINFALGRDGSEPKIQRMGDRFAVEVKGRIHFDLYPVIRRTINLPTYTLEAVYEAVFGQPKEKVYAEEITTAWETGENLERVARYSMEDAKVTYELGKEFLPMEAQLSRLIGQSLWDVSRSSTGNLVEWFLLRKAYERNELAPNKPDEKELARRRQSYEGGYVKEPERGLWENIVYLDFRSLYPSIIITHNVSPDTLNREGCKEYDVAPQVGHRFCKDFPGFIPSLLGDLLEERQKIKKKMKATIDPIERKLLDYRQRAIKILANSYYGYYGYARARWYCKECAESVTAWGREYITMTIKEIEEKYGFKVIYSDTDGFFATIPGADAETVKKKAMEFLKYINAKLPGALELEYEGFYKRGFFVTKKKYAVIDEEGKITTRGLEIVRRDWSEIAKETQARVLEALLKDGDVEKAVRIVKEVTEKLSKYEVPPEKLVIHEQITRDLKDYKATGPHVAVAKRLAARGVKIRPGTVISYIVLKGSGRIGDRAIPFDEFDPTKHKYDAEYYIENQVLPAVERILRAFGYRKEDLRYQKTRQVGLSAWLKPKGT

SEQ ID NO: 75 - protein, 774 aa, synthetic construct
MILDTDYITEDGHPVIRIFKKENGEFKIEYDRTFEPYFYALLKDDSAIEEVKKITAERHGTVVTVKRVEKVQKKFLGRPVEVWKLYFTHPQDVPAIRDKIREHPAVIDIYEYDIPFAKRYLIDKGLVPMEGDEELKMLAFDIETLYHEGEEFAEGPILMISYADEEGARVITWKNVDLPYVDVVSTEREMIKRFLRVVKEKDPDVLITYNGDNFDFAYLKKRCEKLGINFALGRDGSEPKIQRMGDRFAVEVKGRIHFDLYPVIRRTINLPTYTLEAVYEAVFGQPKEKVYAEEITTAWETGENLERVARYSMEDAKVTYELGKEFLPMEAQLSRLIGQSLWDVSRSSTGNLVEWFLLRKAYERNELAPNKPDEKELARRRQSYEGGYVKEPERGLWENIVYLDFRSLYPSIIITHNVSPDTLNREGCKEYDVAPQVGHRFCKDFPGFIPSLLGDLLEERQKIKKKMKATIDPIERKLLDYRQRAIKILANSYYGYYGYARARWYCKECAESVTAWGREYITMTIKEIEEKYGFKVIYSDTDGFFATIPGADAETVKKKAMEFLKYINAKLPGALELEYEGFYKRGFFVTKKKYAVIDEEGKITTRGLEIVRRDWSEIAKETQARVLEALLKDGDVEKAVRIVKEVTEKLSKYEVPPEKLVIHEQITRDLKDYKATGPHVAVAKRLAARGVKIRPGTVISYIVLKGSGRIGDRAIPFDEFDPTKHKYDAEYYIENQVLPAVERILRAFGYRKEDLRYQKTRQVGLSAWLKPKGT

SEQ ID NO: 76 - protein, 774 aa, synthetic construct
MILDTDYITEDGTPVIRIFKKENGEFKIEYDRTFEPYFYALLKDDSAIEEVKKITAERHGTVVTVKRVEKVQKKFLGRPVEVWKLYFTHPQDVPAIRDKIREHPAVIDIYEYDIPFAKRYLIDKGLVPMEGDEELKMLAFDIETLYHEGEEFAEGPILMISYADEEGARVITWKNVDLPYVDVVSTEREMIKRFLRVVKEKDPDVLITYNGDNFDFAYLKKRCEKLGINFALGRDGSEPKIQRMGDRFAVEVKGRIHFDLYPVIRRTINLPTYTLEAVYEAVFGQPKEKVYAEEITTAWETGENLERVARYSMEDAKVTYELGKEFLPMEAQLSRLIGQSLWDVSRSSTGNLVEWFLLRKAYERNELAPNKPDEKELARRRQSYEGGYVKEPERGLWENIVYLDFRSLYPSIIITHNVSPDTLNREGCKEYDVAPQVGHRFCKDFPGFIPSLLGDLLEERQKIKKKMKATIDPIERKLLDYRQRAIKILANSYYGYYGYARARWYCKECAESVTAWGREYITMTIKEIEEKYGFKVIYSDTDGFFATIPGADAETVKKKAMEFLKYINAKLPGALELEYEGFYKRGFFVTKKKYAVIDEEGKITTRGLEIVRRDWSEIAKETQARVLEALLKDGDVEKAVRIVKEVTEKLSKYEVPPEKLVIHEQITRDLKDYKATGPHVAVAKRLAARGVKIRPGTVISYIVLKGSGRIGDRAIPFDEFDPTKHKYDAEYYIENQVLPAVERILRAFGYRKEDLRYQKTRQVGLSAWLKPKGT

SEQ ID NO: 77 - protein, 774 aa, synthetic construct
MILDTDYITEDGVPVIRIFKKENGEFKIEYDRTFEPYFYALLKDDSAIEEVKKITAERHGTVVTVKRVEKVQKKFLGRPVEVWKLYFTHPQDVPAIRDKIREHPAVIDIYEYDIPFAKRYLIDKGLVPMEGDEELKMLAFDIETLYHEGEEFAEGPILMISYADEEGARVITWKNVDLPYVDVVSTEREMIKRFLRVVKEKDPDVLITYNGDNFDFAYLKKRCEKLGINFALGRDGSEPKIQRMGDRFAVEVKGRIHFDLYPVIRRTINLPTYTLEAVYEAVFGQPKEKVYAEEITTAWETGENLERVARYSMEDAKVTYELGKEFLPMEAQLSRLIGQSLWDVSRSSTGNLVEWFLLRKAYERNELAPNKPDEKELARRRQSYEGGYVKEPERGLWENIVYLDFRSLYPSIIITHNVSPDTLNREGCKEYDVAPQVGHRFCKDFPGFIPSLLGDLLEERQKIKKKMKATIDPIERKLLDYRQRAIKILANSYYGYYGYARARWYCKECAESVTAWGREYITMTIKEIEEKYGFKVIYSDTDGFFATIPGADAETVKKKAMEFLKYINAKLPGALELEYEGFYKRGFFVTKKKYAVIDEEGKITTRGLEIVRRDWSEIAKETQARVLEALLKDGDVEKAVRIVKEVTEKLSKYEVPPEKLVIHEQITRDLKDYKATGPHVAVAKRLAARGVKIRPGTVISYIVLKGSGRIGDRAIPFDEFDPTKHKYDAEYYIENQVLPAVERILRAFGYRKEDLRYQKTRQVGLSAWLKPKGT

SEQ ID NO: 78 - protein, 774 aa, synthetic construct
MILDTDYITEDGWPVIRIFKKENGEFKIEYDRTFEPYFYALLKDDSAIEEVKKITAERHGTVVTVKRVEKVQKKFLGRPVEVWKLYFTHPQDVPAIRDKIREHPAVIDIYEYDIPFAKRYLIDKGLVPMEGDEELKMLAFDIETLYHEGEEFAEGPILMISYADEEGARVITWKNVDLPYVDVVSTEREMIKRFLRVVKEKDPDVLITYNGDNFDFAYLKKRCEKLGINFALGRDGSEPKIQRMGDRFAVEVKGRIHFDLYPVIRRTINLPTYTLEAVYEAVFGQPKEKVYAEEITTAWETGENLERVARYSMEDAKVTYELGKEFLPMEAQLSRLIGQSLWDVSRSSTGNLVEWFLLRKAYERNELAPNKPDEKELARRRQSYEGGYVKEPERGLWENIVYLDFRSLYPSIIITHNVSPDTLNREGCKEYDVAPQVGHRFCKDFPGFIPSLLGDLLEERQKIKKKMKATIDPIERKLLDYRQRAIKILANSYYGYYGYARARWYCKECAESVTAWGREYITMTIKEIEEKYGFKVIYSDTDGFFATIPGADAETVKKKAMEFLKYINAKLPGALELEYEGFYKRGFFVTKKKYAVIDEEGKITTRGLEIVRRDWSEIAKETQARVLEALLKDGDVEKAVRIVKEVTEKLSKYEVPPEKLVIHEQITRDLKDYKATGPHVAVAKRLAARGVKIRPGTVISYIVLKGSGRIGDRAIPFDEFDPTKHKYDAEYYIENQVLPAVERILRAFGYRKEDLRYQKTRQVGLSAWLKPKGT

SEQ ID NO: 79 - protein, 774 aa, synthetic construct
MILDTDYITEDGKCVIRIFKKENGEFKIEYDRTFEPYFYALLKDDSAIEEVKKITAERHGTVVTVKRVEKVQKKFLGRPVEVWKLYFTHPQDVPAIRDKIREHPAVIDIYEYDIPFAKRYLIDKGLVPMEGDEELKMLAFDIETLYHEGEEFAEGPILMISYADEEGARVITWKNVDLPYVDVVSTEREMIKRFLRVVKEKDPDVLITYNGDNFDFAYLKKRCEKLGINFALGRDGSEPKIQRMGDRFAVEVKGRIHFDLYPVIRRTINLPTYTLEAVYEAVFGQPKEKVYAEEITTAWETGENLERVARYSMEDAKVTYELGKEFLPMEAQLSRLIGQSLWDVSRSSTGNLVEWFLLRKAYERNELAPNKPDEKELARRRQSYEGGYVKEPERGLWENIVYLDFRSLYPSIIITHNVSPDTLNREGCKEYDVAPQVGHRFCKDFPGFIPSLLGDLLEERQKIKKKMKATIDPIERKLLDYRQRAIKILANSYYGYYGYARARWYCKECAESVTAWGREYITMTIKEIEEKYGFKVIYSDTDGFFATIPGADAETVKKKAMEFLKYINAKLPGALELEYEGFYKRGFFVTKKKYAVIDEEGKITTRGLEIVRRDWSEIAKETQARVLEALLKDGDVEKAVRIVKEVTEKLSKYEVPPEKLVIHEQITRDLKDYKATGPHVAVAKRLAARGVKIRPGTVISYIVLKGSGRIGDRAIPFDEFDPTKHKYDAEYYIENQVLPAVERILRAFGYRKEDLRYQKTRQVGLSAWLKPKGT

SEQ ID NO: 80 - protein, 774 aa, synthetic construct
MILDTDYITEDGKDVIRIFKKENGEFKIEYDRTFEPYFYALLKDDSAIEEVKKITAERHGTVVTVKRVEKVQKKFLGRPVEVWKLYFTHPQDVPAIRDKIREHPAVIDIYEYDIPFAKRYLIDKGLVPMEGDEELKMLAFDIETLYHEGEEFAEGPILMISYADEEGARVITWKNVDLPYVDVVSTEREMIKRFLRVVKEKDPDVLITYNGDNFDFAYLKKRCEKLGINFALGRDGSEPKIQRMGDRFAVEVKGRIHFDLYPVIRRTINLPTYTLEAVYEAVFGQPKEKVYAEEITTAWETGENLERVARYSMEDAKVTYELGKEFLPMEAQLSRLIGQSLWDVSRSSTGNLVEWFLLRKAYERNELAPNKPDEKELARRRQSYEGGYVKEPERGLWENIVYLDFRSLYPSIIITHNVSPDTLNREGCKEYDVAPQVGHRFCKDFPGFIPSLLGDLLEERQKIKKKMKATIDPIERKLLDYRQRAIKILANSYYGYYGYARARWYCKECAESVTAWGREYITMTIKEIEEKYGFKVIYSDTDGFFATIPGADAETVKKKAMEFLKYINAKLPGALELEYEGFYKRGFFVTKKKYAVIDEEGKITTRGLEIVRRDWSEIAKETQARVLEALLKDGDVEKAVRIVKEVTEKLSKYEVPPEKLVIHEQITRDLKDYKATGPHVAVAKRLAARGVKIRPGTVISYIVLKGSGRIGDRAIPFDEFDPTKHKYDAEYYIENQVLPAVERILRAFGYRKEDLRYQKTRQVGLSAWLKPKGT

SEQ ID NO: 81 - protein, 774 aa, synthetic construct
MILDTDYITEDGKEVIRIFKKENGEFKIEYDRTFEPYFYALLKDDSAIEEVKKITAERHGTVVTVKRVEKVQKKFLGRPVEVWKLYFTHPQDVPAIRDKIREHPAVIDIYEYDIPFAKRYLIDKGLVPMEGDEELKMLAFDIETLYHEGEEFAEGPILMISYADEEGARVITWKNVDLPYVDVVSTEREMIKRFLRVVKEKDPDVLITYNGDNFDFAYLKKRCEKLGINFALGRDGSEPKIQRMGDRFAVEVKGRIHFDLYPVIRRTINLPTYTLEAVYEAVFGQPKEKVYAEEITTAWETGENLERVARYSMEDAKVTYELGKEFLPMEAQLSRLIGQSLWDVSRSSTGNLVEWFLLRKAYERNELAPNKPDEKELARRRQSYEGGYVKEPERGLWENIVYLDFRSLYPSIIITHNVSPDTLNREGCKEYDVAPQVGHRFCKDFPGFIPSLLGDLLEERQKIKKKMKATIDPIERKLLDYRQRAIKILANSYYGYYGYARARWYCKECAESVTAWGREYITMTIKEIEEKYGFKVIYSDTDGFFATIPGADAETVKKKAMEFLKYINAKLPGALELEYEGFYKRGFFVTKKKYAVIDEEGKITTRGLEIVRRDWSEIAKETQARVLEALLKDGDVEKAVRIVKEVTEKLSKYEVPPEKLVIHEQITRDLKDYKATGPHVAVAKRLAARGVKIRPGTVISYIVLKGSGRIGDRAIPFDEFDPTKHKYDAEYYIENQVLPAVERILRAFGYRKEDLRYQKTRQVGLSAWLKPKGT

SEQ ID NO: 82 - protein, 774 aa, synthetic construct
MILDTDYITEDGKFVIRIFKKENGEFKIEYDRTFEPYFYALLKDDSAIEEVKKITAERHGTVVTVKRVEKVQKKFLGRPVEVWKLYFTHPQDVPAIRDKIREHPAVIDIYEYDIPFAKRYLIDKGLVPMEGDEELKMLAFDIETLYHEGEEFAEGPILMISYADEEGARVITWKNVDLPYVDVVSTEREMIKRFLRVVKEKDPDVLITYNGDNFDFAYLKKRCEKLGINFALGRDGSEPKIQRMGDRFAVEVKGRIHFDLYPVIRRTINLPTYTLEAVYEAVFGQPKEKVYAEEITTAWETGENLERVARYSMEDAKVTYELGKEFLPMEAQLSRLIGQSLWDVSRSSTGNLVEWFLLRKAYERNELAPNKPDEKELARRRQSYEGGYVKEPERGLWENIVYLDFRSLYPSIIITHNVSPDTLNREGCKEYDVAPQVGHRFCKDFPGFIPSLLGDLLEERQKIKKKMKATIDPIERKLLDYRQRAIKILANSYYGYYGYARARWYCKECAESVTAWGREYITMTIKEIEEKYGFKVIYSDTDGFFATIPGADAETVKKKAMEFLKYINAKLPGALELEYEGFYKRGFFVTKKKYAVIDEEGKITTRGLEIVRRDWSEIAKETQARVLEALLKDGDVEKAVRIVKEVTEKLSKYEVPPEKLVIHEQITRDLKDYKATGPHVAVAKRLAARGVKIRPGTVISYIVLKGSGRIGDRAIPFDEFDPTKHKYDAEYYIENQVLPAVERILRAFGYRKEDLRYQKTRQVGLSAWLKPKGT

SEQ ID NO: 83 - protein, 774 aa, synthetic construct
MILDTDYITEDGKHVIRIFKKENGEFKIEYDRTFEPYFYALLKDDSAIEEVKKITAERHGTVVTVKRVEKVQKKFLGRPVEVWKLYFTHPQDVPAIRDKIREHPAVIDIYEYDIPFAKRYLIDKGLVPMEGDEELKMLAFDIETLYHEGEEFAEGPILMISYADEEGARVITWKNVDLPYVDVVSTEREMIKRFLRVVKEKDPDVLITYNGDNFDFAYLKKRCEKLGINFALGRDGSEPKIQRMGDRFAVEVKGRIHFDLYPVIRRTINLPTYTLEAVYEAVFGQPKEKVYAEEITTAWETGENLERVARYSMEDAKVTYELGKEFLPMEAQLSRLIGQSLWDVSRSSTGNLVEWFLLRKAYERNELAPNKPDEKELARRRQSYEGGYVKEPERGLWENIVYLDFRSLYPSIIITHNVSPDTLNREGCKEYDVAPQVGHRFCKDFPGFIPSLLGDLLEERQKIKKKMKATIDPIERKLLDYRQRAIKILANSYYGYYGYARARWYCKECAESVTAWGREYITMTIKEIEEKYGFKVIYSDTDGFFATIPGADAETVKKKAMEFLKYINAKLPGALELEYEGFYKRGFFVTKKKYAVIDEEGKITTRGLEIVRRDWSEIAKETQARVLEALLKDGDVEKAVRIVKEVTEKLSKYEVPPEKLVIHEQITRDLKDYKATGPHVAVAKRLAARGVKIRPGTVISYIVLKGSGRIGDRAIPFDEFDPTKHKYDAEYYIENQVLPAVERILRAFGYRKEDLRYQKTRQVGLSAWLKPKGT

SEQ ID NO: 84 - protein, 774 aa, synthetic construct
MILDTDYITEDGKMVIRIFKKENGEFKIEYDRTFEPYFYALLKDDSAIEEVKKITAERHGTVVTVKRVEKVQKKFLGRPVEVWKLYFTHPQDVPAIRDKIREHPAVIDIYEYDIPFAKRYLIDKGLVPMEGDEELKMLAFDIETLYHEGEEFAEGPILMISYADEEGARVITWKNVDLPYVDVVSTEREMIKRFLRVVKEKDPDVLITYNGDNFDFAYLKKRCEKLGINFALGRDGSEPKIQRMGDRFAVEVKGRIHFDLYPVIRRTINLPTYTLEAVYEAVFGQPKEKVYAEEITTAWETGENLERVARYSMEDAKVTYELGKEFLPMEAQLSRLIGQSLWDVSRSSTGNLVEWFLLRKAYERNELAPNKPDEKELARRRQSYEGGYVKEPERGLWENIVYLDFRSLYPSIIITHNVSPDTLNREGCKEYDVAPQVGHRFCKDFPGFIPSLLGDLLEERQKIKKKMKATIDPIERKLLDYRQRAIKILANSYYGYYGYARARWYCKECAESVTAWGREYITMTIKEIEEKYGFKVIYSDTDGFFATIPGADAETVKKKAMEFLKYINAKLPGALELEYEGFYKRGFFVTKKKYAVIDEEGKITTRGLEIVRRDWSEIAKETQARVLEALLKDGDVEKAVRIVKEVTEKLSKYEVPPEKLVIHEQITRDLKDYKATGPHVAVAKRLAARGVKIRPGTVISYIVLKGSGRIGDRAIPFDEFDPTKHKYDAEYYIENQVLPAVERILRAFGYRKEDLRYQKTRQVGLSAWLKPKGT

SEQ ID NO: 85 - protein, 774 aa, synthetic construct
MILDTDYITEDGKQVIRIFKKENGEFKIEYDRTFEPYFYALLKDDSAIEEVKKITAERHGTVVTVKRVEKVQKKFLGRPVEVWKLYFTHPQDVPAIRDKIREHPAVIDIYEYDIPFAKRYLIDKGLVPMEGDEELKMLAFDIETLYHEGEEFAEGPILMISYADEEGARVITWKNVDLPYVDVVSTEREMIKRFLRVVKEKDPDVLITYNGDNFDFAYLKKRCEKLGINFALGRDGSEPKIQRMGDRFAVEVKGRIHFDLYPVIRRTINLPTYTLEAVYEAVFGQPKEKVYAEEITTAWETGENLERVARYSMEDAKVTYELGKEFLPMEAQLSRLIGQSLWDVSRSSTGNLVEWFLLRKAYERNELAPNKPDEKELARRRQSYEGGYVKEPERGLWENIVYLDFRSLYPSIIITHNVSPDTLNREGCKEYDVAPQVGHRFCKDFPGFIPSLLGDLLEERQKIKKKMKATIDPIERKLLDYRQRAIKILANSYYGYYGYARARWYCKECAESVTAWGREYITMTIKEIEEKYGFKVIYSDTDGFFATIPGADAETVKKKAMEFLKYINAKLPGALELEYEGFYKRGFFVTKKKYAVIDEEGKITTRGLEIVRRDWSEIAKETQARVLEALLKDGDVEKAVRIVKEVTEKLSKYEVPPEKLVIHEQITRDLKDYKATGPHVAVAKRLAARGVKIRPGTVISYIVLKGSGRIGDRAIPFDEFDPTKHKYDAEYYIENQVLPAVERILRAFGYRKEDLRYQKTRQVGLSAWLKPKGT

SEQ ID NO: 86 - protein, 774 aa, synthetic construct
MILDTDYITEDGKSVIRIFKKENGEFKIEYDRTFEPYFYALLKDDSAIEEVKKITAERHGTVVTVKRVEKVQKKFLGRPVEVWKLYFTHPQDVPAIRDKIREHPAVIDIYEYDIPFAKRYLIDKGLVPMEGDEELKMLAFDIETLYHEGEEFAEGPILMISYADEEGARVITWKNVDLPYVDVVSTEREMIKRFLRVVKEKDPDVLITYNGDNFDFAYLKKRCEKLGINFALGRDGSEPKIQRMGDRFAVEVKGRIHFDLYPVIRRTINLPTYTLEAVYEAVFGQPKEKVYAEEITTAWETGENLERVARYSMEDAKVTYELGKEFLPMEAQLSRLIGQSLWDVSRSSTGNLVEWFLLRKAYERNELAPNKPDEKELARRRQSYEGGYVKEPERGLWENIVYLDFRSLYPSIIITHNVSPDTLNREGCKEYDVAPQVGHRFCKDFPGFIPSLLGDLLEERQKIKKKMKATIDPIERKLLDYRQRAIKILANSYYGYYGYARARWYCKECAESVTAWGREYITMTIKEIEEKYGFKVIYSDTDGFFATIPGADAETVKKKAMEFLKYINAKLPGALELEYEGFYKRGFFVTKKKYAVIDEEGKITTRGLEIVRRDWSEIAKETQARVLEALLKDGDVEKAVRIVKEVTEKLSKYEVPPEKLVIHEQITRDLKDYKATGPHVAVAKRLAARGVKIRPGTVISYIVLKGSGRIGDRAIPFDEFDPTKHKYDAEYYIENQVLPAVERILRAFGYRKEDLRYQKTRQVGLSAWLKPKGT

SEQ ID NO: 87 - protein, 774 aa, synthetic construct
MILDTDYITEDGKTVIRIFKKENGEFKIEYDRTFEPYFYALLKDDSAIEEVKKITAERHGTVVTVKRVEKVQKKFLGRPVEVWKLYFTHPQDVPAIRDKIREHPAVIDIYEYDIPFAKRYLIDKGLVPMEGDEELKMLAFDIETLYHEGEEFAEGPILMISYADEEGARVITWKNVDLPYVDVVSTEREMIKRFLRVVKEKDPDVLITYNGDNFDFAYLKKRCEKLGINFALGRDGSEPKIQRMGDRFAVEVKGRIHFDLYPVIRRTINLPTYTLEAVYEAVFGQPKEKVYAEEITTAWETGENLERVARYSMEDAKVTYELGKEFLPMEAQLSRLIGQSLWDVSRSSTGNLVEWFLLRKAYERNELAPNKPDEKELARRRQSYEGGYVKEPERGLWENIVYLDFRSLYPSIIITHNVSPDTLNREGCKEYDVAPQVGHRFCKDFPGFIPSLLGDLLEERQKIKKKMKATIDPIERKLLDYRQRAIKILANSYYGYYGYARARWYCKECAESVTAWGREYITMTIKEIEEKYGFKVIYSDTDGFFATIPGADAETVKKKAMEFLKYINAKLPGALELEYEGFYKRGFFVTKKKYAVIDEEGKITTRGLEIVRRDWSEIAKETQARVLEALLKDGDVEKAVRIVKEVTEKLSKYEVPPEKLVIHEQITRDLKDYKATGPHVAVAKRLAARGVKIRPGTVISYIVLKGSGRIGDRAIPFDEFDPTKHKYDAEYYIENQVLPAVERILRAFGYRKEDLRYQKTRQVGLSAWLKPKGT

SEQ ID NO: 88 - protein, 774 aa, synthetic construct
MILDTDYITEDGKWVIRIFKKENGEFKIEYDRTFEPYFYALLKDDSAIEEVKKITAERHGTVVTVKRVEKVQKKFLGRPVEVWKLYFTHPQDVPAIRDKIREHPAVIDIYEYDIPFAKRYLIDKGLVPMEGDEELKMLAFDIETLYHEGEEFAEGPILMISYADEEGARVITWKNVDLPYVDVVSTEREMIKRFLRVVKEKDPDVLITYNGDNFDFAYLKKRCEKLGINFALGRDGSEPKIQRMGDRFAVEVKGRIHFDLYPVIRRTINLPTYTLEAVYEAVFGQPKEKVYAEEITTAWETGENLERVARYSMEDAKVTYELGKEFLPMEAQLSRLIGQSLWDVSRSSTGNLVEWFLLRKAYERNELAPNKPDEKELARRRQSYEGGYVKEPERGLWENIVYLDFRSLYPSIIITHNVSPDTLNREGCKEYDVAPQVGHRFCKDFPGFIPSLLGDLLEERQKIKKKMKATIDPIERKLLDYRQRAIKILANSYYGYYGYARARWYCKECAESVTAWGREYITMTIKEIEEKYGFKVIYSDTDGFFATIPGADAETVKKKAMEFLKYINAKLPGALELEYEGFYKRGFFVTKKKYAVIDEEGKITTRGLEIVRRDWSEIAKETQARVLEALLKDGDVEKAVRIVKEVTEKLSKYEVPPEKLVIHEQITRDLKDYKATGPHVAVAKRLAARGVKIRPGTVISYIVLKGSGRIGDRAIPFDEFDPTKHKYDAEYYIENQVLPAVERILRAFGYRKEDLRYQKTRQVGLSAWLKPKGT

SEQ ID NO: 89 - protein, 774 aa, synthetic construct
MILDTDYITEDGKPQIRIFKKENGEFKIEYDRTFEPYFYALLKDDSAIEEVKKITAERHGTVVTVKRVEKVQKKFLGRPVEVWKLYFTHPQDVPAIRDKIREHPAVIDIYEYDIPFAKRYLIDKGLVPMEGDEELKMLAFDIETLYHEGEEFAEGPILMISYADEEGARVITWKNVDLPYVDVVSTEREMIKRFLRVVKEKDPDVLITYNGDNFDFAYLKKRCEKLGINFALGRDGSEPKIQRMGDRFAVEVKGRIHFDLYPVIRRTINLPTYTLEAVYEAVFGQPKEKVYAEEITTAWETGENLERVARYSMEDAKVTYELGKEFLPMEAQLSRLIGQSLWDVSRSSTGNLVEWFLLRKAYERNELAPNKPDEKELARRRQSYEGGYVKEPERGLWENIVYLDFRSLYPSIIITHNVSPDTLNREGCKEYDVAPQVGHRFCKDFPGFIPSLLGDLLEERQKIKKKMKATIDPIERKLLDYRQRAIKILANSYYGYYGYARARWYCKECAESVTAWGREYITMTIKEIEEKYGFKVIYSDTDGFFATIPGADAETVKKKAMEFLKYINAKLPGALELEYEGFYKRGFFVTKKKYAVIDEEGKITTRGLEIVRRDWSEIAKETQARVLEALLKDGDVEKAVRIVKEVTEKLSKYEVPPEKLVIHEQITRDLKDYKATGPHVAVAKRLAARGVKIRPGTVISYIVLKGSGRIGDRAIPFDEFDPTKHKYDAEYYIENQVLPAVERILRAFGYRKEDLRYQKTRQVGLSAWLKPKGT

SEQ ID NO: 90 - protein, 774 aa, synthetic construct
MILDTDYITEDGKPWIRIFKKENGEFKIEYDRTFEPYFYALLKDDSAIEEVKKITAERHGTVVTVKRVEKVQKKFLGRPVEVWKLYFTHPQDVPAIRDKIREHPAVIDIYEYDIPFAKRYLIDKGLVPMEGDEELKMLAFDIETLYHEGEEFAEGPILMISYADEEGARVITWKNVDLPYVDVVSTEREMIKRFLRVVKEKDPDVLITYNGDNFDFAYLKKRCEKLGINFALGRDGSEPKIQRMGDRFAVEVKGRIHFDLYPVIRRTINLPTYTLEAVYEAVFGQPKEKVYAEEITTAWETGENLERVARYSMEDAKVTYELGKEFLPMEAQLSRLIGQSLWDVSRSSTGNLVEWFLLRKAYERNELAPNKPDEKELARRRQSYEGGYVKEPERGLWENIVYLDFRSLYPSIIITHNVSPDTLNREGCKEYDVAPQVGHRFCKDFPGFIPSLLGDLLEERQKIKKKMKATIDPIERKLLDYRQRAIKILANSYYGYYGYARARWYCKECAESVTAWGREYITMTIKEIEEKYGFKVIYSDTDGFFATIPGADAETVKKKAMEFLKYINAKLPGALELEYEGFYKRGFFVTKKKYAVIDEEGKITTRGLEIVRRDWSEIAKETQARVLEALLKDGDVEKAVRIVKEVTEKLSKYEVPPEKLVIHEQITRDLKDYKATGPHVAVAKRLAARGVKIRPGTVISYIVLKGSGRIGDRAIPFDEFDPTKHKYDAEYYIENQVLPAVERILRAFGYRKEDLRYQKTRQVGLSAWLKPKGT

SEQ ID NO: 91 - protein, 774 aa, synthetic construct
MILDTDYITEDGKPVARIFKKENGEFKIEYDRTFEPYFYALLKDDSAIEEVKKITAERHGTVVTVKRVEKVQKKFLGRPVEVWKLYFTHPQDVPAIRDKIREHPAVIDIYEYDIPFAKRYLIDKGLVPMEGDEELKMLAFDIETLYHEGEEFAEGPILMISYADEEGARVITWKNVDLPYVDVVSTEREMIKRFLRVVKEKDPDVLITYNGDNFDFAYLKKRCEKLGINFALGRDGSEPKIQRMGDRFAVEVKGRIHFDLYPVIRRTINLPTYTLEAVYEAVFGQPKEKVYAEEITTAWETGENLERVARYSMEDAKVTYELGKEFLPMEAQLSRLIGQSLWDVSRSSTGNLVEWFLLRKAYERNELAPNKPDEKELARRRQSYEGGYVKEPERGLWENIVYLDFRSLYPSIIITHNVSPDTLNREGCKEYDVAPQVGHRFCKDFPGFIPSLLGDLLEERQKIKKKMKATIDPIERKLLDYRQRAIKILANSYYGYYGYARARWYCKECAESVTAWGREYITMTIKEIEEKYGFKVIYSDTDGFFATIPGADAETVKKKAMEFLKYINAKLPGALELEYEGFYKRGFFVTKKKYAVIDEEGKITTRGLEIVRRDWSEIAKETQARVLEALLKDGDVEKAVRIVKEVTEKLSKYEVPPEKLVIHEQITRDLKDYKATGPHVAVAKRLAARGVKIRPGTVISYIVLKGSGRIGDRAIPFDEFDPTKHKYDAEYYIENQVLPAVERILRAFGYRKEDLRYQKTRQVGLSAWLKPKGT

SEQ ID NO: 92 - protein, 774 aa, synthetic construct
MILDTDYITEDGKPVCRIFKKENGEFKIEYDRTFEPYFYALLKDDSAIEEVKKITAERHGTVVTVKRVEKVQKKFLGRPVEVWKLYFTHPQDVPAIRDKIREHPAVIDIYEYDIPFAKRYLIDKGLVPMEGDEELKMLAFDIETLYHEGEEFAEGPILMISYADEEGARVITWKNVDLPYVDVVSTEREMIKRFLRVVKEKDPDVLITYNGDNFDFAYLKKRCEKLGINFALGRDGSEPKIQRMGDRFAVEVKGRIHFDLYPVIRRTINLPTYTLEAVYEAVFGQPKEKVYAEEITTAWETGENLERVARYSMEDAKVTYELGKEFLPMEAQLSRLIGQSLWDVSRSSTGNLVEWFLLRKAYERNELAPNKPDEKELARRRQSYEGGYVKEPERGLWENIVYLDFRSLYPSIIITHNVSPDTLNREGCKEYDVAPQVGHRFCKDFPGFIPSLLGDLLEERQKIKKKMKATIDPIERKLLDYRQRAIKILANSYYGYYGYARARWYCKECAESVTAWGREYITMTIKEIEEKYGFKVIYSDTDGFFATIPGADAETVKKKAMEFLKYINAKLPGALELEYEGFYKRGFFVTKKKYAVIDEEGKITTRGLEIVRRDWSEIAKETQARVLEALLKDGDVEKAVRIVKEVTEKLSKYEVPPEKLVIHEQITRDLKDYKATGPHVAVAKRLAARGVKIRPGTVISYIVLKGSGRIGDRAIPFDEFDPTKHKYDAEYYIENQVLPAVERILRAFGYRKEDLRYQKTRQVGLSAWLKPKGT

SEQ ID NO: 93 - protein, 774 aa, synthetic construct
MILDTDYITEDGKPVFRIFKKENGEFKIEYDRTFEPYFYALLKDDSAIEEVKKITAERHGTVVTVKRVEKVQKKFLGRPVEVWKLYFTHPQDVPAIRDKIREHPAVIDIYEYDIPFAKRYLIDKGLVPMEGDEELKMLAFDIETLYHEGEEFAEGPILMISYADEEGARVITWKNVDLPYVDVVSTEREMIKRFLRVVKEKDPDVLITYNGDNFDFAYLKKRCEKLGINFALGRDGSEPKIQRMGDRFAVEVKGRIHFDLYPVIRRTINLPTYTLEAVYEAVFGQPKEKVYAEEITTAWETGENLERVARYSMEDAKVTYELGKEFLPMEAQLSRLIGQSLWDVSRSSTGNLVEWFLLRKAYERNELAPNKPDEKELARRRQSYEGGYVKEPERGLWENIVYLDFRSLYPSIIITHNVSPDTLNREGCKEYDVAPQVGHRFCKDFPGFIPSLLGDLLEERQKIKKKMKATIDPIERKLLDYRQRAIKILANSYYGYYGYARARWYCKECAESVTAWGREYITMTIKEIEEKYGFKVIYSDTDGFFATIPGADAETVKKKAMEFLKYINAKLPGALELEYEGFYKRGFFVTKKKYAVIDEEGKITTRGLEIVRRDWSEIAKETQARVLEALLKDGDVEKAVRIVKEVTEKLSKYEVPPEKLVIHEQITRDLKDYKATGPHVAVAKRLAARGVKIRPGTVISYIVLKGSGRIGDRAIPFDEFDPTKHKYDAEYYIENQVLPAVERILRAFGYRKEDLRYQKTRQVGLSAWLKPKGT

SEQ ID NO: 94 - protein, 774 aa, synthetic construct
MILDTDYITEDGKPVHRIFKKENGEFKIEYDRTFEPYFYALLKDDSAIEEVKKITAERHGTVVTVKRVEKVQKKFLGRPVEVWKLYFTHPQDVPAIRDKIREHPAVIDIYEYDIPFAKRYLIDKGLVPMEGDEELKMLAFDIETLYHEGEEFAEGPILMISYADEEGARVITWKNVDLPYVDVVSTEREMIKRFLRVVKEKDPDVLITYNGDNFDFAYLKKRCEKLGINFALGRDGSEPKIQRMGDRFAVEVKGRIHFDLYPVIRRTINLPTYTLEAVYEAVFGQPKEKVYAEEITTAWETGENLERVARYSMEDAKVTYELGKEFLPMEAQLSRLIGQSLWDVSRSSTGNLVEWFLLRKAYERNELAPNKPDEKELARRRQSYEGGYVKEPERGLWENIVYLDFRSLYPSIIITHNVSPDTLNREGCKEYDVAPQVGHRFCKDFPGFIPSLLGDLLEERQKIKKKMKATIDPIERKLLDYRQRAIKILANSYYGYYGYARARWYCKECAESVTAWGREYITMTIKEIEEKYGFKVIYSDTDGFFATIPGADAETVKKKAMEFLKYINAKLPGALELEYEGFYKRGFFVTKKKYAVIDEEGKITTRGLEIVRRDWSEIAKETQARVLEALLKDGDVEKAVRIVKEVTEKLSKYEVPPEKLVIHEQITRDLKDYKATGPHVAVAKRLAARGVKIRPGTVISYIVLKGSGRIGDRAIPFDEFDPTKHKYDAEYYIENQVLPAVERILRAFGYRKEDLRYQKTRQVGLSAWLKPKGT

SEQ ID NO: 95 - protein, 774 aa, synthetic construct
MILDTDYITEDGKPVKRIFKKENGEFKIEYDRTFEPYFYALLKDDSAIEEVKKITAERHGTVVTVKRVEKVQKKFLGRPVEVWKLYFTHPQDVPAIRDKIREHPAVIDIYEYDIPFAKRYLIDKGLVPMEGDEELKMLAFDIETLYHEGEEFAEGPILMISYADEEGARVITWKNVDLPYVDVVSTEREMIKRFLRVVKEKDPDVLITYNGDNFDFAYLKKRCEKLGINFALGRDGSEPKIQRMGDRFAVEVKGRIHFDLYPVIRRTINLPTYTLEAVYEAVFGQPKEKVYAEEITTAWETGENLERVARYSMEDAKVTYELGKEFLPMEAQLSRLIGQSLWDVSRSSTGNLVEWFLLRKAYERNELAPNKPDEKELARRRQSYEGGYVKEPERGLWENIVYLDFRSLYPSIIITHNVSPDTLNREGCKEYDVAPQVGHRFCKDFPGFIPSLLGDLLEERQKIKKKMKATIDPIERKLLDYRQRAIKILANSYYGYYGYARARWYCKECAESVTAWGREYITMTIKEIEEKYGFKVIYSDTDGFFATIPGADAETVKKKAMEFLKYINAKLPGALELEYEGFYKRGFFVTKKKYAVIDEEGKITTRGLEIVRRDWSEIAKETQARVLEALLKDGDVEKAVRIVKEVTEKLSKYEVPPEKLVIHEQITRDLKDYKATGPHVAVAKRLAARGVKIRPGTVISYIVLKGSGRIGDRAIPFDEFDPTKHKYDAEYYIENQVLPAVERILRAFGYRKEDLRYQKTRQVGLSAWLKPKGT

SEQ ID NO: 96 - protein, 774 aa, synthetic construct
MILDTDYITEDGKPVSRIFKKENGEFKIEYDRTFEPYFYALLKDDSAIEEVKKITAERHGTVVTVKRVEKVQKKFLGRPVEVWKLYFTHPQDVPAIRDKIREHPAVIDIYEYDIPFAKRYLIDKGLVPMEGDEELKMLAFDIETLYHEGEEFAEGPILMISYADEEGARVITWKNVDLPYVDVVSTEREMIKRFLRVVKEKDPDVLITYNGDNFDFAYLKKRCEKLGINFALGRDGSEPKIQRMGDRFAVEVKGRIHFDLYPVIRRTINLPTYTLEAVYEAVFGQPKEKVYAEEITTAWETGENLERVARYSMEDAKVTYELGKEFLPMEAQLSRLIGQSLWDVSRSSTGNLVEWFLLRKAYERNELAPNKPDEKELARRRQSYEGGYVKEPERGLWENIVYLDFRSLYPSIIITHNVSPDTLNREGCKEYDVAPQVGHRFCKDFPGFIPSLLGDLLEERQKIKKKMKATIDPIERKLLDYRQRAIKILANSYYGYYGYARARWYCKECAESVTAWGREYITMTIKEIEEKYGFKVIYSDTDGFFATIPGADAETVKKKAMEFLKYINAKLPGALELEYEGFYKRGFFVTKKKYAVIDEEGKITTRGLEIVRRDWSEIAKETQARVLEALLKDGDVEKAVRIVKEVTEKLSKYEVPPEKLVIHEQITRDLKDYKATGPHVAVAKRLAARGVKIRPGTVISYIVLKGSGRIGDRAIPFDEFDPTKHKYDAEYYIENQVLPAVERILRAFGYRKEDLRYQKTRQVGLSAWLKPKGT

SEQ ID NO: 97 - protein, 774 aa, synthetic construct
MILDTDYITEDGKPVWRIFKKENGEFKIEYDRTFEPYFYALLKDDSAIEEVKKITAERHGTVVTVKRVEKVQKKFLGRPVEVWKLYFTHPQDVPAIRDKIREHPAVIDIYEYDIPFAKRYLIDKGLVPMEGDEELKMLAFDIETLYHEGEEFAEGPILMISYADEEGARVITWKNVDLPYVDVVSTEREMIKRFLRVVKEKDPDVLITYNGDNFDFAYLKKRCEKLGINFALGRDGSEPKIQRMGDRFAVEVKGRIHFDLYPVIRRTINLPTYTLEAVYEAVFGQPKEKVYAEEITTAWETGENLERVARYSMEDAKVTYELGKEFLPMEAQLSRLIGQSLWDVSRSSTGNLVEWFLLRKAYERNELAPNKPDEKELARRRQSYEGGYVKEPERGLWENIVYLDFRSLYPSIIITHNVSPDTLNREGCKEYDVAPQVGHRFCKDFPGFIPSLLGDLLEERQKIKKKMKATIDPIERKLLDYRQRAIKILANSYYGYYGYARARWYCKECAESVTAWGREYITMTIKEIEEKYGFKVIYSDTDGFFATIPGADAETVKKKAMEFLKYINAKLPGALELEYEGFYKRGFFVTKKKYAVIDEEGKITTRGLEIVRRDWSEIAKETQARVLEALLKDGDVEKAVRIVKEVTEKLSKYEVPPEKLVIHEQITRDLKDYKATGPHVAVAKRLAARGVKIRPGTVISYIVLKGSGRIGDRAIPFDEFDPTKHKYDAEYYIENQVLPAVERILRAFGYRKEDLRYQKTRQVGLSAWLKPKGT

SEQ ID NO: 98 - protein, 774 aa, synthetic construct
MILDTDYITEDGKPVYRIFKKENGEFKIEYDRTFEPYFYALLKDDSAIEEVKKITAERHGTVVTVKRVEKVQKKFLGRPVEVWKLYFTHPQDVPAIRDKIREHPAVIDIYEYDIPFAKRYLIDKGLVPMEGDEELKMLAFDIETLYHEGEEFAEGPILMISYADEEGARVITWKNVDLPYVDVVSTEREMIKRFLRVVKEKDPDVLITYNGDNFDFAYLKKRCEKLGINFALGRDGSEPKIQRMGDRFAVEVKGRIHFDLYPVIRRTINLPTYTLEAVYEAVFGQPKEKVYAEEITTAWETGENLERVARYSMEDAKVTYELGKEFLPMEAQLSRLIGQSLWDVSRSSTGNLVEWFLLRKAYERNELAPNKPDEKELARRRQSYEGGYVKEPERGLWENIVYLDFRSLYPSIIITHNVSPDTLNREGCKEYDVAPQVGHRFCKDFPGFIPSLLGDLLEERQKIKKKMKATIDPIERKLLDYRQRAIKILANSYYGYYGYARARWYCKECAESVTAWGREYITMTIKEIEEKYGFKVIYSDTDGFFATIPGADAETVKKKAMEFLKYINAKLPGALELEYEGFYKRGFFVTKKKYAVIDEEGKITTRGLEIVRRDWSEIAKETQARVLEALLKDGDVEKAVRIVKEVTEKLSKYEVPPEKLVIHEQITRDLKDYKATGPHVAVAKRLAARGVKIRPGTVISYIVLKGSGRIGDRAIPFDEFDPTKHKYDAEYYIENQVLPAVERILRAFGYRKEDLRYQKTRQVGLSAWLKPKGT

SEQ ID NO: 99 - protein, 774 aa, synthetic construct
MILDTDYITEDGKPVIPIFKKENGEFKIEYDRTFEPYFYALLKDDSAIEEVKKITAERHGTVVTVKRVEKVQKKFLGRPVEVWKLYFTHPQDVPAIRDKIREHPAVIDIYEYDIPFAKRYLIDKGLVPMEGDEELKMLAFDIETLYHEGEEFAEGPILMISYADEEGARVITWKNVDLPYVDVVSTEREMIKRFLRVVKEKDPDVLITYNGDNFDFAYLKKRCEKLGINFALGRDGSEPKIQRMGDRFAVEVKGRIHFDLYPVIRRTINLPTYTLEAVYEAVFGQPKEKVYAEEITTAWETGENLERVARYSMEDAKVTYELGKEFLPMEAQLSRLIGQSLWDVSRSSTGNLVEWFLLRKAYERNELAPNKPDEKELARRRQSYEGGYVKEPERGLWENIVYLDFRSLYPSIIITHNVSPDTLNREGCKEYDVAPQVGHRFCKDFPGFIPSLLGDLLEERQKIKKKMKATIDPIERKLLDYRQRAIKILANSYYGYYGYARARWYCKECAESVTAWGREYITMTIKEIEEKYGFKVIYSDTDGFFATIPGADAETVKKKAMEFLKYINAKLPGALELEYEGFYKRGFFVTKKKYAVIDEEGKITTRGLEIVRRDWSEIAKETQARVLEALLKDGDVEKAVRIVKEVTEKLSKYEVPPEKLVIHEQITRDLKDYKATGPHVAVAKRLAARGVKIRPGTVISYIVLKGSGRIGDRAIPFDEFDPTKHKYDAEYYIENQVLPAVERILRAFGYRKEDLRYQKTRQVGLSAWLKPKGT

SEQ ID NO: 100 - protein, 774 aa, synthetic construct
MILDTDYITEDGKPVIRYFKKENGEFKIEYDRTFEPYFYALLKDDSAIEEVKKITAERHGTVVTVKRVEKVQKKFLGRPVEVWKLYFTHPQDVPAIRDKIREHPAVIDIYEYDIPFAKRYLIDKGLVPMEGDEELKMLAFDIETLYHEGEEFAEGPILMISYADEEGARVITWKNVDLPYVDVVSTEREMIKRFLRVVKEKDPDVLITYNGDNFDFAYLKKRCEKLGINFALGRDGSEPKIQRMGDRFAVEVKGRIHFDLYPVIRRTINLPTYTLEAVYEAVFGQPKEKVYAEEITTAWETGENLERVARYSMEDAKVTYELGKEFLPMEAQLSRLIGQSLWDVSRSSTGNLVEWFLLRKAYERNELAPNKPDEKELARRRQSYEGGYVKEPERGLWENIVYLDFRSLYPSIIITHNVSPDTLNREGCKEYDVAPQVGHRFCKDFPGFIPSLLGDLLEERQKIKKKMKATIDPIERKLLDYRQRAIKILANSYYGYYGYARARWYCKECAESVTAWGREYITMTIKEIEEKYGFKVIYSDTDGFFATIPGADAETVKKKAMEFLKYINAKLPGALELEYEGFYKRGFFVTKKKYAVIDEEGKITTRGLEIVRRDWSEIAKETQARVLEALLKDGDVEKAVRIVKEVTEKLSKYEVPPEKLVIHEQITRDLKDYKATGPHVAVAKRLAARGVKIRPGTVISYIVLKGSGRIGDRAIPFDEFDPTKHKYDAEYYIENQVLPAVERILRAFGYRKEDLRYQKTRQVGLSAWLKPKGT

SEQ ID NO: 101 - protein, 774 aa, synthetic construct
MILDTDYITEDGKPVIRIFKKWNGEFKIEYDRTFEPYFYALLKDDSAIEEVKKITAERHGTVVTVKRVEKVQKKFLGRPVEVWKLYFTHPQDVPAIRDKIREHPAVIDIYEYDIPFAKRYLIDKGLVPMEGDEELKMLAFDIETLYHEGEEFAEGPILMISYADEEGARVITWKNVDLPYVDVVSTEREMIKRFLRVVKEKDPDVLITYNGDNFDFAYLKKRCEKLGINFALGRDGSEPKIQRMGDRFAVEVKGRIHFDLYPVIRRTINLPTYTLEAVYEAVFGQPKEKVYAEEITTAWETGENLERVARYSMEDAKVTYELGKEFLPMEAQLSRLIGQSLWDVSRSSTGNLVEWFLLRKAYERNELAPNKPDEKELARRRQSYEGGYVKEPERGLWENIVYLDFRSLYPSIIITHNVSPDTLNREGCKEYDVAPQVGHRFCKDFPGFIPSLLGDLLEERQKIKKKMKATIDPIERKLLDYRQRAIKILANSYYGYYGYARARWYCKECAESVTAWGREYITMTIKEIEEKYGFKVIYSDTDGFFATIPGADAETVKKKAMEFLKYINAKLPGALELEYEGFYKRGFFVTKKKYAVIDEEGKITTRGLEIVRRDWSEIAKETQARVLEALLKDGDVEKAVRIVKEVTEKLSKYEVPPEKLVIHEQITRDLKDYKATGPHVAVAKRLAARGVKIRPGTVISYIVLKGSGRIGDRAIPFDEFDPTKHKYDAEYYIENQVLPAVERILRAFGYRKEDLRYQKTRQVGLSAWLKPKGT

SEQ ID NO: 102 - protein, 774 aa, synthetic construct
MILDTDYITEDGKPVIRIFKKENGEFKIEYDRTDEPYFYALLKDDSAIEEVKKITAERHGTVVTVKRVEKVQKKFLGRPVEVWKLYFTHPQDVPAIRDKIREHPAVIDIYEYDIPFAKRYLIDKGLVPMEGDEELKMLAFDIETLYHEGEEFAEGPILMISYADEEGARVITWKNVDLPYVDVVSTEREMIKRFLRVVKEKDPDVLITYNGDNFDFAYLKKRCEKLGINFALGRDGSEPKIQRMGDRFAVEVKGRIHFDLYPVIRRTINLPTYTLEAVYEAVFGQPKEKVYAEEITTAWETGENLERVARYSMEDAKVTYELGKEFLPMEAQLSRLIGQSLWDVSRSSTGNLVEWFLLRKAYERNELAPNKPDEKELARRRQSYEGGYVKEPERGLWENIVYLDFRSLYPSIIITHNVSPDTLNREGCKEYDVAPQVGHRFCKDFPGFIPSLLGDLLEERQKIKKKMKATIDPIERKLLDYRQRAIKILANSYYGYYGYARARWYCKECAESVTAWGREYITMTIKEIEEKYGFKVIYSDTDGFFATIPGADAETVKKKAMEFLKYINAKLPGALELEYEGFYKRGFFVTKKKYAVIDEEGKITTRGLEIVRRDWSEIAKETQARVLEALLKDGDVEKAVRIVKEVTEKLSKYEVPPEKLVIHEQITRDLKDYKATGPHVAVAKRLAARGVKIRPGTVISYIVLKGSGRIGDRAIPFDEFDPTKHKYDAEYYIENQVLPAVERILRAFGYRKEDLRYQKTRQVGLSAWLKPKGT

SEQ ID NO: 103 - protein, 774 aa, synthetic construct
MILDTDYITEDGKPVIRIFKKENGEFKIEYDRTFECYFYALLKDDSAIEEVKKITAERHGTVVTVKRVEKVQKKFLGRPVEVWKLYFTHPQDVPAIRDKIREHPAVIDIYEYDIPFAKRYLIDKGLVPMEGDEELKMLAFDIETLYHEGEEFAEGPILMISYADEEGARVITWKNVDLPYVDVVSTEREMIKRFLRVVKEKDPDVLITYNGDNFDFAYLKKRCEKLGINFALGRDGSEPKIQRMGDRFAVEVKGRIHFDLYPVIRRTINLPTYTLEAVYEAVFGQPKEKVYAEEITTAWETGENLERVARYSMEDAKVTYELGKEFLPMEAQLSRLIGQSLWDVSRSSTGNLVEWFLLRKAYERNELAPNKPDEKELARRRQSYEGGYVKEPERGLWENIVYLDFRSLYPSIIITHNVSPDTLNREGCKEYDVAPQVGHRFCKDFPGFIPSLLGDLLEERQKIKKKMKATIDPIERKLLDYRQRAIKILANSYYGYYGYARARWYCKECAESVTAWGREYITMTIKEIEEKYGFKVIYSDTDGFFATIPGADAETVKKKAMEFLKYINAKLPGALELEYEGFYKRGFFVTKKKYAVIDEEGKITTRGLEIVRRDWSEIAKETQARVLEALLKDGDVEKAVRIVKEVTEKLSKYEVPPEKLVIHEQITRDLKDYKATGPHVAVAKRLAARGVKIRPGTVISYIVLKGSGRIGDRAIPFDEFDPTKHKYDAEYYIENQVLPAVERILRAFGYRKEDLRYQKTRQVGLSAWLKPKGT

SEQ ID NO: 104 - protein, 774 aa, synthetic construct
MILDTDYITEDGKPVIRIFKKENGEFKIEYDRTFEDYFYALLKDDSAIEEVKKITAERHGTVVTVKRVEKVQKKFLGRPVEVWKLYFTHPQDVPAIRDKIREHPAVIDIYEYDIPFAKRYLIDKGLVPMEGDEELKMLAFDIETLYHEGEEFAEGPILMISYADEEGARVITWKNVDLPYVDVVSTEREMIKRFLRVVKEKDPDVLITYNGDNFDFAYLKKRCEKLGINFALGRDGSEPKIQRMGDRFAVEVKGRIHFDLYPVIRRTINLPTYTLEAVYEAVFGQPKEKVYAEEITTAWETGENLERVARYSMEDAKVTYELGKEFLPMEAQLSRLIGQSLWDVSRSSTGNLVEWFLLRKAYERNELAPNKPDEKELARRRQSYEGGYVKEPERGLWENIVYLDFRSLYPSIIITHNVSPDTLNREGCKEYDVAPQVGHRFCKDFPGFIPSLLGDLLEERQKIKKKMKATIDPIERKLLDYRQRAIKILANSYYGYYGYARARWYCKECAESVTAWGREYITMTIKEIEEKYGFKVIYSDTDGFFATIPGADAETVKKKAMEFLKYINAKLPGALELEYEGFYKRGFFVTKKKYAVIDEEGKITTRGLEIVRRDWSEIAKETQARVLEALLKDGDVEKAVRIVKEVTEKLSKYEVPPEKLVIHEQITRDLKDYKATGPHVAVAKRLAARGVKIRPGTVISYIVLKGSGRIGDRAIPFDEFDPTKHKYDAEYYIENQVLPAVERILRAFGYRKEDLRYQKTRQVGLSAWLKPKGT

SEQ ID NO: 105 - protein, 774 aa, synthetic construct
MILDTDYITEDGKPVIRIFKKENGEFKIEYDRTFEEYFYALLKDDSAIEEVKKITAERHGTVVTVKRVEKVQKKFLGRPVEVWKLYFTHPQDVPAIRDKIREHPAVIDIYEYDIPFAKRYLIDKGLVPMEGDEELKMLAFDIETLYHEGEEFAEGPILMISYADEEGARVITWKNVDLPYVDVVSTEREMIKRFLRVVKEKDPDVLITYNGDNFDFAYLKKRCEKLGINFALGRDGSEPKIQRMGDRFAVEVKGRIHFDLYPVIRRTINLPTYTLEAVYEAVFGQPKEKVYAEEITTAWETGENLERVARYSMEDAKVTYELGKEFLPMEAQLSRLIGQSLWDVSRSSTGNLVEWFLLRKAYERNELAPNKPDEKELARRRQSYEGGYVKEPERGLWENIVYLDFRSLYPSIIITHNVSPDTLNREGCKEYDVAPQVGHRFCKDFPGFIPSLLGDLLEERQKIKKKMKATIDPIERKLLDYRQRAIKILANSYYGYYGYARARWYCKECAESVTAWGREYITMTIKEIEEKYGFKVIYSDTDGFFATIPGADAETVKKKAMEFLKYINAKLPGALELEYEGFYKRGFFVTKKKYAVIDEEGKITTRGLEIVRRDWSEIAKETQARVLEALLKDGDVEKAVRIVKEVTEKLSKYEVPPEKLVIHEQITRDLKDYKATGPHVAVAKRLAARGVKIRPGTVISYIVLKGSGRIGDRAIPFDEFDPTKHKYDAEYYIENQVLPAVERILRAFGYRKEDLRYQKTRQVGLSAWLKPKGT

SEQ ID NO: 106 - protein, 774 aa, synthetic construct
MILDTDYITEDGKPVIRIFKKENGEFKIEYDRTFEFYFYALLKDDSAIEEVKKITAERHGTVVTVKRVEKVQKKFLGRPVEVWKLYFTHPQDVPAIRDKIREHPAVIDIYEYDIPFAKRYLIDKGLVPMEGDEELKMLAFDIETLYHEGEEFAEGPILMISYADEEGARVITWKNVDLPYVDVVSTEREMIKRFLRVVKEKDPDVLITYNGDNFDFAYLKKRCEKLGINFALGRDGSEPKIQRMGDRFAVEVKGRIHFDLYPVIRRTINLPTYTLEAVYEAVFGQPKEKVYAEEITTAWETGENLERVARYSMEDAKVTYELGKEFLPMEAQLSRLIGQSLWDVSRSSTGNLVEWFLLRKAYERNELAPNKPDEKELARRRQSYEGGYVKEPERGLWENIVYLDFRSLYPSIIITHNVSPDTLNREGCKEYDVAPQVGHRFCKDFPGFIPSLLGDLLEERQKIKKKMKATIDPIERKLLDYRQRAIKILANSYYGYYGYARARWYCKECAESVTAWGREYITMTIKEIEEKYGFKVIYSDTDGFFATIPGADAETVKKKAMEFLKYINAKLPGALELEYEGFYKRGFFVTKKKYAVIDEEGKITTRGLEIVRRDWSEIAKETQARVLEALLKDGDVEKAVRIVKEVTEKLSKYEVPPEKLVIHEQITRDLKDYKATGPHVAVAKRLAARGVKIRPGTVISYIVLKGSGRIGDRAIPFDEFDPTKHKYDAEYYIENQVLPAVERILRAFGYRKEDLRYQKTRQVGLSAWLKPKGT

SEQ ID NO: 107 - protein, 774 aa, synthetic construct
MILDTDYITEDGKPVIRIFKKENGEFKIEYDRTFEHYFYALLKDDSAIEEVKKITAERHGTVVTVKRVEKVQKKFLGRPVEVWKLYFTHPQDVPAIRDKIREHPAVIDIYEYDIPFAKRYLIDKGLVPMEGDEELKMLAFDIETLYHEGEEFAEGPILMISYADEEGARVITWKNVDLPYVDVVSTEREMIKRFLRVVKEKDPDVLITYNGDNFDFAYLKKRCEKLGINFALGRDGSEPKIQRMGDRFAVEVKGRIHFDLYPVIRRTINLPTYTLEAVYEAVFGQPKEKVYAEEITTAWETGENLERVARYSMEDAKVTYELGKEFLPMEAQLSRLIGQSLWDVSRSSTGNLVEWFLLRKAYERNELAPNKPDEKELARRRQSYEGGYVKEPERGLWENIVYLDFRSLYPSIIITHNVSPDTLNREGCKEYDVAPQVGHRFCKDFPGFIPSLLGDLLEERQKIKKKMKATIDPIERKLLDYRQRAIKILANSYYGYYGYARARWYCKECAESVTAWGREYITMTIKEIEEKYGFKVIYSDTDGFFATIPGADAETVKKKAMEFLKYINAKLPGALELEYEGFYKRGFFVTKKKYAVIDEEGKITTRGLEIVRRDWSEIAKETQARVLEALLKDGDVEKAVRIVKEVTEKLSKYEVPPEKLVIHEQITRDLKDYKATGPHVAVAKRLAARGVKIRPGTVISYIVLKGSGRIGDRAIPFDEFDPTKHKYDAEYYIENQVLPAVERILRAFGYRKEDLRYQKTRQVGLSAWLKPKGT

SEQ ID NO: 108 - protein, 774 aa, synthetic construct
MILDTDYITEDGKPVIRIFKKENGEFKIEYDRTFEIYFYALLKDDSAIEEVKKITAERHGTVVTVKRVEKVQKKFLGRPVEVWKLYFTHPQDVPAIRDKIREHPAVIDIYEYDIPFAKRYLIDKGLVPMEGDEELKMLAFDIETLYHEGEEFAEGPILMISYADEEGARVITWKNVDLPYVDVVSTEREMIKRFLRVVKEKDPDVLITYNGDNFDFAYLKKRCEKLGINFALGRDGSEPKIQRMGDRFAVEVKGRIHFDLYPVIRRTINLPTYTLEAVYEAVFGQPKEKVYAEEITTAWETGENLERVARYSMEDAKVTYELGKEFLPMEAQLSRLIGQSLWDVSRSSTGNLVEWFLLRKAYERNELAPNKPDEKELARRRQSYEGGYVKEPERGLWENIVYLDFRSLYPSIIITHNVSPDTLNREGCKEYDVAPQVGHRFCKDFPGFIPSLLGDLLEERQKIKKKMKATIDPIERKLLDYRQRAIKILANSYYGYYGYARARWYCKECAESVTAWGREYITMTIKEIEEKYGFKVIYSDTDGFFATIPGADAETVKKKAMEFLKYINAKLPGALELEYEGFYKRGFFVTKKKYAVIDEEGKITTRGLEIVRRDWSEIAKETQARVLEALLKDGDVEKAVRIVKEVTEKLSKYEVPPEKLVIHEQITRDLKDYKATGPHVAVAKRLAARGVKIRPGTVISYIVLKGSGRIGDRAIPFDEFDPTKHKYDAEYYIENQVLPAVERILRAFGYRKEDLRYQKTRQVGLSAWLKPKGT

SEQ ID NO: 109 - protein, 774 aa, synthetic construct
MILDTDYITEDGKPVIRIFKKENGEFKIEYDRTFEKYFYALLKDDSAIEEVKKITAERHGTVVTVKRVEKVQKKFLGRPVEVWKLYFTHPQDVPAIRDKIREHPAVIDIYEYDIPFAKRYLIDKGLVPMEGDEELKMLAFDIETLYHEGEEFAEGPILMISYADEEGARVITWKNVDLPYVDVVSTEREMIKRFLRVVKEKDPDVLITYNGDNFDFAYLKKRCEKLGINFALGRDGSEPKIQRMGDRFAVEVKGRIHFDLYPVIRRTINLPTYTLEAVYEAVFGQPKEKVYAEEITTAWETGENLERVARYSMEDAKVTYELGKEFLPMEAQLSRLIGQSLWDVSRSSTGNLVEWFLLRKAYERNELAPNKPDEKELARRRQSYEGGYVKEPERGLWENIVYLDFRSLYPSIIITHNVSPDTLNREGCKEYDVAPQVGHRFCKDFPGFIPSLLGDLLEERQKIKKKMKATIDPIERKLLDYRQRAIKILANSYYGYYGYARARWYCKECAESVTAWGREYITMTIKEIEEKYGFKVIYSDTDGFFATIPGADAETVKKKAMEFLKYINAKLPGALELEYEGFYKRGFFVTKKKYAVIDEEGKITTRGLEIVRRDWSEIAKETQARVLEALLKDGDVEKAVRIVKEVTEKLSKYEVPPEKLVIHEQITRDLKDYKATGPHVAVAKRLAARGVKIRPGTVISYIVLKGSGRIGDRAIPFDEFDPTKHKYDAEYYIENQVLPAVERILRAFGYRKEDLRYQKTRQVGLSAWLKPKGT

SEQ ID NO: 110 - protein, 774 aa, synthetic construct
MILDTDYITEDGKPVIRIFKKENGEFKIEYDRTFELYFYALLKDDSAIEEVKKITAERHGTVVTVKRVEKVQKKFLGRPVEVWKLYFTHPQDVPAIRDKIREHPAVIDIYEYDIPFAKRYLIDKGLVPMEGDEELKMLAFDIETLYHEGEEFAEGPILMISYADEEGARVITWKNVDLPYVDVVSTEREMIKRFLRVVKEKDPDVLITYNGDNFDFAYLKKRCEKLGINFALGRDGSEPKIQRMGDRFAVEVKGRIHFDLYPVIRRTINLPTYTLEAVYEAVFGQPKEKVYAEEITTAWETGENLERVARYSMEDAKVTYELGKEFLPMEAQLSRLIGQSLWDVSRSSTGNLVEWFLLRKAYERNELAPNKPDEKELARRRQSYEGGYVKEPERGLWENIVYLDFRSLYPSIIITHNVSPDTLNREGCKEYDVAPQVGHRFCKDFPGFIPSLLGDLLEERQKIKKKMKATIDPIERKLLDYRQRAIKILANSYYGYYGYARARWYCKECAESVTAWGREYITMTIKEIEEKYGFKVIYSDTDGFFATIPGADAETVKKKAMEFLKYINAKLPGALELEYEGFYKRGFFVTKKKYAVIDEEGKITTRGLEIVRRDWSEIAKETQARVLEALLKDGDVEKAVRIVKEVTEKLSKYEVPPEKLVIHEQITRDLKDYKATGPHVAVAKRLAARGVKIRPGTVISYIVLKGSGRIGDRAIPFDEFDPTKHKYDAEYYIENQVLPAVERILRAFGYRKEDLRYQKTRQVGLSAWLKPKGT

SEQ ID NO: 111 - protein, 774 aa, synthetic construct
MILDTDYITEDGKPVIRIFKKENGEFKIEYDRTFEMYFYALLKDDSAIEEVKKITAERHGTVVTVKRVEKVQKKFLGRPVEVWKLYFTHPQDVPAIRDKIREHPAVIDIYEYDIPFAKRYLIDKGLVPMEGDEELKMLAFDIETLYHEGEEFAEGPILMISYADEEGARVITWKNVDLPYVDVVSTEREMIKRFLRVVKEKDPDVLITYNGDNFDFAYLKKRCEKLGINFALGRDGSEPKIQRMGDRFAVEVKGRIHFDLYPVIRRTINLPTYTLEAVYEAVFGQPKEKVYAEEITTAWETGENLERVARYSMEDAKVTYELGKEFLPMEAQLSRLIGQSLWDVSRSSTGNLVEWFLLRKAYERNELAPNKPDEKELARRRQSYEGGYVKEPERGLWENIVYLDFRSLYPSIIITHNVSPDTLNREGCKEYDVAPQVGHRFCKDFPGFIPSLLGDLLEERQKIKKKMKATIDPIERKLLDYRQRAIKILANSYYGYYGYARARWYCKECAESVTAWGREYITMTIKEIEEKYGFKVIYSDTDGFFATIPGADAETVKKKAMEFLKYINAKLPGALELEYEGFYKRGFFVTKKKYAVIDEEGKITTRGLEIVRRDWSEIAKETQARVLEALLKDGDVEKAVRIVKEVTEKLSKYEVPPEKLVIHEQITRDLKDYKATGPHVAVAKRLAARGVKIRPGTVISYIVLKGSGRIGDRAIPFDEFDPTKHKYDAEYYIENQVLPAVERILRAFGYRKEDLRYQKTRQVGLSAWLKPKGT

SEQ ID NO: 112 - protein, 774 aa, synthetic construct
MILDTDYITEDGKPVIRIFKKENGEFKIEYDRTFENYFYALLKDDSAIEEVKKITAERHGTVVTVKRVEKVQKKFLGRPVEVWKLYFTHPQDVPAIRDKIREHPAVIDIYEYDIPFAKRYLIDKGLVPMEGDEELKMLAFDIETLYHEGEEFAEGPILMISYADEEGARVITWKNVDLPYVDVVSTEREMIKRFLRVVKEKDPDVLITYNGDNFDFAYLKKRCEKLGINFALGRDGSEPKIQRMGDRFAVEVKGRIHFDLYPVIRRTINLPTYTLEAVYEAVFGQPKEKVYAEEITTAWETGENLERVARYSMEDAKVTYELGKEFLPMEAQLSRLIGQSLWDVSRSSTGNLVEWFLLRKAYERNELAPNKPDEKELARRRQSYEGGYVKEPERGLWENIVYLDFRSLYPSIIITHNVSPDTLNREGCKEYDVAPQVGHRFCKDFPGFIPSLLGDLLEERQKIKKKMKATIDPIERKLLDYRQRAIKILANSYYGYYGYARARWYCKECAESVTAWGREYITMTIKEIEEKYGFKVIYSDTDGFFATIPGADAETVKKKAMEFLKYINAKLPGALELEYEGFYKRGFFVTKKKYAVIDEEGKITTRGLEIVRRDWSEIAKETQARVLEALLKDGDVEKAVRIVKEVTEKLSKYEVPPEKLVIHEQITRDLKDYKATGPHVAVAKRLAARGVKIRPGTVISYIVLKGSGRIGDRAIPFDEFDPTKHKYDAEYYIENQVLPAVERILRAFGYRKEDLRYQKTRQVGLSAWLKPKGT

SEQ ID NO: 113 - protein, 774 aa, synthetic construct
MILDTDYITEDGKPVIRIFKKENGEFKIEYDRTFEQYFYALLKDDSAIEEVKKITAERHGTVVTVKRVEKVQKKFLGRPVEVWKLYFTHPQDVPAIRDKIREHPAVIDIYEYDIPFAKRYLIDKGLVPMEGDEELKMLAFDIETLYHEGEEFAEGPILMISYADEEGARVITWKNVDLPYVDVVSTEREMIKRFLRVVKEKDPDVLITYNGDNFDFAYLKKRCEKLGINFALGRDGSEPKIQRMGDRFAVEVKGRIHFDLYPVIRRTINLPTYTLEAVYEAVFGQPKEKVYAEEITTAWETGENLERVARYSMEDAKVTYELGKEFLPMEAQLSRLIGQSLWDVSRSSTGNLVEWFLLRKAYERNELAPNKPDEKELARRRQSYEGGYVKEPERGLWENIVYLDFRSLYPSIIITHNVSPDTLNREGCKEYDVAPQVGHRFCKDFPGFIPSLLGDLLEERQKIKKKMKATIDPIERKLLDYRQRAIKILANSYYGYYGYARARWYCKECAESVTAWGREYITMTIKEIEEKYGFKVIYSDTDGFFATIPGADAETVKKKAMEFLKYINAKLPGALELEYEGFYKRGFFVTKKKYAVIDEEGKITTRGLEIVRRDWSEIAKETQARVLEALLKDGDVEKAVRIVKEVTEKLSKYEVPPEKLVIHEQITRDLKDYKATGPHVAVAKRLAARGVKIRPGTVISYIVLKGSGRIGDRAIPFDEFDPTKHKYDAEYYIENQVLPAVERILRAFGYRKEDLRYQKTRQVGLSAWLKPKGT

SEQ ID NO: 114 - protein, 774 aa, synthetic construct
MILDTDYITEDGKPVIRIFKKENGEFKIEYDRTFERYFYALLKDDSAIEEVKKITAERHGTVVTVKRVEKVQKKFLGRPVEVWKLYFTHPQDVPAIRDKIREHPAVIDIYEYDIPFAKRYLIDKGLVPMEGDEELKMLAFDIETLYHEGEEFAEGPILMISYADEEGARVITWKNVDLPYVDVVSTEREMIKRFLRVVKEKDPDVLITYNGDNFDFAYLKKRCEKLGINFALGRDGSEPKIQRMGDRFAVEVKGRIHFDLYPVIRRTINLPTYTLEAVYEAVFGQPKEKVYAEEITTAWETGENLERVARYSMEDAKVTYELGKEFLPMEAQLSRLIGQSLWDVSRSSTGNLVEWFLLRKAYERNELAPNKPDEKELARRRQSYEGGYVKEPERGLWENIVYLDFRSLYPSIIITHNVSPDTLNREGCKEYDVAPQVGHRFCKDFPGFIPSLLGDLLEERQKIKKKMKATIDPIERKLLDYRQRAIKILANSYYGYYGYARARWYCKECAESVTAWGREYITMTIKEIEEKYGFKVIYSDTDGFFATIPGADAETVKKKAMEFLKYINAKLPGALELEYEGFYKRGFFVTKKKYAVIDEEGKITTRGLEIVRRDWSEIAKETQARVLEALLKDGDVEKAVRIVKEVTEKLSKYEVPPEKLVIHEQITRDLKDYKATGPHVAVAKRLAARGVKIRPGTVISYIVLKGSGRIGDRAIPFDEFDPTKHKYDAEYYIENQVLPAVERILRAFGYRKEDLRYQKTRQVGLSAWLKPKGT

SEQ ID NO: 115 - protein, 774 aa, synthetic construct
MILDTDYITEDGKPVIRIFKKENGEFKIEYDRTFETYFYALLKDDSAIEEVKKITAERHGTVVTVKRVEKVQKKFLGRPVEVWKLYFTHPQDVPAIRDKIREHPAVIDIYEYDIPFAKRYLIDKGLVPMEGDEELKMLAFDIETLYHEGEEFAEGPILMISYADEEGARVITWKNVDLPYVDVVSTEREMIKRFLRVVKEKDPDVLITYNGDNFDFAYLKKRCEKLGINFALGRDGSEPKIQRMGDRFAVEVKGRIHFDLYPVIRRTINLPTYTLEAVYEAVFGQPKEKVYAEEITTAWETGENLERVARYSMEDAKVTYELGKEFLPMEAQLSRLIGQSLWDVSRSSTGNLVEWFLLRKAYERNELAPNKPDEKELARRRQSYEGGYVKEPERGLWENIVYLDFRSLYPSIIITHNVSPDTLNREGCKEYDVAPQVGHRFCKDFPGFIPSLLGDLLEERQKIKKKMKATIDPIERKLLDYRQRAIKILANSYYGYYGYARARWYCKECAESVTAWGREYITMTIKEIEEKYGFKVIYSDTDGFFATIPGADAETVKKKAMEFLKYINAKLPGALELEYEGFYKRGFFVTKKKYAVIDEEGKITTRGLEIVRRDWSEIAKETQARVLEALLKDGDVEKAVRIVKEVTEKLSKYEVPPEKLVIHEQITRDLKDYKATGPHVAVAKRLAARGVKIRPGTVISYIVLKGSGRIGDRAIPFDEFDPTKHKYDAEYYIENQVLPAVERILRAFGYRKEDLRYQKTRQVGLSAWLKPKGT

SEQ ID NO: 116 - protein, 774 aa, synthetic construct
MILDTDYITEDGKPVIRIFKKENGEFKIEYDRTFEVYFYALLKDDSAIEEVKKITAERHGTVVTVKRVEKVQKKFLGRPVEVWKLYFTHPQDVPAIRDKIREHPAVIDIYEYDIPFAKRYLIDKGLVPMEGDEELKMLAFDIETLYHEGEEFAEGPILMISYADEEGARVITWKNVDLPYVDVVSTEREMIKRFLRVVKEKDPDVLITYNGDNFDFAYLKKRCEKLGINFALGRDGSEPKIQRMGDRFAVEVKGRIHFDLYPVIRRTINLPTYTLEAVYEAVFGQPKEKVYAEEITTAWETGENLERVARYSMEDAKVTYELGKEFLPMEAQLSRLIGQSLWDVSRSSTGNLVEWFLLRKAYERNELAPNKPDEKELARRRQSYEGGYVKEPERGLWENIVYLDFRSLYPSIIITHNVSPDTLNREGCKEYDVAPQVGHRFCKDFPGFIPSLLGDLLEERQKIKKKMKATIDPIERKLLDYRQRAIKILANSYYGYYGYARARWYCKECAESVTAWGREYITMTIKEIEEKYGFKVIYSDTDGFFATIPGADAETVKKKAMEFLKYINAKLPGALELEYEGFYKRGFFVTKKKYAVIDEEGKITTRGLEIVRRDWSEIAKETQARVLEALLKDGDVEKAVRIVKEVTEKLSKYEVPPEKLVIHEQITRDLKDYKATGPHVAVAKRLAARGVKIRPGTVISYIVLKGSGRIGDRAIPFDEFDPTKHKYDAEYYIENQVLPAVERILRAFGYRKEDLRYQKTRQVGLSAWLKPKGT

SEQ ID NO: 117 - protein, 774 aa, synthetic construct
MILDTDYITEDGKPVIRIFKKENGEFKIEYDRTFEWYFYALLKDDSAIEEVKKITAERHGTVVTVKRVEKVQKKFLGRPVEVWKLYFTHPQDVPAIRDKIREHPAVIDIYEYDIPFAKRYLIDKGLVPMEGDEELKMLAFDIETLYHEGEEFAEGPILMISYADEEGARVITWKNVDLPYVDVVSTEREMIKRFLRVVKEKDPDVLITYNGDNFDFAYLKKRCEKLGINFALGRDGSEPKIQRMGDRFAVEVKGRIHFDLYPVIRRTINLPTYTLEAVYEAVFGQPKEKVYAEEITTAWETGENLERVARYSMEDAKVTYELGKEFLPMEAQLSRLIGQSLWDVSRSSTGNLVEWFLLRKAYERNELAPNKPDEKELARRRQSYEGGYVKEPERGLWENIVYLDFRSLYPSIIITHNVSPDTLNREGCKEYDVAPQVGHRFCKDFPGFIPSLLGDLLEERQKIKKKMKATIDPIERKLLDYRQRAIKILANSYYGYYGYARARWYCKECAESVTAWGREYITMTIKEIEEKYGFKVIYSDTDGFFATIPGADAETVKKKAMEFLKYINAKLPGALELEYEGFYKRGFFVTKKKYAVIDEEGKITTRGLEIVRRDWSEIAKETQARVLEALLKDGDVEKAVRIVKEVTEKLSKYEVPPEKLVIHEQITRDLKDYKATGPHVAVAKRLAARGVKIRPGTVISYIVLKGSGRIGDRAIPFDEFDPTKHKYDAEYYIENQVLPAVERILRAFGYRKEDLRYQKTRQVGLSAWLKPKGT

SEQ ID NO: 118 - protein, 774 aa, synthetic construct
MILDTDYITEDGKPVIRIFKKENGEFKIEYDRTFEYYFYALLKDDSAIEEVKKITAERHGTVVTVKRVEKVQKKFLGRPVEVWKLYFTHPQDVPAIRDKIREHPAVIDIYEYDIPFAKRYLIDKGLVPMEGDEELKMLAFDIETLYHEGEEFAEGPILMISYADEEGARVITWKNVDLPYVDVVSTEREMIKRFLRVVKEKDPDVLITYNGDNFDFAYLKKRCEKLGINFALGRDGSEPKIQRMGDRFAVEVKGRIHFDLYPVIRRTINLPTYTLEAVYEAVFGQPKEKVYAEEITTAWETGENLERVARYSMEDAKVTYELGKEFLPMEAQLSRLIGQSLWDVSRSSTGNLVEWFLLRKAYERNELAPNKPDEKELARRRQSYEGGYVKEPERGLWENIVYLDFRSLYPSIIITHNVSPDTLNREGCKEYDVAPQVGHRFCKDFPGFIPSLLGDLLEERQKIKKKMKATIDPIERKLLDYRQRAIKILANSYYGYYGYARARWYCKECAESVTAWGREYITMTIKEIEEKYGFKVIYSDTDGFFATIPGADAETVKKKAMEFLKYINAKLPGALELEYEGFYKRGFFVTKKKYAVIDEEGKITTRGLEIVRRDWSEIAKETQARVLEALLKDGDVEKAVRIVKEVTEKLSKYEVPPEKLVIHEQITRDLKDYKATGPHVAVAKRLAARGVKIRPGTVISYIVLKGSGRIGDRAIPFDEFDPTKHKYDAEYYIENQVLPAVERILRAFGYRKEDLRYQKTRQVGLSAWLKPKGT

SEQ ID NO: 119 - protein, 774 aa, synthetic construct
MILDTDYITEDGKPVIRIFKKENGEFKIEYDRTFEPAFYALLKDDSAIEEVKKITAERHGTVVTVKRVEKVQKKFLGRPVEVWKLYFTHPQDVPAIRDKIREHPAVIDIYEYDIPFAKRYLIDKGLVPMEGDEELKMLAFDIETLYHEGEEFAEGPILMISYADEEGARVITWKNVDLPYVDVVSTEREMIKRFLRVVKEKDPDVLITYNGDNFDFAYLKKRCEKLGINFALGRDGSEPKIQRMGDRFAVEVKGRIHFDLYPVIRRTINLPTYTLEAVYEAVFGQPKEKVYAEEITTAWETGENLERVARYSMEDAKVTYELGKEFLPMEAQLSRLIGQSLWDVSRSSTGNLVEWFLLRKAYERNELAPNKPDEKELARRRQSYEGGYVKEPERGLWENIVYLDFRSLYPSIIITHNVSPDTLNREGCKEYDVAPQVGHRFCKDFPGFIPSLLGDLLEERQKIKKKMKATIDPIERKLLDYRQRAIKILANSYYGYYGYARARWYCKECAESVTAWGREYITMTIKEIEEKYGFKVIYSDTDGFFATIPGADAETVKKKAMEFLKYINAKLPGALELEYEGFYKRGFFVTKKKYAVIDEEGKITTRGLEIVRRDWSEIAKETQARVLEALLKDGDVEKAVRIVKEVTEKLSKYEVPPEKLVIHEQITRDLKDYKATGPHVAVAKRLAARGVKIRPGTVISYIVLKGSGRIGDRAIPFDEFDPTKHKYDAEYYIENQVLPAVERILRAFGYRKEDLRYQKTRQVGLSAWLKPKGT

SEQ ID NO: 120 - protein, 774 aa, synthetic construct
MILDTDYITEDGKPVIRIFKKENGEFKIEYDRTFEPDFYALLKDDSAIEEVKKITAERHGTVVTVKRVEKVQKKFLGRPVEVWKLYFTHPQDVPAIRDKIREHPAVIDIYEYDIPFAKRYLIDKGLVPMEGDEELKMLAFDIETLYHEGEEFAEGPILMISYADEEGARVITWKNVDLPYVDVVSTEREMIKRFLRVVKEKDPDVLITYNGDNFDFAYLKKRCEKLGINFALGRDGSEPKIQRMGDRFAVEVKGRIHFDLYPVIRRTINLPTYTLEAVYEAVFGQPKEKVYAEEITTAWETGENLERVARYSMEDAKVTYELGKEFLPMEAQLSRLIGQSLWDVSRSSTGNLVEWFLLRKAYERNELAPNKPDEKELARRRQSYEGGYVKEPERGLWENIVYLDFRSLYPSIIITHNVSPDTLNREGCKEYDVAPQVGHRFCKDFPGFIPSLLGDLLEERQKIKKKMKATIDPIERKLLDYRQRAIKILANSYYGYYGYARARWYCKECAESVTAWGREYITMTIKEIEEKYGFKVIYSDTDGFFATIPGADAETVKKKAMEFLKYINAKLPGALELEYEGFYKRGFFVTKKKYAVIDEEGKITTRGLEIVRRDWSEIAKETQARVLEALLKDGDVEKAVRIVKEVTEKLSKYEVPPEKLVIHEQITRDLKDYKATGPHVAVAKRLAARGVKIRPGTVISYIVLKGSGRIGDRAIPFDEFDPTKHKYDAEYYIENQVLPAVERILRAFGYRKEDLRYQKTRQVGLSAWLKPKGT

SEQ ID NO: 121 - protein, 774 aa, synthetic construct
MILDTDYITEDGKPVIRIFKKENGEFKIEYDRTFEPEFYALLKDDSAIEEVKKITAERHGTVVTVKRVEKVQKKFLGRPVEVWKLYFTHPQDVPAIRDKIREHPAVIDIYEYDIPFAKRYLIDKGLVPMEGDEELKMLAFDIETLYHEGEEFAEGPILMISYADEEGARVITWKNVDLPYVDVVSTEREMIKRFLRVVKEKDPDVLITYNGDNFDFAYLKKRCEKLGINFALGRDGSEPKIQRMGDRFAVEVKGRIHFDLYPVIRRTINLPTYTLEAVYEAVFGQPKEKVYAEEITTAWETGENLERVARYSMEDAKVTYELGKEFLPMEAQLSRLIGQSLWDVSRSSTGNLVEWFLLRKAYERNELAPNKPDEKELARRRQSYEGGYVKEPERGLWENIVYLDFRSLYPSIIITHNVSPDTLNREGCKEYDVAPQVGHRFCKDFPGFIPSLLGDLLEERQKIKKKMKATIDPIERKLLDYRQRAIKILANSYYGYYGYARARWYCKECAESVTAWGREYITMTIKEIEEKYGFKVIYSDTDGFFATIPGADAETVKKKAMEFLKYINAKLPGALELEYEGFYKRGFFVTKKKYAVIDEEGKITTRGLEIVRRDWSEIAKETQARVLEALLKDGDVEKAVRIVKEVTEKLSKYEVPPEKLVIHEQITRDLKDYKATGPHVAVAKRLAARGVKIRPGTVISYIVLKGSGRIGDRAIPFDEFDPTKHKYDAEYYIENQVLPAVERILRAFGYRKEDLRYQKTRQVGLSAWLKPKGT

SEQ ID NO: 122 - protein, 774 aa, synthetic construct
MILDTDYITEDGKPVIRIFKKENGEFKIEYDRTFEPFFYALLKDDSAIEEVKKITAERHGTVVTVKRVEKVQKKFLGRPVEVWKLYFTHPQDVPAIRDKIREHPAVIDIYEYDIPFAKRYLIDKGLVPMEGDEELKMLAFDIETLYHEGEEFAEGPILMISYADEEGARVITWKNVDLPYVDVVSTEREMIKRFLRVVKEKDPDVLITYNGDNFDFAYLKKRCEKLGINFALGRDGSEPKIQRMGDRFAVEVKGRIHFDLYPVIRRTINLPTYTLEAVYEAVFGQPKEKVYAEEITTAWETGENLERVARYSMEDAKVTYELGKEFLPMEAQLSRLIGQSLWDVSRSSTGNLVEWFLLRKAYERNELAPNKPDEKELARRRQSYEGGYVKEPERGLWENIVYLDFRSLYPSIIITHNVSPDTLNREGCKEYDVAPQVGHRFCKDFPGFIPSLLGDLLEERQKIKKKMKATIDPIERKLLDYRQRAIKILANSYYGYYGYARARWYCKECAESVTAWGREYITMTIKEIEEKYGFKVIYSDTDGFFATIPGADAETVKKKAMEFLKYINAKLPGALELEYEGFYKRGFFVTKKKYAVIDEEGKITTRGLEIVRRDWSEIAKETQARVLEALLKDGDVEKAVRIVKEVTEKLSKYEVPPEKLVIHEQITRDLKDYKATGPHVAVAKRLAARGVKIRPGTVISYIVLKGSGRIGDRAIPFDEFDPTKHKYDAEYYIENQVLPAVERILRAFGYRKEDLRYQKTRQVGLSAWLKPKGT

SEQ ID NO: 123 - protein, 774 aa, synthetic construct
MILDTDYITEDGKPVIRIFKKENGEFKIEYDRTFEPGFYALLKDDSAIEEVKKITAERHGTVVTVKRVEKVQKKFLGRPVEVWKLYFTHPQDVPAIRDKIREHPAVIDIYEYDIPFAKRYLIDKGLVPMEGDEELKMLAFDIETLYHEGEEFAEGPILMISYADEEGARVITWKNVDLPYVDVVSTEREMIKRFLRVVKEKDPDVLITYNGDNFDFAYLKKRCEKLGINFALGRDGSEPKIQRMGDRFAVEVKGRIHFDLYPVIRRTINLPTYTLEAVYEAVFGQPKEKVYAEEITTAWETGENLERVARYSMEDAKVTYELGKEFLPMEAQLSRLIGQSLWDVSRSSTGNLVEWFLLRKAYERNELAPNKPDEKELARRRQSYEGGYVKEPERGLWENIVYLDFRSLYPSIIITHNVSPDTLNREGCKEYDVAPQVGHRFCKDFPGFIPSLLGDLLEERQKIKKKMKATIDPIERKLLDYRQRAIKILANSYYGYYGYARARWYCKECAESVTAWGREYITMTIKEIEEKYGFKVIYSDTDGFFATIPGADAETVKKKAMEFLKYINAKLPGALELEYEGFYKRGFFVTKKKYAVIDEEGKITTRGLEIVRRDWSEIAKETQARVLEALLKDGDVEKAVRIVKEVTEKLSKYEVPPEKLVIHEQITRDLKDYKATGPHVAVAKRLAARGVKIRPGTVISYIVLKGSGRIGDRAIPFDEFDPTKHKYDAEYYIENQVLPAVERILRAFGYRKEDLRYQKTRQVGLSAWLKPKGT

SEQ ID NO: 124 - protein, 774 aa, synthetic construct
MILDTDYITEDGKPVIRIFKKENGEFKIEYDRTFEPSFYALLKDDSAIEEVKKITAERHGTVVTVKRVEKVQKKFLGRPVEVWKLYFTHPQDVPAIRDKIREHPAVIDIYEYDIPFAKRYLIDKGLVPMEGDEELKMLAFDIETLYHEGEEFAEGPILMISYADEEGARVITWKNVDLPYVDVVSTEREMIKRFLRVVKEKDPDVLITYNGDNFDFAYLKKRCEKLGINFALGRDGSEPKIQRMGDRFAVEVKGRIHFDLYPVIRRTINLPTYTLEAVYEAVFGQPKEKVYAEEITTAWETGENLERVARYSMEDAKVTYELGKEFLPMEAQLSRLIGQSLWDVSRSSTGNLVEWFLLRKAYERNELAPNKPDEKELARRRQSYEGGYVKEPERGLWENIVYLDFRSLYPSIIITHNVSPDTLNREGCKEYDVAPQVGHRFCKDFPGFIPSLLGDLLEERQKIKKKMKATIDPIERKLLDYRQRAIKILANSYYGYYGYARARWYCKECAESVTAWGREYITMTIKEIEEKYGFKVIYSDTDGFFATIPGADAETVKKKAMEFLKYINAKLPGALELEYEGFYKRGFFVTKKKYAVIDEEGKITTRGLEIVRRDWSEIAKETQARVLEALLKDGDVEKAVRIVKEVTEKLSKYEVPPEKLVIHEQITRDLKDYKATGPHVAVAKRLAARGVKIRPGTVISYIVLKGSGRIGDRAIPFDEFDPTKHKYDAEYYIENQVLPAVERILRAFGYRKEDLRYQKTRQVGLSAWLKPKGT

SEQ ID NO: 125 - protein, 774 aa, synthetic construct
MILDTDYITEDGKPVIRIFKKENGEFKIEYDRTFEPTFYALLKDDSAIEEVKKITAERHGTVVTVKRVEKVQKKFLGRPVEVWKLYFTHPQDVPAIRDKIREHPAVIDIYEYDIPFAKRYLIDKGLVPMEGDEELKMLAFDIETLYHEGEEFAEGPILMISYADEEGARVITWKNVDLPYVDVVSTEREMIKRFLRVVKEKDPDVLITYNGDNFDFAYLKKRCEKLGINFALGRDGSEPKIQRMGDRFAVEVKGRIHFDLYPVIRRTINLPTYTLEAVYEAVFGQPKEKVYAEEITTAWETGENLERVARYSMEDAKVTYELGKEFLPMEAQLSRLIGQSLWDVSRSSTGNLVEWFLLRKAYERNELAPNKPDEKELARRRQSYEGGYVKEPERGLWENIVYLDFRSLYPSIIITHNVSPDTLNREGCKEYDVAPQVGHRFCKDFPGFIPSLLGDLLEERQKIKKKMKATIDPIERKLLDYRQRAIKILANSYYGYYGYARARWYCKECAESVTAWGREYITMTIKEIEEKYGFKVIYSDTDGFFATIPGADAETVKKKAMEFLKYINAKLPGALELEYEGFYKRGFFVTKKKYAVIDEEGKITTRGLEIVRRDWSEIAKETQARVLEALLKDGDVEKAVRIVKEVTEKLSKYEVPPEKLVIHEQITRDLKDYKATGPHVAVAKRLAARGVKIRPGTVISYIVLKGSGRIGDRAIPFDEFDPTKHKYDAEYYIENQVLPAVERILRAFGYRKEDLRYQKTRQVGLSAWLKPKGT

SEQ ID NO: 126 - protein, 774 aa, synthetic construct
MILDTDYITEDGKPVIRIFKKENGEFKIEYDRTFEPYFYALLKDDSAIEEVKKITAERHGTVVTVKRVEKLQKKFLGRPVEVWKLYFTHPQDVPAIRDKIREHPAVIDIYEYDIPFAKRYLIDKGLVPMEGDEELKMLAFDIETLYHEGEEFAEGPILMISYADEEGARVITWKNVDLPYVDVVSTEREMIKRFLRVVKEKDPDVLITYNGDNFDFAYLKKRCEKLGINFALGRDGSEPKIQRMGDRFAVEVKGRIHFDLYPVIRRTINLPTYTLEAVYEAVFGQPKEKVYAEEITTAWETGENLERVARYSMEDAKVTYELGKEFLPMEAQLSRLIGQSLWDVSRSSTGNLVEWFLLRKAYERNELAPNKPDEKELARRRQSYEGGYVKEPERGLWENIVYLDFRSLYPSIIITHNVSPDTLNREGCKEYDVAPQVGHRFCKDFPGFIPSLLGDLLEERQKIKKKMKATIDPIERKLLDYRQRAIKILANSYYGYYGYARARWYCKECAESVTAWGREYITMTIKEIEEKYGFKVIYSDTDGFFATIPGADAETVKKKAMEFLKYINAKLPGALELEYEGFYKRGFFVTKKKYAVIDEEGKITTRGLEIVRRDWSEIAKETQARVLEALLKDGDVEKAVRIVKEVTEKLSKYEVPPEKLVIHEQITRDLKDYKATGPHVAVAKRLAARGVKIRPGTVISYIVLKGSGRIGDRAIPFDEFDPTKHKYDAEYYIENQVLPAVERILRAFGYRKEDLRYQKTRQVGLSAWLKPKGT

SEQ ID NO: 127 - protein, 774 aa, synthetic construct
MILDTDYITEDGKPVIRIFKKENGEFKIEYDRTFEPYFYALLKDDSAIEEVKKITAERHGTVVTVKRVEKVQKKFLGRPVEVWKLYRTHPQDVPAIRDKIREHPAVIDIYEYDIPFAKRYLIDKGLVPMEGDEELKMLAFDIETLYHEGEEFAEGPILMISYADEEGARVITWKNVDLPYVDVVSTEREMIKRFLRVVKEKDPDVLITYNGDNFDFAYLKKRCEKLGINFALGRDGSEPKIQRMGDRFAVEVKGRIHFDLYPVIRRTINLPTYTLEAVYEAVFGQPKEKVYAEEITTAWETGENLERVARYSMEDAKVTYELGKEFLPMEAQLSRLIGQSLWDVSRSSTGNLVEWFLLRKAYERNELAPNKPDEKELARRRQSYEGGYVKEPERGLWENIVYLDFRSLYPSIIITHNVSPDTLNREGCKEYDVAPQVGHRFCKDFPGFIPSLLGDLLEERQKIKKKMKATIDPIERKLLDYRQRAIKILANSYYGYYGYARARWYCKECAESVTAWGREYITMTIKEIEEKYGFKVIYSDTDGFFATIPGADAETVKKKAMEFLKYINAKLPGALELEYEGFYKRGFFVTKKKYAVIDEEGKITTRGLEIVRRDWSEIAKETQARVLEALLKDGDVEKAVRIVKEVTEKLSKYEVPPEKLVIHEQITRDLKDYKATGPHVAVAKRLAARGVKIRPGTVISYIVLKGSGRIGDRAIPFDEFDPTKHKYDAEYYIENQVLPAVERILRAFGYRKEDLRYQKTRQVGLSAWLKPKGT

SEQ ID NO: 128 - protein, 774 aa, synthetic construct
MILDTDYITEDGKPVIRIFKKENGEFKIEYDRTFEPYFYALLKDDSAIEEVKKITAERHGTVVTVKRVEKVQKKFLGRPVEVWKLYFTDPQDVPAIRDKIREHPAVIDIYEYDIPFAKRYLIDKGLVPMEGDEELKMLAFDIETLYHEGEEFAEGPILMISYADEEGARVITWKNVDLPYVDVVSTEREMIKRFLRVVKEKDPDVLITYNGDNFDFAYLKKRCEKLGINFALGRDGSEPKIQRMGDRFAVEVKGRIHFDLYPVIRRTINLPTYTLEAVYEAVFGQPKEKVYAEEITTAWETGENLERVARYSMEDAKVTYELGKEFLPMEAQLSRLIGQSLWDVSRSSTGNLVEWFLLRKAYERNELAPNKPDEKELARRRQSYEGGYVKEPERGLWENIVYLDFRSLYPSIIITHNVSPDTLNREGCKEYDVAPQVGHRFCKDFPGFIPSLLGDLLEERQKIKKKMKATIDPIERKLLDYRQRAIKILANSYYGYYGYARARWYCKECAESVTAWGREYITMTIKEIEEKYGFKVIYSDTDGFFATIPGADAETVKKKAMEFLKYINAKLPGALELEYEGFYKRGFFVTKKKYAVIDEEGKITTRGLEIVRRDWSEIAKETQARVLEALLKDGDVEKAVRIVKEVTEKLSKYEVPPEKLVIHEQITRDLKDYKATGPHVAVAKRLAARGVKIRPGTVISYIVLKGSGRIGDRAIPFDEFDPTKHKYDAEYYIENQVLPAVERILRAFGYRKEDLRYQKTRQVGLSAWLKPKGT

SEQ ID NO: 129 - protein, 774 aa, synthetic construct
MILDTDYITEDGKPVIRIFKKENGEFKIEYDRTFEPYFYALLKDDSAIEEVKKITAERHGTVVTVKRVEKVQKKFLGRPVEVWKLYFTPPQDVPAIRDKIREHPAVIDIYEYDIPFAKRYLIDKGLVPMEGDEELKMLAFDIETLYHEGEEFAEGPILMISYADEEGARVITWKNVDLPYVDVVSTEREMIKRFLRVVKEKDPDVLITYNGDNFDFAYLKKRCEKLGINFALGRDGSEPKIQRMGDRFAVEVKGRIHFDLYPVIRRTINLPTYTLEAVYEAVFGQPKEKVYAEEITTAWETGENLERVARYSMEDAKVTYELGKEFLPMEAQLSRLIGQSLWDVSRSSTGNLVEWFLLRKAYERNELAPNKPDEKELARRRQSYEGGYVKEPERGLWENIVYLDFRSLYPSIIITHNVSPDTLNREGCKEYDVAPQVGHRFCKDFPGFIPSLLGDLLEERQKIKKKMKATIDPIERKLLDYRQRAIKILANSYYGYYGYARARWYCKECAESVTAWGREYITMTIKEIEEKYGFKVIYSDTDGFFATIPGADAETVKKKAMEFLKYINAKLPGALELEYEGFYKRGFFVTKKKYAVIDEEGKITTRGLEIVRRDWSEIAKETQARVLEALLKDGDVEKAVRIVKEVTEKLSKYEVPPEKLVIHEQITRDLKDYKATGPHVAVAKRLAARGVKIRPGTVISYIVLKGSGRIGDRAIPFDEFDPTKHKYDAEYYIENQVLPAVERILRAFGYRKEDLRYQKTRQVGLSAWLKPKGT

SEQ ID NO: 130 - protein, 774 aa, synthetic construct
MILDTDYITEDGKPVIRIFKKENGEFKIEYDRTFEPYFYALLKDDSAIEEVKKITAERHGTVVTVKRVEKVQKKFLGRPVEVWKLYFTWPQDVPAIRDKIREHPAVIDIYEYDIPFAKRYLIDKGLVPMEGDEELKMLAFDIETLYHEGEEFAEGPILMISYADEEGARVITWKNVDLPYVDVVSTEREMIKRFLRVVKEKDPDVLITYNGDNFDFAYLKKRCEKLGINFALGRDGSEPKIQRMGDRFAVEVKGRIHFDLYPVIRRTINLPTYTLEAVYEAVFGQPKEKVYAEEITTAWETGENLERVARYSMEDAKVTYELGKEFLPMEAQLSRLIGQSLWDVSRSSTGNLVEWFLLRKAYERNELAPNKPDEKELARRRQSYEGGYVKEPERGLWENIVYLDFRSLYPSIIITHNVSPDTLNREGCKEYDVAPQVGHRFCKDFPGFIPSLLGDLLEERQKIKKKMKATIDPIERKLLDYRQRAIKILANSYYGYYGYARARWYCKECAESVTAWGREYITMTIKEIEEKYGFKVIYSDTDGFFATIPGADAETVKKKAMEFLKYINAKLPGALELEYEGFYKRGFFVTKKKYAVIDEEGKITTRGLEIVRRDWSEIAKETQARVLEALLKDGDVEKAVRIVKEVTEKLSKYEVPPEKLVIHEQITRDLKDYKATGPHVAVAKRLAARGVKIRPGTVISYIVLKGSGRIGDRAIPFDEFDPTKHKYDAEYYIENQVLPAVERILRAFGYRKEDLRYQKTRQVGLSAWLKPKGT

SEQ ID NO: 131 - protein, 774 aa, synthetic construct
MILDTDYITEDGKPVIRIFKKENGEFKIEYDRTFEPYFYALLKDDSAIEEVKKITAERHGTVVTVKRVEKVQKKFLGRPVEVWKLYFTHCQDVPAIRDKIREHPAVIDIYEYDIPFAKRYLIDKGLVPMEGDEELKMLAFDIETLYHEGEEFAEGPILMISYADEEGARVITWKNVDLPYVDVVSTEREMIKRFLRVVKEKDPDVLITYNGDNFDFAYLKKRCEKLGINFALGRDGSEPKIQRMGDRFAVEVKGRIHFDLYPVIRRTINLPTYTLEAVYEAVFGQPKEKVYAEEITTAWETGENLERVARYSMEDAKVTYELGKEFLPMEAQLSRLIGQSLWDVSRSSTGNLVEWFLLRKAYERNELAPNKPDEKELARRRQSYEGGYVKEPERGLWENIVYLDFRSLYPSIIITHNVSPDTLNREGCKEYDVAPQVGHRFCKDFPGFIPSLLGDLLEERQKIKKKMKATIDPIERKLLDYRQRAIKILANSYYGYYGYARARWYCKECAESVTAWGREYITMTIKEIEEKYGFKVIYSDTDGFFATIPGADAETVKKKAMEFLKYINAKLPGALELEYEGFYKRGFFVTKKKYAVIDEEGKITTRGLEIVRRDWSEIAKETQARVLEALLKDGDVEKAVRIVKEVTEKLSKYEVPPEKLVIHEQITRDLKDYKATGPHVAVAKRLAARGVKIRPGTVISYIVLKGSGRIGDRAIPFDEFDPTKHKYDAEYYIENQVLPAVERILRAFGYRKEDLRYQKTRQVGLSAWLKPKGT

SEQ ID NO: 132 - protein, 774 aa, synthetic construct
MILDTDYITEDGKPVIRIFKKENGEFKIEYDRTFEPYFYALLKDDSAIEEVKKITAERHGTVVTVKRVEKVQKKFLGRPVEVWKLYFTHDQDVPAIRDKIREHPAVIDIYEYDIPFAKRYLIDKGLVPMEGDEELKMLAFDIETLYHEGEEFAEGPILMISYADEEGARVITWKNVDLPYVDVVSTEREMIKRFLRVVKEKDPDVLITYNGDNFDFAYLKKRCEKLGINFALGRDGSEPKIQRMGDRFAVEVKGRIHFDLYPVIRRTINLPTYTLEAVYEAVFGQPKEKVYAEEITTAWETGENLERVARYSMEDAKVTYELGKEFLPMEAQLSRLIGQSLWDVSRSSTGNLVEWFLLRKAYERNELAPNKPDEKELARRRQSYEGGYVKEPERGLWENIVYLDFRSLYPSIIITHNVSPDTLNREGCKEYDVAPQVGHRFCKDFPGFIPSLLGDLLEERQKIKKKMKATIDPIERKLLDYRQRAIKILANSYYGYYGYARARWYCKECAESVTAWGREYITMTIKEIEEKYGFKVIYSDTDGFFATIPGADAETVKKKAMEFLKYINAKLPGALELEYEGFYKRGFFVTKKKYAVIDEEGKITTRGLEIVRRDWSEIAKETQARVLEALLKDGDVEKAVRIVKEVTEKLSKYEVPPEKLVIHEQITRDLKDYKATGPHVAVAKRLAARGVKIRPGTVISYIVLKGSGRIGDRAIPFDEFDPTKHKYDAEYYIENQVLPAVERILRAFGYRKEDLRYQKTRQVGLSAWLKPKGT

SEQ ID NO: 133 - protein, 774 aa, synthetic construct
MILDTDYITEDGKPVIRIFKKENGEFKIEYDRTFEPYFYALLKDDSAIEEVKKITAERHGTVVTVKRVEKVQKKFLGRPVEVWKLYFTHEQDVPAIRDKIREHPAVIDIYEYDIPFAKRYLIDKGLVPMEGDEELKMLAFDIETLYHEGEEFAEGPILMISYADEEGARVITWKNVDLPYVDVVSTEREMIKRFLRVVKEKDPDVLITYNGDNFDFAYLKKRCEKLGINFALGRDGSEPKIQRMGDRFAVEVKGRIHFDLYPVIRRTINLPTYTLEAVYEAVFGQPKEKVYAEEITTAWETGENLERVARYSMEDAKVTYELGKEFLPMEAQLSRLIGQSLWDVSRSSTGNLVEWFLLRKAYERNELAPNKPDEKELARRRQSYEGGYVKEPERGLWENIVYLDFRSLYPSIIITHNVSPDTLNREGCKEYDVAPQVGHRFCKDFPGFIPSLLGDLLEERQKIKKKMKATIDPIERKLLDYRQRAIKILANSYYGYYGYARARWYCKECAESVTAWGREYITMTIKEIEEKYGFKVIYSDTDGFFATIPGADAETVKKKAMEFLKYINAKLPGALELEYEGFYKRGFFVTKKKYAVIDEEGKITTRGLEIVRRDWSEIAKETQARVLEALLKDGDVEKAVRIVKEVTEKLSKYEVPPEKLVIHEQITRDLKDYKATGPHVAVAKRLAARGVKIRPGTVISYIVLKGSGRIGDRAIPFDEFDPTKHKYDAEYYIENQVLPAVERILRAFGYRKEDLRYQKTRQVGLSAWLKPKGT

SEQ ID NO: 134 - protein, 774 aa, synthetic construct
MILDTDYITEDGKPVIRIFKKENGEFKIEYDRTFEPYFYALLKDDSAIEEVKKITAERHGTVVTVKRVEKVQKKFLGRPVEVWKLYFTHFQDVPAIRDKIREHPAVIDIYEYDIPFAKRYLIDKGLVPMEGDEELKMLAFDIETLYHEGEEFAEGPILMISYADEEGARVITWKNVDLPYVDVVSTEREMIKRFLRVVKEKDPDVLITYNGDNFDFAYLKKRCEKLGINFALGRDGSEPKIQRMGDRFAVEVKGRIHFDLYPVIRRTINLPTYTLEAVYEAVFGQPKEKVYAEEITTAWETGENLERVARYSMEDAKVTYELGKEFLPMEAQLSRLIGQSLWDVSRSSTGNLVEWFLLRKAYERNELAPNKPDEKELARRRQSYEGGYVKEPERGLWENIVYLDFRSLYPSIIITHNVSPDTLNREGCKEYDVAPQVGHRFCKDFPGFIPSLLGDLLEERQKIKKKMKATIDPIERKLLDYRQRAIKILANSYYGYYGYARARWYCKECAESVTAWGREYITMTIKEIEEKYGFKVIYSDTDGFFATIPGADAETVKKKAMEFLKYINAKLPGALELEYEGFYKRGFFVTKKKYAVIDEEGKITTRGLEIVRRDWSEIAKETQARVLEALLKDGDVEKAVRIVKEVTEKLSKYEVPPEKLVIHEQITRDLKDYKATGPHVAVAKRLAARGVKIRPGTVISYIVLKGSGRIGDRAIPFDEFDPTKHKYDAEYYIENQVLPAVERILRAFGYRKEDLRYQKTRQVGLSAWLKPKGT

SEQ ID NO: 135 - protein, 774 aa, synthetic construct
MILDTDYITEDGKPVIRIFKKENGEFKIEYDRTFEPYFYALLKDDSAIEEVKKITAERHGTVVTVKRVEKVQKKFLGRPVEVWKLYFTHGQDVPAIRDKIREHPAVIDIYEYDIPFAKRYLIDKGLVPMEGDEELKMLAFDIETLYHEGEEFAEGPILMISYADEEGARVITWKNVDLPYVDVVSTEREMIKRFLRVVKEKDPDVLITYNGDNFDFAYLKKRCEKLGINFALGRDGSEPKIQRMGDRFAVEVKGRIHFDLYPVIRRTINLPTYTLEAVYEAVFGQPKEKVYAEEITTAWETGENLERVARYSMEDAKVTYELGKEFLPMEAQLSRLIGQSLWDVSRSSTGNLVEWFLLRKAYERNELAPNKPDEKELARRRQSYEGGYVKEPERGLWENIVYLDFRSLYPSIIITHNVSPDTLNREGCKEYDVAPQVGHRFCKDFPGFIPSLLGDLLEERQKIKKKMKATIDPIERKLLDYRQRAIKILANSYYGYYGYARARWYCKECAESVTAWGREYITMTIKEIEEKYGFKVIYSDTDGFFATIPGADAETVKKKAMEFLKYINAKLPGALELEYEGFYKRGFFVTKKKYAVIDEEGKITTRGLEIVRRDWSEIAKETQARVLEALLKDGDVEKAVRIVKEVTEKLSKYEVPPEKLVIHEQITRDLKDYKATGPHVAVAKRLAARGVKIRPGTVISYIVLKGSGRIGDRAIPFDEFDPTKHKYDAEYYIENQVLPAVERILRAFGYRKEDLRYQKTRQVGLSAWLKPKGT

SEQ ID NO: 136 - protein, 774 aa, synthetic construct
MILDTDYITEDGKPVIRIFKKENGEFKIEYDRTFEPYFYALLKDDSAIEEVKKITAERHGTVVTVKRVEKVQKKFLGRPVEVWKLYFTHHQDVPAIRDKIREHPAVIDIYEYDIPFAKRYLIDKGLVPMEGDEELKMLAFDIETLYHEGEEFAEGPILMISYADEEGARVITWKNVDLPYVDVVSTEREMIKRFLRVVKEKDPDVLITYNGDNFDFAYLKKRCEKLGINFALGRDGSEPKIQRMGDRFAVEVKGRIHFDLYPVIRRTINLPTYTLEAVYEAVFGQPKEKVYAEEITTAWETGENLERVARYSMEDAKVTYELGKEFLPMEAQLSRLIGQSLWDVSRSSTGNLVEWFLLRKAYERNELAPNKPDEKELARRRQSYEGGYVKEPERGLWENIVYLDFRSLYPSIIITHNVSPDTLNREGCKEYDVAPQVGHRFCKDFPGFIPSLLGDLLEERQKIKKKMKATIDPIERKLLDYRQRAIKILANSYYGYYGYARARWYCKECAESVTAWGREYITMTIKEIEEKYGFKVIYSDTDGFFATIPGADAETVKKKAMEFLKYINAKLPGALELEYEGFYKRGFFVTKKKYAVIDEEGKITTRGLEIVRRDWSEIAKETQARVLEALLKDGDVEKAVRIVKEVTEKLSKYEVPPEKLVIHEQITRDLKDYKATGPHVAVAKRLAARGVKIRPGTVISYIVLKGSGRIGDRAIPFDEFDPTKHKYDAEYYIENQVLPAVERILRAFGYRKEDLRYQKTRQVGLSAWLKPKGT

SEQ ID NO: 137 - protein, 774 aa, synthetic construct
MILDTDYITEDGKPVIRIFKKENGEFKIEYDRTFEPYFYALLKDDSAIEEVKKITAERHGTVVTVKRVEKVQKKFLGRPVEVWKLYFTHIQDVPAIRDKIREHPAVIDIYEYDIPFAKRYLIDKGLVPMEGDEELKMLAFDIETLYHEGEEFAEGPILMISYADEEGARVITWKNVDLPYVDVVSTEREMIKRFLRVVKEKDPDVLITYNGDNFDFAYLKKRCEKLGINFALGRDGSEPKIQRMGDRFAVEVKGRIHFDLYPVIRRTINLPTYTLEAVYEAVFGQPKEKVYAEEITTAWETGENLERVARYSMEDAKVTYELGKEFLPMEAQLSRLIGQSLWDVSRSSTGNLVEWFLLRKAYERNELAPNKPDEKELARRRQSYEGGYVKEPERGLWENIVYLDFRSLYPSIIITHNVSPDTLNREGCKEYDVAPQVGHRFCKDFPGFIPSLLGDLLEERQKIKKKMKATIDPIERKLLDYRQRAIKILANSYYGYYGYARARWYCKECAESVTAWGREYITMTIKEIEEKYGFKVIYSDTDGFFATIPGADAETVKKKAMEFLKYINAKLPGALELEYEGFYKRGFFVTKKKYAVIDEEGKITTRGLEIVRRDWSEIAKETQARVLEALLKDGDVEKAVRIVKEVTEKLSKYEVPPEKLVIHEQITRDLKDYKATGPHVAVAKRLAARGVKIRPGTVISYIVLKGSGRIGDRAIPFDEFDPTKHKYDAEYYIENQVLPAVERILRAFGYRKEDLRYQKTRQVGLSAWLKPKGT

SEQ ID NO: 138 - protein, 774 aa, synthetic construct
MILDTDYITEDGKPVIRIFKKENGEFKIEYDRTFEPYFYALLKDDSAIEEVKKITAERHGTVVTVKRVEKVQKKFLGRPVEVWKLYFTHKQDVPAIRDKIREHPAVIDIYEYDIPFAKRYLIDKGLVPMEGDEELKMLAFDIETLYHEGEEFAEGPILMISYADEEGARVITWKNVDLPYVDVVSTEREMIKRFLRVVKEKDPDVLITYNGDNFDFAYLKKRCEKLGINFALGRDGSEPKIQRMGDRFAVEVKGRIHFDLYPVIRRTINLPTYTLEAVYEAVFGQPKEKVYAEEITTAWETGENLERVARYSMEDAKVTYELGKEFLPMEAQLSRLIGQSLWDVSRSSTGNLVEWFLLRKAYERNELAPNKPDEKELARRRQSYEGGYVKEPERGLWENIVYLDFRSLYPSIIITHNVSPDTLNREGCKEYDVAPQVGHRFCKDFPGFIPSLLGDLLEERQKIKKKMKATIDPIERKLLDYRQRAIKILANSYYGYYGYARARWYCKECAESVTAWGREYITMTIKEIEEKYGFKVIYSDTDGFFATIPGADAETVKKKAMEFLKYINAKLPGALELEYEGFYKRGFFVTKKKYAVIDEEGKITTRGLEIVRRDWSEIAKETQARVLEALLKDGDVEKAVRIVKEVTEKLSKYEVPPEKLVIHEQITRDLKDYKATGPHVAVAKRLAARGVKIRPGTVISYIVLKGSGRIGDRAIPFDEFDPTKHKYDAEYYIENQVLPAVERILRAFGYRKEDLRYQKTRQVGLSAWLKPKGT

SEQ ID NO: 139 - protein, 774 aa, synthetic construct
MILDTDYITEDGKPVIRIFKKENGEFKIEYDRTFEPYFYALLKDDSAIEEVKKITAERHGTVVTVKRVEKVQKKFLGRPVEVWKLYFTHLQDVPAIRDKIREHPAVIDIYEYDIPFAKRYLIDKGLVPMEGDEELKMLAFDIETLYHEGEEFAEGPILMISYADEEGARVITWKNVDLPYVDVVSTEREMIKRFLRVVKEKDPDVLITYNGDNFDFAYLKKRCEKLGINFALGRDGSEPKIQRMGDRFAVEVKGRIHFDLYPVIRRTINLPTYTLEAVYEAVFGQPKEKVYAEEITTAWETGENLERVARYSMEDAKVTYELGKEFLPMEAQLSRLIGQSLWDVSRSSTGNLVEWFLLRKAYERNELAPNKPDEKELARRRQSYEGGYVKEPERGLWENIVYLDFRSLYPSIIITHNVSPDTLNREGCKEYDVAPQVGHRFCKDFPGFIPSLLGDLLEERQKIKKKMKATIDPIERKLLDYRQRAIKILANSYYGYYGYARARWYCKECAESVTAWGREYITMTIKEIEEKYGFKVIYSDTDGFFATIPGADAETVKKKAMEFLKYINAKLPGALELEYEGFYKRGFFVTKKKYAVIDEEGKITTRGLEIVRRDWSEIAKETQARVLEALLKDGDVEKAVRIVKEVTEKLSKYEVPPEKLVIHEQITRDLKDYKATGPHVAVAKRLAARGVKIRPGTVISYIVLKGSGRIGDRAIPFDEFDPTKHKYDAEYYIENQVLPAVERILRAFGYRKEDLRYQKTRQVGLSAWLKPKGT

SEQ ID NO: 140 - protein, 774 aa, synthetic construct
MILDTDYITEDGKPVIRIFKKENGEFKIEYDRTFEPYFYALLKDDSAIEEVKKITAERHGTVVTVKRVEKVQKKFLGRPVEVWKLYFTHMQDVPAIRDKIREHPAVIDIYEYDIPFAKRYLIDKGLVPMEGDEELKMLAFDIETLYHEGEEFAEGPILMISYADEEGARVITWKNVDLPYVDVVSTEREMIKRFLRVVKEKDPDVLITYNGDNFDFAYLKKRCEKLGINFALGRDGSEPKIQRMGDRFAVEVKGRIHFDLYPVIRRTINLPTYTLEAVYEAVFGQPKEKVYAEEITTAWETGENLERVARYSMEDAKVTYELGKEFLPMEAQLSRLIGQSLWDVSRSSTGNLVEWFLLRKAYERNELAPNKPDEKELARRRQSYEGGYVKEPERGLWENIVYLDFRSLYPSIIITHNVSPDTLNREGCKEYDVAPQVGHRFCKDFPGFIPSLLGDLLEERQKIKKKMKATIDPIERKLLDYRQRAIKILANSYYGYYGYARARWYCKECAESVTAWGREYITMTIKEIEEKYGFKVIYSDTDGFFATIPGADAETVKKKAMEFLKYINAKLPGALELEYEGFYKRGFFVTKKKYAVIDEEGKITTRGLEIVRRDWSEIAKETQARVLEALLKDGDVEKAVRIVKEVTEKLSKYEVPPEKLVIHEQITRDLKDYKATGPHVAVAKRLAARGVKIRPGTVISYIVLKGSGRIGDRAIPFDEFDPTKHKYDAEYYIENQVLPAVERILRAFGYRKEDLRYQKTRQVGLSAWLKPKGT

SEQ ID NO: 141 - protein, 774 aa, synthetic construct
MILDTDYITEDGKPVIRIFKKENGEFKIEYDRTFEPYFYALLKDDSAIEEVKKITAERHGTVVTVKRVEKVQKKFLGRPVEVWKLYFTHNQDVPAIRDKIREHPAVIDIYEYDIPFAKRYLIDKGLVPMEGDEELKMLAFDIETLYHEGEEFAEGPILMISYADEEGARVITWKNVDLPYVDVVSTEREMIKRFLRVVKEKDPDVLITYNGDNFDFAYLKKRCEKLGINFALGRDGSEPKIQRMGDRFAVEVKGRIHFDLYPVIRRTINLPTYTLEAVYEAVFGQPKEKVYAEEITTAWETGENLERVARYSMEDAKVTYELGKEFLPMEAQLSRLIGQSLWDVSRSSTGNLVEWFLLRKAYERNELAPNKPDEKELARRRQSYEGGYVKEPERGLWENIVYLDFRSLYPSIIITHNVSPDTLNREGCKEYDVAPQVGHRFCKDFPGFIPSLLGDLLEERQKIKKKMKATIDPIERKLLDYRQRAIKILANSYYGYYGYARARWYCKECAESVTAWGREYITMTIKEIEEKYGFKVIYSDTDGFFATIPGADAETVKKKAMEFLKYINAKLPGALELEYEGFYKRGFFVTKKKYAVIDEEGKITTRGLEIVRRDWSEIAKETQARVLEALLKDGDVEKAVRIVKEVTEKLSKYEVPPEKLVIHEQITRDLKDYKATGPHVAVAKRLAARGVKIRPGTVISYIVLKGSGRIGDRAIPFDEFDPTKHKYDAEYYIENQVLPAVERILRAFGYRKEDLRYQKTRQVGLSAWLKPKGT

SEQ ID NO: 142 - protein, 774 aa, synthetic construct
MILDTDYITEDGKPVIRIFKKENGEFKIEYDRTFEPYFYALLKDDSAIEEVKKITAERHGTVVTVKRVEKVQKKFLGRPVEVWKLYFTHQQDVPAIRDKIREHPAVIDIYEYDIPFAKRYLIDKGLVPMEGDEELKMLAFDIETLYHEGEEFAEGPILMISYADEEGARVITWKNVDLPYVDVVSTEREMIKRFLRVVKEKDPDVLITYNGDNFDFAYLKKRCEKLGINFALGRDGSEPKIQRMGDRFAVEVKGRIHFDLYPVIRRTINLPTYTLEAVYEAVFGQPKEKVYAEEITTAWETGENLERVARYSMEDAKVTYELGKEFLPMEAQLSRLIGQSLWDVSRSSTGNLVEWFLLRKAYERNELAPNKPDEKELARRRQSYEGGYVKEPERGLWENIVYLDFRSLYPSIIITHNVSPDTLNREGCKEYDVAPQVGHRFCKDFPGFIPSLLGDLLEERQKIKKKMKATIDPIERKLLDYRQRAIKILANSYYGYYGYARARWYCKECAESVTAWGREYITMTIKEIEEKYGFKVIYSDTDGFFATIPGADAETVKKKAMEFLKYINAKLPGALELEYEGFYKRGFFVTKKKYAVIDEEGKITTRGLEIVRRDWSEIAKETQARVLEALLKDGDVEKAVRIVKEVTEKLSKYEVPPEKLVIHEQITRDLKDYKATGPHVAVAKRLAARGVKIRPGTVISYIVLKGSGRIGDRAIPFDEFDPTKHKYDAEYYIENQVLPAVERILRAFGYRKEDLRYQKTRQVGLSAWLKPKGT

SEQ ID NO: 143 - protein, 774 aa, synthetic construct
MILDTDYITEDGKPVIRIFKKENGEFKIEYDRTFEPYFYALLKDDSAIEEVKKITAERHGTVVTVKRVEKVQKKFLGRPVEVWKLYFTHRQDVPAIRDKIREHPAVIDIYEYDIPFAKRYLIDKGLVPMEGDEELKMLAFDIETLYHEGEEFAEGPILMISYADEEGARVITWKNVDLPYVDVVSTEREMIKRFLRVVKEKDPDVLITYNGDNFDFAYLKKRCEKLGINFALGRDGSEPKIQRMGDRFAVEVKGRIHFDLYPVIRRTINLPTYTLEAVYEAVFGQPKEKVYAEEITTAWETGENLERVARYSMEDAKVTYELGKEFLPMEAQLSRLIGQSLWDVSRSSTGNLVEWFLLRKAYERNELAPNKPDEKELARRRQSYEGGYVKEPERGLWENIVYLDFRSLYPSIIITHNVSPDTLNREGCKEYDVAPQVGHRFCKDFPGFIPSLLGDLLEERQKIKKKMKATIDPIERKLLDYRQRAIKILANSYYGYYGYARARWYCKECAESVTAWGREYITMTIKEIEEKYGFKVIYSDTDGFFATIPGADAETVKKKAMEFLKYINAKLPGALELEYEGFYKRGFFVTKKKYAVIDEEGKITTRGLEIVRRDWSEIAKETQARVLEALLKDGDVEKAVRIVKEVTEKLSKYEVPPEKLVIHEQITRDLKDYKATGPHVAVAKRLAARGVKIRPGTVISYIVLKGSGRIGDRAIPFDEFDPTKHKYDAEYYIENQVLPAVERILRAFGYRKEDLRYQKTRQVGLSAWLKPKGT

SEQ ID NO: 144 - protein, 774 aa, synthetic construct
MILDTDYITEDGKPVIRIFKKENGEFKIEYDRTFEPYFYALLKDDSAIEEVKKITAERHGTVVTVKRVEKVQKKFLGRPVEVWKLYFTHWQDVPAIRDKIREHPAVIDIYEYDIPFAKRYLIDKGLVPMEGDEELKMLAFDIETLYHEGEEFAEGPILMISYADEEGARVITWKNVDLPYVDVVSTEREMIKRFLRVVKEKDPDVLITYNGDNFDFAYLKKRCEKLGINFALGRDGSEPKIQRMGDRFAVEVKGRIHFDLYPVIRRTINLPTYTLEAVYEAVFGQPKEKVYAEEITTAWETGENLERVARYSMEDAKVTYELGKEFLPMEAQLSRLIGQSLWDVSRSSTGNLVEWFLLRKAYERNELAPNKPDEKELARRRQSYEGGYVKEPERGLWENIVYLDFRSLYPSIIITHNVSPDTLNREGCKEYDVAPQVGHRFCKDFPGFIPSLLGDLLEERQKIKKKMKATIDPIERKLLDYRQRAIKILANSYYGYYGYARARWYCKECAESVTAWGREYITMTIKEIEEKYGFKVIYSDTDGFFATIPGADAETVKKKAMEFLKYINAKLPGALELEYEGFYKRGFFVTKKKYAVIDEEGKITTRGLEIVRRDWSEIAKETQARVLEALLKDGDVEKAVRIVKEVTEKLSKYEVPPEKLVIHEQITRDLKDYKATGPHVAVAKRLAARGVKIRPGTVISYIVLKGSGRIGDRAIPFDEFDPTKHKYDAEYYIENQVLPAVERILRAFGYRKEDLRYQKTRQVGLSAWLKPKGT

SEQ ID NO: 145 - protein, 774 aa, synthetic construct
MILDTDYITEDGKPVIRIFKKENGEFKIEYDRTFEPYFYALLKDDSAIEEVKKITAERHGTVVTVKRVEKVQKKFLGRPVEVWKLYFTHYQDVPAIRDKIREHPAVIDIYEYDIPFAKRYLIDKGLVPMEGDEELKMLAFDIETLYHEGEEFAEGPILMISYADEEGARVITWKNVDLPYVDVVSTEREMIKRFLRVVKEKDPDVLITYNGDNFDFAYLKKRCEKLGINFALGRDGSEPKIQRMGDRFAVEVKGRIHFDLYPVIRRTINLPTYTLEAVYEAVFGQPKEKVYAEEITTAWETGENLERVARYSMEDAKVTYELGKEFLPMEAQLSRLIGQSLWDVSRSSTGNLVEWFLLRKAYERNELAPNKPDEKELARRRQSYEGGYVKEPERGLWENIVYLDFRSLYPSIIITHNVSPDTLNREGCKEYDVAPQVGHRFCKDFPGFIPSLLGDLLEERQKIKKKMKATIDPIERKLLDYRQRAIKILANSYYGYYGYARARWYCKECAESVTAWGREYITMTIKEIEEKYGFKVIYSDTDGFFATIPGADAETVKKKAMEFLKYINAKLPGALELEYEGFYKRGFFVTKKKYAVIDEEGKITTRGLEIVRRDWSEIAKETQARVLEALLKDGDVEKAVRIVKEVTEKLSKYEVPPEKLVIHEQITRDLKDYKATGPHVAVAKRLAARGVKIRPGTVISYIVLKGSGRIGDRAIPFDEFDPTKHKYDAEYYIENQVLPAVERILRAFGYRKEDLRYQKTRQVGLSAWLKPKGT

SEQ ID NO: 146 - protein, 774 aa, synthetic construct
MILDTDYITEDGKPVIRIFKKENGEFKIEYDRTFEPYFYALLKDDSAIEEVKKITAERHGTVVTVKRVEKVQKKFLGRPVEVWKLYFTHPDDVPAIRDKIREHPAVIDIYEYDIPFAKRYLIDKGLVPMEGDEELKMLAFDIETLYHEGEEFAEGPILMISYADEEGARVITWKNVDLPYVDVVSTEREMIKRFLRVVKEKDPDVLITYNGDNFDFAYLKKRCEKLGINFALGRDGSEPKIQRMGDRFAVEVKGRIHFDLYPVIRRTINLPTYTLEAVYEAVFGQPKEKVYAEEITTAWETGENLERVARYSMEDAKVTYELGKEFLPMEAQLSRLIGQSLWDVSRSSTGNLVEWFLLRKAYERNELAPNKPDEKELARRRQSYEGGYVKEPERGLWENIVYLDFRSLYPSIIITHNVSPDTLNREGCKEYDVAPQVGHRFCKDFPGFIPSLLGDLLEERQKIKKKMKATIDPIERKLLDYRQRAIKILANSYYGYYGYARARWYCKECAESVTAWGREYITMTIKEIEEKYGFKVIYSDTDGFFATIPGADAETVKKKAMEFLKYINAKLPGALELEYEGFYKRGFFVTKKKYAVIDEEGKITTRGLEIVRRDWSEIAKETQARVLEALLKDGDVEKAVRIVKEVTEKLSKYEVPPEKLVIHEQITRDLKDYKATGPHVAVAKRLAARGVKIRPGTVISYIVLKGSGRIGDRAIPFDEFDPTKHKYDAEYYIENQVLPAVERILRAFGYRKEDLRYQKTRQVGLSAWLKPKGT

SEQ ID NO: 147 - protein, 774 aa, synthetic construct
MILDTDYITEDGKPVIRIFKKENGEFKIEYDRTFEPYFYALLKDDSAIEEVKKITAERHGTVVTVKRVEKVQKKFLGRPVEVWKLYFTHPEDVPAIRDKIREHPAVIDIYEYDIPFAKRYLIDKGLVPMEGDEELKMLAFDIETLYHEGEEFAEGPILMISYADEEGARVITWKNVDLPYVDVVSTEREMIKRFLRVVKEKDPDVLITYNGDNFDFAYLKKRCEKLGINFALGRDGSEPKIQRMGDRFAVEVKGRIHFDLYPVIRRTINLPTYTLEAVYEAVFGQPKEKVYAEEITTAWETGENLERVARYSMEDAKVTYELGKEFLPMEAQLSRLIGQSLWDVSRSSTGNLVEWFLLRKAYERNELAPNKPDEKELARRRQSYEGGYVKEPERGLWENIVYLDFRSLYPSIIITHNVSPDTLNREGCKEYDVAPQVGHRFCKDFPGFIPSLLGDLLEERQKIKKKMKATIDPIERKLLDYRQRAIKILANSYYGYYGYARARWYCKECAESVTAWGREYITMTIKEIEEKYGFKVIYSDTDGFFATIPGADAETVKKKAMEFLKYINAKLPGALELEYEGFYKRGFFVTKKKYAVIDEEGKITTRGLEIVRRDWSEIAKETQARVLEALLKDGDVEKAVRIVKEVTEKLSKYEVPPEKLVIHEQITRDLKDYKATGPHVAVAKRLAARGVKIRPGTVISYIVLKGSGRIGDRAIPFDEFDPTKHKYDAEYYIENQVLPAVERILRAFGYRKEDLRYQKTRQVGLSAWLKPKGT

SEQ ID NO: 148 - protein, 774 aa, synthetic construct
MILDTDYITEDGKPVIRIFKKENGEFKIEYDRTFEPYFYALLKDDSAIEEVKKITAERHGTVVTVKRVEKVQKKFLGRPVEVWKLYFTHPNDVPAIRDKIREHPAVIDIYEYDIPFAKRYLIDKGLVPMEGDEELKMLAFDIETLYHEGEEFAEGPILMISYADEEGARVITWKNVDLPYVDVVSTEREMIKRFLRVVKEKDPDVLITYNGDNFDFAYLKKRCEKLGINFALGRDGSEPKIQRMGDRFAVEVKGRIHFDLYPVIRRTINLPTYTLEAVYEAVFGQPKEKVYAEEITTAWETGENLERVARYSMEDAKVTYELGKEFLPMEAQLSRLIGQSLWDVSRSSTGNLVEWFLLRKAYERNELAPNKPDEKELARRRQSYEGGYVKEPERGLWENIVYLDFRSLYPSIIITHNVSPDTLNREGCKEYDVAPQVGHRFCKDFPGFIPSLLGDLLEERQKIKKKMKATIDPIERKLLDYRQRAIKILANSYYGYYGYARARWYCKECAESVTAWGREYITMTIKEIEEKYGFKVIYSDTDGFFATIPGADAETVKKKAMEFLKYINAKLPGALELEYEGFYKRGFFVTKKKYAVIDEEGKITTRGLEIVRRDWSEIAKETQARVLEALLKDGDVEKAVRIVKEVTEKLSKYEVPPEKLVIHEQITRDLKDYKATGPHVAVAKRLAARGVKIRPGTVISYIVLKGSGRIGDRAIPFDEFDPTKHKYDAEYYIENQVLPAVERILRAFGYRKEDLRYQKTRQVGLSAWLKPKGT

SEQ ID NO: 149 - protein, 774 aa, synthetic construct
MILDTDYITEDGKPVIRIFKKENGEFKIEYDRTFEPYFYALLKDDSAIEEVKKITAERHGTVVTVKRVEKVQKKFLGRPVEVWKLYFTHPYDVPAIRDKIREHPAVIDIYEYDIPFAKRYLIDKGLVPMEGDEELKMLAFDIETLYHEGEEFAEGPILMISYADEEGARVITWKNVDLPYVDVVSTEREMIKRFLRVVKEKDPDVLITYNGDNFDFAYLKKRCEKLGINFALGRDGSEPKIQRMGDRFAVEVKGRIHFDLYPVIRRTINLPTYTLEAVYEAVFGQPKEKVYAEEITTAWETGENLERVARYSMEDAKVTYELGKEFLPMEAQLSRLIGQSLWDVSRSSTGNLVEWFLLRKAYERNELAPNKPDEKELARRRQSYEGGYVKEPERGLWENIVYLDFRSLYPSIIITHNVSPDTLNREGCKEYDVAPQVGHRFCKDFPGFIPSLLGDLLEERQKIKKKMKATIDPIERKLLDYRQRAIKILANSYYGYYGYARARWYCKECAESVTAWGREYITMTIKEIEEKYGFKVIYSDTDGFFATIPGADAETVKKKAMEFLKYINAKLPGALELEYEGFYKRGFFVTKKKYAVIDEEGKITTRGLEIVRRDWSEIAKETQARVLEALLKDGDVEKAVRIVKEVTEKLSKYEVPPEKLVIHEQITRDLKDYKATGPHVAVAKRLAARGVKIRPGTVISYIVLKGSGRIGDRAIPFDEFDPTKHKYDAEYYIENQVLPAVERILRAFGYRKEDLRYQKTRQVGLSAWLKPKGT

SEQ ID NO: 150 - protein, 774 aa, synthetic construct
MILDTDYITEDGKPVIRIFKKENGEFKIEYDRTFEPYFYALLKDDSAIEEVKKITAERHGTVVTVKRVEKVQKKFLGRPVEVWKLYFTHPQPVPAIRDKIREHPAVIDIYEYDIPFAKRYLIDKGLVPMEGDEELKMLAFDIETLYHEGEEFAEGPILMISYADEEGARVITWKNVDLPYVDVVSTEREMIKRFLRVVKEKDPDVLITYNGDNFDFAYLKKRCEKLGINFALGRDGSEPKIQRMGDRFAVEVKGRIHFDLYPVIRRTINLPTYTLEAVYEAVFGQPKEKVYAEEITTAWETGENLERVARYSMEDAKVTYELGKEFLPMEAQLSRLIGQSLWDVSRSSTGNLVEWFLLRKAYERNELAPNKPDEKELARRRQSYEGGYVKEPERGLWENIVYLDFRSLYPSIIITHNVSPDTLNREGCKEYDVAPQVGHRFCKDFPGFIPSLLGDLLEERQKIKKKMKATIDPIERKLLDYRQRAIKILANSYYGYYGYARARWYCKECAESVTAWGREYITMTIKEIEEKYGFKVIYSDTDGFFATIPGADAETVKKKAMEFLKYINAKLPGALELEYEGFYKRGFFVTKKKYAVIDEEGKITTRGLEIVRRDWSEIAKETQARVLEALLKDGDVEKAVRIVKEVTEKLSKYEVPPEKLVIHEQITRDLKDYKATGPHVAVAKRLAARGVKIRPGTVISYIVLKGSGRIGDRAIPFDEFDPTKHKYDAEYYIENQVLPAVERILRAFGYRKEDLRYQKTRQVGLSAWLKPKGT

SEQ ID NO: 151 - protein, 774 aa, synthetic construct
MILDTDYITEDGKPVIRIFKKENGEFKIEYDRTFEPYFYALLKDDSAIEEVKKITAERHGTVVTVKRVEKVQKKFLGRPVEVWKLYFTHPQDAPAIRDKIREHPAVIDIYEYDIPFAKRYLIDKGLVPMEGDEELKMLAFDIETLYHEGEEFAEGPILMISYADEEGARVITWKNVDLPYVDVVSTEREMIKRFLRVVKEKDPDVLITYNGDNFDFAYLKKRCEKLGINFALGRDGSEPKIQRMGDRFAVEVKGRIHFDLYPVIRRTINLPTYTLEAVYEAVFGQPKEKVYAEEITTAWETGENLERVARYSMEDAKVTYELGKEFLPMEAQLSRLIGQSLWDVSRSSTGNLVEWFLLRKAYERNELAPNKPDEKELARRRQSYEGGYVKEPERGLWENIVYLDFRSLYPSIIITHNVSPDTLNREGCKEYDVAPQVGHRFCKDFPGFIPSLLGDLLEERQKIKKKMKATIDPIERKLLDYRQRAIKILANSYYGYYGYARARWYCKECAESVTAWGREYITMTIKEIEEKYGFKVIYSDTDGFFATIPGADAETVKKKAMEFLKYINAKLPGALELEYEGFYKRGFFVTKKKYAVIDEEGKITTRGLEIVRRDWSEIAKETQARVLEALLKDGDVEKAVRIVKEVTEKLSKYEVPPEKLVIHEQITRDLKDYKATGPHVAVAKRLAARGVKIRPGTVISYIVLKGSGRIGDRAIPFDEFDPTKHKYDAEYYIENQVLPAVERILRAFGYRKEDLRYQKTRQVGLSAWLKPKGT

SEQ ID NO: 152 - protein, 774 aa, synthetic construct
MILDTDYITEDGKPVIRIFKKENGEFKIEYDRTFEPYFYALLKDDSAIEEVKKITAERHGTVVTVKRVEKVQKKFLGRPVEVWKLYFTHPQDCPAIRDKIREHPAVIDIYEYDIPFAKRYLIDKGLVPMEGDEELKMLAFDIETLYHEGEEFAEGPILMISYADEEGARVITWKNVDLPYVDVVSTEREMIKRFLRVVKEKDPDVLITYNGDNFDFAYLKKRCEKLGINFALGRDGSEPKIQRMGDRFAVEVKGRIHFDLYPVIRRTINLPTYTLEAVYEAVFGQPKEKVYAEEITTAWETGENLERVARYSMEDAKVTYELGKEFLPMEAQLSRLIGQSLWDVSRSSTGNLVEWFLLRKAYERNELAPNKPDEKELARRRQSYEGGYVKEPERGLWENIVYLDFRSLYPSIIITHNVSPDTLNREGCKEYDVAPQVGHRFCKDFPGFIPSLLGDLLEERQKIKKKMKATIDPIERKLLDYRQRAIKILANSYYGYYGYARARWYCKECAESVTAWGREYITMTIKEIEEKYGFKVIYSDTDGFFATIPGADAETVKKKAMEFLKYINAKLPGALELEYEGFYKRGFFVTKKKYAVIDEEGKITTRGLEIVRRDWSEIAKETQARVLEALLKDGDVEKAVRIVKEVTEKLSKYEVPPEKLVIHEQITRDLKDYKATGPHVAVAKRLAARGVKIRPGTVISYIVLKGSGRIGDRAIPFDEFDPTKHKYDAEYYIENQVLPAVERILRAFGYRKEDLRYQKTRQVGLSAWLKPKGT

SEQ ID NO: 153 - protein, 774 aa, synthetic construct
MILDTDYITEDGKPVIRIFKKENGEFKIEYDRTFEPYFYALLKDDSAIEEVKKITAERHGTVVTVKRVEKVQKKFLGRPVEVWKLYFTHPQDDPAIRDKIREHPAVIDIYEYDIPFAKRYLIDKGLVPMEGDEELKMLAFDIETLYHEGEEFAEGPILMISYADEEGARVITWKNVDLPYVDVVSTEREMIKRFLRVVKEKDPDVLITYNGDNFDFAYLKKRCEKLGINFALGRDGSEPKIQRMGDRFAVEVKGRIHFDLYPVIRRTINLPTYTLEAVYEAVFGQPKEKVYAEEITTAWETGENLERVARYSMEDAKVTYELGKEFLPMEAQLSRLIGQSLWDVSRSSTGNLVEWFLLRKAYERNELAPNKPDEKELARRRQSYEGGYVKEPERGLWENIVYLDFRSLYPSIIITHNVSPDTLNREGCKEYDVAPQVGHRFCKDFPGFIPSLLGDLLEERQKIKKKMKATIDPIERKLLDYRQRAIKILANSYYGYYGYARARWYCKECAESVTAWGREYITMTIKEIEEKYGFKVIYSDTDGFFATIPGADAETVKKKAMEFLKYINAKLPGALELEYEGFYKRGFFVTKKKYAVIDEEGKITTRGLEIVRRDWSEIAKETQARVLEALLKDGDVEKAVRIVKEVTEKLSKYEVPPEKLVIHEQITRDLKDYKATGPHVAVAKRLAARGVKIRPGTVISYIVLKGSGRIGDRAIPFDEFDPTKHKYDAEYYIENQVLPAVERILRAFGYRKEDLRYQKTRQVGLSAWLKPKGT

SEQ ID NO: 154 - protein, 774 aa, synthetic construct
MILDTDYITEDGKPVIRIFKKENGEFKIEYDRTFEPYFYALLKDDSAIEEVKKITAERHGTVVTVKRVEKVQKKFLGRPVEVWKLYFTHPQDEPAIRDKIREHPAVIDIYEYDIPFAKRYLIDKGLVPMEGDEELKMLAFDIETLYHEGEEFAEGPILMISYADEEGARVITWKNVDLPYVDVVSTEREMIKRFLRVVKEKDPDVLITYNGDNFDFAYLKKRCEKLGINFALGRDGSEPKIQRMGDRFAVEVKGRIHFDLYPVIRRTINLPTYTLEAVYEAVFGQPKEKVYAEEITTAWETGENLERVARYSMEDAKVTYELGKEFLPMEAQLSRLIGQSLWDVSRSSTGNLVEWFLLRKAYERNELAPNKPDEKELARRRQSYEGGYVKEPERGLWENIVYLDFRSLYPSIIITHNVSPDTLNREGCKEYDVAPQVGHRFCKDFPGFIPSLLGDLLEERQKIKKKMKATIDPIERKLLDYRQRAIKILANSYYGYYGYARARWYCKECAESVTAWGREYITMTIKEIEEKYGFKVIYSDTDGFFATIPGADAETVKKKAMEFLKYINAKLPGALELEYEGFYKRGFFVTKKKYAVIDEEGKITTRGLEIVRRDWSEIAKETQARVLEALLKDGDVEKAVRIVKEVTEKLSKYEVPPEKLVIHEQITRDLKDYKATGPHVAVAKRLAARGVKIRPGTVISYIVLKGSGRIGDRAIPFDEFDPTKHKYDAEYYIENQVLPAVERILRAFGYRKEDLRYQKTRQVGLSAWLKPKGT

SEQ ID NO: 155 - protein, 774 aa, synthetic construct
MILDTDYITEDGKPVIRIFKKENGEFKIEYDRTFEPYFYALLKDDSAIEEVKKITAERHGTVVTVKRVEKVQKKFLGRPVEVWKLYFTHPQDFPAIRDKIREHPAVIDIYEYDIPFAKRYLIDKGLVPMEGDEELKMLAFDIETLYHEGEEFAEGPILMISYADEEGARVITWKNVDLPYVDVVSTEREMIKRFLRVVKEKDPDVLITYNGDNFDFAYLKKRCEKLGINFALGRDGSEPKIQRMGDRFAVEVKGRIHFDLYPVIRRTINLPTYTLEAVYEAVFGQPKEKVYAEEITTAWETGENLERVARYSMEDAKVTYELGKEFLPMEAQLSRLIGQSLWDVSRSSTGNLVEWFLLRKAYERNELAPNKPDEKELARRRQSYEGGYVKEPERGLWENIVYLDFRSLYPSIIITHNVSPDTLNREGCKEYDVAPQVGHRFCKDFPGFIPSLLGDLLEERQKIKKKMKATIDPIERKLLDYRQRAIKILANSYYGYYGYARARWYCKECAESVTAWGREYITMTIKEIEEKYGFKVIYSDTDGFFATIPGADAETVKKKAMEFLKYINAKLPGALELEYEGFYKRGFFVTKKKYAVIDEEGKITTRGLEIVRRDWSEIAKETQARVLEALLKDGDVEKAVRIVKEVTEKLSKYEVPPEKLVIHEQITRDLKDYKATGPHVAVAKRLAARGVKIRPGTVISYIVLKGSGRIGDRAIPFDEFDPTKHKYDAEYYIENQVLPAVERILRAFGYRKEDLRYQKTRQVGLSAWLKPKGT

SEQ ID NO: 156 - protein, 774 aa, synthetic construct
MILDTDYITEDGKPVIRIFKKENGEFKIEYDRTFEPYFYALLKDDSAIEEVKKITAERHGTVVTVKRVEKVQKKFLGRPVEVWKLYFTHPQDGPAIRDKIREHPAVIDIYEYDIPFAKRYLIDKGLVPMEGDEELKMLAFDIETLYHEGEEFAEGPILMISYADEEGARVITWKNVDLPYVDVVSTEREMIKRFLRVVKEKDPDVLITYNGDNFDFAYLKKRCEKLGINFALGRDGSEPKIQRMGDRFAVEVKGRIHFDLYPVIRRTINLPTYTLEAVYEAVFGQPKEKVYAEEITTAWETGENLERVARYSMEDAKVTYELGKEFLPMEAQLSRLIGQSLWDVSRSSTGNLVEWFLLRKAYERNELAPNKPDEKELARRRQSYEGGYVKEPERGLWENIVYLDFRSLYPSIIITHNVSPDTLNREGCKEYDVAPQVGHRFCKDFPGFIPSLLGDLLEERQKIKKKMKATIDPIERKLLDYRQRAIKILANSYYGYYGYARARWYCKECAESVTAWGREYITMTIKEIEEKYGFKVIYSDTDGFFATIPGADAETVKKKAMEFLKYINAKLPGALELEYEGFYKRGFFVTKKKYAVIDEEGKITTRGLEIVRRDWSEIAKETQARVLEALLKDGDVEKAVRIVKEVTEKLSKYEVPPEKLVIHEQITRDLKDYKATGPHVAVAKRLAARGVKIRPGTVISYIVLKGSGRIGDRAIPFDEFDPTKHKYDAEYYIENQVLPAVERILRAFGYRKEDLRYQKTRQVGLSAWLKPKGT

SEQ ID NO: 157 - protein, 774 aa, synthetic construct
MILDTDYITEDGKPVIRIFKKENGEFKIEYDRTFEPYFYALLKDDSAIEEVKKITAERHGTVVTVKRVEKVQKKFLGRPVEVWKLYFTHPQDHPAIRDKIREHPAVIDIYEYDIPFAKRYLIDKGLVPMEGDEELKMLAFDIETLYHEGEEFAEGPILMISYADEEGARVITWKNVDLPYVDVVSTEREMIKRFLRVVKEKDPDVLITYNGDNFDFAYLKKRCEKLGINFALGRDGSEPKIQRMGDRFAVEVKGRIHFDLYPVIRRTINLPTYTLEAVYEAVFGQPKEKVYAEEITTAWETGENLERVARYSMEDAKVTYELGKEFLPMEAQLSRLIGQSLWDVSRSSTGNLVEWFLLRKAYERNELAPNKPDEKELARRRQSYEGGYVKEPERGLWENIVYLDFRSLYPSIIITHNVSPDTLNREGCKEYDVAPQVGHRFCKDFPGFIPSLLGDLLEERQKIKKKMKATIDPIERKLLDYRQRAIKILANSYYGYYGYARARWYCKECAESVTAWGREYITMTIKEIEEKYGFKVIYSDTDGFFATIPGADAETVKKKAMEFLKYINAKLPGALELEYEGFYKRGFFVTKKKYAVIDEEGKITTRGLEIVRRDWSEIAKETQARVLEALLKDGDVEKAVRIVKEVTEKLSKYEVPPEKLVIHEQITRDLKDYKATGPHVAVAKRLAARGVKIRPGTVISYIVLKGSGRIGDRAIPFDEFDPTKHKYDAEYYIENQVLPAVERILRAFGYRKEDLRYQKTRQVGLSAWLKPKGT

SEQ ID NO: 158 - protein, 774 aa, synthetic construct
MILDTDYITEDGKPVIRIFKKENGEFKIEYDRTFEPYFYALLKDDSAIEEVKKITAERHGTVVTVKRVEKVQKKFLGRPVEVWKLYFTHPQDKPAIRDKIREHPAVIDIYEYDIPFAKRYLIDKGLVPMEGDEELKMLAFDIETLYHEGEEFAEGPILMISYADEEGARVITWKNVDLPYVDVVSTEREMIKRFLRVVKEKDPDVLITYNGDNFDFAYLKKRCEKLGINFALGRDGSEPKIQRMGDRFAVEVKGRIHFDLYPVIRRTINLPTYTLEAVYEAVFGQPKEKVYAEEITTAWETGENLERVARYSMEDAKVTYELGKEFLPMEAQLSRLIGQSLWDVSRSSTGNLVEWFLLRKAYERNELAPNKPDEKELARRRQSYEGGYVKEPERGLWENIVYLDFRSLYPSIIITHNVSPDTLNREGCKEYDVAPQVGHRFCKDFPGFIPSLLGDLLEERQKIKKKMKATIDPIERKLLDYRQRAIKILANSYYGYYGYARARWYCKECAESVTAWGREYITMTIKEIEEKYGFKVIYSDTDGFFATIPGADAETVKKKAMEFLKYINAKLPGALELEYEGFYKRGFFVTKKKYAVIDEEGKITTRGLEIVRRDWSEIAKETQARVLEALLKDGDVEKAVRIVKEVTEKLSKYEVPPEKLVIHEQITRDLKDYKATGPHVAVAKRLAARGVKIRPGTVISYIVLKGSGRIGDRAIPFDEFDPTKHKYDAEYYIENQVLPAVERILRAFGYRKEDLRYQKTRQVGLSAWLKPKGT

SEQ ID NO: 159 - protein, 774 aa, synthetic construct
MILDTDYITEDGKPVIRIFKKENGEFKIEYDRTFEPYFYALLKDDSAIEEVKKITAERHGTVVTVKRVEKVQKKFLGRPVEVWKLYFTHPQDMPAIRDKIREHPAVIDIYEYDIPFAKRYLIDKGLVPMEGDEELKMLAFDIETLYHEGEEFAEGPILMISYADEEGARVITWKNVDLPYVDVVSTEREMIKRFLRVVKEKDPDVLITYNGDNFDFAYLKKRCEKLGINFALGRDGSEPKIQRMGDRFAVEVKGRIHFDLYPVIRRTINLPTYTLEAVYEAVFGQPKEKVYAEEITTAWETGENLERVARYSMEDAKVTYELGKEFLPMEAQLSRLIGQSLWDVSRSSTGNLVEWFLLRKAYERNELAPNKPDEKELARRRQSYEGGYVKEPERGLWENIVYLDFRSLYPSIIITHNVSPDTLNREGCKEYDVAPQVGHRFCKDFPGFIPSLLGDLLEERQKIKKKMKATIDPIERKLLDYRQRAIKILANSYYGYYGYARARWYCKECAESVTAWGREYITMTIKEIEEKYGFKVIYSDTDGFFATIPGADAETVKKKAMEFLKYINAKLPGALELEYEGFYKRGFFVTKKKYAVIDEEGKITTRGLEIVRRDWSEIAKETQARVLEALLKDGDVEKAVRIVKEVTEKLSKYEVPPEKLVIHEQITRDLKDYKATGPHVAVAKRLAARGVKIRPGTVISYIVLKGSGRIGDRAIPFDEFDPTKHKYDAEYYIENQVLPAVERILRAFGYRKEDLRYQKTRQVGLSAWLKPKGT

SEQ ID NO: 160 - protein, 774 aa, synthetic construct
MILDTDYITEDGKPVIRIFKKENGEFKIEYDRTFEPYFYALLKDDSAIEEVKKITAERHGTVVTVKRVEKVQKKFLGRPVEVWKLYFTHPQDNPAIRDKIREHPAVIDIYEYDIPFAKRYLIDKGLVPMEGDEELKMLAFDIETLYHEGEEFAEGPILMISYADEEGARVITWKNVDLPYVDVVSTEREMIKRFLRVVKEKDPDVLITYNGDNFDFAYLKKRCEKLGINFALGRDGSEPKIQRMGDRFAVEVKGRIHFDLYPVIRRTINLPTYTLEAVYEAVFGQPKEKVYAEEITTAWETGENLERVARYSMEDAKVTYELGKEFLPMEAQLSRLIGQSLWDVSRSSTGNLVEWFLLRKAYERNELAPNKPDEKELARRRQSYEGGYVKEPERGLWENIVYLDFRSLYPSIIITHNVSPDTLNREGCKEYDVAPQVGHRFCKDFPGFIPSLLGDLLEERQKIKKKMKATIDPIERKLLDYRQRAIKILANSYYGYYGYARARWYCKECAESVTAWGREYITMTIKEIEEKYGFKVIYSDTDGFFATIPGADAETVKKKAMEFLKYINAKLPGALELEYEGFYKRGFFVTKKKYAVIDEEGKITTRGLEIVRRDWSEIAKETQARVLEALLKDGDVEKAVRIVKEVTEKLSKYEVPPEKLVIHEQITRDLKDYKATGPHVAVAKRLAARGVKIRPGTVISYIVLKGSGRIGDRAIPFDEFDPTKHKYDAEYYIENQVLPAVERILRAFGYRKEDLRYQKTRQVGLSAWLKPKGT

SEQ ID NO: 161 - protein, 774 aa, synthetic construct
MILDTDYITEDGKPVIRIFKKENGEFKIEYDRTFEPYFYALLKDDSAIEEVKKITAERHGTVVTVKRVEKVQKKFLGRPVEVWKLYFTHPQDPPAIRDKIREHPAVIDIYEYDIPFAKRYLIDKGLVPMEGDEELKMLAFDIETLYHEGEEFAEGPILMISYADEEGARVITWKNVDLPYVDVVSTEREMIKRFLRVVKEKDPDVLITYNGDNFDFAYLKKRCEKLGINFALGRDGSEPKIQRMGDRFAVEVKGRIHFDLYPVIRRTINLPTYTLEAVYEAVFGQPKEKVYAEEITTAWETGENLERVARYSMEDAKVTYELGKEFLPMEAQLSRLIGQSLWDVSRSSTGNLVEWFLLRKAYERNELAPNKPDEKELARRRQSYEGGYVKEPERGLWENIVYLDFRSLYPSIIITHNVSPDTLNREGCKEYDVAPQVGHRFCKDFPGFIPSLLGDLLEERQKIKKKMKATIDPIERKLLDYRQRAIKILANSYYGYYGYARARWYCKECAESVTAWGREYITMTIKEIEEKYGFKVIYSDTDGFFATIPGADAETVKKKAMEFLKYINAKLPGALELEYEGFYKRGFFVTKKKYAVIDEEGKITTRGLEIVRRDWSEIAKETQARVLEALLKDGDVEKAVRIVKEVTEKLSKYEVPPEKLVIHEQITRDLKDYKATGPHVAVAKRLAARGVKIRPGTVISYIVLKGSGRIGDRAIPFDEFDPTKHKYDAEYYIENQVLPAVERILRAFGYRKEDLRYQKTRQVGLSAWLKPKGT

SEQ ID NO: 162 - protein, 774 aa, synthetic construct
MILDTDYITEDGKPVIRIFKKENGEFKIEYDRTFEPYFYALLKDDSAIEEVKKITAERHGTVVTVKRVEKVQKKFLGRPVEVWKLYFTHPQDQPAIRDKIREHPAVIDIYEYDIPFAKRYLIDKGLVPMEGDEELKMLAFDIETLYHEGEEFAEGPILMISYADEEGARVITWKNVDLPYVDVVSTEREMIKRFLRVVKEKDPDVLITYNGDNFDFAYLKKRCEKLGINFALGRDGSEPKIQRMGDRFAVEVKGRIHFDLYPVIRRTINLPTYTLEAVYEAVFGQPKEKVYAEEITTAWETGENLERVARYSMEDAKVTYELGKEFLPMEAQLSRLIGQSLWDVSRSSTGNLVEWFLLRKAYERNELAPNKPDEKELARRRQSYEGGYVKEPERGLWENIVYLDFRSLYPSIIITHNVSPDTLNREGCKEYDVAPQVGHRFCKDFPGFIPSLLGDLLEERQKIKKKMKATIDPIERKLLDYRQRAIKILANSYYGYYGYARARWYCKECAESVTAWGREYITMTIKEIEEKYGFKVIYSDTDGFFATIPGADAETVKKKAMEFLKYINAKLPGALELEYEGFYKRGFFVTKKKYAVIDEEGKITTRGLEIVRRDWSEIAKETQARVLEALLKDGDVEKAVRIVKEVTEKLSKYEVPPEKLVIHEQITRDLKDYKATGPHVAVAKRLAARGVKIRPGTVISYIVLKGSGRIGDRAIPFDEFDPTKHKYDAEYYIENQVLPAVERILRAFGYRKEDLRYQKTRQVGLSAWLKPKGT

SEQ ID NO: 163 - protein, 774 aa, synthetic construct
MILDTDYITEDGKPVIRIFKKENGEFKIEYDRTFEPYFYALLKDDSAIEEVKKITAERHGTVVTVKRVEKVQKKFLGRPVEVWKLYFTHPQDRPAIRDKIREHPAVIDIYEYDIPFAKRYLIDKGLVPMEGDEELKMLAFDIETLYHEGEEFAEGPILMISYADEEGARVITWKNVDLPYVDVVSTEREMIKRFLRVVKEKDPDVLITYNGDNFDFAYLKKRCEKLGINFALGRDGSEPKIQRMGDRFAVEVKGRIHFDLYPVIRRTINLPTYTLEAVYEAVFGQPKEKVYAEEITTAWETGENLERVARYSMEDAKVTYELGKEFLPMEAQLSRLIGQSLWDVSRSSTGNLVEWFLLRKAYERNELAPNKPDEKELARRRQSYEGGYVKEPERGLWENIVYLDFRSLYPSIIITHNVSPDTLNREGCKEYDVAPQVGHRFCKDFPGFIPSLLGDLLEERQKIKKKMKATIDPIERKLLDYRQRAIKILANSYYGYYGYARARWYCKECAESVTAWGREYITMTIKEIEEKYGFKVIYSDTDGFFATIPGADAETVKKKAMEFLKYINAKLPGALELEYEGFYKRGFFVTKKKYAVIDEEGKITTRGLEIVRRDWSEIAKETQARVLEALLKDGDVEKAVRIVKEVTEKLSKYEVPPEKLVIHEQITRDLKDYKATGPHVAVAKRLAARGVKIRPGTVISYIVLKGSGRIGDRAIPFDEFDPTKHKYDAEYYIENQVLPAVERILRAFGYRKEDLRYQKTRQVGLSAWLKPKGT

SEQ ID NO: 164 - protein, 774 aa, synthetic construct
MILDTDYITEDGKPVIRIFKKENGEFKIEYDRTFEPYFYALLKDDSAIEEVKKITAERHGTVVTVKRVEKVQKKFLGRPVEVWKLYFTHPQDSPAIRDKIREHPAVIDIYEYDIPFAKRYLIDKGLVPMEGDEELKMLAFDIETLYHEGEEFAEGPILMISYADEEGARVITWKNVDLPYVDVVSTEREMIKRFLRVVKEKDPDVLITYNGDNFDFAYLKKRCEKLGINFALGRDGSEPKIQRMGDRFAVEVKGRIHFDLYPVIRRTINLPTYTLEAVYEAVFGQPKEKVYAEEITTAWETGENLERVARYSMEDAKVTYELGKEFLPMEAQLSRLIGQSLWDVSRSSTGNLVEWFLLRKAYERNELAPNKPDEKELARRRQSYEGGYVKEPERGLWENIVYLDFRSLYPSIIITHNVSPDTLNREGCKEYDVAPQVGHRFCKDFPGFIPSLLGDLLEERQKIKKKMKATIDPIERKLLDYRQRAIKILANSYYGYYGYARARWYCKECAESVTAWGREYITMTIKEIEEKYGFKVIYSDTDGFFATIPGADAETVKKKAMEFLKYINAKLPGALELEYEGFYKRGFFVTKKKYAVIDEEGKITTRGLEIVRRDWSEIAKETQARVLEALLKDGDVEKAVRIVKEVTEKLSKYEVPPEKLVIHEQITRDLKDYKATGPHVAVAKRLAARGVKIRPGTVISYIVLKGSGRIGDRAIPFDEFDPTKHKYDAEYYIENQVLPAVERILRAFGYRKEDLRYQKTRQVGLSAWLKPKGT

SEQ ID NO: 165 - protein, 774 aa, synthetic construct
MILDTDYITEDGKPVIRIFKKENGEFKIEYDRTFEPYFYALLKDDSAIEEVKKITAERHGTVVTVKRVEKVQKKFLGRPVEVWKLYFTHPQDTPAIRDKIREHPAVIDIYEYDIPFAKRYLIDKGLVPMEGDEELKMLAFDIETLYHEGEEFAEGPILMISYADEEGARVITWKNVDLPYVDVVSTEREMIKRFLRVVKEKDPDVLITYNGDNFDFAYLKKRCEKLGINFALGRDGSEPKIQRMGDRFAVEVKGRIHFDLYPVIRRTINLPTYTLEAVYEAVFGQPKEKVYAEEITTAWETGENLERVARYSMEDAKVTYELGKEFLPMEAQLSRLIGQSLWDVSRSSTGNLVEWFLLRKAYERNELAPNKPDEKELARRRQSYEGGYVKEPERGLWENIVYLDFRSLYPSIIITHNVSPDTLNREGCKEYDVAPQVGHRFCKDFPGFIPSLLGDLLEERQKIKKKMKATIDPIERKLLDYRQRAIKILANSYYGYYGYARARWYCKECAESVTAWGREYITMTIKEIEEKYGFKVIYSDTDGFFATIPGADAETVKKKAMEFLKYINAKLPGALELEYEGFYKRGFFVTKKKYAVIDEEGKITTRGLEIVRRDWSEIAKETQARVLEALLKDGDVEKAVRIVKEVTEKLSKYEVPPEKLVIHEQITRDLKDYKATGPHVAVAKRLAARGVKIRPGTVISYIVLKGSGRIGDRAIPFDEFDPTKHKYDAEYYIENQVLPAVERILRAFGYRKEDLRYQKTRQVGLSAWLKPKGT

SEQ ID NO: 166 - protein, 774 aa, synthetic construct
MILDTDYITEDGKPVIRIFKKENGEFKIEYDRTFEPYFYALLKDDSAIEEVKKITAERHGTVVTVKRVEKVQKKFLGRPVEVWKLYFTHPQDWPAIRDKIREHPAVIDIYEYDIPFAKRYLIDKGLVPMEGDEELKMLAFDIETLYHEGEEFAEGPILMISYADEEGARVITWKNVDLPYVDVVSTEREMIKRFLRVVKEKDPDVLITYNGDNFDFAYLKKRCEKLGINFALGRDGSEPKIQRMGDRFAVEVKGRIHFDLYPVIRRTINLPTYTLEAVYEAVFGQPKEKVYAEEITTAWETGENLERVARYSMEDAKVTYELGKEFLPMEAQLSRLIGQSLWDVSRSSTGNLVEWFLLRKAYERNELAPNKPDEKELARRRQSYEGGYVKEPERGLWENIVYLDFRSLYPSIIITHNVSPDTLNREGCKEYDVAPQVGHRFCKDFPGFIPSLLGDLLEERQKIKKKMKATIDPIERKLLDYRQRAIKILANSYYGYYGYARARWYCKECAESVTAWGREYITMTIKEIEEKYGFKVIYSDTDGFFATIPGADAETVKKKAMEFLKYINAKLPGALELEYEGFYKRGFFVTKKKYAVIDEEGKITTRGLEIVRRDWSEIAKETQARVLEALLKDGDVEKAVRIVKEVTEKLSKYEVPPEKLVIHEQITRDLKDYKATGPHVAVAKRLAARGVKIRPGTVISYIVLKGSGRIGDRAIPFDEFDPTKHKYDAEYYIENQVLPAVERILRAFGYRKEDLRYQKTRQVGLSAWLKPKGT

SEQ ID NO: 167 - protein, 774 aa, synthetic construct
MILDTDYITEDGKPVIRIFKKENGEFKIEYDRTFEPYFYALLKDDSAIEEVKKITAERHGTVVTVKRVEKVQKKFLGRPVEVWKLYFTHPQDYPAIRDKIREHPAVIDIYEYDIPFAKRYLIDKGLVPMEGDEELKMLAFDIETLYHEGEEFAEGPILMISYADEEGARVITWKNVDLPYVDVVSTEREMIKRFLRVVKEKDPDVLITYNGDNFDFAYLKKRCEKLGINFALGRDGSEPKIQRMGDRFAVEVKGRIHFDLYPVIRRTINLPTYTLEAVYEAVFGQPKEKVYAEEITTAWETGENLERVARYSMEDAKVTYELGKEFLPMEAQLSRLIGQSLWDVSRSSTGNLVEWFLLRKAYERNELAPNKPDEKELARRRQSYEGGYVKEPERGLWENIVYLDFRSLYPSIIITHNVSPDTLNREGCKEYDVAPQVGHRFCKDFPGFIPSLLGDLLEERQKIKKKMKATIDPIERKLLDYRQRAIKILANSYYGYYGYARARWYCKECAESVTAWGREYITMTIKEIEEKYGFKVIYSDTDGFFATIPGADAETVKKKAMEFLKYINAKLPGALELEYEGFYKRGFFVTKKKYAVIDEEGKITTRGLEIVRRDWSEIAKETQARVLEALLKDGDVEKAVRIVKEVTEKLSKYEVPPEKLVIHEQITRDLKDYKATGPHVAVAKRLAARGVKIRPGTVISYIVLKGSGRIGDRAIPFDEFDPTKHKYDAEYYIENQVLPAVERILRAFGYRKEDLRYQKTRQVGLSAWLKPKGT

SEQ ID NO: 168 - protein, 774 aa, synthetic construct
MILDTDYITEDGKPVIRIFKKENGEFKIEYDRTFEPYFYALLKDDSAIEEVKKITAERHGTVVTVKRVEKVQKKFLGRPVEVWKLYFTHPQDVCAIRDKIREHPAVIDIYEYDIPFAKRYLIDKGLVPMEGDEELKMLAFDIETLYHEGEEFAEGPILMISYADEEGARVITWKNVDLPYVDVVSTEREMIKRFLRVVKEKDPDVLITYNGDNFDFAYLKKRCEKLGINFALGRDGSEPKIQRMGDRFAVEVKGRIHFDLYPVIRRTINLPTYTLEAVYEAVFGQPKEKVYAEEITTAWETGENLERVARYSMEDAKVTYELGKEFLPMEAQLSRLIGQSLWDVSRSSTGNLVEWFLLRKAYERNELAPNKPDEKELARRRQSYEGGYVKEPERGLWENIVYLDFRSLYPSIIITHNVSPDTLNREGCKEYDVAPQVGHRFCKDFPGFIPSLLGDLLEERQKIKKKMKATIDPIERKLLDYRQRAIKILANSYYGYYGYARARWYCKECAESVTAWGREYITMTIKEIEEKYGFKVIYSDTDGFFATIPGADAETVKKKAMEFLKYINAKLPGALELEYEGFYKRGFFVTKKKYAVIDEEGKITTRGLEIVRRDWSEIAKETQARVLEALLKDGDVEKAVRIVKEVTEKLSKYEVPPEKLVIHEQITRDLKDYKATGPHVAVAKRLAARGVKIRPGTVISYIVLKGSGRIGDRAIPFDEFDPTKHKYDAEYYIENQVLPAVERILRAFGYRKEDLRYQKTRQVGLSAWLKPKGT

SEQ ID NO: 169 - protein, 774 aa, synthetic construct
MILDTDYITEDGKPVIRIFKKENGEFKIEYDRTFEPYFYALLKDDSAIEEVKKITAERHGTVVTVKRVEKVQKKFLGRPVEVWKLYFTHPQDVDAIRDKIREHPAVIDIYEYDIPFAKRYLIDKGLVPMEGDEELKMLAFDIETLYHEGEEFAEGPILMISYADEEGARVITWKNVDLPYVDVVSTEREMIKRFLRVVKEKDPDVLITYNGDNFDFAYLKKRCEKLGINFALGRDGSEPKIQRMGDRFAVEVKGRIHFDLYPVIRRTINLPTYTLEAVYEAVFGQPKEKVYAEEITTAWETGENLERVARYSMEDAKVTYELGKEFLPMEAQLSRLIGQSLWDVSRSSTGNLVEWFLLRKAYERNELAPNKPDEKELARRRQSYEGGYVKEPERGLWENIVYLDFRSLYPSIIITHNVSPDTLNREGCKEYDVAPQVGHRFCKDFPGFIPSLLGDLLEERQKIKKKMKATIDPIERKLLDYRQRAIKILANSYYGYYGYARARWYCKECAESVTAWGREYITMTIKEIEEKYGFKVIYSDTDGFFATIPGADAETVKKKAMEFLKYINAKLPGALELEYEGFYKRGFFVTKKKYAVIDEEGKITTRGLEIVRRDWSEIAKETQARVLEALLKDGDVEKAVRIVKEVTEKLSKYEVPPEKLVIHEQITRDLKDYKATGPHVAVAKRLAARGVKIRPGTVISYIVLKGSGRIGDRAIPFDEFDPTKHKYDAEYYIENQVLPAVERILRAFGYRKEDLRYQKTRQVGLSAWLKPKGT

SEQ ID NO: 170 - protein, 774 aa, synthetic construct
MILDTDYITEDGKPVIRIFKKENGEFKIEYDRTFEPYFYALLKDDSAIEEVKKITAERHGTVVTVKRVEKVQKKFLGRPVEVWKLYFTHPQDVEAIRDKIREHPAVIDIYEYDIPFAKRYLIDKGLVPMEGDEELKMLAFDIETLYHEGEEFAEGPILMISYADEEGARVITWKNVDLPYVDVVSTEREMIKRFLRVVKEKDPDVLITYNGDNFDFAYLKKRCEKLGINFALGRDGSEPKIQRMGDRFAVEVKGRIHFDLYPVIRRTINLPTYTLEAVYEAVFGQPKEKVYAEEITTAWETGENLERVARYSMEDAKVTYELGKEFLPMEAQLSRLIGQSLWDVSRSSTGNLVEWFLLRKAYERNELAPNKPDEKELARRRQSYEGGYVKEPERGLWENIVYLDFRSLYPSIIITHNVSPDTLNREGCKEYDVAPQVGHRFCKDFPGFIPSLLGDLLEERQKIKKKMKATIDPIERKLLDYRQRAIKILANSYYGYYGYARARWYCKECAESVTAWGREYITMTIKEIEEKYGFKVIYSDTDGFFATIPGADAETVKKKAMEFLKYINAKLPGALELEYEGFYKRGFFVTKKKYAVIDEEGKITTRGLEIVRRDWSEIAKETQARVLEALLKDGDVEKAVRIVKEVTEKLSKYEVPPEKLVIHEQITRDLKDYKATGPHVAVAKRLAARGVKIRPGTVISYIVLKGSGRIGDRAIPFDEFDPTKHKYDAEYYIENQVLPAVERILRAFGYRKEDLRYQKTRQVGLSAWLKPKGT

SEQ ID NO: 171 - protein, 774 aa, synthetic construct
MILDTDYITEDGKPVIRIFKKENGEFKIEYDRTFEPYFYALLKDDSAIEEVKKITAERHGTVVTVKRVEKVQKKFLGRPVEVWKLYFTHPQDVFAIRDKIREHPAVIDIYEYDIPFAKRYLIDKGLVPMEGDEELKMLAFDIETLYHEGEEFAEGPILMISYADEEGARVITWKNVDLPYVDVVSTEREMIKRFLRVVKEKDPDVLITYNGDNFDFAYLKKRCEKLGINFALGRDGSEPKIQRMGDRFAVEVKGRIHFDLYPVIRRTINLPTYTLEAVYEAVFGQPKEKVYAEEITTAWETGENLERVARYSMEDAKVTYELGKEFLPMEAQLSRLIGQSLWDVSRSSTGNLVEWFLLRKAYERNELAPNKPDEKELARRRQSYEGGYVKEPERGLWENIVYLDFRSLYPSIIITHNVSPDTLNREGCKEYDVAPQVGHRFCKDFPGFIPSLLGDLLEERQKIKKKMKATIDPIERKLLDYRQRAIKILANSYYGYYGYARARWYCKECAESVTAWGREYITMTIKEIEEKYGFKVIYSDTDGFFATIPGADAETVKKKAMEFLKYINAKLPGALELEYEGFYKRGFFVTKKKYAVIDEEGKITTRGLEIVRRDWSEIAKETQARVLEALLKDGDVEKAVRIVKEVTEKLSKYEVPPEKLVIHEQITRDLKDYKATGPHVAVAKRLAARGVKIRPGTVISYIVLKGSGRIGDRAIPFDEFDPTKHKYDAEYYIENQVLPAVERILRAFGYRKEDLRYQKTRQVGLSAWLKPKGT

SEQ ID NO: 172 - protein, 774 aa, synthetic construct
MILDTDYITEDGKPVIRIFKKENGEFKIEYDRTFEPYFYALLKDDSAIEEVKKITAERHGTVVTVKRVEKVQKKFLGRPVEVWKLYFTHPQDVGAIRDKIREHPAVIDIYEYDIPFAKRYLIDKGLVPMEGDEELKMLAFDIETLYHEGEEFAEGPILMISYADEEGARVITWKNVDLPYVDVVSTEREMIKRFLRVVKEKDPDVLITYNGDNFDFAYLKKRCEKLGINFALGRDGSEPKIQRMGDRFAVEVKGRIHFDLYPVIRRTINLPTYTLEAVYEAVFGQPKEKVYAEEITTAWETGENLERVARYSMEDAKVTYELGKEFLPMEAQLSRLIGQSLWDVSRSSTGNLVEWFLLRKAYERNELAPNKPDEKELARRRQSYEGGYVKEPERGLWENIVYLDFRSLYPSIIITHNVSPDTLNREGCKEYDVAPQVGHRFCKDFPGFIPSLLGDLLEERQKIKKKMKATIDPIERKLLDYRQRAIKILANSYYGYYGYARARWYCKECAESVTAWGREYITMTIKEIEEKYGFKVIYSDTDGFFATIPGADAETVKKKAMEFLKYINAKLPGALELEYEGFYKRGFFVTKKKYAVIDEEGKITTRGLEIVRRDWSEIAKETQARVLEALLKDGDVEKAVRIVKEVTEKLSKYEVPPEKLVIHEQITRDLKDYKATGPHVAVAKRLAARGVKIRPGTVISYIVLKGSGRIGDRAIPFDEFDPTKHKYDAEYYIENQVLPAVERILRAFGYRKEDLRYQKTRQVGLSAWLKPKGT

SEQ ID NO: 173 - protein, 774 aa, synthetic construct
MILDTDYITEDGKPVIRIFKKENGEFKIEYDRTFEPYFYALLKDDSAIEEVKKITAERHGTVVTVKRVEKVQKKFLGRPVEVWKLYFTHPQDVHAIRDKIREHPAVIDIYEYDIPFAKRYLIDKGLVPMEGDEELKMLAFDIETLYHEGEEFAEGPILMISYADEEGARVITWKNVDLPYVDVVSTEREMIKRFLRVVKEKDPDVLITYNGDNFDFAYLKKRCEKLGINFALGRDGSEPKIQRMGDRFAVEVKGRIHFDLYPVIRRTINLPTYTLEAVYEAVFGQPKEKVYAEEITTAWETGENLERVARYSMEDAKVTYELGKEFLPMEAQLSRLIGQSLWDVSRSSTGNLVEWFLLRKAYERNELAPNKPDEKELARRRQSYEGGYVKEPERGLWENIVYLDFRSLYPSIIITHNVSPDTLNREGCKEYDVAPQVGHRFCKDFPGFIPSLLGDLLEERQKIKKKMKATIDPIERKLLDYRQRAIKILANSYYGYYGYARARWYCKECAESVTAWGREYITMTIKEIEEKYGFKVIYSDTDGFFATIPGADAETVKKKAMEFLKYINAKLPGALELEYEGFYKRGFFVTKKKYAVIDEEGKITTRGLEIVRRDWSEIAKETQARVLEALLKDGDVEKAVRIVKEVTEKLSKYEVPPEKLVIHEQITRDLKDYKATGPHVAVAKRLAARGVKIRPGTVISYIVLKGSGRIGDRAIPFDEFDPTKHKYDAEYYIENQVLPAVERILRAFGYRKEDLRYQKTRQVGLSAWLKPKGT

SEQ ID NO: 174 - protein, 774 aa, synthetic construct
MILDTDYITEDGKPVIRIFKKENGEFKIEYDRTFEPYFYALLKDDSAIEEVKKITAERHGTVVTVKRVEKVQKKFLGRPVEVWKLYFTHPQDVIAIRDKIREHPAVIDIYEYDIPFAKRYLIDKGLVPMEGDEELKMLAFDIETLYHEGEEFAEGPILMISYADEEGARVITWKNVDLPYVDVVSTEREMIKRFLRVVKEKDPDVLITYNGDNFDFAYLKKRCEKLGINFALGRDGSEPKIQRMGDRFAVEVKGRIHFDLYPVIRRTINLPTYTLEAVYEAVFGQPKEKVYAEEITTAWETGENLERVARYSMEDAKVTYELGKEFLPMEAQLSRLIGQSLWDVSRSSTGNLVEWFLLRKAYERNELAPNKPDEKELARRRQSYEGGYVKEPERGLWENIVYLDFRSLYPSIIITHNVSPDTLNREGCKEYDVAPQVGHRFCKDFPGFIPSLLGDLLEERQKIKKKMKATIDPIERKLLDYRQRAIKILANSYYGYYGYARARWYCKECAESVTAWGREYITMTIKEIEEKYGFKVIYSDTDGFFATIPGADAETVKKKAMEFLKYINAKLPGALELEYEGFYKRGFFVTKKKYAVIDEEGKITTRGLEIVRRDWSEIAKETQARVLEALLKDGDVEKAVRIVKEVTEKLSKYEVPPEKLVIHEQITRDLKDYKATGPHVAVAKRLAARGVKIRPGTVISYIVLKGSGRIGDRAIPFDEFDPTKHKYDAEYYIENQVLPAVERILRAFGYRKEDLRYQKTRQVGLSAWLKPKGT

SEQ ID NO: 175 - protein, 774 aa, synthetic construct
MILDTDYITEDGKPVIRIFKKENGEFKIEYDRTFEPYFYALLKDDSAIEEVKKITAERHGTVVTVKRVEKVQKKFLGRPVEVWKLYFTHPQDVMAIRDKIREHPAVIDIYEYDIPFAKRYLIDKGLVPMEGDEELKMLAFDIETLYHEGEEFAEGPILMISYADEEGARVITWKNVDLPYVDVVSTEREMIKRFLRVVKEKDPDVLITYNGDNFDFAYLKKRCEKLGINFALGRDGSEPKIQRMGDRFAVEVKGRIHFDLYPVIRRTINLPTYTLEAVYEAVFGQPKEKVYAEEITTAWETGENLERVARYSMEDAKVTYELGKEFLPMEAQLSRLIGQSLWDVSRSSTGNLVEWFLLRKAYERNELAPNKPDEKELARRRQSYEGGYVKEPERGLWENIVYLDFRSLYPSIIITHNVSPDTLNREGCKEYDVAPQVGHRFCKDFPGFIPSLLGDLLEERQKIKKKMKATIDPIERKLLDYRQRAIKILANSYYGYYGYARARWYCKECAESVTAWGREYITMTIKEIEEKYGFKVIYSDTDGFFATIPGADAETVKKKAMEFLKYINAKLPGALELEYEGFYKRGFFVTKKKYAVIDEEGKITTRGLEIVRRDWSEIAKETQARVLEALLKDGDVEKAVRIVKEVTEKLSKYEVPPEKLVIHEQITRDLKDYKATGPHVAVAKRLAARGVKIRPGTVISYIVLKGSGRIGDRAIPFDEFDPTKHKYDAEYYIENQVLPAVERILRAFGYRKEDLRYQKTRQVGLSAWLKPKGT

SEQ ID NO: 176 - protein, 774 aa, synthetic construct
MILDTDYITEDGKPVIRIFKKENGEFKIEYDRTFEPYFYALLKDDSAIEEVKKITAERHGTVVTVKRVEKVQKKFLGRPVEVWKLYFTHPQDVNAIRDKIREHPAVIDIYEYDIPFAKRYLIDKGLVPMEGDEELKMLAFDIETLYHEGEEFAEGPILMISYADEEGARVITWKNVDLPYVDVVSTEREMIKRFLRVVKEKDPDVLITYNGDNFDFAYLKKRCEKLGINFALGRDGSEPKIQRMGDRFAVEVKGRIHFDLYPVIRRTINLPTYTLEAVYEAVFGQPKEKVYAEEITTAWETGENLERVARYSMEDAKVTYELGKEFLPMEAQLSRLIGQSLWDVSRSSTGNLVEWFLLRKAYERNELAPNKPDEKELARRRQSYEGGYVKEPERGLWENIVYLDFRSLYPSIIITHNVSPDTLNREGCKEYDVAPQVGHRFCKDFPGFIPSLLGDLLEERQKIKKKMKATIDPIERKLLDYRQRAIKILANSYYGYYGYARARWYCKECAESVTAWGREYITMTIKEIEEKYGFKVIYSDTDGFFATIPGADAETVKKKAMEFLKYINAKLPGALELEYEGFYKRGFFVTKKKYAVIDEEGKITTRGLEIVRRDWSEIAKETQARVLEALLKDGDVEKAVRIVKEVTEKLSKYEVPPEKLVIHEQITRDLKDYKATGPHVAVAKRLAARGVKIRPGTVISYIVLKGSGRIGDRAIPFDEFDPTKHKYDAEYYIENQVLPAVERILRAFGYRKEDLRYQKTRQVGLSAWLKPKGT

SEQ ID NO: 177 - protein, 774 aa, synthetic construct
MILDTDYITEDGKPVIRIFKKENGEFKIEYDRTFEPYFYALLKDDSAIEEVKKITAERHGTVVTVKRVEKVQKKFLGRPVEVWKLYFTHPQDVQAIRDKIREHPAVIDIYEYDIPFAKRYLIDKGLVPMEGDEELKMLAFDIETLYHEGEEFAEGPILMISYADEEGARVITWKNVDLPYVDVVSTEREMIKRFLRVVKEKDPDVLITYNGDNFDFAYLKKRCEKLGINFALGRDGSEPKIQRMGDRFAVEVKGRIHFDLYPVIRRTINLPTYTLEAVYEAVFGQPKEKVYAEEITTAWETGENLERVARYSMEDAKVTYELGKEFLPMEAQLSRLIGQSLWDVSRSSTGNLVEWFLLRKAYERNELAPNKPDEKELARRRQSYEGGYVKEPERGLWENIVYLDFRSLYPSIIITHNVSPDTLNREGCKEYDVAPQVGHRFCKDFPGFIPSLLGDLLEERQKIKKKMKATIDPIERKLLDYRQRAIKILANSYYGYYGYARARWYCKECAESVTAWGREYITMTIKEIEEKYGFKVIYSDTDGFFATIPGADAETVKKKAMEFLKYINAKLPGALELEYEGFYKRGFFVTKKKYAVIDEEGKITTRGLEIVRRDWSEIAKETQARVLEALLKDGDVEKAVRIVKEVTEKLSKYEVPPEKLVIHEQITRDLKDYKATGPHVAVAKRLAARGVKIRPGTVISYIVLKGSGRIGDRAIPFDEFDPTKHKYDAEYYIENQVLPAVERILRAFGYRKEDLRYQKTRQVGLSAWLKPKGT

SEQ ID NO: 178 - protein, 774 aa, synthetic construct
MILDTDYITEDGKPVIRIFKKENGEFKIEYDRTFEPYFYALLKDDSAIEEVKKITAERHGTVVTVKRVEKVQKKFLGRPVEVWKLYFTHPQDVWAIRDKIREHPAVIDIYEYDIPFAKRYLIDKGLVPMEGDEELKMLAFDIETLYHEGEEFAEGPILMISYADEEGARVITWKNVDLPYVDVVSTEREMIKRFLRVVKEKDPDVLITYNGDNFDFAYLKKRCEKLGINFALGRDGSEPKIQRMGDRFAVEVKGRIHFDLYPVIRRTINLPTYTLEAVYEAVFGQPKEKVYAEEITTAWETGENLERVARYSMEDAKVTYELGKEFLPMEAQLSRLIGQSLWDVSRSSTGNLVEWFLLRKAYERNELAPNKPDEKELARRRQSYEGGYVKEPERGLWENIVYLDFRSLYPSIIITHNVSPDTLNREGCKEYDVAPQVGHRFCKDFPGFIPSLLGDLLEERQKIKKKMKATIDPIERKLLDYRQRAIKILANSYYGYYGYARARWYCKECAESVTAWGREYITMTIKEIEEKYGFKVIYSDTDGFFATIPGADAETVKKKAMEFLKYINAKLPGALELEYEGFYKRGFFVTKKKYAVIDEEGKITTRGLEIVRRDWSEIAKETQARVLEALLKDGDVEKAVRIVKEVTEKLSKYEVPPEKLVIHEQITRDLKDYKATGPHVAVAKRLAARGVKIRPGTVISYIVLKGSGRIGDRAIPFDEFDPTKHKYDAEYYIENQVLPAVERILRAFGYRKEDLRYQKTRQVGLSAWLKPKGT

SEQ ID NO: 179 - protein, 774 aa, synthetic construct
MILDTDYITEDGKPVIRIFKKENGEFKIEYDRTFEPYFYALLKDDSAIEEVKKITAERHGTVVTVKRVEKVQKKFLGRPVEVWKLYFTHPQDVYAIRDKIREHPAVIDIYEYDIPFAKRYLIDKGLVPMEGDEELKMLAFDIETLYHEGEEFAEGPILMISYADEEGARVITWKNVDLPYVDVVSTEREMIKRFLRVVKEKDPDVLITYNGDNFDFAYLKKRCEKLGINFALGRDGSEPKIQRMGDRFAVEVKGRIHFDLYPVIRRTINLPTYTLEAVYEAVFGQPKEKVYAEEITTAWETGENLERVARYSMEDAKVTYELGKEFLPMEAQLSRLIGQSLWDVSRSSTGNLVEWFLLRKAYERNELAPNKPDEKELARRRQSYEGGYVKEPERGLWENIVYLDFRSLYPSIIITHNVSPDTLNREGCKEYDVAPQVGHRFCKDFPGFIPSLLGDLLEERQKIKKKMKATIDPIERKLLDYRQRAIKILANSYYGYYGYARARWYCKECAESVTAWGREYITMTIKEIEEKYGFKVIYSDTDGFFATIPGADAETVKKKAMEFLKYINAKLPGALELEYEGFYKRGFFVTKKKYAVIDEEGKITTRGLEIVRRDWSEIAKETQARVLEALLKDGDVEKAVRIVKEVTEKLSKYEVPPEKLVIHEQITRDLKDYKATGPHVAVAKRLAARGVKIRPGTVISYIVLKGSGRIGDRAIPFDEFDPTKHKYDAEYYIENQVLPAVERILRAFGYRKEDLRYQKTRQVGLSAWLKPKGT

SEQ ID NO: 180 - protein, 774 aa, synthetic construct
MILDTDYITEDGKPVIRIFKKENGEFKIEYDRTFEPYFYALLKDDSAIEEVKKITAERHGTVVTVKRVEKVQKKFLGRPVEVWKLYFTHPQDVPAPRDKIREHPAVIDIYEYDIPFAKRYLIDKGLVPMEGDEELKMLAFDIETLYHEGEEFAEGPILMISYADEEGARVITWKNVDLPYVDVVSTEREMIKRFLRVVKEKDPDVLITYNGDNFDFAYLKKRCEKLGINFALGRDGSEPKIQRMGDRFAVEVKGRIHFDLYPVIRRTINLPTYTLEAVYEAVFGQPKEKVYAEEITTAWETGENLERVARYSMEDAKVTYELGKEFLPMEAQLSRLIGQSLWDVSRSSTGNLVEWFLLRKAYERNELAPNKPDEKELARRRQSYEGGYVKEPERGLWENIVYLDFRSLYPSIIITHNVSPDTLNREGCKEYDVAPQVGHRFCKDFPGFIPSLLGDLLEERQKIKKKMKATIDPIERKLLDYRQRAIKILANSYYGYYGYARARWYCKECAESVTAWGREYITMTIKEIEEKYGFKVIYSDTDGFFATIPGADAETVKKKAMEFLKYINAKLPGALELEYEGFYKRGFFVTKKKYAVIDEEGKITTRGLEIVRRDWSEIAKETQARVLEALLKDGDVEKAVRIVKEVTEKLSKYEVPPEKLVIHEQITRDLKDYKATGPHVAVAKRLAARGVKIRPGTVISYIVLKGSGRIGDRAIPFDEFDPTKHKYDAEYYIENQVLPAVERILRAFGYRKEDLRYQKTRQVGLSAWLKPKGT

SEQ ID NO: 181 - protein, 774 aa, synthetic construct
MILDTDYITEDGKPVIRIFKKENGEFKIEYDRTFEPYFYALLKDDSAIEEVKKITAERHGTVVTVKRVEKVQKKFLGRPVEVWKLYFTHPQDVPARRDKIREHPAVIDIYEYDIPFAKRYLIDKGLVPMEGDEELKMLAFDIETLYHEGEEFAEGPILMISYADEEGARVITWKNVDLPYVDVVSTEREMIKRFLRVVKEKDPDVLITYNGDNFDFAYLKKRCEKLGINFALGRDGSEPKIQRMGDRFAVEVKGRIHFDLYPVIRRTINLPTYTLEAVYEAVFGQPKEKVYAEEITTAWETGENLERVARYSMEDAKVTYELGKEFLPMEAQLSRLIGQSLWDVSRSSTGNLVEWFLLRKAYERNELAPNKPDEKELARRRQSYEGGYVKEPERGLWENIVYLDFRSLYPSIIITHNVSPDTLNREGCKEYDVAPQVGHRFCKDFPGFIPSLLGDLLEERQKIKKKMKATIDPIERKLLDYRQRAIKILANSYYGYYGYARARWYCKECAESVTAWGREYITMTIKEIEEKYGFKVIYSDTDGFFATIPGADAETVKKKAMEFLKYINAKLPGALELEYEGFYKRGFFVTKKKYAVIDEEGKITTRGLEIVRRDWSEIAKETQARVLEALLKDGDVEKAVRIVKEVTEKLSKYEVPPEKLVIHEQITRDLKDYKATGPHVAVAKRLAARGVKIRPGTVISYIVLKGSGRIGDRAIPFDEFDPTKHKYDAEYYIENQVLPAVERILRAFGYRKEDLRYQKTRQVGLSAWLKPKGT

SEQ ID NO: 182 - protein, 774 aa, synthetic construct
MILDTDYITEDGKPVIRIFKKENGEFKIEYDRTFEPYFYALLKDDSAIEEVKKITAERHGTVVTVKRVEKVQKKFLGRPVEVWKLYFTHPQDVPAIADKIREHPAVIDIYEYDIPFAKRYLIDKGLVPMEGDEELKMLAFDIETLYHEGEEFAEGPILMISYADEEGARVITWKNVDLPYVDVVSTEREMIKRFLRVVKEKDPDVLITYNGDNFDFAYLKKRCEKLGINFALGRDGSEPKIQRMGDRFAVEVKGRIHFDLYPVIRRTINLPTYTLEAVYEAVFGQPKEKVYAEEITTAWETGENLERVARYSMEDAKVTYELGKEFLPMEAQLSRLIGQSLWDVSRSSTGNLVEWFLLRKAYERNELAPNKPDEKELARRRQSYEGGYVKEPERGLWENIVYLDFRSLYPSIIITHNVSPDTLNREGCKEYDVAPQVGHRFCKDFPGFIPSLLGDLLEERQKIKKKMKATIDPIERKLLDYRQRAIKILANSYYGYYGYARARWYCKECAESVTAWGREYITMTIKEIEEKYGFKVIYSDTDGFFATIPGADAETVKKKAMEFLKYINAKLPGALELEYEGFYKRGFFVTKKKYAVIDEEGKITTRGLEIVRRDWSEIAKETQARVLEALLKDGDVEKAVRIVKEVTEKLSKYEVPPEKLVIHEQITRDLKDYKATGPHVAVAKRLAARGVKIRPGTVISYIVLKGSGRIGDRAIPFDEFDPTKHKYDAEYYIENQVLPAVERILRAFGYRKEDLRYQKTRQVGLSAWLKPKGT

SEQ ID NO: 183 - protein, 774 aa, synthetic construct
MILDTDYITEDGKPVIRIFKKENGEFKIEYDRTFEPYFYALLKDDSAIEEVKKITAERHGTVVTVKRVEKVQKKFLGRPVEVWKLYFTHPQDVPAICDKIREHPAVIDIYEYDIPFAKRYLIDKGLVPMEGDEELKMLAFDIETLYHEGEEFAEGPILMISYADEEGARVITWKNVDLPYVDVVSTEREMIKRFLRVVKEKDPDVLITYNGDNFDFAYLKKRCEKLGINFALGRDGSEPKIQRMGDRFAVEVKGRIHFDLYPVIRRTINLPTYTLEAVYEAVFGQPKEKVYAEEITTAWETGENLERVARYSMEDAKVTYELGKEFLPMEAQLSRLIGQSLWDVSRSSTGNLVEWFLLRKAYERNELAPNKPDEKELARRRQSYEGGYVKEPERGLWENIVYLDFRSLYPSIIITHNVSPDTLNREGCKEYDVAPQVGHRFCKDFPGFIPSLLGDLLEERQKIKKKMKATIDPIERKLLDYRQRAIKILANSYYGYYGYARARWYCKECAESVTAWGREYITMTIKEIEEKYGFKVIYSDTDGFFATIPGADAETVKKKAMEFLKYINAKLPGALELEYEGFYKRGFFVTKKKYAVIDEEGKITTRGLEIVRRDWSEIAKETQARVLEALLKDGDVEKAVRIVKEVTEKLSKYEVPPEKLVIHEQITRDLKDYKATGPHVAVAKRLAARGVKIRPGTVISYIVLKGSGRIGDRAIPFDEFDPTKHKYDAEYYIENQVLPAVERILRAFGYRKEDLRYQKTRQVGLSAWLKPKGT

SEQ ID NO: 184 - protein, 774 aa, synthetic construct
MILDTDYITEDGKPVIRIFKKENGEFKIEYDRTFEPYFYALLKDDSAIEEVKKITAERHGTVVTVKRVEKVQKKFLGRPVEVWKLYFTHPQDVPAIDDKIREHPAVIDIYEYDIPFAKRYLIDKGLVPMEGDEELKMLAFDIETLYHEGEEFAEGPILMISYADEEGARVITWKNVDLPYVDVVSTEREMIKRFLRVVKEKDPDVLITYNGDNFDFAYLKKRCEKLGINFALGRDGSEPKIQRMGDRFAVEVKGRIHFDLYPVIRRTINLPTYTLEAVYEAVFGQPKEKVYAEEITTAWETGENLERVARYSMEDAKVTYELGKEFLPMEAQLSRLIGQSLWDVSRSSTGNLVEWFLLRKAYERNELAPNKPDEKELARRRQSYEGGYVKEPERGLWENIVYLDFRSLYPSIIITHNVSPDTLNREGCKEYDVAPQVGHRFCKDFPGFIPSLLGDLLEERQKIKKKMKATIDPIERKLLDYRQRAIKILANSYYGYYGYARARWYCKECAESVTAWGREYITMTIKEIEEKYGFKVIYSDTDGFFATIPGADAETVKKKAMEFLKYINAKLPGALELEYEGFYKRGFFVTKKKYAVIDEEGKITTRGLEIVRRDWSEIAKETQARVLEALLKDGDVEKAVRIVKEVTEKLSKYEVPPEKLVIHEQITRDLKDYKATGPHVAVAKRLAARGVKIRPGTVISYIVLKGSGRIGDRAIPFDEFDPTKHKYDAEYYIENQVLPAVERILRAFGYRKEDLRYQKTRQVGLSAWLKPKGT

SEQ ID NO: 185 - protein, 774 aa, synthetic construct
MILDTDYITEDGKPVIRIFKKENGEFKIEYDRTFEPYFYALLKDDSAIEEVKKITAERHGTVVTVKRVEKVQKKFLGRPVEVWKLYFTHPQDVPAIEDKIREHPAVIDIYEYDIPFAKRYLIDKGLVPMEGDEELKMLAFDIETLYHEGEEFAEGPILMISYADEEGARVITWKNVDLPYVDVVSTEREMIKRFLRVVKEKDPDVLITYNGDNFDFAYLKKRCEKLGINFALGRDGSEPKIQRMGDRFAVEVKGRIHFDLYPVIRRTINLPTYTLEAVYEAVFGQPKEKVYAEEITTAWETGENLERVARYSMEDAKVTYELGKEFLPMEAQLSRLIGQSLWDVSRSSTGNLVEWFLLRKAYERNELAPNKPDEKELARRRQSYEGGYVKEPERGLWENIVYLDFRSLYPSIIITHNVSPDTLNREGCKEYDVAPQVGHRFCKDFPGFIPSLLGDLLEERQKIKKKMKATIDPIERKLLDYRQRAIKILANSYYGYYGYARARWYCKECAESVTAWGREYITMTIKEIEEKYGFKVIYSDTDGFFATIPGADAETVKKKAMEFLKYINAKLPGALELEYEGFYKRGFFVTKKKYAVIDEEGKITTRGLEIVRRDWSEIAKETQARVLEALLKDGDVEKAVRIVKEVTEKLSKYEVPPEKLVIHEQITRDLKDYKATGPHVAVAKRLAARGVKIRPGTVISYIVLKGSGRIGDRAIPFDEFDPTKHKYDAEYYIENQVLPAVERILRAFGYRKEDLRYQKTRQVGLSAWLKPKGT

SEQ ID NO: 186 - protein, 774 aa, synthetic construct
MILDTDYITEDGKPVIRIFKKENGEFKIEYDRTFEPYFYALLKDDSAIEEVKKITAERHGTVVTVKRVEKVQKKFLGRPVEVWKLYFTHPQDVPAIFDKIREHPAVIDIYEYDIPFAKRYLIDKGLVPMEGDEELKMLAFDIETLYHEGEEFAEGPILMISYADEEGARVITWKNVDLPYVDVVSTEREMIKRFLRVVKEKDPDVLITYNGDNFDFAYLKKRCEKLGINFALGRDGSEPKIQRMGDRFAVEVKGRIHFDLYPVIRRTINLPTYTLEAVYEAVFGQPKEKVYAEEITTAWETGENLERVARYSMEDAKVTYELGKEFLPMEAQLSRLIGQSLWDVSRSSTGNLVEWFLLRKAYERNELAPNKPDEKELARRRQSYEGGYVKEPERGLWENIVYLDFRSLYPSIIITHNVSPDTLNREGCKEYDVAPQVGHRFCKDFPGFIPSLLGDLLEERQKIKKKMKATIDPIERKLLDYRQRAIKILANSYYGYYGYARARWYCKECAESVTAWGREYITMTIKEIEEKYGFKVIYSDTDGFFATIPGADAETVKKKAMEFLKYINAKLPGALELEYEGFYKRGFFVTKKKYAVIDEEGKITTRGLEIVRRDWSEIAKETQARVLEALLKDGDVEKAVRIVKEVTEKLSKYEVPPEKLVIHEQITRDLKDYKATGPHVAVAKRLAARGVKIRPGTVISYIVLKGSGRIGDRAIPFDEFDPTKHKYDAEYYIENQVLPAVERILRAFGYRKEDLRYQKTRQVGLSAWLKPKGT

SEQ ID NO: 187 - protein, 774 aa, synthetic construct
MILDTDYITEDGKPVIRIFKKENGEFKIEYDRTFEPYFYALLKDDSAIEEVKKITAERHGTVVTVKRVEKVQKKFLGRPVEVWKLYFTHPQDVPAIGDKIREHPAVIDIYEYDIPFAKRYLIDKGLVPMEGDEELKMLAFDIETLYHEGEEFAEGPILMISYADEEGARVITWKNVDLPYVDVVSTEREMIKRFLRVVKEKDPDVLITYNGDNFDFAYLKKRCEKLGINFALGRDGSEPKIQRMGDRFAVEVKGRIHFDLYPVIRRTINLPTYTLEAVYEAVFGQPKEKVYAEEITTAWETGENLERVARYSMEDAKVTYELGKEFLPMEAQLSRLIGQSLWDVSRSSTGNLVEWFLLRKAYERNELAPNKPDEKELARRRQSYEGGYVKEPERGLWENIVYLDFRSLYPSIIITHNVSPDTLNREGCKEYDVAPQVGHRFCKDFPGFIPSLLGDLLEERQKIKKKMKATIDPIERKLLDYRQRAIKILANSYYGYYGYARARWYCKECAESVTAWGREYITMTIKEIEEKYGFKVIYSDTDGFFATIPGADAETVKKKAMEFLKYINAKLPGALELEYEGFYKRGFFVTKKKYAVIDEEGKITTRGLEIVRRDWSEIAKETQARVLEALLKDGDVEKAVRIVKEVTEKLSKYEVPPEKLVIHEQITRDLKDYKATGPHVAVAKRLAARGVKIRPGTVISYIVLKGSGRIGDRAIPFDEFDPTKHKYDAEYYIENQVLPAVERILRAFGYRKEDLRYQKTRQVGLSAWLKPKGT

SEQ ID NO: 188 - protein, 774 aa, synthetic construct
MILDTDYITEDGKPVIRIFKKENGEFKIEYDRTFEPYFYALLKDDSAIEEVKKITAERHGTVVTVKRVEKVQKKFLGRPVEVWKLYFTHPQDVPAIHDKIREHPAVIDIYEYDIPFAKRYLIDKGLVPMEGDEELKMLAFDIETLYHEGEEFAEGPILMISYADEEGARVITWKNVDLPYVDVVSTEREMIKRFLRVVKEKDPDVLITYNGDNFDFAYLKKRCEKLGINFALGRDGSEPKIQRMGDRFAVEVKGRIHFDLYPVIRRTINLPTYTLEAVYEAVFGQPKEKVYAEEITTAWETGENLERVARYSMEDAKVTYELGKEFLPMEAQLSRLIGQSLWDVSRSSTGNLVEWFLLRKAYERNELAPNKPDEKELARRRQSYEGGYVKEPERGLWENIVYLDFRSLYPSIIITHNVSPDTLNREGCKEYDVAPQVGHRFCKDFPGFIPSLLGDLLEERQKIKKKMKATIDPIERKLLDYRQRAIKILANSYYGYYGYARARWYCKECAESVTAWGREYITMTIKEIEEKYGFKVIYSDTDGFFATIPGADAETVKKKAMEFLKYINAKLPGALELEYEGFYKRGFFVTKKKYAVIDEEGKITTRGLEIVRRDWSEIAKETQARVLEALLKDGDVEKAVRIVKEVTEKLSKYEVPPEKLVIHEQITRDLKDYKATGPHVAVAKRLAARGVKIRPGTVISYIVLKGSGRIGDRAIPFDEFDPTKHKYDAEYYIENQVLPAVERILRAFGYRKEDLRYQKTRQVGLSAWLKPKGT

SEQ ID NO: 189 - protein, 774 aa, synthetic construct
MILDTDYITEDGKPVIRIFKKENGEFKIEYDRTFEPYFYALLKDDSAIEEVKKITAERHGTVVTVKRVEKVQKKFLGRPVEVWKLYFTHPQDVPAIIDKIREHPAVIDIYEYDIPFAKRYLIDKGLVPMEGDEELKMLAFDIETLYHEGEEFAEGPILMISYADEEGARVITWKNVDLPYVDVVSTEREMIKRFLRVVKEKDPDVLITYNGDNFDFAYLKKRCEKLGINFALGRDGSEPKIQRMGDRFAVEVKGRIHFDLYPVIRRTINLPTYTLEAVYEAVFGQPKEKVYAEEITTAWETGENLERVARYSMEDAKVTYELGKEFLPMEAQLSRLIGQSLWDVSRSSTGNLVEWFLLRKAYERNELAPNKPDEKELARRRQSYEGGYVKEPERGLWENIVYLDFRSLYPSIIITHNVSPDTLNREGCKEYDVAPQVGHRFCKDFPGFIPSLLGDLLEERQKIKKKMKATIDPIERKLLDYRQRAIKILANSYYGYYGYARARWYCKECAESVTAWGREYITMTIKEIEEKYGFKVIYSDTDGFFATIPGADAETVKKKAMEFLKYINAKLPGALELEYEGFYKRGFFVTKKKYAVIDEEGKITTRGLEIVRRDWSEIAKETQARVLEALLKDGDVEKAVRIVKEVTEKLSKYEVPPEKLVIHEQITRDLKDYKATGPHVAVAKRLAARGVKIRPGTVISYIVLKGSGRIGDRAIPFDEFDPTKHKYDAEYYIENQVLPAVERILRAFGYRKEDLRYQKTRQVGLSAWLKPKGT

SEQ ID NO: 190 - protein, 774 aa, synthetic construct
MILDTDYITEDGKPVIRIFKKENGEFKIEYDRTFEPYFYALLKDDSAIEEVKKITAERHGTVVTVKRVEKVQKKFLGRPVEVWKLYFTHPQDVPAIKDKIREHPAVIDIYEYDIPFAKRYLIDKGLVPMEGDEELKMLAFDIETLYHEGEEFAEGPILMISYADEEGARVITWKNVDLPYVDVVSTEREMIKRFLRVVKEKDPDVLITYNGDNFDFAYLKKRCEKLGINFALGRDGSEPKIQRMGDRFAVEVKGRIHFDLYPVIRRTINLPTYTLEAVYEAVFGQPKEKVYAEEITTAWETGENLERVARYSMEDAKVTYELGKEFLPMEAQLSRLIGQSLWDVSRSSTGNLVEWFLLRKAYERNELAPNKPDEKELARRRQSYEGGYVKEPERGLWENIVYLDFRSLYPSIIITHNVSPDTLNREGCKEYDVAPQVGHRFCKDFPGFIPSLLGDLLEERQKIKKKMKATIDPIERKLLDYRQRAIKILANSYYGYYGYARARWYCKECAESVTAWGREYITMTIKEIEEKYGFKVIYSDTDGFFATIPGADAETVKKKAMEFLKYINAKLPGALELEYEGFYKRGFFVTKKKYAVIDEEGKITTRGLEIVRRDWSEIAKETQARVLEALLKDGDVEKAVRIVKEVTEKLSKYEVPPEKLVIHEQITRDLKDYKATGPHVAVAKRLAARGVKIRPGTVISYIVLKGSGRIGDRAIPFDEFDPTKHKYDAEYYIENQVLPAVERILRAFGYRKEDLRYQKTRQVGLSAWLKPKGT

SEQ ID NO: 191 - protein, 774 aa, synthetic construct
MILDTDYITEDGKPVIRIFKKENGEFKIEYDRTFEPYFYALLKDDSAIEEVKKITAERHGTVVTVKRVEKVQKKFLGRPVEVWKLYFTHPQDVPAILDKIREHPAVIDIYEYDIPFAKRYLIDKGLVPMEGDEELKMLAFDIETLYHEGEEFAEGPILMISYADEEGARVITWKNVDLPYVDVVSTEREMIKRFLRVVKEKDPDVLITYNGDNFDFAYLKKRCEKLGINFALGRDGSEPKIQRMGDRFAVEVKGRIHFDLYPVIRRTINLPTYTLEAVYEAVFGQPKEKVYAEEITTAWETGENLERVARYSMEDAKVTYELGKEFLPMEAQLSRLIGQSLWDVSRSSTGNLVEWFLLRKAYERNELAPNKPDEKELARRRQSYEGGYVKEPERGLWENIVYLDFRSLYPSIIITHNVSPDTLNREGCKEYDVAPQVGHRFCKDFPGFIPSLLGDLLEERQKIKKKMKATIDPIERKLLDYRQRAIKILANSYYGYYGYARARWYCKECAESVTAWGREYITMTIKEIEEKYGFKVIYSDTDGFFATIPGADAETVKKKAMEFLKYINAKLPGALELEYEGFYKRGFFVTKKKYAVIDEEGKITTRGLEIVRRDWSEIAKETQARVLEALLKDGDVEKAVRIVKEVTEKLSKYEVPPEKLVIHEQITRDLKDYKATGPHVAVAKRLAARGVKIRPGTVISYIVLKGSGRIGDRAIPFDEFDPTKHKYDAEYYIENQVLPAVERILRAFGYRKEDLRYQKTRQVGLSAWLKPKGT

SEQ ID NO: 192 - protein, 774 aa, synthetic construct
MILDTDYITEDGKPVIRIFKKENGEFKIEYDRTFEPYFYALLKDDSAIEEVKKITAERHGTVVTVKRVEKVQKKFLGRPVEVWKLYFTHPQDVPAIMDKIREHPAVIDIYEYDIPFAKRYLIDKGLVPMEGDEELKMLAFDIETLYHEGEEFAEGPILMISYADEEGARVITWKNVDLPYVDVVSTEREMIKRFLRVVKEKDPDVLITYNGDNFDFAYLKKRCEKLGINFALGRDGSEPKIQRMGDRFAVEVKGRIHFDLYPVIRRTINLPTYTLEAVYEAVFGQPKEKVYAEEITTAWETGENLERVARYSMEDAKVTYELGKEFLPMEAQLSRLIGQSLWDVSRSSTGNLVEWFLLRKAYERNELAPNKPDEKELARRRQSYEGGYVKEPERGLWENIVYLDFRSLYPSIIITHNVSPDTLNREGCKEYDVAPQVGHRFCKDFPGFIPSLLGDLLEERQKIKKKMKATIDPIERKLLDYRQRAIKILANSYYGYYGYARARWYCKECAESVTAWGREYITMTIKEIEEKYGFKVIYSDTDGFFATIPGADAETVKKKAMEFLKYINAKLPGALELEYEGFYKRGFFVTKKKYAVIDEEGKITTRGLEIVRRDWSEIAKETQARVLEALLKDGDVEKAVRIVKEVTEKLSKYEVPPEKLVIHEQITRDLKDYKATGPHVAVAKRLAARGVKIRPGTVISYIVLKGSGRIGDRAIPFDEFDPTKHKYDAEYYIENQVLPAVERILRAFGYRKEDLRYQKTRQVGLSAWLKPKGT

SEQ ID NO: 193 - protein, 774 aa, synthetic construct
MILDTDYITEDGKPVIRIFKKENGEFKIEYDRTFEPYFYALLKDDSAIEEVKKITAERHGTVVTVKRVEKVQKKFLGRPVEVWKLYFTHPQDVPAINDKIREHPAVIDIYEYDIPFAKRYLIDKGLVPMEGDEELKMLAFDIETLYHEGEEFAEGPILMISYADEEGARVITWKNVDLPYVDVVSTEREMIKRFLRVVKEKDPDVLITYNGDNFDFAYLKKRCEKLGINFALGRDGSEPKIQRMGDRFAVEVKGRIHFDLYPVIRRTINLPTYTLEAVYEAVFGQPKEKVYAEEITTAWETGENLERVARYSMEDAKVTYELGKEFLPMEAQLSRLIGQSLWDVSRSSTGNLVEWFLLRKAYERNELAPNKPDEKELARRRQSYEGGYVKEPERGLWENIVYLDFRSLYPSIIITHNVSPDTLNREGCKEYDVAPQVGHRFCKDFPGFIPSLLGDLLEERQKIKKKMKATIDPIERKLLDYRQRAIKILANSYYGYYGYARARWYCKECAESVTAWGREYITMTIKEIEEKYGFKVIYSDTDGFFATIPGADAETVKKKAMEFLKYINAKLPGALELEYEGFYKRGFFVTKKKYAVIDEEGKITTRGLEIVRRDWSEIAKETQARVLEALLKDGDVEKAVRIVKEVTEKLSKYEVPPEKLVIHEQITRDLKDYKATGPHVAVAKRLAARGVKIRPGTVISYIVLKGSGRIGDRAIPFDEFDPTKHKYDAEYYIENQVLPAVERILRAFGYRKEDLRYQKTRQVGLSAWLKPKGT

SEQ ID NO: 194 - protein, 774 aa, synthetic construct
MILDTDYITEDGKPVIRIFKKENGEFKIEYDRTFEPYFYALLKDDSAIEEVKKITAERHGTVVTVKRVEKVQKKFLGRPVEVWKLYFTHPQDVPAIPDKIREHPAVIDIYEYDIPFAKRYLIDKGLVPMEGDEELKMLAFDIETLYHEGEEFAEGPILMISYADEEGARVITWKNVDLPYVDVVSTEREMIKRFLRVVKEKDPDVLITYNGDNFDFAYLKKRCEKLGINFALGRDGSEPKIQRMGDRFAVEVKGRIHFDLYPVIRRTINLPTYTLEAVYEAVFGQPKEKVYAEEITTAWETGENLERVARYSMEDAKVTYELGKEFLPMEAQLSRLIGQSLWDVSRSSTGNLVEWFLLRKAYERNELAPNKPDEKELARRRQSYEGGYVKEPERGLWENIVYLDFRSLYPSIIITHNVSPDTLNREGCKEYDVAPQVGHRFCKDFPGFIPSLLGDLLEERQKIKKKMKATIDPIERKLLDYRQRAIKILANSYYGYYGYARARWYCKECAESVTAWGREYITMTIKEIEEKYGFKVIYSDTDGFFATIPGADAETVKKKAMEFLKYINAKLPGALELEYEGFYKRGFFVTKKKYAVIDEEGKITTRGLEIVRRDWSEIAKETQARVLEALLKDGDVEKAVRIVKEVTEKLSKYEVPPEKLVIHEQITRDLKDYKATGPHVAVAKRLAARGVKIRPGTVISYIVLKGSGRIGDRAIPFDEFDPTKHKYDAEYYIENQVLPAVERILRAFGYRKEDLRYQKTRQVGLSAWLKPKGT

SEQ ID NO: 195 - protein, 774 aa, synthetic construct
MILDTDYITEDGKPVIRIFKKENGEFKIEYDRTFEPYFYALLKDDSAIEEVKKITAERHGTVVTVKRVEKVQKKFLGRPVEVWKLYFTHPQDVPAIQDKIREHPAVIDIYEYDIPFAKRYLIDKGLVPMEGDEELKMLAFDIETLYHEGEEFAEGPILMISYADEEGARVITWKNVDLPYVDVVSTEREMIKRFLRVVKEKDPDVLITYNGDNFDFAYLKKRCEKLGINFALGRDGSEPKIQRMGDRFAVEVKGRIHFDLYPVIRRTINLPTYTLEAVYEAVFGQPKEKVYAEEITTAWETGENLERVARYSMEDAKVTYELGKEFLPMEAQLSRLIGQSLWDVSRSSTGNLVEWFLLRKAYERNELAPNKPDEKELARRRQSYEGGYVKEPERGLWENIVYLDFRSLYPSIIITHNVSPDTLNREGCKEYDVAPQVGHRFCKDFPGFIPSLLGDLLEERQKIKKKMKATIDPIERKLLDYRQRAIKILANSYYGYYGYARARWYCKECAESVTAWGREYITMTIKEIEEKYGFKVIYSDTDGFFATIPGADAETVKKKAMEFLKYINAKLPGALELEYEGFYKRGFFVTKKKYAVIDEEGKITTRGLEIVRRDWSEIAKETQARVLEALLKDGDVEKAVRIVKEVTEKLSKYEVPPEKLVIHEQITRDLKDYKATGPHVAVAKRLAARGVKIRPGTVISYIVLKGSGRIGDRAIPFDEFDPTKHKYDAEYYIENQVLPAVERILRAFGYRKEDLRYQKTRQVGLSAWLKPKGT

SEQ ID NO: 196 - protein, 774 aa, synthetic construct
MILDTDYITEDGKPVIRIFKKENGEFKIEYDRTFEPYFYALLKDDSAIEEVKKITAERHGTVVTVKRVEKVQKKFLGRPVEVWKLYFTHPQDVPAISDKIREHPAVIDIYEYDIPFAKRYLIDKGLVPMEGDEELKMLAFDIETLYHEGEEFAEGPILMISYADEEGARVITWKNVDLPYVDVVSTEREMIKRFLRVVKEKDPDVLITYNGDNFDFAYLKKRCEKLGINFALGRDGSEPKIQRMGDRFAVEVKGRIHFDLYPVIRRTINLPTYTLEAVYEAVFGQPKEKVYAEEITTAWETGENLERVARYSMEDAKVTYELGKEFLPMEAQLSRLIGQSLWDVSRSSTGNLVEWFLLRKAYERNELAPNKPDEKELARRRQSYEGGYVKEPERGLWENIVYLDFRSLYPSIIITHNVSPDTLNREGCKEYDVAPQVGHRFCKDFPGFIPSLLGDLLEERQKIKKKMKATIDPIERKLLDYRQRAIKILANSYYGYYGYARARWYCKECAESVTAWGREYITMTIKEIEEKYGFKVIYSDTDGFFATIPGADAETVKKKAMEFLKYINAKLPGALELEYEGFYKRGFFVTKKKYAVIDEEGKITTRGLEIVRRDWSEIAKETQARVLEALLKDGDVEKAVRIVKEVTEKLSKYEVPPEKLVIHEQITRDLKDYKATGPHVAVAKRLAARGVKIRPGTVISYIVLKGSGRIGDRAIPFDEFDPTKHKYDAEYYIENQVLPAVERILRAFGYRKEDLRYQKTRQVGLSAWLKPKGT

SEQ ID NO: 197 - protein, 774 aa, synthetic construct
MILDTDYITEDGKPVIRIFKKENGEFKIEYDRTFEPYFYALLKDDSAIEEVKKITAERHGTVVTVKRVEKVQKKFLGRPVEVWKLYFTHPQDVPAITDKIREHPAVIDIYEYDIPFAKRYLIDKGLVPMEGDEELKMLAFDIETLYHEGEEFAEGPILMISYADEEGARVITWKNVDLPYVDVVSTEREMIKRFLRVVKEKDPDVLITYNGDNFDFAYLKKRCEKLGINFALGRDGSEPKIQRMGDRFAVEVKGRIHFDLYPVIRRTINLPTYTLEAVYEAVFGQPKEKVYAEEITTAWETGENLERVARYSMEDAKVTYELGKEFLPMEAQLSRLIGQSLWDVSRSSTGNLVEWFLLRKAYERNELAPNKPDEKELARRRQSYEGGYVKEPERGLWENIVYLDFRSLYPSIIITHNVSPDTLNREGCKEYDVAPQVGHRFCKDFPGFIPSLLGDLLEERQKIKKKMKATIDPIERKLLDYRQRAIKILANSYYGYYGYARARWYCKECAESVTAWGREYITMTIKEIEEKYGFKVIYSDTDGFFATIPGADAETVKKKAMEFLKYINAKLPGALELEYEGFYKRGFFVTKKKYAVIDEEGKITTRGLEIVRRDWSEIAKETQARVLEALLKDGDVEKAVRIVKEVTEKLSKYEVPPEKLVIHEQITRDLKDYKATGPHVAVAKRLAARGVKIRPGTVISYIVLKGSGRIGDRAIPFDEFDPTKHKYDAEYYIENQVLPAVERILRAFGYRKEDLRYQKTRQVGLSAWLKPKGT

SEQ ID NO: 198 - protein, 774 aa, synthetic construct
MILDTDYITEDGKPVIRIFKKENGEFKIEYDRTFEPYFYALLKDDSAIEEVKKITAERHGTVVTVKRVEKVQKKFLGRPVEVWKLYFTHPQDVPAIVDKIREHPAVIDIYEYDIPFAKRYLIDKGLVPMEGDEELKMLAFDIETLYHEGEEFAEGPILMISYADEEGARVITWKNVDLPYVDVVSTEREMIKRFLRVVKEKDPDVLITYNGDNFDFAYLKKRCEKLGINFALGRDGSEPKIQRMGDRFAVEVKGRIHFDLYPVIRRTINLPTYTLEAVYEAVFGQPKEKVYAEEITTAWETGENLERVARYSMEDAKVTYELGKEFLPMEAQLSRLIGQSLWDVSRSSTGNLVEWFLLRKAYERNELAPNKPDEKELARRRQSYEGGYVKEPERGLWENIVYLDFRSLYPSIIITHNVSPDTLNREGCKEYDVAPQVGHRFCKDFPGFIPSLLGDLLEERQKIKKKMKATIDPIERKLLDYRQRAIKILANSYYGYYGYARARWYCKECAESVTAWGREYITMTIKEIEEKYGFKVIYSDTDGFFATIPGADAETVKKKAMEFLKYINAKLPGALELEYEGFYKRGFFVTKKKYAVIDEEGKITTRGLEIVRRDWSEIAKETQARVLEALLKDGDVEKAVRIVKEVTEKLSKYEVPPEKLVIHEQITRDLKDYKATGPHVAVAKRLAARGVKIRPGTVISYIVLKGSGRIGDRAIPFDEFDPTKHKYDAEYYIENQVLPAVERILRAFGYRKEDLRYQKTRQVGLSAWLKPKGT

SEQ ID NO: 199 - protein, 774 aa, synthetic construct
MILDTDYITEDGKPVIRIFKKENGEFKIEYDRTFEPYFYALLKDDSAIEEVKKITAERHGTVVTVKRVEKVQKKFLGRPVEVWKLYFTHPQDVPAIWDKIREHPAVIDIYEYDIPFAKRYLIDKGLVPMEGDEELKMLAFDIETLYHEGEEFAEGPILMISYADEEGARVITWKNVDLPYVDVVSTEREMIKRFLRVVKEKDPDVLITYNGDNFDFAYLKKRCEKLGINFALGRDGSEPKIQRMGDRFAVEVKGRIHFDLYPVIRRTINLPTYTLEAVYEAVFGQPKEKVYAEEITTAWETGENLERVARYSMEDAKVTYELGKEFLPMEAQLSRLIGQSLWDVSRSSTGNLVEWFLLRKAYERNELAPNKPDEKELARRRQSYEGGYVKEPERGLWENIVYLDFRSLYPSIIITHNVSPDTLNREGCKEYDVAPQVGHRFCKDFPGFIPSLLGDLLEERQKIKKKMKATIDPIERKLLDYRQRAIKILANSYYGYYGYARARWYCKECAESVTAWGREYITMTIKEIEEKYGFKVIYSDTDGFFATIPGADAETVKKKAMEFLKYINAKLPGALELEYEGFYKRGFFVTKKKYAVIDEEGKITTRGLEIVRRDWSEIAKETQARVLEALLKDGDVEKAVRIVKEVTEKLSKYEVPPEKLVIHEQITRDLKDYKATGPHVAVAKRLAARGVKIRPGTVISYIVLKGSGRIGDRAIPFDEFDPTKHKYDAEYYIENQVLPAVERILRAFGYRKEDLRYQKTRQVGLSAWLKPKGT

SEQ ID NO: 200 - protein, 774 aa, synthetic construct
MILDTDYITEDGKPVIRIFKKENGEFKIEYDRTFEPYFYALLKDDSAIEEVKKITAERHGTVVTVKRVEKVQKKFLGRPVEVWKLYFTHPQDVPAIYDKIREHPAVIDIYEYDIPFAKRYLIDKGLVPMEGDEELKMLAFDIETLYHEGEEFAEGPILMISYADEEGARVITWKNVDLPYVDVVSTEREMIKRFLRVVKEKDPDVLITYNGDNFDFAYLKKRCEKLGINFALGRDGSEPKIQRMGDRFAVEVKGRIHFDLYPVIRRTINLPTYTLEAVYEAVFGQPKEKVYAEEITTAWETGENLERVARYSMEDAKVTYELGKEFLPMEAQLSRLIGQSLWDVSRSSTGNLVEWFLLRKAYERNELAPNKPDEKELARRRQSYEGGYVKEPERGLWENIVYLDFRSLYPSIIITHNVSPDTLNREGCKEYDVAPQVGHRFCKDFPGFIPSLLGDLLEERQKIKKKMKATIDPIERKLLDYRQRAIKILANSYYGYYGYARARWYCKECAESVTAWGREYITMTIKEIEEKYGFKVIYSDTDGFFATIPGADAETVKKKAMEFLKYINAKLPGALELEYEGFYKRGFFVTKKKYAVIDEEGKITTRGLEIVRRDWSEIAKETQARVLEALLKDGDVEKAVRIVKEVTEKLSKYEVPPEKLVIHEQITRDLKDYKATGPHVAVAKRLAARGVKIRPGTVISYIVLKGSGRIGDRAIPFDEFDPTKHKYDAEYYIENQVLPAVERILRAFGYRKEDLRYQKTRQVGLSAWLKPKGT

SEQ ID NO: 201 - protein, 774 aa, synthetic construct
MILDTDYITEDGKPVIRIFKKENGEFKIEYDRTFEPYFYALLKDDSAIEEVKKITAERHGTVVTVKRVEKVQKKFLGRPVEVWKLYFTHPQDVPAIRDKIEEHPAVIDIYEYDIPFAKRYLIDKGLVPMEGDEELKMLAFDIETLYHEGEEFAEGPILMISYADEEGARVITWKNVDLPYVDVVSTEREMIKRFLRVVKEKDPDVLITYNGDNFDFAYLKKRCEKLGINFALGRDGSEPKIQRMGDRFAVEVKGRIHFDLYPVIRRTINLPTYTLEAVYEAVFGQPKEKVYAEEITTAWETGENLERVARYSMEDAKVTYELGKEFLPMEAQLSRLIGQSLWDVSRSSTGNLVEWFLLRKAYERNELAPNKPDEKELARRRQSYEGGYVKEPERGLWENIVYLDFRSLYPSIIITHNVSPDTLNREGCKEYDVAPQVGHRFCKDFPGFIPSLLGDLLEERQKIKKKMKATIDPIERKLLDYRQRAIKILANSYYGYYGYARARWYCKECAESVTAWGREYITMTIKEIEEKYGFKVIYSDTDGFFATIPGADAETVKKKAMEFLKYINAKLPGALELEYEGFYKRGFFVTKKKYAVIDEEGKITTRGLEIVRRDWSEIAKETQARVLEALLKDGDVEKAVRIVKEVTEKLSKYEVPPEKLVIHEQITRDLKDYKATGPHVAVAKRLAARGVKIRPGTVISYIVLKGSGRIGDRAIPFDEFDPTKHKYDAEYYIENQVLPAVERILRAFGYRKEDLRYQKTRQVGLSAWLKPKGT

SEQ ID NO: 202 - protein, 774 aa, synthetic construct
MILDTDYITEDGKPVIRIFKKENGEFKIEYDRTFEPYFYALLKDDSAIEEVKKITAERHGTVVTVKRVEKVQKKFLGRPVEVWKLYFTHPQDVPAIRDKIQEHPAVIDIYEYDIPFAKRYLIDKGLVPMEGDEELKMLAFDIETLYHEGEEFAEGPILMISYADEEGARVITWKNVDLPYVDVVSTEREMIKRFLRVVKEKDPDVLITYNGDNFDFAYLKKRCEKLGINFALGRDGSEPKIQRMGDRFAVEVKGRIHFDLYPVIRRTINLPTYTLEAVYEAVFGQPKEKVYAEEITTAWETGENLERVARYSMEDAKVTYELGKEFLPMEAQLSRLIGQSLWDVSRSSTGNLVEWFLLRKAYERNELAPNKPDEKELARRRQSYEGGYVKEPERGLWENIVYLDFRSLYPSIIITHNVSPDTLNREGCKEYDVAPQVGHRFCKDFPGFIPSLLGDLLEERQKIKKKMKATIDPIERKLLDYRQRAIKILANSYYGYYGYARARWYCKECAESVTAWGREYITMTIKEIEEKYGFKVIYSDTDGFFATIPGADAETVKKKAMEFLKYINAKLPGALELEYEGFYKRGFFVTKKKYAVIDEEGKITTRGLEIVRRDWSEIAKETQARVLEALLKDGDVEKAVRIVKEVTEKLSKYEVPPEKLVIHEQITRDLKDYKATGPHVAVAKRLAARGVKIRPGTVISYIVLKGSGRIGDRAIPFDEFDPTKHKYDAEYYIENQVLPAVERILRAFGYRKEDLRYQKTRQVGLSAWLKPKGT

SEQ ID NO: 203 - protein, 774 aa, synthetic construct
MILDTDYITEDGKPVIRIFKKENGEFKIEYDRTFEPYFYALLKDDSAIEEVKKITAERHGTVVTVKRVEKVQKKFLGRPVEVWKLYFTHPQDVPAIRDKIREHPAVIDDYEYDIPFAKRYLIDKGLVPMEGDEELKMLAFDIETLYHEGEEFAEGPILMISYADEEGARVITWKNVDLPYVDVVSTEREMIKRFLRVVKEKDPDVLITYNGDNFDFAYLKKRCEKLGINFALGRDGSEPKIQRMGDRFAVEVKGRIHFDLYPVIRRTINLPTYTLEAVYEAVFGQPKEKVYAEEITTAWETGENLERVARYSMEDAKVTYELGKEFLPMEAQLSRLIGQSLWDVSRSSTGNLVEWFLLRKAYERNELAPNKPDEKELARRRQSYEGGYVKEPERGLWENIVYLDFRSLYPSIIITHNVSPDTLNREGCKEYDVAPQVGHRFCKDFPGFIPSLLGDLLEERQKIKKKMKATIDPIERKLLDYRQRAIKILANSYYGYYGYARARWYCKECAESVTAWGREYITMTIKEIEEKYGFKVIYSDTDGFFATIPGADAETVKKKAMEFLKYINAKLPGALELEYEGFYKRGFFVTKKKYAVIDEEGKITTRGLEIVRRDWSEIAKETQARVLEALLKDGDVEKAVRIVKEVTEKLSKYEVPPEKLVIHEQITRDLKDYKATGPHVAVAKRLAARGVKIRPGTVISYIVLKGSGRIGDRAIPFDEFDPTKHKYDAEYYIENQVLPAVERILRAFGYRKEDLRYQKTRQVGLSAWLKPKGT

SEQ ID NO: 204 - protein, 774 aa, synthetic construct
MILDTDYITEDGKPVIRIFKKENGEFKIEYDRTFEPYFYALLKDDSAIEEVKKITAERHGTVVTVKRVEKVQKKFLGRPVEVWKLYFTHPQDVPAIRDKIREHPAVIDFYEYDIPFAKRYLIDKGLVPMEGDEELKMLAFDIETLYHEGEEFAEGPILMISYADEEGARVITWKNVDLPYVDVVSTEREMIKRFLRVVKEKDPDVLITYNGDNFDFAYLKKRCEKLGINFALGRDGSEPKIQRMGDRFAVEVKGRIHFDLYPVIRRTINLPTYTLEAVYEAVFGQPKEKVYAEEITTAWETGENLERVARYSMEDAKVTYELGKEFLPMEAQLSRLIGQSLWDVSRSSTGNLVEWFLLRKAYERNELAPNKPDEKELARRRQSYEGGYVKEPERGLWENIVYLDFRSLYPSIIITHNVSPDTLNREGCKEYDVAPQVGHRFCKDFPGFIPSLLGDLLEERQKIKKKMKATIDPIERKLLDYRQRAIKILANSYYGYYGYARARWYCKECAESVTAWGREYITMTIKEIEEKYGFKVIYSDTDGFFATIPGADAETVKKKAMEFLKYINAKLPGALELEYEGFYKRGFFVTKKKYAVIDEEGKITTRGLEIVRRDWSEIAKETQARVLEALLKDGDVEKAVRIVKEVTEKLSKYEVPPEKLVIHEQITRDLKDYKATGPHVAVAKRLAARGVKIRPGTVISYIVLKGSGRIGDRAIPFDEFDPTKHKYDAEYYIENQVLPAVERILRAFGYRKEDLRYQKTRQVGLSAWLKPKGT

SEQ ID NO: 205 - protein, 774 aa, synthetic construct
MILDTDYITEDGKPVIRIFKKENGEFKIEYDRTFEPYFYALLKDDSAIEEVKKITAERHGTVVTVKRVEKVQKKFLGRPVEVWKLYFTHPQDVPAIRDKIREHPAVIDIPEYDIPFAKRYLIDKGLVPMEGDEELKMLAFDIETLYHEGEEFAEGPILMISYADEEGARVITWKNVDLPYVDVVSTEREMIKRFLRVVKEKDPDVLITYNGDNFDFAYLKKRCEKLGINFALGRDGSEPKIQRMGDRFAVEVKGRIHFDLYPVIRRTINLPTYTLEAVYEAVFGQPKEKVYAEEITTAWETGENLERVARYSMEDAKVTYELGKEFLPMEAQLSRLIGQSLWDVSRSSTGNLVEWFLLRKAYERNELAPNKPDEKELARRRQSYEGGYVKEPERGLWENIVYLDFRSLYPSIIITHNVSPDTLNREGCKEYDVAPQVGHRFCKDFPGFIPSLLGDLLEERQKIKKKMKATIDPIERKLLDYRQRAIKILANSYYGYYGYARARWYCKECAESVTAWGREYITMTIKEIEEKYGFKVIYSDTDGFFATIPGADAETVKKKAMEFLKYINAKLPGALELEYEGFYKRGFFVTKKKYAVIDEEGKITTRGLEIVRRDWSEIAKETQARVLEALLKDGDVEKAVRIVKEVTEKLSKYEVPPEKLVIHEQITRDLKDYKATGPHVAVAKRLAARGVKIRPGTVISYIVLKGSGRIGDRAIPFDEFDPTKHKYDAEYYIENQVLPAVERILRAFGYRKEDLRYQKTRQVGLSAWLKPKGT

SEQ ID NO: 206 - protein, 774 aa, synthetic construct
MILDTDYITEDGKPVIRIFKKENGEFKIEYDRTFEPYFYALLKDDSAIEEVKKITAERHGTVVTVKRVEKVQKKFLGRPVEVWKLYFTHPQDVPAIRDKIREHPAVIDIYGYDIPFAKRYLIDKGLVPMEGDEELKMLAFDIETLYHEGEEFAEGPILMISYADEEGARVITWKNVDLPYVDVVSTEREMIKRFLRVVKEKDPDVLITYNGDNFDFAYLKKRCEKLGINFALGRDGSEPKIQRMGDRFAVEVKGRIHFDLYPVIRRTINLPTYTLEAVYEAVFGQPKEKVYAEEITTAWETGENLERVARYSMEDAKVTYELGKEFLPMEAQLSRLIGQSLWDVSRSSTGNLVEWFLLRKAYERNELAPNKPDEKELARRRQSYEGGYVKEPERGLWENIVYLDFRSLYPSIIITHNVSPDTLNREGCKEYDVAPQVGHRFCKDFPGFIPSLLGDLLEERQKIKKKMKATIDPIERKLLDYRQRAIKILANSYYGYYGYARARWYCKECAESVTAWGREYITMTIKEIEEKYGFKVIYSDTDGFFATIPGADAETVKKKAMEFLKYINAKLPGALELEYEGFYKRGFFVTKKKYAVIDEEGKITTRGLEIVRRDWSEIAKETQARVLEALLKDGDVEKAVRIVKEVTEKLSKYEVPPEKLVIHEQITRDLKDYKATGPHVAVAKRLAARGVKIRPGTVISYIVLKGSGRIGDRAIPFDEFDPTKHKYDAEYYIENQVLPAVERILRAFGYRKEDLRYQKTRQVGLSAWLKPKGT

SEQ ID NO: 207 - protein, 774 aa, synthetic construct
MILDTDYITEDGKPVIRIFKKENGEFKIEYDRTFEPYFYALLKDDSAIEEVKKITAERHGTVVTVKRVEKVQKKFLGRPVEVWKLYFTHPQDVPAIRDKIREHPAVIDIYEDDIPFAKRYLIDKGLVPMEGDEELKMLAFDIETLYHEGEEFAEGPILMISYADEEGARVITWKNVDLPYVDVVSTEREMIKRFLRVVKEKDPDVLITYNGDNFDFAYLKKRCEKLGINFALGRDGSEPKIQRMGDRFAVEVKGRIHFDLYPVIRRTINLPTYTLEAVYEAVFGQPKEKVYAEEITTAWETGENLERVARYSMEDAKVTYELGKEFLPMEAQLSRLIGQSLWDVSRSSTGNLVEWFLLRKAYERNELAPNKPDEKELARRRQSYEGGYVKEPERGLWENIVYLDFRSLYPSIIITHNVSPDTLNREGCKEYDVAPQVGHRFCKDFPGFIPSLLGDLLEERQKIKKKMKATIDPIERKLLDYRQRAIKILANSYYGYYGYARARWYCKECAESVTAWGREYITMTIKEIEEKYGFKVIYSDTDGFFATIPGADAETVKKKAMEFLKYINAKLPGALELEYEGFYKRGFFVTKKKYAVIDEEGKITTRGLEIVRRDWSEIAKETQARVLEALLKDGDVEKAVRIVKEVTEKLSKYEVPPEKLVIHEQITRDLKDYKATGPHVAVAKRLAARGVKIRPGTVISYIVLKGSGRIGDRAIPFDEFDPTKHKYDAEYYIENQVLPAVERILRAFGYRKEDLRYQKTRQVGLSAWLKPKGT

SEQ ID NO: 208 - protein, 774 aa, synthetic construct
MILDTDYITEDGKPVIRIFKKENGEFKIEYDRTFEPYFYALLKDDSAIEEVKKITAERHGTVVTVKRVEKVQKKFLGRPVEVWKLYFTHPQDVPAIRDKIREHPAVIDIYEEDIPFAKRYLIDKGLVPMEGDEELKMLAFDIETLYHEGEEFAEGPILMISYADEEGARVITWKNVDLPYVDVVSTEREMIKRFLRVVKEKDPDVLITYNGDNFDFAYLKKRCEKLGINFALGRDGSEPKIQRMGDRFAVEVKGRIHFDLYPVIRRTINLPTYTLEAVYEAVFGQPKEKVYAEEITTAWETGENLERVARYSMEDAKVTYELGKEFLPMEAQLSRLIGQSLWDVSRSSTGNLVEWFLLRKAYERNELAPNKPDEKELARRRQSYEGGYVKEPERGLWENIVYLDFRSLYPSIIITHNVSPDTLNREGCKEYDVAPQVGHRFCKDFPGFIPSLLGDLLEERQKIKKKMKATIDPIERKLLDYRQRAIKILANSYYGYYGYARARWYCKECAESVTAWGREYITMTIKEIEEKYGFKVIYSDTDGFFATIPGADAETVKKKAMEFLKYINAKLPGALELEYEGFYKRGFFVTKKKYAVIDEEGKITTRGLEIVRRDWSEIAKETQARVLEALLKDGDVEKAVRIVKEVTEKLSKYEVPPEKLVIHEQITRDLKDYKATGPHVAVAKRLAARGVKIRPGTVISYIVLKGSGRIGDRAIPFDEFDPTKHKYDAEYYIENQVLPAVERILRAFGYRKEDLRYQKTRQVGLSAWLKPKGT

SEQ ID NO: 209 - protein, 774 aa, synthetic construct
MILDTDYITEDGKPVIRIFKKENGEFKIEYDRTFEPYFYALLKDDSAIEEVKKITAERHGTVVTVKRVEKVQKKFLGRPVEVWKLYFTHPQDVPAIRDKIREHPAVIDIYEYPIPFAKRYLIDKGLVPMEGDEELKMLAFDIETLYHEGEEFAEGPILMISYADEEGARVITWKNVDLPYVDVVSTEREMIKRFLRVVKEKDPDVLITYNGDNFDFAYLKKRCEKLGINFALGRDGSEPKIQRMGDRFAVEVKGRIHFDLYPVIRRTINLPTYTLEAVYEAVFGQPKEKVYAEEITTAWETGENLERVARYSMEDAKVTYELGKEFLPMEAQLSRLIGQSLWDVSRSSTGNLVEWFLLRKAYERNELAPNKPDEKELARRRQSYEGGYVKEPERGLWENIVYLDFRSLYPSIIITHNVSPDTLNREGCKEYDVAPQVGHRFCKDFPGFIPSLLGDLLEERQKIKKKMKATIDPIERKLLDYRQRAIKILANSYYGYYGYARARWYCKECAESVTAWGREYITMTIKEIEEKYGFKVIYSDTDGFFATIPGADAETVKKKAMEFLKYINAKLPGALELEYEGFYKRGFFVTKKKYAVIDEEGKITTRGLEIVRRDWSEIAKETQARVLEALLKDGDVEKAVRIVKEVTEKLSKYEVPPEKLVIHEQITRDLKDYKATGPHVAVAKRLAARGVKIRPGTVISYIVLKGSGRIGDRAIPFDEFDPTKHKYDAEYYIENQVLPAVERILRAFGYRKEDLRYQKTRQVGLSAWLKPKGT

SEQ ID NO: 210 - protein, 774 aa, synthetic construct
MILDTDYITEDGKPVIRIFKKENGEFKIEYDRTFEPYFYALLKDDSAIEEVKKITAERHGTVVTVKRVEKVQKKFLGRPVEVWKLYFTHPQDVPAIRDKIREHPAVIDIYEYDEPFAKRYLIDKGLVPMEGDEELKMLAFDIETLYHEGEEFAEGPILMISYADEEGARVITWKNVDLPYVDVVSTEREMIKRFLRVVKEKDPDVLITYNGDNFDFAYLKKRCEKLGINFALGRDGSEPKIQRMGDRFAVEVKGRIHFDLYPVIRRTINLPTYTLEAVYEAVFGQPKEKVYAEEITTAWETGENLERVARYSMEDAKVTYELGKEFLPMEAQLSRLIGQSLWDVSRSSTGNLVEWFLLRKAYERNELAPNKPDEKELARRRQSYEGGYVKEPERGLWENIVYLDFRSLYPSIIITHNVSPDTLNREGCKEYDVAPQVGHRFCKDFPGFIPSLLGDLLEERQKIKKKMKATIDPIERKLLDYRQRAIKILANSYYGYYGYARARWYCKECAESVTAWGREYITMTIKEIEEKYGFKVIYSDTDGFFATIPGADAETVKKKAMEFLKYINAKLPGALELEYEGFYKRGFFVTKKKYAVIDEEGKITTRGLEIVRRDWSEIAKETQARVLEALLKDGDVEKAVRIVKEVTEKLSKYEVPPEKLVIHEQITRDLKDYKATGPHVAVAKRLAARGVKIRPGTVISYIVLKGSGRIGDRAIPFDEFDPTKHKYDAEYYIENQVLPAVERILRAFGYRKEDLRYQKTRQVGLSAWLKPKGT

SEQ ID NO: 211 - protein, 774 aa, synthetic construct
MILDTDYITEDGKPVIRIFKKENGEFKIEYDRTFEPYFYALLKDDSAIEEVKKITAERHGTVVTVKRVEKVQKKFLGRPVEVWKLYFTHPQDVPAIRDKIREHPAVIDIYEYDGPFAKRYLIDKGLVPMEGDEELKMLAFDIETLYHEGEEFAEGPILMISYADEEGARVITWKNVDLPYVDVVSTEREMIKRFLRVVKEKDPDVLITYNGDNFDFAYLKKRCEKLGINFALGRDGSEPKIQRMGDRFAVEVKGRIHFDLYPVIRRTINLPTYTLEAVYEAVFGQPKEKVYAEEITTAWETGENLERVARYSMEDAKVTYELGKEFLPMEAQLSRLIGQSLWDVSRSSTGNLVEWFLLRKAYERNELAPNKPDEKELARRRQSYEGGYVKEPERGLWENIVYLDFRSLYPSIIITHNVSPDTLNREGCKEYDVAPQVGHRFCKDFPGFIPSLLGDLLEERQKIKKKMKATIDPIERKLLDYRQRAIKILANSYYGYYGYARARWYCKECAESVTAWGREYITMTIKEIEEKYGFKVIYSDTDGFFATIPGADAETVKKKAMEFLKYINAKLPGALELEYEGFYKRGFFVTKKKYAVIDEEGKITTRGLEIVRRDWSEIAKETQARVLEALLKDGDVEKAVRIVKEVTEKLSKYEVPPEKLVIHEQITRDLKDYKATGPHVAVAKRLAARGVKIRPGTVISYIVLKGSGRIGDRAIPFDEFDPTKHKYDAEYYIENQVLPAVERILRAFGYRKEDLRYQKTRQVGLSAWLKPKGT

SEQ ID NO: 212 - protein, 774 aa, synthetic construct
MILDTDYITEDGKPVIRIFKKENGEFKIEYDRTFEPYFYALLKDDSAIEEVKKITAERHGTVVTVKRVEKVQKKFLGRPVEVWKLYFTHPQDVPAIRDKIREHPAVIDIYEYDHPFAKRYLIDKGLVPMEGDEELKMLAFDIETLYHEGEEFAEGPILMISYADEEGARVITWKNVDLPYVDVVSTEREMIKRFLRVVKEKDPDVLITYNGDNFDFAYLKKRCEKLGINFALGRDGSEPKIQRMGDRFAVEVKGRIHFDLYPVIRRTINLPTYTLEAVYEAVFGQPKEKVYAEEITTAWETGENLERVARYSMEDAKVTYELGKEFLPMEAQLSRLIGQSLWDVSRSSTGNLVEWFLLRKAYERNELAPNKPDEKELARRRQSYEGGYVKEPERGLWENIVYLDFRSLYPSIIITHNVSPDTLNREGCKEYDVAPQVGHRFCKDFPGFIPSLLGDLLEERQKIKKKMKATIDPIERKLLDYRQRAIKILANSYYGYYGYARARWYCKECAESVTAWGREYITMTIKEIEEKYGFKVIYSDTDGFFATIPGADAETVKKKAMEFLKYINAKLPGALELEYEGFYKRGFFVTKKKYAVIDEEGKITTRGLEIVRRDWSEIAKETQARVLEALLKDGDVEKAVRIVKEVTEKLSKYEVPPEKLVIHEQITRDLKDYKATGPHVAVAKRLAARGVKIRPGTVISYIVLKGSGRIGDRAIPFDEFDPTKHKYDAEYYIENQVLPAVERILRAFGYRKEDLRYQKTRQVGLSAWLKPKGT

SEQ ID NO: 213 - protein, 774 aa, synthetic construct
MILDTDYITEDGKPVIRIFKKENGEFKIEYDRTFEPYFYALLKDDSAIEEVKKITAERHGTVVTVKRVEKVQKKFLGRPVEVWKLYFTHPQDVPAIRDKIREHPAVIDIYEYDKPFAKRYLIDKGLVPMEGDEELKMLAFDIETLYHEGEEFAEGPILMISYADEEGARVITWKNVDLPYVDVVSTEREMIKRFLRVVKEKDPDVLITYNGDNFDFAYLKKRCEKLGINFALGRDGSEPKIQRMGDRFAVEVKGRIHFDLYPVIRRTINLPTYTLEAVYEAVFGQPKEKVYAEEITTAWETGENLERVARYSMEDAKVTYELGKEFLPMEAQLSRLIGQSLWDVSRSSTGNLVEWFLLRKAYERNELAPNKPDEKELARRRQSYEGGYVKEPERGLWENIVYLDFRSLYPSIIITHNVSPDTLNREGCKEYDVAPQVGHRFCKDFPGFIPSLLGDLLEERQKIKKKMKATIDPIERKLLDYRQRAIKILANSYYGYYGYARARWYCKECAESVTAWGREYITMTIKEIEEKYGFKVIYSDTDGFFATIPGADAETVKKKAMEFLKYINAKLPGALELEYEGFYKRGFFVTKKKYAVIDEEGKITTRGLEIVRRDWSEIAKETQARVLEALLKDGDVEKAVRIVKEVTEKLSKYEVPPEKLVIHEQITRDLKDYKATGPHVAVAKRLAARGVKIRPGTVISYIVLKGSGRIGDRAIPFDEFDPTKHKYDAEYYIENQVLPAVERILRAFGYRKEDLRYQKTRQVGLSAWLKPKGT

SEQ ID NO: 214 - protein, 774 aa, synthetic construct
MILDTDYITEDGKPVIRIFKKENGEFKIEYDRTFEPYFYALLKDDSAIEEVKKITAERHGTVVTVKRVEKVQKKFLGRPVEVWKLYFTHPQDVPAIRDKIREHPAVIDIYEYDNPFAKRYLIDKGLVPMEGDEELKMLAFDIETLYHEGEEFAEGPILMISYADEEGARVITWKNVDLPYVDVVSTEREMIKRFLRVVKEKDPDVLITYNGDNFDFAYLKKRCEKLGINFALGRDGSEPKIQRMGDRFAVEVKGRIHFDLYPVIRRTINLPTYTLEAVYEAVFGQPKEKVYAEEITTAWETGENLERVARYSMEDAKVTYELGKEFLPMEAQLSRLIGQSLWDVSRSSTGNLVEWFLLRKAYERNELAPNKPDEKELARRRQSYEGGYVKEPERGLWENIVYLDFRSLYPSIIITHNVSPDTLNREGCKEYDVAPQVGHRFCKDFPGFIPSLLGDLLEERQKIKKKMKATIDPIERKLLDYRQRAIKILANSYYGYYGYARARWYCKECAESVTAWGREYITMTIKEIEEKYGFKVIYSDTDGFFATIPGADAETVKKKAMEFLKYINAKLPGALELEYEGFYKRGFFVTKKKYAVIDEEGKITTRGLEIVRRDWSEIAKETQARVLEALLKDGDVEKAVRIVKEVTEKLSKYEVPPEKLVIHEQITRDLKDYKATGPHVAVAKRLAARGVKIRPGTVISYIVLKGSGRIGDRAIPFDEFDPTKHKYDAEYYIENQVLPAVERILRAFGYRKEDLRYQKTRQVGLSAWLKPKGT

SEQ ID NO: 215 - protein, 774 aa, synthetic construct
MILDTDYITEDGKPVIRIFKKENGEFKIEYDRTFEPYFYALLKDDSAIEEVKKITAERHGTVVTVKRVEKVQKKFLGRPVEVWKLYFTHPQDVPAIRDKIREHPAVIDIYEYDPPFAKRYLIDKGLVPMEGDEELKMLAFDIETLYHEGEEFAEGPILMISYADEEGARVITWKNVDLPYVDVVSTEREMIKRFLRVVKEKDPDVLITYNGDNFDFAYLKKRCEKLGINFALGRDGSEPKIQRMGDRFAVEVKGRIHFDLYPVIRRTINLPTYTLEAVYEAVFGQPKEKVYAEEITTAWETGENLERVARYSMEDAKVTYELGKEFLPMEAQLSRLIGQSLWDVSRSSTGNLVEWFLLRKAYERNELAPNKPDEKELARRRQSYEGGYVKEPERGLWENIVYLDFRSLYPSIIITHNVSPDTLNREGCKEYDVAPQVGHRFCKDFPGFIPSLLGDLLEERQKIKKKMKATIDPIERKLLDYRQRAIKILANSYYGYYGYARARWYCKECAESVTAWGREYITMTIKEIEEKYGFKVIYSDTDGFFATIPGADAETVKKKAMEFLKYINAKLPGALELEYEGFYKRGFFVTKKKYAVIDEEGKITTRGLEIVRRDWSEIAKETQARVLEALLKDGDVEKAVRIVKEVTEKLSKYEVPPEKLVIHEQITRDLKDYKATGPHVAVAKRLAARGVKIRPGTVISYIVLKGSGRIGDRAIPFDEFDPTKHKYDAEYYIENQVLPAVERILRAFGYRKEDLRYQKTRQVGLSAWLKPKGT

SEQ ID NO: 216 - protein, 774 aa, synthetic construct
MILDTDYITEDGKPVIRIFKKENGEFKIEYDRTFEPYFYALLKDDSAIEEVKKITAERHGTVVTVKRVEKVQKKFLGRPVEVWKLYFTHPQDVPAIRDKIREHPAVIDIYEYDQPFAKRYLIDKGLVPMEGDEELKMLAFDIETLYHEGEEFAEGPILMISYADEEGARVITWKNVDLPYVDVVSTEREMIKRFLRVVKEKDPDVLITYNGDNFDFAYLKKRCEKLGINFALGRDGSEPKIQRMGDRFAVEVKGRIHFDLYPVIRRTINLPTYTLEAVYEAVFGQPKEKVYAEEITTAWETGENLERVARYSMEDAKVTYELGKEFLPMEAQLSRLIGQSLWDVSRSSTGNLVEWFLLRKAYERNELAPNKPDEKELARRRQSYEGGYVKEPERGLWENIVYLDFRSLYPSIIITHNVSPDTLNREGCKEYDVAPQVGHRFCKDFPGFIPSLLGDLLEERQKIKKKMKATIDPIERKLLDYRQRAIKILANSYYGYYGYARARWYCKECAESVTAWGREYITMTIKEIEEKYGFKVIYSDTDGFFATIPGADAETVKKKAMEFLKYINAKLPGALELEYEGFYKRGFFVTKKKYAVIDEEGKITTRGLEIVRRDWSEIAKETQARVLEALLKDGDVEKAVRIVKEVTEKLSKYEVPPEKLVIHEQITRDLKDYKATGPHVAVAKRLAARGVKIRPGTVISYIVLKGSGRIGDRAIPFDEFDPTKHKYDAEYYIENQVLPAVERILRAFGYRKEDLRYQKTRQVGLSAWLKPKGT

SEQ ID NO: 217 - protein, 774 aa, synthetic construct
MILDTDYITEDGKPVIRIFKKENGEFKIEYDRTFEPYFYALLKDDSAIEEVKKITAERHGTVVTVKRVEKVQKKFLGRPVEVWKLYFTHPQDVPAIRDKIREHPAVIDIYEYDSPFAKRYLIDKGLVPMEGDEELKMLAFDIETLYHEGEEFAEGPILMISYADEEGARVITWKNVDLPYVDVVSTEREMIKRFLRVVKEKDPDVLITYNGDNFDFAYLKKRCEKLGINFALGRDGSEPKIQRMGDRFAVEVKGRIHFDLYPVIRRTINLPTYTLEAVYEAVFGQPKEKVYAEEITTAWETGENLERVARYSMEDAKVTYELGKEFLPMEAQLSRLIGQSLWDVSRSSTGNLVEWFLLRKAYERNELAPNKPDEKELARRRQSYEGGYVKEPERGLWENIVYLDFRSLYPSIIITHNVSPDTLNREGCKEYDVAPQVGHRFCKDFPGFIPSLLGDLLEERQKIKKKMKATIDPIERKLLDYRQRAIKILANSYYGYYGYARARWYCKECAESVTAWGREYITMTIKEIEEKYGFKVIYSDTDGFFATIPGADAETVKKKAMEFLKYINAKLPGALELEYEGFYKRGFFVTKKKYAVIDEEGKITTRGLEIVRRDWSEIAKETQARVLEALLKDGDVEKAVRIVKEVTEKLSKYEVPPEKLVIHEQITRDLKDYKATGPHVAVAKRLAARGVKIRPGTVISYIVLKGSGRIGDRAIPFDEFDPTKHKYDAEYYIENQVLPAVERILRAFGYRKEDLRYQKTRQVGLSAWLKPKGT

SEQ ID NO: 218 - protein, 774 aa, synthetic construct
MILDTDYITEDGKPVIRIFKKENGEFKIEYDRTFEPYFYALLKDDSAIEEVKKITAERHGTVVTVKRVEKVQKKFLGRPVEVWKLYFTHPQDVPAIRDKIREHPAVIDIYEYDYPFAKRYLIDKGLVPMEGDEELKMLAFDIETLYHEGEEFAEGPILMISYADEEGARVITWKNVDLPYVDVVSTEREMIKRFLRVVKEKDPDVLITYNGDNFDFAYLKKRCEKLGINFALGRDGSEPKIQRMGDRFAVEVKGRIHFDLYPVIRRTINLPTYTLEAVYEAVFGQPKEKVYAEEITTAWETGENLERVARYSMEDAKVTYELGKEFLPMEAQLSRLIGQSLWDVSRSSTGNLVEWFLLRKAYERNELAPNKPDEKELARRRQSYEGGYVKEPERGLWENIVYLDFRSLYPSIIITHNVSPDTLNREGCKEYDVAPQVGHRFCKDFPGFIPSLLGDLLEERQKIKKKMKATIDPIERKLLDYRQRAIKILANSYYGYYGYARARWYCKECAESVTAWGREYITMTIKEIEEKYGFKVIYSDTDGFFATIPGADAETVKKKAMEFLKYINAKLPGALELEYEGFYKRGFFVTKKKYAVIDEEGKITTRGLEIVRRDWSEIAKETQARVLEALLKDGDVEKAVRIVKEVTEKLSKYEVPPEKLVIHEQITRDLKDYKATGPHVAVAKRLAARGVKIRPGTVISYIVLKGSGRIGDRAIPFDEFDPTKHKYDAEYYIENQVLPAVERILRAFGYRKEDLRYQKTRQVGLSAWLKPKGT

SEQ ID NO: 219 - protein, 774 aa, synthetic construct
MILDTDYITEDGKPVIRIFKKENGEFKIEYDRTFEPYFYALLKDDSAIEEVKKITAERHGTVVTVKRVEKVQKKFLGRPVEVWKLYFTHPQDVPAIRDKIREHPAVIDIYEYDICFAKRYLIDKGLVPMEGDEELKMLAFDIETLYHEGEEFAEGPILMISYADEEGARVITWKNVDLPYVDVVSTEREMIKRFLRVVKEKDPDVLITYNGDNFDFAYLKKRCEKLGINFALGRDGSEPKIQRMGDRFAVEVKGRIHFDLYPVIRRTINLPTYTLEAVYEAVFGQPKEKVYAEEITTAWETGENLERVARYSMEDAKVTYELGKEFLPMEAQLSRLIGQSLWDVSRSSTGNLVEWFLLRKAYERNELAPNKPDEKELARRRQSYEGGYVKEPERGLWENIVYLDFRSLYPSIIITHNVSPDTLNREGCKEYDVAPQVGHRFCKDFPGFIPSLLGDLLEERQKIKKKMKATIDPIERKLLDYRQRAIKILANSYYGYYGYARARWYCKECAESVTAWGREYITMTIKEIEEKYGFKVIYSDTDGFFATIPGADAETVKKKAMEFLKYINAKLPGALELEYEGFYKRGFFVTKKKYAVIDEEGKITTRGLEIVRRDWSEIAKETQARVLEALLKDGDVEKAVRIVKEVTEKLSKYEVPPEKLVIHEQITRDLKDYKATGPHVAVAKRLAARGVKIRPGTVISYIVLKGSGRIGDRAIPFDEFDPTKHKYDAEYYIENQVLPAVERILRAFGYRKEDLRYQKTRQVGLSAWLKPKGT

SEQ ID NO: 220 - protein, 774 aa, synthetic construct
MILDTDYITEDGKPVIRIFKKENGEFKIEYDRTFEPYFYALLKDDSAIEEVKKITAERHGTVVTVKRVEKVQKKFLGRPVEVWKLYFTHPQDVPAIRDKIREHPAVIDIYEYDIDFAKRYLIDKGLVPMEGDEELKMLAFDIETLYHEGEEFAEGPILMISYADEEGARVITWKNVDLPYVDVVSTEREMIKRFLRVVKEKDPDVLITYNGDNFDFAYLKKRCEKLGINFALGRDGSEPKIQRMGDRFAVEVKGRIHFDLYPVIRRTINLPTYTLEAVYEAVFGQPKEKVYAEEITTAWETGENLERVARYSMEDAKVTYELGKEFLPMEAQLSRLIGQSLWDVSRSSTGNLVEWFLLRKAYERNELAPNKPDEKELARRRQSYEGGYVKEPERGLWENIVYLDFRSLYPSIIITHNVSPDTLNREGCKEYDVAPQVGHRFCKDFPGFIPSLLGDLLEERQKIKKKMKATIDPIERKLLDYRQRAIKILANSYYGYYGYARARWYCKECAESVTAWGREYITMTIKEIEEKYGFKVIYSDTDGFFATIPGADAETVKKKAMEFLKYINAKLPGALELEYEGFYKRGFFVTKKKYAVIDEEGKITTRGLEIVRRDWSEIAKETQARVLEALLKDGDVEKAVRIVKEVTEKLSKYEVPPEKLVIHEQITRDLKDYKATGPHVAVAKRLAARGVKIRPGTVISYIVLKGSGRIGDRAIPFDEFDPTKHKYDAEYYIENQVLPAVERILRAFGYRKEDLRYQKTRQVGLSAWLKPKGT

SEQ ID NO: 221 - protein, 774 aa, synthetic construct
MILDTDYITEDGKPVIRIFKKENGEFKIEYDRTFEPYFYALLKDDSAIEEVKKITAERHGTVVTVKRVEKVQKKFLGRPVEVWKLYFTHPQDVPAIRDKIREHPAVIDIYEYDIFFAKRYLIDKGLVPMEGDEELKMLAFDIETLYHEGEEFAEGPILMISYADEEGARVITWKNVDLPYVDVVSTEREMIKRFLRVVKEKDPDVLITYNGDNFDFAYLKKRCEKLGINFALGRDGSEPKIQRMGDRFAVEVKGRIHFDLYPVIRRTINLPTYTLEAVYEAVFGQPKEKVYAEEITTAWETGENLERVARYSMEDAKVTYELGKEFLPMEAQLSRLIGQSLWDVSRSSTGNLVEWFLLRKAYERNELAPNKPDEKELARRRQSYEGGYVKEPERGLWENIVYLDFRSLYPSIIITHNVSPDTLNREGCKEYDVAPQVGHRFCKDFPGFIPSLLGDLLEERQKIKKKMKATIDPIERKLLDYRQRAIKILANSYYGYYGYARARWYCKECAESVTAWGREYITMTIKEIEEKYGFKVIYSDTDGFFATIPGADAETVKKKAMEFLKYINAKLPGALELEYEGFYKRGFFVTKKKYAVIDEEGKITTRGLEIVRRDWSEIAKETQARVLEALLKDGDVEKAVRIVKEVTEKLSKYEVPPEKLVIHEQITRDLKDYKATGPHVAVAKRLAARGVKIRPGTVISYIVLKGSGRIGDRAIPFDEFDPTKHKYDAEYYIENQVLPAVERILRAFGYRKEDLRYQKTRQVGLSAWLKPKGT

SEQ ID NO: 222 - protein, 774 aa, synthetic construct
MILDTDYITEDGKPVIRIFKKENGEFKIEYDRTFEPYFYALLKDDSAIEEVKKITAERHGTVVTVKRVEKVQKKFLGRPVEVWKLYFTHPQDVPAIRDKIREHPAVIDIYEYDIHFAKRYLIDKGLVPMEGDEELKMLAFDIETLYHEGEEFAEGPILMISYADEEGARVITWKNVDLPYVDVVSTEREMIKRFLRVVKEKDPDVLITYNGDNFDFAYLKKRCEKLGINFALGRDGSEPKIQRMGDRFAVEVKGRIHFDLYPVIRRTINLPTYTLEAVYEAVFGQPKEKVYAEEITTAWETGENLERVARYSMEDAKVTYELGKEFLPMEAQLSRLIGQSLWDVSRSSTGNLVEWFLLRKAYERNELAPNKPDEKELARRRQSYEGGYVKEPERGLWENIVYLDFRSLYPSIIITHNVSPDTLNREGCKEYDVAPQVGHRFCKDFPGFIPSLLGDLLEERQKIKKKMKATIDPIERKLLDYRQRAIKILANSYYGYYGYARARWYCKECAESVTAWGREYITMTIKEIEEKYGFKVIYSDTDGFFATIPGADAETVKKKAMEFLKYINAKLPGALELEYEGFYKRGFFVTKKKYAVIDEEGKITTRGLEIVRRDWSEIAKETQARVLEALLKDGDVEKAVRIVKEVTEKLSKYEVPPEKLVIHEQITRDLKDYKATGPHVAVAKRLAARGVKIRPGTVISYIVLKGSGRIGDRAIPFDEFDPTKHKYDAEYYIENQVLPAVERILRAFGYRKEDLRYQKTRQVGLSAWLKPKGT

SEQ ID NO: 223 - protein, 774 aa, synthetic construct
MILDTDYITEDGKPVIRIFKKENGEFKIEYDRTFEPYFYALLKDDSAIEEVKKITAERHGTVVTVKRVEKVQKKFLGRPVEVWKLYFTHPQDVPAIRDKIREHPAVIDIYEYDINFAKRYLIDKGLVPMEGDEELKMLAFDIETLYHEGEEFAEGPILMISYADEEGARVITWKNVDLPYVDVVSTEREMIKRFLRVVKEKDPDVLITYNGDNFDFAYLKKRCEKLGINFALGRDGSEPKIQRMGDRFAVEVKGRIHFDLYPVIRRTINLPTYTLEAVYEAVFGQPKEKVYAEEITTAWETGENLERVARYSMEDAKVTYELGKEFLPMEAQLSRLIGQSLWDVSRSSTGNLVEWFLLRKAYERNELAPNKPDEKELARRRQSYEGGYVKEPERGLWENIVYLDFRSLYPSIIITHNVSPDTLNREGCKEYDVAPQVGHRFCKDFPGFIPSLLGDLLEERQKIKKKMKATIDPIERKLLDYRQRAIKILANSYYGYYGYARARWYCKECAESVTAWGREYITMTIKEIEEKYGFKVIYSDTDGFFATIPGADAETVKKKAMEFLKYINAKLPGALELEYEGFYKRGFFVTKKKYAVIDEEGKITTRGLEIVRRDWSEIAKETQARVLEALLKDGDVEKAVRIVKEVTEKLSKYEVPPEKLVIHEQITRDLKDYKATGPHVAVAKRLAARGVKIRPGTVISYIVLKGSGRIGDRAIPFDEFDPTKHKYDAEYYIENQVLPAVERILRAFGYRKEDLRYQKTRQVGLSAWLKPKGT

SEQ ID NO: 224 - protein, 774 aa, synthetic construct
MILDTDYITEDGKPVIRIFKKENGEFKIEYDRTFEPYFYALLKDDSAIEEVKKITAERHGTVVTVKRVEKVQKKFLGRPVEVWKLYFTHPQDVPAIRDKIREHPAVIDIYEYDISFAKRYLIDKGLVPMEGDEELKMLAFDIETLYHEGEEFAEGPILMISYADEEGARVITWKNVDLPYVDVVSTEREMIKRFLRVVKEKDPDVLITYNGDNFDFAYLKKRCEKLGINFALGRDGSEPKIQRMGDRFAVEVKGRIHFDLYPVIRRTINLPTYTLEAVYEAVFGQPKEKVYAEEITTAWETGENLERVARYSMEDAKVTYELGKEFLPMEAQLSRLIGQSLWDVSRSSTGNLVEWFLLRKAYERNELAPNKPDEKELARRRQSYEGGYVKEPERGLWENIVYLDFRSLYPSIIITHNVSPDTLNREGCKEYDVAPQVGHRFCKDFPGFIPSLLGDLLEERQKIKKKMKATIDPIERKLLDYRQRAIKILANSYYGYYGYARARWYCKECAESVTAWGREYITMTIKEIEEKYGFKVIYSDTDGFFATIPGADAETVKKKAMEFLKYINAKLPGALELEYEGFYKRGFFVTKKKYAVIDEEGKITTRGLEIVRRDWSEIAKETQARVLEALLKDGDVEKAVRIVKEVTEKLSKYEVPPEKLVIHEQITRDLKDYKATGPHVAVAKRLAARGVKIRPGTVISYIVLKGSGRIGDRAIPFDEFDPTKHKYDAEYYIENQVLPAVERILRAFGYRKEDLRYQKTRQVGLSAWLKPKGT

SEQ ID NO: 225 - protein, 774 aa, synthetic construct
MILDTDYITEDGKPVIRIFKKENGEFKIEYDRTFEPYFYALLKDDSAIEEVKKITAERHGTVVTVKRVEKVQKKFLGRPVEVWKLYFTHPQDVPAIRDKIREHPAVIDIYEYDITFAKRYLIDKGLVPMEGDEELKMLAFDIETLYHEGEEFAEGPILMISYADEEGARVITWKNVDLPYVDVVSTEREMIKRFLRVVKEKDPDVLITYNGDNFDFAYLKKRCEKLGINFALGRDGSEPKIQRMGDRFAVEVKGRIHFDLYPVIRRTINLPTYTLEAVYEAVFGQPKEKVYAEEITTAWETGENLERVARYSMEDAKVTYELGKEFLPMEAQLSRLIGQSLWDVSRSSTGNLVEWFLLRKAYERNELAPNKPDEKELARRRQSYEGGYVKEPERGLWENIVYLDFRSLYPSIIITHNVSPDTLNREGCKEYDVAPQVGHRFCKDFPGFIPSLLGDLLEERQKIKKKMKATIDPIERKLLDYRQRAIKILANSYYGYYGYARARWYCKECAESVTAWGREYITMTIKEIEEKYGFKVIYSDTDGFFATIPGADAETVKKKAMEFLKYINAKLPGALELEYEGFYKRGFFVTKKKYAVIDEEGKITTRGLEIVRRDWSEIAKETQARVLEALLKDGDVEKAVRIVKEVTEKLSKYEVPPEKLVIHEQITRDLKDYKATGPHVAVAKRLAARGVKIRPGTVISYIVLKGSGRIGDRAIPFDEFDPTKHKYDAEYYIENQVLPAVERILRAFGYRKEDLRYQKTRQVGLSAWLKPKGT

SEQ ID NO: 226 - protein, 774 aa, synthetic construct
MILDTDYITEDGKPVIRIFKKENGEFKIEYDRTFEPYFYALLKDDSAIEEVKKITAERHGTVVTVKRVEKVQKKFLGRPVEVWKLYFTHPQDVPAIRDKIREHPAVIDIYEYDIYFAKRYLIDKGLVPMEGDEELKMLAFDIETLYHEGEEFAEGPILMISYADEEGARVITWKNVDLPYVDVVSTEREMIKRFLRVVKEKDPDVLITYNGDNFDFAYLKKRCEKLGINFALGRDGSEPKIQRMGDRFAVEVKGRIHFDLYPVIRRTINLPTYTLEAVYEAVFGQPKEKVYAEEITTAWETGENLERVARYSMEDAKVTYELGKEFLPMEAQLSRLIGQSLWDVSRSSTGNLVEWFLLRKAYERNELAPNKPDEKELARRRQSYEGGYVKEPERGLWENIVYLDFRSLYPSIIITHNVSPDTLNREGCKEYDVAPQVGHRFCKDFPGFIPSLLGDLLEERQKIKKKMKATIDPIERKLLDYRQRAIKILANSYYGYYGYARARWYCKECAESVTAWGREYITMTIKEIEEKYGFKVIYSDTDGFFATIPGADAETVKKKAMEFLKYINAKLPGALELEYEGFYKRGFFVTKKKYAVIDEEGKITTRGLEIVRRDWSEIAKETQARVLEALLKDGDVEKAVRIVKEVTEKLSKYEVPPEKLVIHEQITRDLKDYKATGPHVAVAKRLAARGVKIRPGTVISYIVLKGSGRIGDRAIPFDEFDPTKHKYDAEYYIENQVLPAVERILRAFGYRKEDLRYQKTRQVGLSAWLKPKGT

SEQ ID NO: 227 - protein, 774 aa, synthetic construct
MILDTDYITEDGKPVIRIFKKENGEFKIEYDRTFEPYFYALLKDDSAIEEVKKITAERHGTVVTVKRVEKVQKKFLGRPVEVWKLYFTHPQDVPAIRDKIREHPAVIDIYEYDIPAAKRYLIDKGLVPMEGDEELKMLAFDIETLYHEGEEFAEGPILMISYADEEGARVITWKNVDLPYVDVVSTEREMIKRFLRVVKEKDPDVLITYNGDNFDFAYLKKRCEKLGINFALGRDGSEPKIQRMGDRFAVEVKGRIHFDLYPVIRRTINLPTYTLEAVYEAVFGQPKEKVYAEEITTAWETGENLERVARYSMEDAKVTYELGKEFLPMEAQLSRLIGQSLWDVSRSSTGNLVEWFLLRKAYERNELAPNKPDEKELARRRQSYEGGYVKEPERGLWENIVYLDFRSLYPSIIITHNVSPDTLNREGCKEYDVAPQVGHRFCKDFPGFIPSLLGDLLEERQKIKKKMKATIDPIERKLLDYRQRAIKILANSYYGYYGYARARWYCKECAESVTAWGREYITMTIKEIEEKYGFKVIYSDTDGFFATIPGADAETVKKKAMEFLKYINAKLPGALELEYEGFYKRGFFVTKKKYAVIDEEGKITTRGLEIVRRDWSEIAKETQARVLEALLKDGDVEKAVRIVKEVTEKLSKYEVPPEKLVIHEQITRDLKDYKATGPHVAVAKRLAARGVKIRPGTVISYIVLKGSGRIGDRAIPFDEFDPTKHKYDAEYYIENQVLPAVERILRAFGYRKEDLRYQKTRQVGLSAWLKPKGT

SEQ ID NO: 228 - protein, 774 aa, synthetic construct
MILDTDYITEDGKPVIRIFKKENGEFKIEYDRTFEPYFYALLKDDSAIEEVKKITAERHGTVVTVKRVEKVQKKFLGRPVEVWKLYFTHPQDVPAIRDKIREHPAVIDIYEYDIPDAKRYLIDKGLVPMEGDEELKMLAFDIETLYHEGEEFAEGPILMISYADEEGARVITWKNVDLPYVDVVSTEREMIKRFLRVVKEKDPDVLITYNGDNFDFAYLKKRCEKLGINFALGRDGSEPKIQRMGDRFAVEVKGRIHFDLYPVIRRTINLPTYTLEAVYEAVFGQPKEKVYAEEITTAWETGENLERVARYSMEDAKVTYELGKEFLPMEAQLSRLIGQSLWDVSRSSTGNLVEWFLLRKAYERNELAPNKPDEKELARRRQSYEGGYVKEPERGLWENIVYLDFRSLYPSIIITHNVSPDTLNREGCKEYDVAPQVGHRFCKDFPGFIPSLLGDLLEERQKIKKKMKATIDPIERKLLDYRQRAIKILANSYYGYYGYARARWYCKECAESVTAWGREYITMTIKEIEEKYGFKVIYSDTDGFFATIPGADAETVKKKAMEFLKYINAKLPGALELEYEGFYKRGFFVTKKKYAVIDEEGKITTRGLEIVRRDWSEIAKETQARVLEALLKDGDVEKAVRIVKEVTEKLSKYEVPPEKLVIHEQITRDLKDYKATGPHVAVAKRLAARGVKIRPGTVISYIVLKGSGRIGDRAIPFDEFDPTKHKYDAEYYIENQVLPAVERILRAFGYRKEDLRYQKTRQVGLSAWLKPKGT

SEQ ID NO: 229 - protein, 774 aa, synthetic construct
MILDTDYITEDGKPVIRIFKKENGEFKIEYDRTFEPYFYALLKDDSAIEEVKKITAERHGTVVTVKRVEKVQKKFLGRPVEVWKLYFTHPQDVPAIRDKIREHPAVIDIYEYDIPEAKRYLIDKGLVPMEGDEELKMLAFDIETLYHEGEEFAEGPILMISYADEEGARVITWKNVDLPYVDVVSTEREMIKRFLRVVKEKDPDVLITYNGDNFDFAYLKKRCEKLGINFALGRDGSEPKIQRMGDRFAVEVKGRIHFDLYPVIRRTINLPTYTLEAVYEAVFGQPKEKVYAEEITTAWETGENLERVARYSMEDAKVTYELGKEFLPMEAQLSRLIGQSLWDVSRSSTGNLVEWFLLRKAYERNELAPNKPDEKELARRRQSYEGGYVKEPERGLWENIVYLDFRSLYPSIIITHNVSPDTLNREGCKEYDVAPQVGHRFCKDFPGFIPSLLGDLLEERQKIKKKMKATIDPIERKLLDYRQRAIKILANSYYGYYGYARARWYCKECAESVTAWGREYITMTIKEIEEKYGFKVIYSDTDGFFATIPGADAETVKKKAMEFLKYINAKLPGALELEYEGFYKRGFFVTKKKYAVIDEEGKITTRGLEIVRRDWSEIAKETQARVLEALLKDGDVEKAVRIVKEVTEKLSKYEVPPEKLVIHEQITRDLKDYKATGPHVAVAKRLAARGVKIRPGTVISYIVLKGSGRIGDRAIPFDEFDPTKHKYDAEYYIENQVLPAVERILRAFGYRKEDLRYQKTRQVGLSAWLKPKGT

SEQ ID NO: 230 - protein, 774 aa, synthetic construct
MILDTDYITEDGKPVIRIFKKENGEFKIEYDRTFEPYFYALLKDDSAIEEVKKITAERHGTVVTVKRVEKVQKKFLGRPVEVWKLYFTHPQDVPAIRDKIREHPAVIDIYEYDIPGAKRYLIDKGLVPMEGDEELKMLAFDIETLYHEGEEFAEGPILMISYADEEGARVITWKNVDLPYVDVVSTEREMIKRFLRVVKEKDPDVLITYNGDNFDFAYLKKRCEKLGINFALGRDGSEPKIQRMGDRFAVEVKGRIHFDLYPVIRRTINLPTYTLEAVYEAVFGQPKEKVYAEEITTAWETGENLERVARYSMEDAKVTYELGKEFLPMEAQLSRLIGQSLWDVSRSSTGNLVEWFLLRKAYERNELAPNKPDEKELARRRQSYEGGYVKEPERGLWENIVYLDFRSLYPSIIITHNVSPDTLNREGCKEYDVAPQVGHRFCKDFPGFIPSLLGDLLEERQKIKKKMKATIDPIERKLLDYRQRAIKILANSYYGYYGYARARWYCKECAESVTAWGREYITMTIKEIEEKYGFKVIYSDTDGFFATIPGADAETVKKKAMEFLKYINAKLPGALELEYEGFYKRGFFVTKKKYAVIDEEGKITTRGLEIVRRDWSEIAKETQARVLEALLKDGDVEKAVRIVKEVTEKLSKYEVPPEKLVIHEQITRDLKDYKATGPHVAVAKRLAARGVKIRPGTVISYIVLKGSGRIGDRAIPFDEFDPTKHKYDAEYYIENQVLPAVERILRAFGYRKEDLRYQKTRQVGLSAWLKPKGT

SEQ ID NO: 231 - protein, 774 aa, synthetic construct
MILDTDYITEDGKPVIRIFKKENGEFKIEYDRTFEPYFYALLKDDSAIEEVKKITAERHGTVVTVKRVEKVQKKFLGRPVEVWKLYFTHPQDVPAIRDKIREHPAVIDIYEYDIPHAKRYLIDKGLVPMEGDEELKMLAFDIETLYHEGEEFAEGPILMISYADEEGARVITWKNVDLPYVDVVSTEREMIKRFLRVVKEKDPDVLITYNGDNFDFAYLKKRCEKLGINFALGRDGSEPKIQRMGDRFAVEVKGRIHFDLYPVIRRTINLPTYTLEAVYEAVFGQPKEKVYAEEITTAWETGENLERVARYSMEDAKVTYELGKEFLPMEAQLSRLIGQSLWDVSRSSTGNLVEWFLLRKAYERNELAPNKPDEKELARRRQSYEGGYVKEPERGLWENIVYLDFRSLYPSIIITHNVSPDTLNREGCKEYDVAPQVGHRFCKDFPGFIPSLLGDLLEERQKIKKKMKATIDPIERKLLDYRQRAIKILANSYYGYYGYARARWYCKECAESVTAWGREYITMTIKEIEEKYGFKVIYSDTDGFFATIPGADAETVKKKAMEFLKYINAKLPGALELEYEGFYKRGFFVTKKKYAVIDEEGKITTRGLEIVRRDWSEIAKETQARVLEALLKDGDVEKAVRIVKEVTEKLSKYEVPPEKLVIHEQITRDLKDYKATGPHVAVAKRLAARGVKIRPGTVISYIVLKGSGRIGDRAIPFDEFDPTKHKYDAEYYIENQVLPAVERILRAFGYRKEDLRYQKTRQVGLSAWLKPKGT

SEQ ID NO: 232 - protein, 774 aa, synthetic construct
MILDTDYITEDGKPVIRIFKKENGEFKIEYDRTFEPYFYALLKDDSAIEEVKKITAERHGTVVTVKRVEKVQKKFLGRPVEVWKLYFTHPQDVPAIRDKIREHPAVIDIYEYDIPIAKRYLIDKGLVPMEGDEELKMLAFDIETLYHEGEEFAEGPILMISYADEEGARVITWKNVDLPYVDVVSTEREMIKRFLRVVKEKDPDVLITYNGDNFDFAYLKKRCEKLGINFALGRDGSEPKIQRMGDRFAVEVKGRIHFDLYPVIRRTINLPTYTLEAVYEAVFGQPKEKVYAEEITTAWETGENLERVARYSMEDAKVTYELGKEFLPMEAQLSRLIGQSLWDVSRSSTGNLVEWFLLRKAYERNELAPNKPDEKELARRRQSYEGGYVKEPERGLWENIVYLDFRSLYPSIIITHNVSPDTLNREGCKEYDVAPQVGHRFCKDFPGFIPSLLGDLLEERQKIKKKMKATIDPIERKLLDYRQRAIKILANSYYGYYGYARARWYCKECAESVTAWGREYITMTIKEIEEKYGFKVIYSDTDGFFATIPGADAETVKKKAMEFLKYINAKLPGALELEYEGFYKRGFFVTKKKYAVIDEEGKITTRGLEIVRRDWSEIAKETQARVLEALLKDGDVEKAVRIVKEVTEKLSKYEVPPEKLVIHEQITRDLKDYKATGPHVAVAKRLAARGVKIRPGTVISYIVLKGSGRIGDRAIPFDEFDPTKHKYDAEYYIENQVLPAVERILRAFGYRKEDLRYQKTRQVGLSAWLKPKGT

SEQ ID NO: 233 - protein, 774 aa, synthetic construct
MILDTDYITEDGKPVIRIFKKENGEFKIEYDRTFEPYFYALLKDDSAIEEVKKITAERHGTVVTVKRVEKVQKKFLGRPVEVWKLYFTHPQDVPAIRDKIREHPAVIDIYEYDIPKAKRYLIDKGLVPMEGDEELKMLAFDIETLYHEGEEFAEGPILMISYADEEGARVITWKNVDLPYVDVVSTEREMIKRFLRVVKEKDPDVLITYNGDNFDFAYLKKRCEKLGINFALGRDGSEPKIQRMGDRFAVEVKGRIHFDLYPVIRRTINLPTYTLEAVYEAVFGQPKEKVYAEEITTAWETGENLERVARYSMEDAKVTYELGKEFLPMEAQLSRLIGQSLWDVSRSSTGNLVEWFLLRKAYERNELAPNKPDEKELARRRQSYEGGYVKEPERGLWENIVYLDFRSLYPSIIITHNVSPDTLNREGCKEYDVAPQVGHRFCKDFPGFIPSLLGDLLEERQKIKKKMKATIDPIERKLLDYRQRAIKILANSYYGYYGYARARWYCKECAESVTAWGREYITMTIKEIEEKYGFKVIYSDTDGFFATIPGADAETVKKKAMEFLKYINAKLPGALELEYEGFYKRGFFVTKKKYAVIDEEGKITTRGLEIVRRDWSEIAKETQARVLEALLKDGDVEKAVRIVKEVTEKLSKYEVPPEKLVIHEQITRDLKDYKATGPHVAVAKRLAARGVKIRPGTVISYIVLKGSGRIGDRAIPFDEFDPTKHKYDAEYYIENQVLPAVERILRAFGYRKEDLRYQKTRQVGLSAWLKPKGT

SEQ ID NO: 234 - protein, 774 aa, synthetic construct
MILDTDYITEDGKPVIRIFKKENGEFKIEYDRTFEPYFYALLKDDSAIEEVKKITAERHGTVVTVKRVEKVQKKFLGRPVEVWKLYFTHPQDVPAIRDKIREHPAVIDIYEYDIPNAKRYLIDKGLVPMEGDEELKMLAFDIETLYHEGEEFAEGPILMISYADEEGARVITWKNVDLPYVDVVSTEREMIKRFLRVVKEKDPDVLITYNGDNFDFAYLKKRCEKLGINFALGRDGSEPKIQRMGDRFAVEVKGRIHFDLYPVIRRTINLPTYTLEAVYEAVFGQPKEKVYAEEITTAWETGENLERVARYSMEDAKVTYELGKEFLPMEAQLSRLIGQSLWDVSRSSTGNLVEWFLLRKAYERNELAPNKPDEKELARRRQSYEGGYVKEPERGLWENIVYLDFRSLYPSIIITHNVSPDTLNREGCKEYDVAPQVGHRFCKDFPGFIPSLLGDLLEERQKIKKKMKATIDPIERKLLDYRQRAIKILANSYYGYYGYARARWYCKECAESVTAWGREYITMTIKEIEEKYGFKVIYSDTDGFFATIPGADAETVKKKAMEFLKYINAKLPGALELEYEGFYKRGFFVTKKKYAVIDEEGKITTRGLEIVRRDWSEIAKETQARVLEALLKDGDVEKAVRIVKEVTEKLSKYEVPPEKLVIHEQITRDLKDYKATGPHVAVAKRLAARGVKIRPGTVISYIVLKGSGRIGDRAIPFDEFDPTKHKYDAEYYIENQVLPAVERILRAFGYRKEDLRYQKTRQVGLSAWLKPKGT

SEQ ID NO: 235 - protein, 774 aa, synthetic construct
MILDTDYITEDGKPVIRIFKKENGEFKIEYDRTFEPYFYALLKDDSAIEEVKKITAERHGTVVTVKRVEKVQKKFLGRPVEVWKLYFTHPQDVPAIRDKIREHPAVIDIYEYDIPPAKRYLIDKGLVPMEGDEELKMLAFDIETLYHEGEEFAEGPILMISYADEEGARVITWKNVDLPYVDVVSTEREMIKRFLRVVKEKDPDVLITYNGDNFDFAYLKKRCEKLGINFALGRDGSEPKIQRMGDRFAVEVKGRIHFDLYPVIRRTINLPTYTLEAVYEAVFGQPKEKVYAEEITTAWETGENLERVARYSMEDAKVTYELGKEFLPMEAQLSRLIGQSLWDVSRSSTGNLVEWFLLRKAYERNELAPNKPDEKELARRRQSYEGGYVKEPERGLWENIVYLDFRSLYPSIIITHNVSPDTLNREGCKEYDVAPQVGHRFCKDFPGFIPSLLGDLLEERQKIKKKMKATIDPIERKLLDYRQRAIKILANSYYGYYGYARARWYCKECAESVTAWGREYITMTIKEIEEKYGFKVIYSDTDGFFATIPGADAETVKKKAMEFLKYINAKLPGALELEYEGFYKRGFFVTKKKYAVIDEEGKITTRGLEIVRRDWSEIAKETQARVLEALLKDGDVEKAVRIVKEVTEKLSKYEVPPEKLVIHEQITRDLKDYKATGPHVAVAKRLAARGVKIRPGTVISYIVLKGSGRIGDRAIPFDEFDPTKHKYDAEYYIENQVLPAVERILRAFGYRKEDLRYQKTRQVGLSAWLKPKGT

SEQ ID NO: 236 - protein, 774 aa, synthetic construct
MILDTDYITEDGKPVIRIFKKENGEFKIEYDRTFEPYFYALLKDDSAIEEVKKITAERHGTVVTVKRVEKVQKKFLGRPVEVWKLYFTHPQDVPAIRDKIREHPAVIDIYEYDIPQAKRYLIDKGLVPMEGDEELKMLAFDIETLYHEGEEFAEGPILMISYADEEGARVITWKNVDLPYVDVVSTEREMIKRFLRVVKEKDPDVLITYNGDNFDFAYLKKRCEKLGINFALGRDGSEPKIQRMGDRFAVEVKGRIHFDLYPVIRRTINLPTYTLEAVYEAVFGQPKEKVYAEEITTAWETGENLERVARYSMEDAKVTYELGKEFLPMEAQLSRLIGQSLWDVSRSSTGNLVEWFLLRKAYERNELAPNKPDEKELARRRQSYEGGYVKEPERGLWENIVYLDFRSLYPSIIITHNVSPDTLNREGCKEYDVAPQVGHRFCKDFPGFIPSLLGDLLEERQKIKKKMKATIDPIERKLLDYRQRAIKILANSYYGYYGYARARWYCKECAESVTAWGREYITMTIKEIEEKYGFKVIYSDTDGFFATIPGADAETVKKKAMEFLKYINAKLPGALELEYEGFYKRGFFVTKKKYAVIDEEGKITTRGLEIVRRDWSEIAKETQARVLEALLKDGDVEKAVRIVKEVTEKLSKYEVPPEKLVIHEQITRDLKDYKATGPHVAVAKRLAARGVKIRPGTVISYIVLKGSGRIGDRAIPFDEFDPTKHKYDAEYYIENQVLPAVERILRAFGYRKEDLRYQKTRQVGLSAWLKPKGT

SEQ ID NO: 237 - protein, 774 aa, synthetic construct
MILDTDYITEDGKPVIRIFKKENGEFKIEYDRTFEPYFYALLKDDSAIEEVKKITAERHGTVVTVKRVEKVQKKFLGRPVEVWKLYFTHPQDVPAIRDKIREHPAVIDIYEYDIPRAKRYLIDKGLVPMEGDEELKMLAFDIETLYHEGEEFAEGPILMISYADEEGARVITWKNVDLPYVDVVSTEREMIKRFLRVVKEKDPDVLITYNGDNFDFAYLKKRCEKLGINFALGRDGSEPKIQRMGDRFAVEVKGRIHFDLYPVIRRTINLPTYTLEAVYEAVFGQPKEKVYAEEITTAWETGENLERVARYSMEDAKVTYELGKEFLPMEAQLSRLIGQSLWDVSRSSTGNLVEWFLLRKAYERNELAPNKPDEKELARRRQSYEGGYVKEPERGLWENIVYLDFRSLYPSIIITHNVSPDTLNREGCKEYDVAPQVGHRFCKDFPGFIPSLLGDLLEERQKIKKKMKATIDPIERKLLDYRQRAIKILANSYYGYYGYARARWYCKECAESVTAWGREYITMTIKEIEEKYGFKVIYSDTDGFFATIPGADAETVKKKAMEFLKYINAKLPGALELEYEGFYKRGFFVTKKKYAVIDEEGKITTRGLEIVRRDWSEIAKETQARVLEALLKDGDVEKAVRIVKEVTEKLSKYEVPPEKLVIHEQITRDLKDYKATGPHVAVAKRLAARGVKIRPGTVISYIVLKGSGRIGDRAIPFDEFDPTKHKYDAEYYIENQVLPAVERILRAFGYRKEDLRYQKTRQVGLSAWLKPKGT

SEQ ID NO: 238 - protein, 774 aa, synthetic construct
MILDTDYITEDGKPVIRIFKKENGEFKIEYDRTFEPYFYALLKDDSAIEEVKKITAERHGTVVTVKRVEKVQKKFLGRPVEVWKLYFTHPQDVPAIRDKIREHPAVIDIYEYDIPVAKRYLIDKGLVPMEGDEELKMLAFDIETLYHEGEEFAEGPILMISYADEEGARVITWKNVDLPYVDVVSTEREMIKRFLRVVKEKDPDVLITYNGDNFDFAYLKKRCEKLGINFALGRDGSEPKIQRMGDRFAVEVKGRIHFDLYPVIRRTINLPTYTLEAVYEAVFGQPKEKVYAEEITTAWETGENLERVARYSMEDAKVTYELGKEFLPMEAQLSRLIGQSLWDVSRSSTGNLVEWFLLRKAYERNELAPNKPDEKELARRRQSYEGGYVKEPERGLWENIVYLDFRSLYPSIIITHNVSPDTLNREGCKEYDVAPQVGHRFCKDFPGFIPSLLGDLLEERQKIKKKMKATIDPIERKLLDYRQRAIKILANSYYGYYGYARARWYCKECAESVTAWGREYITMTIKEIEEKYGFKVIYSDTDGFFATIPGADAETVKKKAMEFLKYINAKLPGALELEYEGFYKRGFFVTKKKYAVIDEEGKITTRGLEIVRRDWSEIAKETQARVLEALLKDGDVEKAVRIVKEVTEKLSKYEVPPEKLVIHEQITRDLKDYKATGPHVAVAKRLAARGVKIRPGTVISYIVLKGSGRIGDRAIPFDEFDPTKHKYDAEYYIENQVLPAVERILRAFGYRKEDLRYQKTRQVGLSAWLKPKGT

SEQ ID NO: 239 - protein, 774 aa, synthetic construct
MILDTDYITEDGKPVIRIFKKENGEFKIEYDRTFEPYFYALLKDDSAIEEVKKITAERHGTVVTVKRVEKVQKKFLGRPVEVWKLYFTHPQDVPAIRDKIREHPAVIDIYEYDIPFDKRYLIDKGLVPMEGDEELKMLAFDIETLYHEGEEFAEGPILMISYADEEGARVITWKNVDLPYVDVVSTEREMIKRFLRVVKEKDPDVLITYNGDNFDFAYLKKRCEKLGINFALGRDGSEPKIQRMGDRFAVEVKGRIHFDLYPVIRRTINLPTYTLEAVYEAVFGQPKEKVYAEEITTAWETGENLERVARYSMEDAKVTYELGKEFLPMEAQLSRLIGQSLWDVSRSSTGNLVEWFLLRKAYERNELAPNKPDEKELARRRQSYEGGYVKEPERGLWENIVYLDFRSLYPSIIITHNVSPDTLNREGCKEYDVAPQVGHRFCKDFPGFIPSLLGDLLEERQKIKKKMKATIDPIERKLLDYRQRAIKILANSYYGYYGYARARWYCKECAESVTAWGREYITMTIKEIEEKYGFKVIYSDTDGFFATIPGADAETVKKKAMEFLKYINAKLPGALELEYEGFYKRGFFVTKKKYAVIDEEGKITTRGLEIVRRDWSEIAKETQARVLEALLKDGDVEKAVRIVKEVTEKLSKYEVPPEKLVIHEQITRDLKDYKATGPHVAVAKRLAARGVKIRPGTVISYIVLKGSGRIGDRAIPFDEFDPTKHKYDAEYYIENQVLPAVERILRAFGYRKEDLRYQKTRQVGLSAWLKPKGT

SEQ ID NO: 240 - protein, 774 aa, synthetic construct
MILDTDYITEDGKPVIRIFKKENGEFKIEYDRTFEPYFYALLKDDSAIEEVKKITAERHGTVVTVKRVEKVQKKFLGRPVEVWKLYFTHPQDVPAIRDKIREHPAVIDIYEYDIPFEKRYLIDKGLVPMEGDEELKMLAFDIETLYHEGEEFAEGPILMISYADEEGARVITWKNVDLPYVDVVSTEREMIKRFLRVVKEKDPDVLITYNGDNFDFAYLKKRCEKLGINFALGRDGSEPKIQRMGDRFAVEVKGRIHFDLYPVIRRTINLPTYTLEAVYEAVFGQPKEKVYAEEITTAWETGENLERVARYSMEDAKVTYELGKEFLPMEAQLSRLIGQSLWDVSRSSTGNLVEWFLLRKAYERNELAPNKPDEKELARRRQSYEGGYVKEPERGLWENIVYLDFRSLYPSIIITHNVSPDTLNREGCKEYDVAPQVGHRFCKDFPGFIPSLLGDLLEERQKIKKKMKATIDPIERKLLDYRQRAIKILANSYYGYYGYARARWYCKECAESVTAWGREYITMTIKEIEEKYGFKVIYSDTDGFFATIPGADAETVKKKAMEFLKYINAKLPGALELEYEGFYKRGFFVTKKKYAVIDEEGKITTRGLEIVRRDWSEIAKETQARVLEALLKDGDVEKAVRIVKEVTEKLSKYEVPPEKLVIHEQITRDLKDYKATGPHVAVAKRLAARGVKIRPGTVISYIVLKGSGRIGDRAIPFDEFDPTKHKYDAEYYIENQVLPAVERILRAFGYRKEDLRYQKTRQVGLSAWLKPKGT

SEQ ID NO: 241 - protein, 774 aa, synthetic construct
MILDTDYITEDGKPVIRIFKKENGEFKIEYDRTFEPYFYALLKDDSAIEEVKKITAERHGTVVTVKRVEKVQKKFLGRPVEVWKLYFTHPQDVPAIRDKIREHPAVIDIYEYDIPFLKRYLIDKGLVPMEGDEELKMLAFDIETLYHEGEEFAEGPILMISYADEEGARVITWKNVDLPYVDVVSTEREMIKRFLRVVKEKDPDVLITYNGDNFDFAYLKKRCEKLGINFALGRDGSEPKIQRMGDRFAVEVKGRIHFDLYPVIRRTINLPTYTLEAVYEAVFGQPKEKVYAEEITTAWETGENLERVARYSMEDAKVTYELGKEFLPMEAQLSRLIGQSLWDVSRSSTGNLVEWFLLRKAYERNELAPNKPDEKELARRRQSYEGGYVKEPERGLWENIVYLDFRSLYPSIIITHNVSPDTLNREGCKEYDVAPQVGHRFCKDFPGFIPSLLGDLLEERQKIKKKMKATIDPIERKLLDYRQRAIKILANSYYGYYGYARARWYCKECAESVTAWGREYITMTIKEIEEKYGFKVIYSDTDGFFATIPGADAETVKKKAMEFLKYINAKLPGALELEYEGFYKRGFFVTKKKYAVIDEEGKITTRGLEIVRRDWSEIAKETQARVLEALLKDGDVEKAVRIVKEVTEKLSKYEVPPEKLVIHEQITRDLKDYKATGPHVAVAKRLAARGVKIRPGTVISYIVLKGSGRIGDRAIPFDEFDPTKHKYDAEYYIENQVLPAVERILRAFGYRKEDLRYQKTRQVGLSAWLKPKGT

SEQ ID NO: 242 - protein, 774 aa, synthetic construct
MILDTDYITEDGKPVIRIFKKENGEFKIEYDRTFEPYFYALLKDDSAIEEVKKITAERHGTVVTVKRVEKVQKKFLGRPVEVWKLYFTHPQDVPAIRDKIREHPAVIDIYEYDIPFMKRYLIDKGLVPMEGDEELKMLAFDIETLYHEGEEFAEGPILMISYADEEGARVITWKNVDLPYVDVVSTEREMIKRFLRVVKEKDPDVLITYNGDNFDFAYLKKRCEKLGINFALGRDGSEPKIQRMGDRFAVEVKGRIHFDLYPVIRRTINLPTYTLEAVYEAVFGQPKEKVYAEEITTAWETGENLERVARYSMEDAKVTYELGKEFLPMEAQLSRLIGQSLWDVSRSSTGNLVEWFLLRKAYERNELAPNKPDEKELARRRQSYEGGYVKEPERGLWENIVYLDFRSLYPSIIITHNVSPDTLNREGCKEYDVAPQVGHRFCKDFPGFIPSLLGDLLEERQKIKKKMKATIDPIERKLLDYRQRAIKILANSYYGYYGYARARWYCKECAESVTAWGREYITMTIKEIEEKYGFKVIYSDTDGFFATIPGADAETVKKKAMEFLKYINAKLPGALELEYEGFYKRGFFVTKKKYAVIDEEGKITTRGLEIVRRDWSEIAKETQARVLEALLKDGDVEKAVRIVKEVTEKLSKYEVPPEKLVIHEQITRDLKDYKATGPHVAVAKRLAARGVKIRPGTVISYIVLKGSGRIGDRAIPFDEFDPTKHKYDAEYYIENQVLPAVERILRAFGYRKEDLRYQKTRQVGLSAWLKPKGT

SEQ ID NO: 243 - protein, 774 aa, synthetic construct
MILDTDYITEDGKPVIRIFKKENGEFKIEYDRTFEPYFYALLKDDSAIEEVKKITAERHGTVVTVKRVEKVQKKFLGRPVEVWKLYFTHPQDVPAIRDKIREHPAVIDIYEYDIPFQKRYLIDKGLVPMEGDEELKMLAFDIETLYHEGEEFAEGPILMISYADEEGARVITWKNVDLPYVDVVSTEREMIKRFLRVVKEKDPDVLITYNGDNFDFAYLKKRCEKLGINFALGRDGSEPKIQRMGDRFAVEVKGRIHFDLYPVIRRTINLPTYTLEAVYEAVFGQPKEKVYAEEITTAWETGENLERVARYSMEDAKVTYELGKEFLPMEAQLSRLIGQSLWDVSRSSTGNLVEWFLLRKAYERNELAPNKPDEKELARRRQSYEGGYVKEPERGLWENIVYLDFRSLYPSIIITHNVSPDTLNREGCKEYDVAPQVGHRFCKDFPGFIPSLLGDLLEERQKIKKKMKATIDPIERKLLDYRQRAIKILANSYYGYYGYARARWYCKECAESVTAWGREYITMTIKEIEEKYGFKVIYSDTDGFFATIPGADAETVKKKAMEFLKYINAKLPGALELEYEGFYKRGFFVTKKKYAVIDEEGKITTRGLEIVRRDWSEIAKETQARVLEALLKDGDVEKAVRIVKEVTEKLSKYEVPPEKLVIHEQITRDLKDYKATGPHVAVAKRLAARGVKIRPGTVISYIVLKGSGRIGDRAIPFDEFDPTKHKYDAEYYIENQVLPAVERILRAFGYRKEDLRYQKTRQVGLSAWLKPKGT

SEQ ID NO: 244 - protein, 774 aa, synthetic construct
MILDTDYITEDGKPVIRIFKKENGEFKIEYDRTFEPYFYALLKDDSAIEEVKKITAERHGTVVTVKRVEKVQKKFLGRPVEVWKLYFTHPQDVPAIRDKIREHPAVIDIYEYDIPFWKRYLIDKGLVPMEGDEELKMLAFDIETLYHEGEEFAEGPILMISYADEEGARVITWKNVDLPYVDVVSTEREMIKRFLRVVKEKDPDVLITYNGDNFDFAYLKKRCEKLGINFALGRDGSEPKIQRMGDRFAVEVKGRIHFDLYPVIRRTINLPTYTLEAVYEAVFGQPKEKVYAEEITTAWETGENLERVARYSMEDAKVTYELGKEFLPMEAQLSRLIGQSLWDVSRSSTGNLVEWFLLRKAYERNELAPNKPDEKELARRRQSYEGGYVKEPERGLWENIVYLDFRSLYPSIIITHNVSPDTLNREGCKEYDVAPQVGHRFCKDFPGFIPSLLGDLLEERQKIKKKMKATIDPIERKLLDYRQRAIKILANSYYGYYGYARARWYCKECAESVTAWGREYITMTIKEIEEKYGFKVIYSDTDGFFATIPGADAETVKKKAMEFLKYINAKLPGALELEYEGFYKRGFFVTKKKYAVIDEEGKITTRGLEIVRRDWSEIAKETQARVLEALLKDGDVEKAVRIVKEVTEKLSKYEVPPEKLVIHEQITRDLKDYKATGPHVAVAKRLAARGVKIRPGTVISYIVLKGSGRIGDRAIPFDEFDPTKHKYDAEYYIENQVLPAVERILRAFGYRKEDLRYQKTRQVGLSAWLKPKGT

SEQ ID NO: 245 - protein, 774 aa, synthetic construct
MILDTDYITEDGKPVIRIFKKENGEFKIEYDRTFEPYFYALLKDDSAIEEVKKITAERHGTVVTVKRVEKVQKKFLGRPVEVWKLYFTHPQDVPAIRDKIREHPAVIDIYEYDIPFAKAYLIDKGLVPMEGDEELKMLAFDIETLYHEGEEFAEGPILMISYADEEGARVITWKNVDLPYVDVVSTEREMIKRFLRVVKEKDPDVLITYNGDNFDFAYLKKRCEKLGINFALGRDGSEPKIQRMGDRFAVEVKGRIHFDLYPVIRRTINLPTYTLEAVYEAVFGQPKEKVYAEEITTAWETGENLERVARYSMEDAKVTYELGKEFLPMEAQLSRLIGQSLWDVSRSSTGNLVEWFLLRKAYERNELAPNKPDEKELARRRQSYEGGYVKEPERGLWENIVYLDFRSLYPSIIITHNVSPDTLNREGCKEYDVAPQVGHRFCKDFPGFIPSLLGDLLEERQKIKKKMKATIDPIERKLLDYRQRAIKILANSYYGYYGYARARWYCKECAESVTAWGREYITMTIKEIEEKYGFKVIYSDTDGFFATIPGADAETVKKKAMEFLKYINAKLPGALELEYEGFYKRGFFVTKKKYAVIDEEGKITTRGLEIVRRDWSEIAKETQARVLEALLKDGDVEKAVRIVKEVTEKLSKYEVPPEKLVIHEQITRDLKDYKATGPHVAVAKRLAARGVKIRPGTVISYIVLKGSGRIGDRAIPFDEFDPTKHKYDAEYYIENQVLPAVERILRAFGYRKEDLRYQKTRQVGLSAWLKPKGT

SEQ ID NO: 246 - protein, 774 aa, synthetic construct
MILDTDYITEDGKPVIRIFKKENGEFKIEYDRTFEPYFYALLKDDSAIEEVKKITAERHGTVVTVKRVEKVQKKFLGRPVEVWKLYFTHPQDVPAIRDKIREHPAVIDIYEYDIPFAKCYLIDKGLVPMEGDEELKMLAFDIETLYHEGEEFAEGPILMISYADEEGARVITWKNVDLPYVDVVSTEREMIKRFLRVVKEKDPDVLITYNGDNFDFAYLKKRCEKLGINFALGRDGSEPKIQRMGDRFAVEVKGRIHFDLYPVIRRTINLPTYTLEAVYEAVFGQPKEKVYAEEITTAWETGENLERVARYSMEDAKVTYELGKEFLPMEAQLSRLIGQSLWDVSRSSTGNLVEWFLLRKAYERNELAPNKPDEKELARRRQSYEGGYVKEPERGLWENIVYLDFRSLYPSIIITHNVSPDTLNREGCKEYDVAPQVGHRFCKDFPGFIPSLLGDLLEERQKIKKKMKATIDPIERKLLDYRQRAIKILANSYYGYYGYARARWYCKECAESVTAWGREYITMTIKEIEEKYGFKVIYSDTDGFFATIPGADAETVKKKAMEFLKYINAKLPGALELEYEGFYKRGFFVTKKKYAVIDEEGKITTRGLEIVRRDWSEIAKETQARVLEALLKDGDVEKAVRIVKEVTEKLSKYEVPPEKLVIHEQITRDLKDYKATGPHVAVAKRLAARGVKIRPGTVISYIVLKGSGRIGDRAIPFDEFDPTKHKYDAEYYIENQVLPAVERILRAFGYRKEDLRYQKTRQVGLSAWLKPKGT

SEQ ID NO: 247 - protein, 774 aa, synthetic construct
MILDTDYITEDGKPVIRIFKKENGEFKIEYDRTFEPYFYALLKDDSAIEEVKKITAERHGTVVTVKRVEKVQKKFLGRPVEVWKLYFTHPQDVPAIRDKIREHPAVIDIYEYDIPFAKDYLIDKGLVPMEGDEELKMLAFDIETLYHEGEEFAEGPILMISYADEEGARVITWKNVDLPYVDVVSTEREMIKRFLRVVKEKDPDVLITYNGDNFDFAYLKKRCEKLGINFALGRDGSEPKIQRMGDRFAVEVKGRIHFDLYPVIRRTINLPTYTLEAVYEAVFGQPKEKVYAEEITTAWETGENLERVARYSMEDAKVTYELGKEFLPMEAQLSRLIGQSLWDVSRSSTGNLVEWFLLRKAYERNELAPNKPDEKELARRRQSYEGGYVKEPERGLWENIVYLDFRSLYPSIIITHNVSPDTLNREGCKEYDVAPQVGHRFCKDFPGFIPSLLGDLLEERQKIKKKMKATIDPIERKLLDYRQRAIKILANSYYGYYGYARARWYCKECAESVTAWGREYITMTIKEIEEKYGFKVIYSDTDGFFATIPGADAETVKKKAMEFLKYINAKLPGALELEYEGFYKRGFFVTKKKYAVIDEEGKITTRGLEIVRRDWSEIAKETQARVLEALLKDGDVEKAVRIVKEVTEKLSKYEVPPEKLVIHEQITRDLKDYKATGPHVAVAKRLAARGVKIRPGTVISYIVLKGSGRIGDRAIPFDEFDPTKHKYDAEYYIENQVLPAVERILRAFGYRKEDLRYQKTRQVGLSAWLKPKGT

SEQ ID NO: 248 - protein, 774 aa, synthetic construct
MILDTDYITEDGKPVIRIFKKENGEFKIEYDRTFEPYFYALLKDDSAIEEVKKITAERHGTVVTVKRVEKVQKKFLGRPVEVWKLYFTHPQDVPAIRDKIREHPAVIDIYEYDIPFAKEYLIDKGLVPMEGDEELKMLAFDIETLYHEGEEFAEGPILMISYADEEGARVITWKNVDLPYVDVVSTEREMIKRFLRVVKEKDPDVLITYNGDNFDFAYLKKRCEKLGINFALGRDGSEPKIQRMGDRFAVEVKGRIHFDLYPVIRRTINLPTYTLEAVYEAVFGQPKEKVYAEEITTAWETGENLERVARYSMEDAKVTYELGKEFLPMEAQLSRLIGQSLWDVSRSSTGNLVEWFLLRKAYERNELAPNKPDEKELARRRQSYEGGYVKEPERGLWENIVYLDFRSLYPSIIITHNVSPDTLNREGCKEYDVAPQVGHRFCKDFPGFIPSLLGDLLEERQKIKKKMKATIDPIERKLLDYRQRAIKILANSYYGYYGYARARWYCKECAESVTAWGREYITMTIKEIEEKYGFKVIYSDTDGFFATIPGADAETVKKKAMEFLKYINAKLPGALELEYEGFYKRGFFVTKKKYAVIDEEGKITTRGLEIVRRDWSEIAKETQARVLEALLKDGDVEKAVRIVKEVTEKLSKYEVPPEKLVIHEQITRDLKDYKATGPHVAVAKRLAARGVKIRPGTVISYIVLKGSGRIGDRAIPFDEFDPTKHKYDAEYYIENQVLPAVERILRAFGYRKEDLRYQKTRQVGLSAWLKPKGT

SEQ ID NO: 249 - protein, 774 aa, synthetic construct
MILDTDYITEDGKPVIRIFKKENGEFKIEYDRTFEPYFYALLKDDSAIEEVKKITAERHGTVVTVKRVEKVQKKFLGRPVEVWKLYFTHPQDVPAIRDKIREHPAVIDIYEYDIPFAKFYLIDKGLVPMEGDEELKMLAFDIETLYHEGEEFAEGPILMISYADEEGARVITWKNVDLPYVDVVSTEREMIKRFLRVVKEKDPDVLITYNGDNFDFAYLKKRCEKLGINFALGRDGSEPKIQRMGDRFAVEVKGRIHFDLYPVIRRTINLPTYTLEAVYEAVFGQPKEKVYAEEITTAWETGENLERVARYSMEDAKVTYELGKEFLPMEAQLSRLIGQSLWDVSRSSTGNLVEWFLLRKAYERNELAPNKPDEKELARRRQSYEGGYVKEPERGLWENIVYLDFRSLYPSIIITHNVSPDTLNREGCKEYDVAPQVGHRFCKDFPGFIPSLLGDLLEERQKIKKKMKATIDPIERKLLDYRQRAIKILANSYYGYYGYARARWYCKECAESVTAWGREYITMTIKEIEEKYGFKVIYSDTDGFFATIPGADAETVKKKAMEFLKYINAKLPGALELEYEGFYKRGFFVTKKKYAVIDEEGKITTRGLEIVRRDWSEIAKETQARVLEALLKDGDVEKAVRIVKEVTEKLSKYEVPPEKLVIHEQITRDLKDYKATGPHVAVAKRLAARGVKIRPGTVISYIVLKGSGRIGDRAIPFDEFDPTKHKYDAEYYIENQVLPAVERILRAFGYRKEDLRYQKTRQVGLSAWLKPKGT

SEQ ID NO: 250 - protein, 774 aa, synthetic construct
MILDTDYITEDGKPVIRIFKKENGEFKIEYDRTFEPYFYALLKDDSAIEEVKKITAERHGTVVTVKRVEKVQKKFLGRPVEVWKLYFTHPQDVPAIRDKIREHPAVIDIYEYDIPFAKGYLIDKGLVPMEGDEELKMLAFDIETLYHEGEEFAEGPILMISYADEEGARVITWKNVDLPYVDVVSTEREMIKRFLRVVKEKDPDVLITYNGDNFDFAYLKKRCEKLGINFALGRDGSEPKIQRMGDRFAVEVKGRIHFDLYPVIRRTINLPTYTLEAVYEAVFGQPKEKVYAEEITTAWETGENLERVARYSMEDAKVTYELGKEFLPMEAQLSRLIGQSLWDVSRSSTGNLVEWFLLRKAYERNELAPNKPDEKELARRRQSYEGGYVKEPERGLWENIVYLDFRSLYPSIIITHNVSPDTLNREGCKEYDVAPQVGHRFCKDFPGFIPSLLGDLLEERQKIKKKMKATIDPIERKLLDYRQRAIKILANSYYGYYGYARARWYCKECAESVTAWGREYITMTIKEIEEKYGFKVIYSDTDGFFATIPGADAETVKKKAMEFLKYINAKLPGALELEYEGFYKRGFFVTKKKYAVIDEEGKITTRGLEIVRRDWSEIAKETQARVLEALLKDGDVEKAVRIVKEVTEKLSKYEVPPEKLVIHEQITRDLKDYKATGPHVAVAKRLAARGVKIRPGTVISYIVLKGSGRIGDRAIPFDEFDPTKHKYDAEYYIENQVLPAVERILRAFGYRKEDLRYQKTRQVGLSAWLKPKGT

SEQ ID NO: 251 - protein, 774 aa, synthetic construct
MILDTDYITEDGKPVIRIFKKENGEFKIEYDRTFEPYFYALLKDDSAIEEVKKITAERHGTVVTVKRVEKVQKKFLGRPVEVWKLYFTHPQDVPAIRDKIREHPAVIDIYEYDIPFAKHYLIDKGLVPMEGDEELKMLAFDIETLYHEGEEFAEGPILMISYADEEGARVITWKNVDLPYVDVVSTEREMIKRFLRVVKEKDPDVLITYNGDNFDFAYLKKRCEKLGINFALGRDGSEPKIQRMGDRFAVEVKGRIHFDLYPVIRRTINLPTYTLEAVYEAVFGQPKEKVYAEEITTAWETGENLERVARYSMEDAKVTYELGKEFLPMEAQLSRLIGQSLWDVSRSSTGNLVEWFLLRKAYERNELAPNKPDEKELARRRQSYEGGYVKEPERGLWENIVYLDFRSLYPSIIITHNVSPDTLNREGCKEYDVAPQVGHRFCKDFPGFIPSLLGDLLEERQKIKKKMKATIDPIERKLLDYRQRAIKILANSYYGYYGYARARWYCKECAESVTAWGREYITMTIKEIEEKYGFKVIYSDTDGFFATIPGADAETVKKKAMEFLKYINAKLPGALELEYEGFYKRGFFVTKKKYAVIDEEGKITTRGLEIVRRDWSEIAKETQARVLEALLKDGDVEKAVRIVKEVTEKLSKYEVPPEKLVIHEQITRDLKDYKATGPHVAVAKRLAARGVKIRPGTVISYIVLKGSGRIGDRAIPFDEFDPTKHKYDAEYYIENQVLPAVERILRAFGYRKEDLRYQKTRQVGLSAWLKPKGT

SEQ ID NO: 252 - protein, 774 aa, synthetic construct
MILDTDYITEDGKPVIRIFKKENGEFKIEYDRTFEPYFYALLKDDSAIEEVKKITAERHGTVVTVKRVEKVQKKFLGRPVEVWKLYFTHPQDVPAIRDKIREHPAVIDIYEYDIPFAKIYLIDKGLVPMEGDEELKMLAFDIETLYHEGEEFAEGPILMISYADEEGARVITWKNVDLPYVDVVSTEREMIKRFLRVVKEKDPDVLITYNGDNFDFAYLKKRCEKLGINFALGRDGSEPKIQRMGDRFAVEVKGRIHFDLYPVIRRTINLPTYTLEAVYEAVFGQPKEKVYAEEITTAWETGENLERVARYSMEDAKVTYELGKEFLPMEAQLSRLIGQSLWDVSRSSTGNLVEWFLLRKAYERNELAPNKPDEKELARRRQSYEGGYVKEPERGLWENIVYLDFRSLYPSIIITHNVSPDTLNREGCKEYDVAPQVGHRFCKDFPGFIPSLLGDLLEERQKIKKKMKATIDPIERKLLDYRQRAIKILANSYYGYYGYARARWYCKECAESVTAWGREYITMTIKEIEEKYGFKVIYSDTDGFFATIPGADAETVKKKAMEFLKYINAKLPGALELEYEGFYKRGFFVTKKKYAVIDEEGKITTRGLEIVRRDWSEIAKETQARVLEALLKDGDVEKAVRIVKEVTEKLSKYEVPPEKLVIHEQITRDLKDYKATGPHVAVAKRLAARGVKIRPGTVISYIVLKGSGRIGDRAIPFDEFDPTKHKYDAEYYIENQVLPAVERILRAFGYRKEDLRYQKTRQVGLSAWLKPKGT

SEQ ID NO: 253 - protein, 774 aa, synthetic construct
MILDTDYITEDGKPVIRIFKKENGEFKIEYDRTFEPYFYALLKDDSAIEEVKKITAERHGTVVTVKRVEKVQKKFLGRPVEVWKLYFTHPQDVPAIRDKIREHPAVIDIYEYDIPFAKKYLIDKGLVPMEGDEELKMLAFDIETLYHEGEEFAEGPILMISYADEEGARVITWKNVDLPYVDVVSTEREMIKRFLRVVKEKDPDVLITYNGDNFDFAYLKKRCEKLGINFALGRDGSEPKIQRMGDRFAVEVKGRIHFDLYPVIRRTINLPTYTLEAVYEAVFGQPKEKVYAEEITTAWETGENLERVARYSMEDAKVTYELGKEFLPMEAQLSRLIGQSLWDVSRSSTGNLVEWFLLRKAYERNELAPNKPDEKELARRRQSYEGGYVKEPERGLWENIVYLDFRSLYPSIIITHNVSPDTLNREGCKEYDVAPQVGHRFCKDFPGFIPSLLGDLLEERQKIKKKMKATIDPIERKLLDYRQRAIKILANSYYGYYGYARARWYCKECAESVTAWGREYITMTIKEIEEKYGFKVIYSDTDGFFATIPGADAETVKKKAMEFLKYINAKLPGALELEYEGFYKRGFFVTKKKYAVIDEEGKITTRGLEIVRRDWSEIAKETQARVLEALLKDGDVEKAVRIVKEVTEKLSKYEVPPEKLVIHEQITRDLKDYKATGPHVAVAKRLAARGVKIRPGTVISYIVLKGSGRIGDRAIPFDEFDPTKHKYDAEYYIENQVLPAVERILRAFGYRKEDLRYQKTRQVGLSAWLKPKGT

SEQ ID NO: 254 - protein, 774 aa, synthetic construct
MILDTDYITEDGKPVIRIFKKENGEFKIEYDRTFEPYFYALLKDDSAIEEVKKITAERHGTVVTVKRVEKVQKKFLGRPVEVWKLYFTHPQDVPAIRDKIREHPAVIDIYEYDIPFAKLYLIDKGLVPMEGDEELKMLAFDIETLYHEGEEFAEGPILMISYADEEGARVITWKNVDLPYVDVVSTEREMIKRFLRVVKEKDPDVLITYNGDNFDFAYLKKRCEKLGINFALGRDGSEPKIQRMGDRFAVEVKGRIHFDLYPVIRRTINLPTYTLEAVYEAVFGQPKEKVYAEEITTAWETGENLERVARYSMEDAKVTYELGKEFLPMEAQLSRLIGQSLWDVSRSSTGNLVEWFLLRKAYERNELAPNKPDEKELARRRQSYEGGYVKEPERGLWENIVYLDFRSLYPSIIITHNVSPDTLNREGCKEYDVAPQVGHRFCKDFPGFIPSLLGDLLEERQKIKKKMKATIDPIERKLLDYRQRAIKILANSYYGYYGYARARWYCKECAESVTAWGREYITMTIKEIEEKYGFKVIYSDTDGFFATIPGADAETVKKKAMEFLKYINAKLPGALELEYEGFYKRGFFVTKKKYAVIDEEGKITTRGLEIVRRDWSEIAKETQARVLEALLKDGDVEKAVRIVKEVTEKLSKYEVPPEKLVIHEQITRDLKDYKATGPHVAVAKRLAARGVKIRPGTVISYIVLKGSGRIGDRAIPFDEFDPTKHKYDAEYYIENQVLPAVERILRAFGYRKEDLRYQKTRQVGLSAWLKPKGT

SEQ ID NO: 255 - protein, 774 aa, synthetic construct
MILDTDYITEDGKPVIRIFKKENGEFKIEYDRTFEPYFYALLKDDSAIEEVKKITAERHGTVVTVKRVEKVQKKFLGRPVEVWKLYFTHPQDVPAIRDKIREHPAVIDIYEYDIPFAKMYLIDKGLVPMEGDEELKMLAFDIETLYHEGEEFAEGPILMISYADEEGARVITWKNVDLPYVDVVSTEREMIKRFLRVVKEKDPDVLITYNGDNFDFAYLKKRCEKLGINFALGRDGSEPKIQRMGDRFAVEVKGRIHFDLYPVIRRTINLPTYTLEAVYEAVFGQPKEKVYAEEITTAWETGENLERVARYSMEDAKVTYELGKEFLPMEAQLSRLIGQSLWDVSRSSTGNLVEWFLLRKAYERNELAPNKPDEKELARRRQSYEGGYVKEPERGLWENIVYLDFRSLYPSIIITHNVSPDTLNREGCKEYDVAPQVGHRFCKDFPGFIPSLLGDLLEERQKIKKKMKATIDPIERKLLDYRQRAIKILANSYYGYYGYARARWYCKECAESVTAWGREYITMTIKEIEEKYGFKVIYSDTDGFFATIPGADAETVKKKAMEFLKYINAKLPGALELEYEGFYKRGFFVTKKKYAVIDEEGKITTRGLEIVRRDWSEIAKETQARVLEALLKDGDVEKAVRIVKEVTEKLSKYEVPPEKLVIHEQITRDLKDYKATGPHVAVAKRLAARGVKIRPGTVISYIVLKGSGRIGDRAIPFDEFDPTKHKYDAEYYIENQVLPAVERILRAFGYRKEDLRYQKTRQVGLSAWLKPKGT

SEQ ID NO: 256 - protein, 774 aa, synthetic construct
MILDTDYITEDGKPVIRIFKKENGEFKIEYDRTFEPYFYALLKDDSAIEEVKKITAERHGTVVTVKRVEKVQKKFLGRPVEVWKLYFTHPQDVPAIRDKIREHPAVIDIYEYDIPFAKNYLIDKGLVPMEGDEELKMLAFDIETLYHEGEEFAEGPILMISYADEEGARVITWKNVDLPYVDVVSTEREMIKRFLRVVKEKDPDVLITYNGDNFDFAYLKKRCEKLGINFALGRDGSEPKIQRMGDRFAVEVKGRIHFDLYPVIRRTINLPTYTLEAVYEAVFGQPKEKVYAEEITTAWETGENLERVARYSMEDAKVTYELGKEFLPMEAQLSRLIGQSLWDVSRSSTGNLVEWFLLRKAYERNELAPNKPDEKELARRRQSYEGGYVKEPERGLWENIVYLDFRSLYPSIIITHNVSPDTLNREGCKEYDVAPQVGHRFCKDFPGFIPSLLGDLLEERQKIKKKMKATIDPIERKLLDYRQRAIKILANSYYGYYGYARARWYCKECAESVTAWGREYITMTIKEIEEKYGFKVIYSDTDGFFATIPGADAETVKKKAMEFLKYINAKLPGALELEYEGFYKRGFFVTKKKYAVIDEEGKITTRGLEIVRRDWSEIAKETQARVLEALLKDGDVEKAVRIVKEVTEKLSKYEVPPEKLVIHEQITRDLKDYKATGPHVAVAKRLAARGVKIRPGTVISYIVLKGSGRIGDRAIPFDEFDPTKHKYDAEYYIENQVLPAVERILRAFGYRKEDLRYQKTRQVGLSAWLKPKGT

SEQ ID NO: 257 - protein, 774 aa, synthetic construct
MILDTDYITEDGKPVIRIFKKENGEFKIEYDRTFEPYFYALLKDDSAIEEVKKITAERHGTVVTVKRVEKVQKKFLGRPVEVWKLYFTHPQDVPAIRDKIREHPAVIDIYEYDIPFAKQYLIDKGLVPMEGDEELKMLAFDIETLYHEGEEFAEGPILMISYADEEGARVITWKNVDLPYVDVVSTEREMIKRFLRVVKEKDPDVLITYNGDNFDFAYLKKRCEKLGINFALGRDGSEPKIQRMGDRFAVEVKGRIHFDLYPVIRRTINLPTYTLEAVYEAVFGQPKEKVYAEEITTAWETGENLERVARYSMEDAKVTYELGKEFLPMEAQLSRLIGQSLWDVSRSSTGNLVEWFLLRKAYERNELAPNKPDEKELARRRQSYEGGYVKEPERGLWENIVYLDFRSLYPSIIITHNVSPDTLNREGCKEYDVAPQVGHRFCKDFPGFIPSLLGDLLEERQKIKKKMKATIDPIERKLLDYRQRAIKILANSYYGYYGYARARWYCKECAESVTAWGREYITMTIKEIEEKYGFKVIYSDTDGFFATIPGADAETVKKKAMEFLKYINAKLPGALELEYEGFYKRGFFVTKKKYAVIDEEGKITTRGLEIVRRDWSEIAKETQARVLEALLKDGDVEKAVRIVKEVTEKLSKYEVPPEKLVIHEQITRDLKDYKATGPHVAVAKRLAARGVKIRPGTVISYIVLKGSGRIGDRAIPFDEFDPTKHKYDAEYYIENQVLPAVERILRAFGYRKEDLRYQKTRQVGLSAWLKPKGT

SEQ ID NO: 258 - protein, 774 aa, synthetic construct
MILDTDYITEDGKPVIRIFKKENGEFKIEYDRTFEPYFYALLKDDSAIEEVKKITAERHGTVVTVKRVEKVQKKFLGRPVEVWKLYFTHPQDVPAIRDKIREHPAVIDIYEYDIPFAKSYLIDKGLVPMEGDEELKMLAFDIETLYHEGEEFAEGPILMISYADEEGARVITWKNVDLPYVDVVSTEREMIKRFLRVVKEKDPDVLITYNGDNFDFAYLKKRCEKLGINFALGRDGSEPKIQRMGDRFAVEVKGRIHFDLYPVIRRTINLPTYTLEAVYEAVFGQPKEKVYAEEITTAWETGENLERVARYSMEDAKVTYELGKEFLPMEAQLSRLIGQSLWDVSRSSTGNLVEWFLLRKAYERNELAPNKPDEKELARRRQSYEGGYVKEPERGLWENIVYLDFRSLYPSIIITHNVSPDTLNREGCKEYDVAPQVGHRFCKDFPGFIPSLLGDLLEERQKIKKKMKATIDPIERKLLDYRQRAIKILANSYYGYYGYARARWYCKECAESVTAWGREYITMTIKEIEEKYGFKVIYSDTDGFFATIPGADAETVKKKAMEFLKYINAKLPGALELEYEGFYKRGFFVTKKKYAVIDEEGKITTRGLEIVRRDWSEIAKETQARVLEALLKDGDVEKAVRIVKEVTEKLSKYEVPPEKLVIHEQITRDLKDYKATGPHVAVAKRLAARGVKIRPGTVISYIVLKGSGRIGDRAIPFDEFDPTKHKYDAEYYIENQVLPAVERILRAFGYRKEDLRYQKTRQVGLSAWLKPKGT

SEQ ID NO: 259 - protein, 774 aa, synthetic construct
MILDTDYITEDGKPVIRIFKKENGEFKIEYDRTFEPYFYALLKDDSAIEEVKKITAERHGTVVTVKRVEKVQKKFLGRPVEVWKLYFTHPQDVPAIRDKIREHPAVIDIYEYDIPFAKTYLIDKGLVPMEGDEELKMLAFDIETLYHEGEEFAEGPILMISYADEEGARVITWKNVDLPYVDVVSTEREMIKRFLRVVKEKDPDVLITYNGDNFDFAYLKKRCEKLGINFALGRDGSEPKIQRMGDRFAVEVKGRIHFDLYPVIRRTINLPTYTLEAVYEAVFGQPKEKVYAEEITTAWETGENLERVARYSMEDAKVTYELGKEFLPMEAQLSRLIGQSLWDVSRSSTGNLVEWFLLRKAYERNELAPNKPDEKELARRRQSYEGGYVKEPERGLWENIVYLDFRSLYPSIIITHNVSPDTLNREGCKEYDVAPQVGHRFCKDFPGFIPSLLGDLLEERQKIKKKMKATIDPIERKLLDYRQRAIKILANSYYGYYGYARARWYCKECAESVTAWGREYITMTIKEIEEKYGFKVIYSDTDGFFATIPGADAETVKKKAMEFLKYINAKLPGALELEYEGFYKRGFFVTKKKYAVIDEEGKITTRGLEIVRRDWSEIAKETQARVLEALLKDGDVEKAVRIVKEVTEKLSKYEVPPEKLVIHEQITRDLKDYKATGPHVAVAKRLAARGVKIRPGTVISYIVLKGSGRIGDRAIPFDEFDPTKHKYDAEYYIENQVLPAVERILRAFGYRKEDLRYQKTRQVGLSAWLKPKGT

SEQ ID NO: 260 - protein, 774 aa, synthetic construct
MILDTDYITEDGKPVIRIFKKENGEFKIEYDRTFEPYFYALLKDDSAIEEVKKITAERHGTVVTVKRVEKVQKKFLGRPVEVWKLYFTHPQDVPAIRDKIREHPAVIDIYEYDIPFAKVYLIDKGLVPMEGDEELKMLAFDIETLYHEGEEFAEGPILMISYADEEGARVITWKNVDLPYVDVVSTEREMIKRFLRVVKEKDPDVLITYNGDNFDFAYLKKRCEKLGINFALGRDGSEPKIQRMGDRFAVEVKGRIHFDLYPVIRRTINLPTYTLEAVYEAVFGQPKEKVYAEEITTAWETGENLERVARYSMEDAKVTYELGKEFLPMEAQLSRLIGQSLWDVSRSSTGNLVEWFLLRKAYERNELAPNKPDEKELARRRQSYEGGYVKEPERGLWENIVYLDFRSLYPSIIITHNVSPDTLNREGCKEYDVAPQVGHRFCKDFPGFIPSLLGDLLEERQKIKKKMKATIDPIERKLLDYRQRAIKILANSYYGYYGYARARWYCKECAESVTAWGREYITMTIKEIEEKYGFKVIYSDTDGFFATIPGADAETVKKKAMEFLKYINAKLPGALELEYEGFYKRGFFVTKKKYAVIDEEGKITTRGLEIVRRDWSEIAKETQARVLEALLKDGDVEKAVRIVKEVTEKLSKYEVPPEKLVIHEQITRDLKDYKATGPHVAVAKRLAARGVKIRPGTVISYIVLKGSGRIGDRAIPFDEFDPTKHKYDAEYYIENQVLPAVERILRAFGYRKEDLRYQKTRQVGLSAWLKPKGT

SEQ ID NO: 261 - protein, 774 aa, synthetic construct
MILDTDYITEDGKPVIRIFKKENGEFKIEYDRTFEPYFYALLKDDSAIEEVKKITAERHGTVVTVKRVEKVQKKFLGRPVEVWKLYFTHPQDVPAIRDKIREHPAVIDIYEYDIPFAKWYLIDKGLVPMEGDEELKMLAFDIETLYHEGEEFAEGPILMISYADEEGARVITWKNVDLPYVDVVSTEREMIKRFLRVVKEKDPDVLITYNGDNFDFAYLKKRCEKLGINFALGRDGSEPKIQRMGDRFAVEVKGRIHFDLYPVIRRTINLPTYTLEAVYEAVFGQPKEKVYAEEITTAWETGENLERVARYSMEDAKVTYELGKEFLPMEAQLSRLIGQSLWDVSRSSTGNLVEWFLLRKAYERNELAPNKPDEKELARRRQSYEGGYVKEPERGLWENIVYLDFRSLYPSIIITHNVSPDTLNREGCKEYDVAPQVGHRFCKDFPGFIPSLLGDLLEERQKIKKKMKATIDPIERKLLDYRQRAIKILANSYYGYYGYARARWYCKECAESVTAWGREYITMTIKEIEEKYGFKVIYSDTDGFFATIPGADAETVKKKAMEFLKYINAKLPGALELEYEGFYKRGFFVTKKKYAVIDEEGKITTRGLEIVRRDWSEIAKETQARVLEALLKDGDVEKAVRIVKEVTEKLSKYEVPPEKLVIHEQITRDLKDYKATGPHVAVAKRLAARGVKIRPGTVISYIVLKGSGRIGDRAIPFDEFDPTKHKYDAEYYIENQVLPAVERILRAFGYRKEDLRYQKTRQVGLSAWLKPKGT

SEQ ID NO: 262 - protein, 774 aa, synthetic construct
MILDTDYITEDGKPVIRIFKKENGEFKIEYDRTFEPYFYALLKDDSAIEEVKKITAERHGTVVTVKRVEKVQKKFLGRPVEVWKLYFTHPQDVPAIRDKIREHPAVIDIYEYDIPFAKYYLIDKGLVPMEGDEELKMLAFDIETLYHEGEEFAEGPILMISYADEEGARVITWKNVDLPYVDVVSTEREMIKRFLRVVKEKDPDVLITYNGDNFDFAYLKKRCEKLGINFALGRDGSEPKIQRMGDRFAVEVKGRIHFDLYPVIRRTINLPTYTLEAVYEAVFGQPKEKVYAEEITTAWETGENLERVARYSMEDAKVTYELGKEFLPMEAQLSRLIGQSLWDVSRSSTGNLVEWFLLRKAYERNELAPNKPDEKELARRRQSYEGGYVKEPERGLWENIVYLDFRSLYPSIIITHNVSPDTLNREGCKEYDVAPQVGHRFCKDFPGFIPSLLGDLLEERQKIKKKMKATIDPIERKLLDYRQRAIKILANSYYGYYGYARARWYCKECAESVTAWGREYITMTIKEIEEKYGFKVIYSDTDGFFATIPGADAETVKKKAMEFLKYINAKLPGALELEYEGFYKRGFFVTKKKYAVIDEEGKITTRGLEIVRRDWSEIAKETQARVLEALLKDGDVEKAVRIVKEVTEKLSKYEVPPEKLVIHEQITRDLKDYKATGPHVAVAKRLAARGVKIRPGTVISYIVLKGSGRIGDRAIPFDEFDPTKHKYDAEYYIENQVLPAVERILRAFGYRKEDLRYQKTRQVGLSAWLKPKGT

SEQ ID NO: 263 - protein, 774 aa, synthetic construct
MILDTDYITEDGKPVIRIFKKENGEFKIEYDRTFEPYFYALLKDDSAIEEVKKITAERHGTVVTVKRVEKVQKKFLGRPVEVWKLYFTHPQDVPAIRDKIREHPAVIDIYEYDIPFAKRPLIDKGLVPMEGDEELKMLAFDIETLYHEGEEFAEGPILMISYADEEGARVITWKNVDLPYVDVVSTEREMIKRFLRVVKEKDPDVLITYNGDNFDFAYLKKRCEKLGINFALGRDGSEPKIQRMGDRFAVEVKGRIHFDLYPVIRRTINLPTYTLEAVYEAVFGQPKEKVYAEEITTAWETGENLERVARYSMEDAKVTYELGKEFLPMEAQLSRLIGQSLWDVSRSSTGNLVEWFLLRKAYERNELAPNKPDEKELARRRQSYEGGYVKEPERGLWENIVYLDFRSLYPSIIITHNVSPDTLNREGCKEYDVAPQVGHRFCKDFPGFIPSLLGDLLEERQKIKKKMKATIDPIERKLLDYRQRAIKILANSYYGYYGYARARWYCKECAESVTAWGREYITMTIKEIEEKYGFKVIYSDTDGFFATIPGADAETVKKKAMEFLKYINAKLPGALELEYEGFYKRGFFVTKKKYAVIDEEGKITTRGLEIVRRDWSEIAKETQARVLEALLKDGDVEKAVRIVKEVTEKLSKYEVPPEKLVIHEQITRDLKDYKATGPHVAVAKRLAARGVKIRPGTVISYIVLKGSGRIGDRAIPFDEFDPTKHKYDAEYYIENQVLPAVERILRAFGYRKEDLRYQKTRQVGLSAWLKPKGT

SEQ ID NO: 264 - protein, 774 aa, synthetic construct
MILDTDYITEDGKPVIRIFKKENGEFKIEYDRTFEPYFYALLKDDSAIEEVKKITAERHGTVVTVKRVEKVQKKFLGRPVEVWKLYFTHPQDVPAIRDKIREHPAVIDIYEYDIPFAKRYLKDKGLVPMEGDEELKMLAFDIETLYHEGEEFAEGPILMISYADEEGARVITWKNVDLPYVDVVSTEREMIKRFLRVVKEKDPDVLITYNGDNFDFAYLKKRCEKLGINFALGRDGSEPKIQRMGDRFAVEVKGRIHFDLYPVIRRTINLPTYTLEAVYEAVFGQPKEKVYAEEITTAWETGENLERVARYSMEDAKVTYELGKEFLPMEAQLSRLIGQSLWDVSRSSTGNLVEWFLLRKAYERNELAPNKPDEKELARRRQSYEGGYVKEPERGLWENIVYLDFRSLYPSIIITHNVSPDTLNREGCKEYDVAPQVGHRFCKDFPGFIPSLLGDLLEERQKIKKKMKATIDPIERKLLDYRQRAIKILANSYYGYYGYARARWYCKECAESVTAWGREYITMTIKEIEEKYGFKVIYSDTDGFFATIPGADAETVKKKAMEFLKYINAKLPGALELEYEGFYKRGFFVTKKKYAVIDEEGKITTRGLEIVRRDWSEIAKETQARVLEALLKDGDVEKAVRIVKEVTEKLSKYEVPPEKLVIHEQITRDLKDYKATGPHVAVAKRLAARGVKIRPGTVISYIVLKGSGRIGDRAIPFDEFDPTKHKYDAEYYIENQVLPAVERILRAFGYRKEDLRYQKTRQVGLSAWLKPKGT

SEQ ID NO: 265 - protein, 774 aa, synthetic construct
MILDTDYITEDGKPVIRIFKKENGEFKIEYDRTFEPYFYALLKDDSAIEEVKKITAERHGTVVTVKRVEKVQKKFLGRPVEVWKLYFTHPQDVPAIRDKIREHPAVIDIYEYDIPFAKRYLRDKGLVPMEGDEELKMLAFDIETLYHEGEEFAEGPILMISYADEEGARVITWKNVDLPYVDVVSTEREMIKRFLRVVKEKDPDVLITYNGDNFDFAYLKKRCEKLGINFALGRDGSEPKIQRMGDRFAVEVKGRIHFDLYPVIRRTINLPTYTLEAVYEAVFGQPKEKVYAEEITTAWETGENLERVARYSMEDAKVTYELGKEFLPMEAQLSRLIGQSLWDVSRSSTGNLVEWFLLRKAYERNELAPNKPDEKELARRRQSYEGGYVKEPERGLWENIVYLDFRSLYPSIIITHNVSPDTLNREGCKEYDVAPQVGHRFCKDFPGFIPSLLGDLLEERQKIKKKMKATIDPIERKLLDYRQRAIKILANSYYGYYGYARARWYCKECAESVTAWGREYITMTIKEIEEKYGFKVIYSDTDGFFATIPGADAETVKKKAMEFLKYINAKLPGALELEYEGFYKRGFFVTKKKYAVIDEEGKITTRGLEIVRRDWSEIAKETQARVLEALLKDGDVEKAVRIVKEVTEKLSKYEVPPEKLVIHEQITRDLKDYKATGPHVAVAKRLAARGVKIRPGTVISYIVLKGSGRIGDRAIPFDEFDPTKHKYDAEYYIENQVLPAVERILRAFGYRKEDLRYQKTRQVGLSAWLKPKGT

SEQ ID NO: 266 - protein, 774 aa, synthetic construct
MILDTDYITEDGKPVIRIFKKENGEFKIEYDRTFEPYFYALLKDDSAIEEVKKITAERHGTVVTVKRVEKVQKKFLGRPVEVWKLYFTHPQDVPAIRDKIREHPAVIDIYEYDIPFAKRYLWDKGLVPMEGDEELKMLAFDIETLYHEGEEFAEGPILMISYADEEGARVITWKNVDLPYVDVVSTEREMIKRFLRVVKEKDPDVLITYNGDNFDFAYLKKRCEKLGINFALGRDGSEPKIQRMGDRFAVEVKGRIHFDLYPVIRRTINLPTYTLEAVYEAVFGQPKEKVYAEEITTAWETGENLERVARYSMEDAKVTYELGKEFLPMEAQLSRLIGQSLWDVSRSSTGNLVEWFLLRKAYERNELAPNKPDEKELARRRQSYEGGYVKEPERGLWENIVYLDFRSLYPSIIITHNVSPDTLNREGCKEYDVAPQVGHRFCKDFPGFIPSLLGDLLEERQKIKKKMKATIDPIERKLLDYRQRAIKILANSYYGYYGYARARWYCKECAESVTAWGREYITMTIKEIEEKYGFKVIYSDTDGFFATIPGADAETVKKKAMEFLKYINAKLPGALELEYEGFYKRGFFVTKKKYAVIDEEGKITTRGLEIVRRDWSEIAKETQARVLEALLKDGDVEKAVRIVKEVTEKLSKYEVPPEKLVIHEQITRDLKDYKATGPHVAVAKRLAARGVKIRPGTVISYIVLKGSGRIGDRAIPFDEFDPTKHKYDAEYYIENQVLPAVERILRAFGYRKEDLRYQKTRQVGLSAWLKPKGT

SEQ ID NO: 267 - protein, 774 aa, synthetic construct
MILDTDYITEDGKPVIRIFKKENGEFKIEYDRTFEPYFYALLKDDSAIEEVKKITAERHGTVVTVKRVEKVQKKFLGRPVEVWKLYFTHPQDVPAIRDKIREHPAVIDIYEYDIPFAKRYLIAKGLVPMEGDEELKMLAFDIETLYHEGEEFAEGPILMISYADEEGARVITWKNVDLPYVDVVSTEREMIKRFLRVVKEKDPDVLITYNGDNFDFAYLKKRCEKLGINFALGRDGSEPKIQRMGDRFAVEVKGRIHFDLYPVIRRTINLPTYTLEAVYEAVFGQPKEKVYAEEITTAWETGENLERVARYSMEDAKVTYELGKEFLPMEAQLSRLIGQSLWDVSRSSTGNLVEWFLLRKAYERNELAPNKPDEKELARRRQSYEGGYVKEPERGLWENIVYLDFRSLYPSIIITHNVSPDTLNREGCKEYDVAPQVGHRFCKDFPGFIPSLLGDLLEERQKIKKKMKATIDPIERKLLDYRQRAIKILANSYYGYYGYARARWYCKECAESVTAWGREYITMTIKEIEEKYGFKVIYSDTDGFFATIPGADAETVKKKAMEFLKYINAKLPGALELEYEGFYKRGFFVTKKKYAVIDEEGKITTRGLEIVRRDWSEIAKETQARVLEALLKDGDVEKAVRIVKEVTEKLSKYEVPPEKLVIHEQITRDLKDYKATGPHVAVAKRLAARGVKIRPGTVISYIVLKGSGRIGDRAIPFDEFDPTKHKYDAEYYIENQVLPAVERILRAFGYRKEDLRYQKTRQVGLSAWLKPKGT

SEQ ID NO: 268 - protein, 774 aa, synthetic construct
MILDTDYITEDGKPVIRIFKKENGEFKIEYDRTFEPYFYALLKDDSAIEEVKKITAERHGTVVTVKRVEKVQKKFLGRPVEVWKLYFTHPQDVPAIRDKIREHPAVIDIYEYDIPFAKRYLICKGLVPMEGDEELKMLAFDIETLYHEGEEFAEGPILMISYADEEGARVITWKNVDLPYVDVVSTEREMIKRFLRVVKEKDPDVLITYNGDNFDFAYLKKRCEKLGINFALGRDGSEPKIQRMGDRFAVEVKGRIHFDLYPVIRRTINLPTYTLEAVYEAVFGQPKEKVYAEEITTAWETGENLERVARYSMEDAKVTYELGKEFLPMEAQLSRLIGQSLWDVSRSSTGNLVEWFLLRKAYERNELAPNKPDEKELARRRQSYEGGYVKEPERGLWENIVYLDFRSLYPSIIITHNVSPDTLNREGCKEYDVAPQVGHRFCKDFPGFIPSLLGDLLEERQKIKKKMKATIDPIERKLLDYRQRAIKILANSYYGYYGYARARWYCKECAESVTAWGREYITMTIKEIEEKYGFKVIYSDTDGFFATIPGADAETVKKKAMEFLKYINAKLPGALELEYEGFYKRGFFVTKKKYAVIDEEGKITTRGLEIVRRDWSEIAKETQARVLEALLKDGDVEKAVRIVKEVTEKLSKYEVPPEKLVIHEQITRDLKDYKATGPHVAVAKRLAARGVKIRPGTVISYIVLKGSGRIGDRAIPFDEFDPTKHKYDAEYYIENQVLPAVERILRAFGYRKEDLRYQKTRQVGLSAWLKPKGT

SEQ ID NO: 269 - protein, 774 aa, synthetic construct
MILDTDYITEDGKPVIRIFKKENGEFKIEYDRTFEPYFYALLKDDSAIEEVKKITAERHGTVVTVKRVEKVQKKFLGRPVEVWKLYFTHPQDVPAIRDKIREHPAVIDIYEYDIPFAKRYLIFKGLVPMEGDEELKMLAFDIETLYHEGEEFAEGPILMISYADEEGARVITWKNVDLPYVDVVSTEREMIKRFLRVVKEKDPDVLITYNGDNFDFAYLKKRCEKLGINFALGRDGSEPKIQRMGDRFAVEVKGRIHFDLYPVIRRTINLPTYTLEAVYEAVFGQPKEKVYAEEITTAWETGENLERVARYSMEDAKVTYELGKEFLPMEAQLSRLIGQSLWDVSRSSTGNLVEWFLLRKAYERNELAPNKPDEKELARRRQSYEGGYVKEPERGLWENIVYLDFRSLYPSIIITHNVSPDTLNREGCKEYDVAPQVGHRFCKDFPGFIPSLLGDLLEERQKIKKKMKATIDPIERKLLDYRQRAIKILANSYYGYYGYARARWYCKECAESVTAWGREYITMTIKEIEEKYGFKVIYSDTDGFFATIPGADAETVKKKAMEFLKYINAKLPGALELEYEGFYKRGFFVTKKKYAVIDEEGKITTRGLEIVRRDWSEIAKETQARVLEALLKDGDVEKAVRIVKEVTEKLSKYEVPPEKLVIHEQITRDLKDYKATGPHVAVAKRLAARGVKIRPGTVISYIVLKGSGRIGDRAIPFDEFDPTKHKYDAEYYIENQVLPAVERILRAFGYRKEDLRYQKTRQVGLSAWLKPKGT

SEQ ID NO: 270 - protein, 774 aa, synthetic construct
MILDTDYITEDGKPVIRIFKKENGEFKIEYDRTFEPYFYALLKDDSAIEEVKKITAERHGTVVTVKRVEKVQKKFLGRPVEVWKLYFTHPQDVPAIRDKIREHPAVIDIYEYDIPFAKRYLIHKGLVPMEGDEELKMLAFDIETLYHEGEEFAEGPILMISYADEEGARVITWKNVDLPYVDVVSTEREMIKRFLRVVKEKDPDVLITYNGDNFDFAYLKKRCEKLGINFALGRDGSEPKIQRMGDRFAVEVKGRIHFDLYPVIRRTINLPTYTLEAVYEAVFGQPKEKVYAEEITTAWETGENLERVARYSMEDAKVTYELGKEFLPMEAQLSRLIGQSLWDVSRSSTGNLVEWFLLRKAYERNELAPNKPDEKELARRRQSYEGGYVKEPERGLWENIVYLDFRSLYPSIIITHNVSPDTLNREGCKEYDVAPQVGHRFCKDFPGFIPSLLGDLLEERQKIKKKMKATIDPIERKLLDYRQRAIKILANSYYGYYGYARARWYCKECAESVTAWGREYITMTIKEIEEKYGFKVIYSDTDGFFATIPGADAETVKKKAMEFLKYINAKLPGALELEYEGFYKRGFFVTKKKYAVIDEEGKITTRGLEIVRRDWSEIAKETQARVLEALLKDGDVEKAVRIVKEVTEKLSKYEVPPEKLVIHEQITRDLKDYKATGPHVAVAKRLAARGVKIRPGTVISYIVLKGSGRIGDRAIPFDEFDPTKHKYDAEYYIENQVLPAVERILRAFGYRKEDLRYQKTRQVGLSAWLKPKGT

SEQ ID NO: 271 - protein, 774 aa, synthetic construct
MILDTDYITEDGKPVIRIFKKENGEFKIEYDRTFEPYFYALLKDDSAIEEVKKITAERHGTVVTVKRVEKVQKKFLGRPVEVWKLYFTHPQDVPAIRDKIREHPAVIDIYEYDIPFAKRYLIIKGLVPMEGDEELKMLAFDIETLYHEGEEFAEGPILMISYADEEGARVITWKNVDLPYVDVVSTEREMIKRFLRVVKEKDPDVLITYNGDNFDFAYLKKRCEKLGINFALGRDGSEPKIQRMGDRFAVEVKGRIHFDLYPVIRRTINLPTYTLEAVYEAVFGQPKEKVYAEEITTAWETGENLERVARYSMEDAKVTYELGKEFLPMEAQLSRLIGQSLWDVSRSSTGNLVEWFLLRKAYERNELAPNKPDEKELARRRQSYEGGYVKEPERGLWENIVYLDFRSLYPSIIITHNVSPDTLNREGCKEYDVAPQVGHRFCKDFPGFIPSLLGDLLEERQKIKKKMKATIDPIERKLLDYRQRAIKILANSYYGYYGYARARWYCKECAESVTAWGREYITMTIKEIEEKYGFKVIYSDTDGFFATIPGADAETVKKKAMEFLKYINAKLPGALELEYEGFYKRGFFVTKKKYAVIDEEGKITTRGLEIVRRDWSEIAKETQARVLEALLKDGDVEKAVRIVKEVTEKLSKYEVPPEKLVIHEQITRDLKDYKATGPHVAVAKRLAARGVKIRPGTVISYIVLKGSGRIGDRAIPFDEFDPTKHKYDAEYYIENQVLPAVERILRAFGYRKEDLRYQKTRQVGLSAWLKPKGT

SEQ ID NO: 272 - protein, 774 aa, synthetic construct
MILDTDYITEDGKPVIRIFKKENGEFKIEYDRTFEPYFYALLKDDSAIEEVKKITAERHGTVVTVKRVEKVQKKFLGRPVEVWKLYFTHPQDVPAIRDKIREHPAVIDIYEYDIPFAKRYLIKKGLVPMEGDEELKMLAFDIETLYHEGEEFAEGPILMISYADEEGARVITWKNVDLPYVDVVSTEREMIKRFLRVVKEKDPDVLITYNGDNFDFAYLKKRCEKLGINFALGRDGSEPKIQRMGDRFAVEVKGRIHFDLYPVIRRTINLPTYTLEAVYEAVFGQPKEKVYAEEITTAWETGENLERVARYSMEDAKVTYELGKEFLPMEAQLSRLIGQSLWDVSRSSTGNLVEWFLLRKAYERNELAPNKPDEKELARRRQSYEGGYVKEPERGLWENIVYLDFRSLYPSIIITHNVSPDTLNREGCKEYDVAPQVGHRFCKDFPGFIPSLLGDLLEERQKIKKKMKATIDPIERKLLDYRQRAIKILANSYYGYYGYARARWYCKECAESVTAWGREYITMTIKEIEEKYGFKVIYSDTDGFFATIPGADAETVKKKAMEFLKYINAKLPGALELEYEGFYKRGFFVTKKKYAVIDEEGKITTRGLEIVRRDWSEIAKETQARVLEALLKDGDVEKAVRIVKEVTEKLSKYEVPPEKLVIHEQITRDLKDYKATGPHVAVAKRLAARGVKIRPGTVISYIVLKGSGRIGDRAIPFDEFDPTKHKYDAEYYIENQVLPAVERILRAFGYRKEDLRYQKTRQVGLSAWLKPKGT

SEQ ID NO: 273 - protein, 774 aa, synthetic construct
MILDTDYITEDGKPVIRIFKKENGEFKIEYDRTFEPYFYALLKDDSAIEEVKKITAERHGTVVTVKRVEKVQKKFLGRPVEVWKLYFTHPQDVPAIRDKIREHPAVIDIYEYDIPFAKRYLILKGLVPMEGDEELKMLAFDIETLYHEGEEFAEGPILMISYADEEGARVITWKNVDLPYVDVVSTEREMIKRFLRVVKEKDPDVLITYNGDNFDFAYLKKRCEKLGINFALGRDGSEPKIQRMGDRFAVEVKGRIHFDLYPVIRRTINLPTYTLEAVYEAVFGQPKEKVYAEEITTAWETGENLERVARYSMEDAKVTYELGKEFLPMEAQLSRLIGQSLWDVSRSSTGNLVEWFLLRKAYERNELAPNKPDEKELARRRQSYEGGYVKEPERGLWENIVYLDFRSLYPSIIITHNVSPDTLNREGCKEYDVAPQVGHRFCKDFPGFIPSLLGDLLEERQKIKKKMKATIDPIERKLLDYRQRAIKILANSYYGYYGYARARWYCKECAESVTAWGREYITMTIKEIEEKYGFKVIYSDTDGFFATIPGADAETVKKKAMEFLKYINAKLPGALELEYEGFYKRGFFVTKKKYAVIDEEGKITTRGLEIVRRDWSEIAKETQARVLEALLKDGDVEKAVRIVKEVTEKLSKYEVPPEKLVIHEQITRDLKDYKATGPHVAVAKRLAARGVKIRPGTVISYIVLKGSGRIGDRAIPFDEFDPTKHKYDAEYYIENQVLPAVERILRAFGYRKEDLRYQKTRQVGLSAWLKPKGT

SEQ ID NO: 274 - protein, 774 aa, synthetic construct
MILDTDYITEDGKPVIRIFKKENGEFKIEYDRTFEPYFYALLKDDSAIEEVKKITAERHGTVVTVKRVEKVQKKFLGRPVEVWKLYFTHPQDVPAIRDKIREHPAVIDIYEYDIPFAKRYLIMKGLVPMEGDEELKMLAFDIETLYHEGEEFAEGPILMISYADEEGARVITWKNVDLPYVDVVSTEREMIKRFLRVVKEKDPDVLITYNGDNFDFAYLKKRCEKLGINFALGRDGSEPKIQRMGDRFAVEVKGRIHFDLYPVIRRTINLPTYTLEAVYEAVFGQPKEKVYAEEITTAWETGENLERVARYSMEDAKVTYELGKEFLPMEAQLSRLIGQSLWDVSRSSTGNLVEWFLLRKAYERNELAPNKPDEKELARRRQSYEGGYVKEPERGLWENIVYLDFRSLYPSIIITHNVSPDTLNREGCKEYDVAPQVGHRFCKDFPGFIPSLLGDLLEERQKIKKKMKATIDPIERKLLDYRQRAIKILANSYYGYYGYARARWYCKECAESVTAWGREYITMTIKEIEEKYGFKVIYSDTDGFFATIPGADAETVKKKAMEFLKYINAKLPGALELEYEGFYKRGFFVTKKKYAVIDEEGKITTRGLEIVRRDWSEIAKETQARVLEALLKDGDVEKAVRIVKEVTEKLSKYEVPPEKLVIHEQITRDLKDYKATGPHVAVAKRLAARGVKIRPGTVISYIVLKGSGRIGDRAIPFDEFDPTKHKYDAEYYIENQVLPAVERILRAFGYRKEDLRYQKTRQVGLSAWLKPKGT

SEQ ID NO: 275 - protein, 774 aa, synthetic construct
MILDTDYITEDGKPVIRIFKKENGEFKIEYDRTFEPYFYALLKDDSAIEEVKKITAERHGTVVTVKRVEKVQKKFLGRPVEVWKLYFTHPQDVPAIRDKIREHPAVIDIYEYDIPFAKRYLIQKGLVPMEGDEELKMLAFDIETLYHEGEEFAEGPILMISYADEEGARVITWKNVDLPYVDVVSTEREMIKRFLRVVKEKDPDVLITYNGDNFDFAYLKKRCEKLGINFALGRDGSEPKIQRMGDRFAVEVKGRIHFDLYPVIRRTINLPTYTLEAVYEAVFGQPKEKVYAEEITTAWETGENLERVARYSMEDAKVTYELGKEFLPMEAQLSRLIGQSLWDVSRSSTGNLVEWFLLRKAYERNELAPNKPDEKELARRRQSYEGGYVKEPERGLWENIVYLDFRSLYPSIIITHNVSPDTLNREGCKEYDVAPQVGHRFCKDFPGFIPSLLGDLLEERQKIKKKMKATIDPIERKLLDYRQRAIKILANSYYGYYGYARARWYCKECAESVTAWGREYITMTIKEIEEKYGFKVIYSDTDGFFATIPGADAETVKKKAMEFLKYINAKLPGALELEYEGFYKRGFFVTKKKYAVIDEEGKITTRGLEIVRRDWSEIAKETQARVLEALLKDGDVEKAVRIVKEVTEKLSKYEVPPEKLVIHEQITRDLKDYKATGPHVAVAKRLAARGVKIRPGTVISYIVLKGSGRIGDRAIPFDEFDPTKHKYDAEYYIENQVLPAVERILRAFGYRKEDLRYQKTRQVGLSAWLKPKGT

SEQ ID NO: 276 - protein, 774 aa, synthetic construct
MILDTDYITEDGKPVIRIFKKENGEFKIEYDRTFEPYFYALLKDDSAIEEVKKITAERHGTVVTVKRVEKVQKKFLGRPVEVWKLYFTHPQDVPAIRDKIREHPAVIDIYEYDIPFAKRYLIRKGLVPMEGDEELKMLAFDIETLYHEGEEFAEGPILMISYADEEGARVITWKNVDLPYVDVVSTEREMIKRFLRVVKEKDPDVLITYNGDNFDFAYLKKRCEKLGINFALGRDGSEPKIQRMGDRFAVEVKGRIHFDLYPVIRRTINLPTYTLEAVYEAVFGQPKEKVYAEEITTAWETGENLERVARYSMEDAKVTYELGKEFLPMEAQLSRLIGQSLWDVSRSSTGNLVEWFLLRKAYERNELAPNKPDEKELARRRQSYEGGYVKEPERGLWENIVYLDFRSLYPSIIITHNVSPDTLNREGCKEYDVAPQVGHRFCKDFPGFIPSLLGDLLEERQKIKKKMKATIDPIERKLLDYRQRAIKILANSYYGYYGYARARWYCKECAESVTAWGREYITMTIKEIEEKYGFKVIYSDTDGFFATIPGADAETVKKKAMEFLKYINAKLPGALELEYEGFYKRGFFVTKKKYAVIDEEGKITTRGLEIVRRDWSEIAKETQARVLEALLKDGDVEKAVRIVKEVTEKLSKYEVPPEKLVIHEQITRDLKDYKATGPHVAVAKRLAARGVKIRPGTVISYIVLKGSGRIGDRAIPFDEFDPTKHKYDAEYYIENQVLPAVERILRAFGYRKEDLRYQKTRQVGLSAWLKPKGT

SEQ ID NO: 277 - protein, 774 aa, synthetic construct
MILDTDYITEDGKPVIRIFKKENGEFKIEYDRTFEPYFYALLKDDSAIEEVKKITAERHGTVVTVKRVEKVQKKFLGRPVEVWKLYFTHPQDVPAIRDKIREHPAVIDIYEYDIPFAKRYLISKGLVPMEGDEELKMLAFDIETLYHEGEEFAEGPILMISYADEEGARVITWKNVDLPYVDVVSTEREMIKRFLRVVKEKDPDVLITYNGDNFDFAYLKKRCEKLGINFALGRDGSEPKIQRMGDRFAVEVKGRIHFDLYPVIRRTINLPTYTLEAVYEAVFGQPKEKVYAEEITTAWETGENLERVARYSMEDAKVTYELGKEFLPMEAQLSRLIGQSLWDVSRSSTGNLVEWFLLRKAYERNELAPNKPDEKELARRRQSYEGGYVKEPERGLWENIVYLDFRSLYPSIIITHNVSPDTLNREGCKEYDVAPQVGHRFCKDFPGFIPSLLGDLLEERQKIKKKMKATIDPIERKLLDYRQRAIKILANSYYGYYGYARARWYCKECAESVTAWGREYITMTIKEIEEKYGFKVIYSDTDGFFATIPGADAETVKKKAMEFLKYINAKLPGALELEYEGFYKRGFFVTKKKYAVIDEEGKITTRGLEIVRRDWSEIAKETQARVLEALLKDGDVEKAVRIVKEVTEKLSKYEVPPEKLVIHEQITRDLKDYKATGPHVAVAKRLAARGVKIRPGTVISYIVLKGSGRIGDRAIPFDEFDPTKHKYDAEYYIENQVLPAVERILRAFGYRKEDLRYQKTRQVGLSAWLKPKGT

SEQ ID NO: 278 - protein, 774 aa, synthetic construct
MILDTDYITEDGKPVIRIFKKENGEFKIEYDRTFEPYFYALLKDDSAIEEVKKITAERHGTVVTVKRVEKVQKKFLGRPVEVWKLYFTHPQDVPAIRDKIREHPAVIDIYEYDIPFAKRYLITKGLVPMEGDEELKMLAFDIETLYHEGEEFAEGPILMISYADEEGARVITWKNVDLPYVDVVSTEREMIKRFLRVVKEKDPDVLITYNGDNFDFAYLKKRCEKLGINFALGRDGSEPKIQRMGDRFAVEVKGRIHFDLYPVIRRTINLPTYTLEAVYEAVFGQPKEKVYAEEITTAWETGENLERVARYSMEDAKVTYELGKEFLPMEAQLSRLIGQSLWDVSRSSTGNLVEWFLLRKAYERNELAPNKPDEKELARRRQSYEGGYVKEPERGLWENIVYLDFRSLYPSIIITHNVSPDTLNREGCKEYDVAPQVGHRFCKDFPGFIPSLLGDLLEERQKIKKKMKATIDPIERKLLDYRQRAIKILANSYYGYYGYARARWYCKECAESVTAWGREYITMTIKEIEEKYGFKVIYSDTDGFFATIPGADAETVKKKAMEFLKYINAKLPGALELEYEGFYKRGFFVTKKKYAVIDEEGKITTRGLEIVRRDWSEIAKETQARVLEALLKDGDVEKAVRIVKEVTEKLSKYEVPPEKLVIHEQITRDLKDYKATGPHVAVAKRLAARGVKIRPGTVISYIVLKGSGRIGDRAIPFDEFDPTKHKYDAEYYIENQVLPAVERILRAFGYRKEDLRYQKTRQVGLSAWLKPKGT

SEQ ID NO: 279 - protein, 774 aa, synthetic construct
MILDTDYITEDGKPVIRIFKKENGEFKIEYDRTFEPYFYALLKDDSAIEEVKKITAERHGTVVTVKRVEKVQKKFLGRPVEVWKLYFTHPQDVPAIRDKIREHPAVIDIYEYDIPFAKRYLIVKGLVPMEGDEELKMLAFDIETLYHEGEEFAEGPILMISYADEEGARVITWKNVDLPYVDVVSTEREMIKRFLRVVKEKDPDVLITYNGDNFDFAYLKKRCEKLGINFALGRDGSEPKIQRMGDRFAVEVKGRIHFDLYPVIRRTINLPTYTLEAVYEAVFGQPKEKVYAEEITTAWETGENLERVARYSMEDAKVTYELGKEFLPMEAQLSRLIGQSLWDVSRSSTGNLVEWFLLRKAYERNELAPNKPDEKELARRRQSYEGGYVKEPERGLWENIVYLDFRSLYPSIIITHNVSPDTLNREGCKEYDVAPQVGHRFCKDFPGFIPSLLGDLLEERQKIKKKMKATIDPIERKLLDYRQRAIKILANSYYGYYGYARARWYCKECAESVTAWGREYITMTIKEIEEKYGFKVIYSDTDGFFATIPGADAETVKKKAMEFLKYINAKLPGALELEYEGFYKRGFFVTKKKYAVIDEEGKITTRGLEIVRRDWSEIAKETQARVLEALLKDGDVEKAVRIVKEVTEKLSKYEVPPEKLVIHEQITRDLKDYKATGPHVAVAKRLAARGVKIRPGTVISYIVLKGSGRIGDRAIPFDEFDPTKHKYDAEYYIENQVLPAVERILRAFGYRKEDLRYQKTRQVGLSAWLKPKGT

SEQ ID NO: 280 - protein, 774 aa, synthetic construct
MILDTDYITEDGKPVIRIFKKENGEFKIEYDRTFEPYFYALLKDDSAIEEVKKITAERHGTVVTVKRVEKVQKKFLGRPVEVWKLYFTHPQDVPAIRDKIREHPAVIDIYEYDIPFAKRYLIWKGLVPMEGDEELKMLAFDIETLYHEGEEFAEGPILMISYADEEGARVITWKNVDLPYVDVVSTEREMIKRFLRVVKEKDPDVLITYNGDNFDFAYLKKRCEKLGINFALGRDGSEPKIQRMGDRFAVEVKGRIHFDLYPVIRRTINLPTYTLEAVYEAVFGQPKEKVYAEEITTAWETGENLERVARYSMEDAKVTYELGKEFLPMEAQLSRLIGQSLWDVSRSSTGNLVEWFLLRKAYERNELAPNKPDEKELARRRQSYEGGYVKEPERGLWENIVYLDFRSLYPSIIITHNVSPDTLNREGCKEYDVAPQVGHRFCKDFPGFIPSLLGDLLEERQKIKKKMKATIDPIERKLLDYRQRAIKILANSYYGYYGYARARWYCKECAESVTAWGREYITMTIKEIEEKYGFKVIYSDTDGFFATIPGADAETVKKKAMEFLKYINAKLPGALELEYEGFYKRGFFVTKKKYAVIDEEGKITTRGLEIVRRDWSEIAKETQARVLEALLKDGDVEKAVRIVKEVTEKLSKYEVPPEKLVIHEQITRDLKDYKATGPHVAVAKRLAARGVKIRPGTVISYIVLKGSGRIGDRAIPFDEFDPTKHKYDAEYYIENQVLPAVERILRAFGYRKEDLRYQKTRQVGLSAWLKPKGT

SEQ ID NO: 281 - protein, 774 aa, synthetic construct
MILDTDYITEDGKPVIRIFKKENGEFKIEYDRTFEPYFYALLKDDSAIEEVKKITAERHGTVVTVKRVEKVQKKFLGRPVEVWKLYFTHPQDVPAIRDKIREHPAVIDIYEYDIPFAKRYLIYKGLVPMEGDEELKMLAFDIETLYHEGEEFAEGPILMISYADEEGARVITWKNVDLPYVDVVSTEREMIKRFLRVVKEKDPDVLITYNGDNFDFAYLKKRCEKLGINFALGRDGSEPKIQRMGDRFAVEVKGRIHFDLYPVIRRTINLPTYTLEAVYEAVFGQPKEKVYAEEITTAWETGENLERVARYSMEDAKVTYELGKEFLPMEAQLSRLIGQSLWDVSRSSTGNLVEWFLLRKAYERNELAPNKPDEKELARRRQSYEGGYVKEPERGLWENIVYLDFRSLYPSIIITHNVSPDTLNREGCKEYDVAPQVGHRFCKDFPGFIPSLLGDLLEERQKIKKKMKATIDPIERKLLDYRQRAIKILANSYYGYYGYARARWYCKECAESVTAWGREYITMTIKEIEEKYGFKVIYSDTDGFFATIPGADAETVKKKAMEFLKYINAKLPGALELEYEGFYKRGFFVTKKKYAVIDEEGKITTRGLEIVRRDWSEIAKETQARVLEALLKDGDVEKAVRIVKEVTEKLSKYEVPPEKLVIHEQITRDLKDYKATGPHVAVAKRLAARGVKIRPGTVISYIVLKGSGRIGDRAIPFDEFDPTKHKYDAEYYIENQVLPAVERILRAFGYRKEDLRYQKTRQVGLSAWLKPKGT

SEQ ID NO: 282 - protein, 774 aa, synthetic construct
MILDTDYITEDGKPVIRIFKKENGEFKIEYDRTFEPYFYALLKDDSAIEEVKKITAERHGTVVTVKRVEKVQKKFLGRPVEVWKLYFTHPQDVPAIRDKIREHPAVIDIYEYDIPFAKRYLIDKGLVPMEGDEELKMNAFDIETLYHEGEEFAEGPILMISYADEEGARVITWKNVDLPYVDVVSTEREMIKRFLRVVKEKDPDVLITYNGDNFDFAYLKKRCEKLGINFALGRDGSEPKIQRMGDRFAVEVKGRIHFDLYPVIRRTINLPTYTLEAVYEAVFGQPKEKVYAEEITTAWETGENLERVARYSMEDAKVTYELGKEFLPMEAQLSRLIGQSLWDVSRSSTGNLVEWFLLRKAYERNELAPNKPDEKELARRRQSYEGGYVKEPERGLWENIVYLDFRSLYPSIIITHNVSPDTLNREGCKEYDVAPQVGHRFCKDFPGFIPSLLGDLLEERQKIKKKMKATIDPIERKLLDYRQRAIKILANSYYGYYGYARARWYCKECAESVTAWGREYITMTIKEIEEKYGFKVIYSDTDGFFATIPGADAETVKKKAMEFLKYINAKLPGALELEYEGFYKRGFFVTKKKYAVIDEEGKITTRGLEIVRRDWSEIAKETQARVLEALLKDGDVEKAVRIVKEVTEKLSKYEVPPEKLVIHEQITRDLKDYKATGPHVAVAKRLAARGVKIRPGTVISYIVLKGSGRIGDRAIPFDEFDPTKHKYDAEYYIENQVLPAVERILRAFGYRKEDLRYQKTRQVGLSAWLKPKGT

SEQ ID NO: 283 - protein, 774 aa, synthetic construct
MILDTDYITEDGKPVIRIFKKENGEFKIEYDRTFEPYFYALLKDDSAIEEVKKITAERHGTVVTVKRVEKVQKKFLGRPVEVWKLYFTHPQDVPAIRDKIREHPAVIDIYEYDIPFAKRYLIDKGLVPMEGDEELKMLEFDIETLYHEGEEFAEGPILMISYADEEGARVITWKNVDLPYVDVVSTEREMIKRFLRVVKEKDPDVLITYNGDNFDFAYLKKRCEKLGINFALGRDGSEPKIQRMGDRFAVEVKGRIHFDLYPVIRRTINLPTYTLEAVYEAVFGQPKEKVYAEEITTAWETGENLERVARYSMEDAKVTYELGKEFLPMEAQLSRLIGQSLWDVSRSSTGNLVEWFLLRKAYERNELAPNKPDEKELARRRQSYEGGYVKEPERGLWENIVYLDFRSLYPSIIITHNVSPDTLNREGCKEYDVAPQVGHRFCKDFPGFIPSLLGDLLEERQKIKKKMKATIDPIERKLLDYRQRAIKILANSYYGYYGYARARWYCKECAESVTAWGREYITMTIKEIEEKYGFKVIYSDTDGFFATIPGADAETVKKKAMEFLKYINAKLPGALELEYEGFYKRGFFVTKKKYAVIDEEGKITTRGLEIVRRDWSEIAKETQARVLEALLKDGDVEKAVRIVKEVTEKLSKYEVPPEKLVIHEQITRDLKDYKATGPHVAVAKRLAARGVKIRPGTVISYIVLKGSGRIGDRAIPFDEFDPTKHKYDAEYYIENQVLPAVERILRAFGYRKEDLRYQKTRQVGLSAWLKPKGT

SEQ ID NO: 284 - protein, 774 aa, synthetic construct
MILDTDYITEDGKPVIRIFKKENGEFKIEYDRTFEPYFYALLKDDSAIEEVKKITAERHGTVVTVKRVEKVQKKFLGRPVEVWKLYFTHPQDVPAIRDKIREHPAVIDIYEYDIPFAKRYLIDKGLVPMEGDEELKMLQFDIETLYHEGEEFAEGPILMISYADEEGARVITWKNVDLPYVDVVSTEREMIKRFLRVVKEKDPDVLITYNGDNFDFAYLKKRCEKLGINFALGRDGSEPKIQRMGDRFAVEVKGRIHFDLYPVIRRTINLPTYTLEAVYEAVFGQPKEKVYAEEITTAWETGENLERVARYSMEDAKVTYELGKEFLPMEAQLSRLIGQSLWDVSRSSTGNLVEWFLLRKAYERNELAPNKPDEKELARRRQSYEGGYVKEPERGLWENIVYLDFRSLYPSIIITHNVSPDTLNREGCKEYDVAPQVGHRFCKDFPGFIPSLLGDLLEERQKIKKKMKATIDPIERKLLDYRQRAIKILANSYYGYYGYARARWYCKECAESVTAWGREYITMTIKEIEEKYGFKVIYSDTDGFFATIPGADAETVKKKAMEFLKYINAKLPGALELEYEGFYKRGFFVTKKKYAVIDEEGKITTRGLEIVRRDWSEIAKETQARVLEALLKDGDVEKAVRIVKEVTEKLSKYEVPPEKLVIHEQITRDLKDYKATGPHVAVAKRLAARGVKIRPGTVISYIVLKGSGRIGDRAIPFDEFDPTKHKYDAEYYIENQVLPAVERILRAFGYRKEDLRYQKTRQVGLSAWLKPKGT

SEQ ID NO: 285 - protein, 774 aa, synthetic construct
MILDTDYITEDGKPVIRIFKKENGEFKIEYDRTFEPYFYALLKDDSAIEEVKKITAERHGTVVTVKRVEKVQKKFLGRPVEVWKLYFTHPQDVPAIRDKIREHPAVIDIYEYDIPFAKRYLIDKGLVPMEGDEELKMLARDIETLYHEGEEFAEGPILMISYADEEGARVITWKNVDLPYVDVVSTEREMIKRFLRVVKEKDPDVLITYNGDNFDFAYLKKRCEKLGINFALGRDGSEPKIQRMGDRFAVEVKGRIHFDLYPVIRRTINLPTYTLEAVYEAVFGQPKEKVYAEEITTAWETGENLERVARYSMEDAKVTYELGKEFLPMEAQLSRLIGQSLWDVSRSSTGNLVEWFLLRKAYERNELAPNKPDEKELARRRQSYEGGYVKEPERGLWENIVYLDFRSLYPSIIITHNVSPDTLNREGCKEYDVAPQVGHRFCKDFPGFIPSLLGDLLEERQKIKKKMKATIDPIERKLLDYRQRAIKILANSYYGYYGYARARWYCKECAESVTAWGREYITMTIKEIEEKYGFKVIYSDTDGFFATIPGADAETVKKKAMEFLKYINAKLPGALELEYEGFYKRGFFVTKKKYAVIDEEGKITTRGLEIVRRDWSEIAKETQARVLEALLKDGDVEKAVRIVKEVTEKLSKYEVPPEKLVIHEQITRDLKDYKATGPHVAVAKRLAARGVKIRPGTVISYIVLKGSGRIGDRAIPFDEFDPTKHKYDAEYYIENQVLPAVERILRAFGYRKEDLRYQKTRQVGLSAWLKPKGT

SEQ ID NO: 286 - protein, 774 aa, synthetic construct
MILDTDYITEDGKPVIRIFKKENGEFKIEYDRTFEPYFYALLKDDSAIEEVKKITAERHGTVVTVKRVEKVQKKFLGRPVEVWKLYFTHPQDVPAIRDKIREHPAVIDIYEYDIPFAKRYLIDKGLVPMEGDEELKMLAFAIETLYHEGEEFAEGPILMISYADEEGARVITWKNVDLPYVDVVSTEREMIKRFLRVVKEKDPDVLITYNGDNFDFAYLKKRCEKLGINFALGRDGSEPKIQRMGDRFAVEVKGRIHFDLYPVIRRTINLPTYTLEAVYEAVFGQPKEKVYAEEITTAWETGENLERVARYSMEDAKVTYELGKEFLPMEAQLSRLIGQSLWDVSRSSTGNLVEWFLLRKAYERNELAPNKPDEKELARRRQSYEGGYVKEPERGLWENIVYLDFRSLYPSIIITHNVSPDTLNREGCKEYDVAPQVGHRFCKDFPGFIPSLLGDLLEERQKIKKKMKATIDPIERKLLDYRQRAIKILANSYYGYYGYARARWYCKECAESVTAWGREYITMTIKEIEEKYGFKVIYSDTDGFFATIPGADAETVKKKAMEFLKYINAKLPGALELEYEGFYKRGFFVTKKKYAVIDEEGKITTRGLEIVRRDWSEIAKETQARVLEALLKDGDVEKAVRIVKEVTEKLSKYEVPPEKLVIHEQITRDLKDYKATGPHVAVAKRLAARGVKIRPGTVISYIVLKGSGRIGDRAIPFDEFDPTKHKYDAEYYIENQVLPAVERILRAFGYRKEDLRYQKTRQVGLSAWLKPKGT

SEQ ID NO: 287 - protein, 774 aa, synthetic construct
MILDTDYITEDGKPVIRIFKKENGEFKIEYDRTFEPYFYALLKDDSAIEEVKKITAERHGTVVTVKRVEKVQKKFLGRPVEVWKLYFTHPQDVPAIRDKIREHPAVIDIYEYDIPFAKRYLIDKGLVPMEGDEELKMLAFCIETLYHEGEEFAEGPILMISYADEEGARVITWKNVDLPYVDVVSTEREMIKRFLRVVKEKDPDVLITYNGDNFDFAYLKKRCEKLGINFALGRDGSEPKIQRMGDRFAVEVKGRIHFDLYPVIRRTINLPTYTLEAVYEAVFGQPKEKVYAEEITTAWETGENLERVARYSMEDAKVTYELGKEFLPMEAQLSRLIGQSLWDVSRSSTGNLVEWFLLRKAYERNELAPNKPDEKELARRRQSYEGGYVKEPERGLWENIVYLDFRSLYPSIIITHNVSPDTLNREGCKEYDVAPQVGHRFCKDFPGFIPSLLGDLLEERQKIKKKMKATIDPIERKLLDYRQRAIKILANSYYGYYGYARARWYCKECAESVTAWGREYITMTIKEIEEKYGFKVIYSDTDGFFATIPGADAETVKKKAMEFLKYINAKLPGALELEYEGFYKRGFFVTKKKYAVIDEEGKITTRGLEIVRRDWSEIAKETQARVLEALLKDGDVEKAVRIVKEVTEKLSKYEVPPEKLVIHEQITRDLKDYKATGPHVAVAKRLAARGVKIRPGTVISYIVLKGSGRIGDRAIPFDEFDPTKHKYDAEYYIENQVLPAVERILRAFGYRKEDLRYQKTRQVGLSAWLKPKGT

SEQ ID NO: 288 - protein, 774 aa, synthetic construct
MILDTDYITEDGKPVIRIFKKENGEFKIEYDRTFEPYFYALLKDDSAIEEVKKITAERHGTVVTVKRVEKVQKKFLGRPVEVWKLYFTHPQDVPAIRDKIREHPAVIDIYEYDIPFAKRYLIDKGLVPMEGDEELKMLAFGIETLYHEGEEFAEGPILMISYADEEGARVITWKNVDLPYVDVVSTEREMIKRFLRVVKEKDPDVLITYNGDNFDFAYLKKRCEKLGINFALGRDGSEPKIQRMGDRFAVEVKGRIHFDLYPVIRRTINLPTYTLEAVYEAVFGQPKEKVYAEEITTAWETGENLERVARYSMEDAKVTYELGKEFLPMEAQLSRLIGQSLWDVSRSSTGNLVEWFLLRKAYERNELAPNKPDEKELARRRQSYEGGYVKEPERGLWENIVYLDFRSLYPSIIITHNVSPDTLNREGCKEYDVAPQVGHRFCKDFPGFIPSLLGDLLEERQKIKKKMKATIDPIERKLLDYRQRAIKILANSYYGYYGYARARWYCKECAESVTAWGREYITMTIKEIEEKYGFKVIYSDTDGFFATIPGADAETVKKKAMEFLKYINAKLPGALELEYEGFYKRGFFVTKKKYAVIDEEGKITTRGLEIVRRDWSEIAKETQARVLEALLKDGDVEKAVRIVKEVTEKLSKYEVPPEKLVIHEQITRDLKDYKATGPHVAVAKRLAARGVKIRPGTVISYIVLKGSGRIGDRAIPFDEFDPTKHKYDAEYYIENQVLPAVERILRAFGYRKEDLRYQKTRQVGLSAWLKPKGT

SEQ ID NO: 289 - protein, 774 aa, synthetic construct
MILDTDYITEDGKPVIRIFKKENGEFKIEYDRTFEPYFYALLKDDSAIEEVKKITAERHGTVVTVKRVEKVQKKFLGRPVEVWKLYFTHPQDVPAIRDKIREHPAVIDIYEYDIPFAKRYLIDKGLVPMEGDEELKMLAFHIETLYHEGEEFAEGPILMISYADEEGARVITWKNVDLPYVDVVSTEREMIKRFLRVVKEKDPDVLITYNGDNFDFAYLKKRCEKLGINFALGRDGSEPKIQRMGDRFAVEVKGRIHFDLYPVIRRTINLPTYTLEAVYEAVFGQPKEKVYAEEITTAWETGENLERVARYSMEDAKVTYELGKEFLPMEAQLSRLIGQSLWDVSRSSTGNLVEWFLLRKAYERNELAPNKPDEKELARRRQSYEGGYVKEPERGLWENIVYLDFRSLYPSIIITHNVSPDTLNREGCKEYDVAPQVGHRFCKDFPGFIPSLLGDLLEERQKIKKKMKATIDPIERKLLDYRQRAIKILANSYYGYYGYARARWYCKECAESVTAWGREYITMTIKEIEEKYGFKVIYSDTDGFFATIPGADAETVKKKAMEFLKYINAKLPGALELEYEGFYKRGFFVTKKKYAVIDEEGKITTRGLEIVRRDWSEIAKETQARVLEALLKDGDVEKAVRIVKEVTEKLSKYEVPPEKLVIHEQITRDLKDYKATGPHVAVAKRLAARGVKIRPGTVISYIVLKGSGRIGDRAIPFDEFDPTKHKYDAEYYIENQVLPAVERILRAFGYRKEDLRYQKTRQVGLSAWLKPKGT

SEQ ID NO: 290 - protein, 774 aa, synthetic construct
MILDTDYITEDGKPVIRIFKKENGEFKIEYDRTFEPYFYALLKDDSAIEEVKKITAERHGTVVTVKRVEKVQKKFLGRPVEVWKLYFTHPQDVPAIRDKIREHPAVIDIYEYDIPFAKRYLIDKGLVPMEGDEELKMLAFKIETLYHEGEEFAEGPILMISYADEEGARVITWKNVDLPYVDVVSTEREMIKRFLRVVKEKDPDVLITYNGDNFDFAYLKKRCEKLGINFALGRDGSEPKIQRMGDRFAVEVKGRIHFDLYPVIRRTINLPTYTLEAVYEAVFGQPKEKVYAEEITTAWETGENLERVARYSMEDAKVTYELGKEFLPMEAQLSRLIGQSLWDVSRSSTGNLVEWFLLRKAYERNELAPNKPDEKELARRRQSYEGGYVKEPERGLWENIVYLDFRSLYPSIIITHNVSPDTLNREGCKEYDVAPQVGHRFCKDFPGFIPSLLGDLLEERQKIKKKMKATIDPIERKLLDYRQRAIKILANSYYGYYGYARARWYCKECAESVTAWGREYITMTIKEIEEKYGFKVIYSDTDGFFATIPGADAETVKKKAMEFLKYINAKLPGALELEYEGFYKRGFFVTKKKYAVIDEEGKITTRGLEIVRRDWSEIAKETQARVLEALLKDGDVEKAVRIVKEVTEKLSKYEVPPEKLVIHEQITRDLKDYKATGPHVAVAKRLAARGVKIRPGTVISYIVLKGSGRIGDRAIPFDEFDPTKHKYDAEYYIENQVLPAVERILRAFGYRKEDLRYQKTRQVGLSAWLKPKGT

SEQ ID NO: 291 - protein, 774 aa, synthetic construct
MILDTDYITEDGKPVIRIFKKENGEFKIEYDRTFEPYFYALLKDDSAIEEVKKITAERHGTVVTVKRVEKVQKKFLGRPVEVWKLYFTHPQDVPAIRDKIREHPAVIDIYEYDIPFAKRYLIDKGLVPMEGDEELKMLAFNIETLYHEGEEFAEGPILMISYADEEGARVITWKNVDLPYVDVVSTEREMIKRFLRVVKEKDPDVLITYNGDNFDFAYLKKRCEKLGINFALGRDGSEPKIQRMGDRFAVEVKGRIHFDLYPVIRRTINLPTYTLEAVYEAVFGQPKEKVYAEEITTAWETGENLERVARYSMEDAKVTYELGKEFLPMEAQLSRLIGQSLWDVSRSSTGNLVEWFLLRKAYERNELAPNKPDEKELARRRQSYEGGYVKEPERGLWENIVYLDFRSLYPSIIITHNVSPDTLNREGCKEYDVAPQVGHRFCKDFPGFIPSLLGDLLEERQKIKKKMKATIDPIERKLLDYRQRAIKILANSYYGYYGYARARWYCKECAESVTAWGREYITMTIKEIEEKYGFKVIYSDTDGFFATIPGADAETVKKKAMEFLKYINAKLPGALELEYEGFYKRGFFVTKKKYAVIDEEGKITTRGLEIVRRDWSEIAKETQARVLEALLKDGDVEKAVRIVKEVTEKLSKYEVPPEKLVIHEQITRDLKDYKATGPHVAVAKRLAARGVKIRPGTVISYIVLKGSGRIGDRAIPFDEFDPTKHKYDAEYYIENQVLPAVERILRAFGYRKEDLRYQKTRQVGLSAWLKPKGT

SEQ ID NO: 292 - protein, 774 aa, synthetic construct
MILDTDYITEDGKPVIRIFKKENGEFKIEYDRTFEPYFYALLKDDSAIEEVKKITAERHGTVVTVKRVEKVQKKFLGRPVEVWKLYFTHPQDVPAIRDKIREHPAVIDIYEYDIPFAKRYLIDKGLVPMEGDEELKMLAFPIETLYHEGEEFAEGPILMISYADEEGARVITWKNVDLPYVDVVSTEREMIKRFLRVVKEKDPDVLITYNGDNFDFAYLKKRCEKLGINFALGRDGSEPKIQRMGDRFAVEVKGRIHFDLYPVIRRTINLPTYTLEAVYEAVFGQPKEKVYAEEITTAWETGENLERVARYSMEDAKVTYELGKEFLPMEAQLSRLIGQSLWDVSRSSTGNLVEWFLLRKAYERNELAPNKPDEKELARRRQSYEGGYVKEPERGLWENIVYLDFRSLYPSIIITHNVSPDTLNREGCKEYDVAPQVGHRFCKDFPGFIPSLLGDLLEERQKIKKKMKATIDPIERKLLDYRQRAIKILANSYYGYYGYARARWYCKECAESVTAWGREYITMTIKEIEEKYGFKVIYSDTDGFFATIPGADAETVKKKAMEFLKYINAKLPGALELEYEGFYKRGFFVTKKKYAVIDEEGKITTRGLEIVRRDWSEIAKETQARVLEALLKDGDVEKAVRIVKEVTEKLSKYEVPPEKLVIHEQITRDLKDYKATGPHVAVAKRLAARGVKIRPGTVISYIVLKGSGRIGDRAIPFDEFDPTKHKYDAEYYIENQVLPAVERILRAFGYRKEDLRYQKTRQVGLSAWLKPKGT

SEQ ID NO: 293 - protein, 774 aa, synthetic construct
MILDTDYITEDGKPVIRIFKKENGEFKIEYDRTFEPYFYALLKDDSAIEEVKKITAERHGTVVTVKRVEKVQKKFLGRPVEVWKLYFTHPQDVPAIRDKIREHPAVIDIYEYDIPFAKRYLIDKGLVPMEGDEELKMLAFQIETLYHEGEEFAEGPILMISYADEEGARVITWKNVDLPYVDVVSTEREMIKRFLRVVKEKDPDVLITYNGDNFDFAYLKKRCEKLGINFALGRDGSEPKIQRMGDRFAVEVKGRIHFDLYPVIRRTINLPTYTLEAVYEAVFGQPKEKVYAEEITTAWETGENLERVARYSMEDAKVTYELGKEFLPMEAQLSRLIGQSLWDVSRSSTGNLVEWFLLRKAYERNELAPNKPDEKELARRRQSYEGGYVKEPERGLWENIVYLDFRSLYPSIIITHNVSPDTLNREGCKEYDVAPQVGHRFCKDFPGFIPSLLGDLLEERQKIKKKMKATIDPIERKLLDYRQRAIKILANSYYGYYGYARARWYCKECAESVTAWGREYITMTIKEIEEKYGFKVIYSDTDGFFATIPGADAETVKKKAMEFLKYINAKLPGALELEYEGFYKRGFFVTKKKYAVIDEEGKITTRGLEIVRRDWSEIAKETQARVLEALLKDGDVEKAVRIVKEVTEKLSKYEVPPEKLVIHEQITRDLKDYKATGPHVAVAKRLAARGVKIRPGTVISYIVLKGSGRIGDRAIPFDEFDPTKHKYDAEYYIENQVLPAVERILRAFGYRKEDLRYQKTRQVGLSAWLKPKGT

SEQ ID NO: 294 - protein, 774 aa, synthetic construct
MILDTDYITEDGKPVIRIFKKENGEFKIEYDRTFEPYFYALLKDDSAIEEVKKITAERHGTVVTVKRVEKVQKKFLGRPVEVWKLYFTHPQDVPAIRDKIREHPAVIDIYEYDIPFAKRYLIDKGLVPMEGDEELKMLAFSIETLYHEGEEFAEGPILMISYADEEGARVITWKNVDLPYVDVVSTEREMIKRFLRVVKEKDPDVLITYNGDNFDFAYLKKRCEKLGINFALGRDGSEPKIQRMGDRFAVEVKGRIHFDLYPVIRRTINLPTYTLEAVYEAVFGQPKEKVYAEEITTAWETGENLERVARYSMEDAKVTYELGKEFLPMEAQLSRLIGQSLWDVSRSSTGNLVEWFLLRKAYERNELAPNKPDEKELARRRQSYEGGYVKEPERGLWENIVYLDFRSLYPSIIITHNVSPDTLNREGCKEYDVAPQVGHRFCKDFPGFIPSLLGDLLEERQKIKKKMKATIDPIERKLLDYRQRAIKILANSYYGYYGYARARWYCKECAESVTAWGREYITMTIKEIEEKYGFKVIYSDTDGFFATIPGADAETVKKKAMEFLKYINAKLPGALELEYEGFYKRGFFVTKKKYAVIDEEGKITTRGLEIVRRDWSEIAKETQARVLEALLKDGDVEKAVRIVKEVTEKLSKYEVPPEKLVIHEQITRDLKDYKATGPHVAVAKRLAARGVKIRPGTVISYIVLKGSGRIGDRAIPFDEFDPTKHKYDAEYYIENQVLPAVERILRAFGYRKEDLRYQKTRQVGLSAWLKPKGT

SEQ ID NO: 295 - protein, 774 aa, synthetic construct
MILDTDYITEDGKPVIRIFKKENGEFKIEYDRTFEPYFYALLKDDSAIEEVKKITAERHGTVVTVKRVEKVQKKFLGRPVEVWKLYFTHPQDVPAIRDKIREHPAVIDIYEYDIPFAKRYLIDKGLVPMEGDEELKMLAFTIETLYHEGEEFAEGPILMISYADEEGARVITWKNVDLPYVDVVSTEREMIKRFLRVVKEKDPDVLITYNGDNFDFAYLKKRCEKLGINFALGRDGSEPKIQRMGDRFAVEVKGRIHFDLYPVIRRTINLPTYTLEAVYEAVFGQPKEKVYAEEITTAWETGENLERVARYSMEDAKVTYELGKEFLPMEAQLSRLIGQSLWDVSRSSTGNLVEWFLLRKAYERNELAPNKPDEKELARRRQSYEGGYVKEPERGLWENIVYLDFRSLYPSIIITHNVSPDTLNREGCKEYDVAPQVGHRFCKDFPGFIPSLLGDLLEERQKIKKKMKATIDPIERKLLDYRQRAIKILANSYYGYYGYARARWYCKECAESVTAWGREYITMTIKEIEEKYGFKVIYSDTDGFFATIPGADAETVKKKAMEFLKYINAKLPGALELEYEGFYKRGFFVTKKKYAVIDEEGKITTRGLEIVRRDWSEIAKETQARVLEALLKDGDVEKAVRIVKEVTEKLSKYEVPPEKLVIHEQITRDLKDYKATGPHVAVAKRLAARGVKIRPGTVISYIVLKGSGRIGDRAIPFDEFDPTKHKYDAEYYIENQVLPAVERILRAFGYRKEDLRYQKTRQVGLSAWLKPKGT

SEQ ID NO: 296 - protein, 774 aa, synthetic construct
MILDTDYITEDGKPVIRIFKKENGEFKIEYDRTFEPYFYALLKDDSAIEEVKKITAERHGTVVTVKRVEKVQKKFLGRPVEVWKLYFTHPQDVPAIRDKIREHPAVIDIYEYDIPFAKRYLIDKGLVPMEGDEELKMLAFVIETLYHEGEEFAEGPILMISYADEEGARVITWKNVDLPYVDVVSTEREMIKRFLRVVKEKDPDVLITYNGDNFDFAYLKKRCEKLGINFALGRDGSEPKIQRMGDRFAVEVKGRIHFDLYPVIRRTINLPTYTLEAVYEAVFGQPKEKVYAEEITTAWETGENLERVARYSMEDAKVTYELGKEFLPMEAQLSRLIGQSLWDVSRSSTGNLVEWFLLRKAYERNELAPNKPDEKELARRRQSYEGGYVKEPERGLWENIVYLDFRSLYPSIIITHNVSPDTLNREGCKEYDVAPQVGHRFCKDFPGFIPSLLGDLLEERQKIKKKMKATIDPIERKLLDYRQRAIKILANSYYGYYGYARARWYCKECAESVTAWGREYITMTIKEIEEKYGFKVIYSDTDGFFATIPGADAETVKKKAMEFLKYINAKLPGALELEYEGFYKRGFFVTKKKYAVIDEEGKITTRGLEIVRRDWSEIAKETQARVLEALLKDGDVEKAVRIVKEVTEKLSKYEVPPEKLVIHEQITRDLKDYKATGPHVAVAKRLAARGVKIRPGTVISYIVLKGSGRIGDRAIPFDEFDPTKHKYDAEYYIENQVLPAVERILRAFGYRKEDLRYQKTRQVGLSAWLKPKGT

SEQ ID NO: 297 - protein, 774 aa, synthetic construct
MILDTDYITEDGKPVIRIFKKENGEFKIEYDRTFEPYFYALLKDDSAIEEVKKITAERHGTVVTVKRVEKVQKKFLGRPVEVWKLYFTHPQDVPAIRDKIREHPAVIDIYEYDIPFAKRYLIDKGLVPMEGDEELKMLAFDFETLYHEGEEFAEGPILMISYADEEGARVITWKNVDLPYVDVVSTEREMIKRFLRVVKEKDPDVLITYNGDNFDFAYLKKRCEKLGINFALGRDGSEPKIQRMGDRFAVEVKGRIHFDLYPVIRRTINLPTYTLEAVYEAVFGQPKEKVYAEEITTAWETGENLERVARYSMEDAKVTYELGKEFLPMEAQLSRLIGQSLWDVSRSSTGNLVEWFLLRKAYERNELAPNKPDEKELARRRQSYEGGYVKEPERGLWENIVYLDFRSLYPSIIITHNVSPDTLNREGCKEYDVAPQVGHRFCKDFPGFIPSLLGDLLEERQKIKKKMKATIDPIERKLLDYRQRAIKILANSYYGYYGYARARWYCKECAESVTAWGREYITMTIKEIEEKYGFKVIYSDTDGFFATIPGADAETVKKKAMEFLKYINAKLPGALELEYEGFYKRGFFVTKKKYAVIDEEGKITTRGLEIVRRDWSEIAKETQARVLEALLKDGDVEKAVRIVKEVTEKLSKYEVPPEKLVIHEQITRDLKDYKATGPHVAVAKRLAARGVKIRPGTVISYIVLKGSGRIGDRAIPFDEFDPTKHKYDAEYYIENQVLPAVERILRAFGYRKEDLRYQKTRQVGLSAWLKPKGT

SEQ ID NO: 298 - protein, 774 aa, synthetic construct
MILDTDYITEDGKPVIRIFKKENGEFKIEYDRTFEPYFYALLKDDSAIEEVKKITAERHGTVVTVKRVEKVQKKFLGRPVEVWKLYFTHPQDVPAIRDKIREHPAVIDIYEYDIPFAKRYLIDKGLVPMEGDEELKMLAFDGETLYHEGEEFAEGPILMISYADEEGARVITWKNVDLPYVDVVSTEREMIKRFLRVVKEKDPDVLITYNGDNFDFAYLKKRCEKLGINFALGRDGSEPKIQRMGDRFAVEVKGRIHFDLYPVIRRTINLPTYTLEAVYEAVFGQPKEKVYAEEITTAWETGENLERVARYSMEDAKVTYELGKEFLPMEAQLSRLIGQSLWDVSRSSTGNLVEWFLLRKAYERNELAPNKPDEKELARRRQSYEGGYVKEPERGLWENIVYLDFRSLYPSIIITHNVSPDTLNREGCKEYDVAPQVGHRFCKDFPGFIPSLLGDLLEERQKIKKKMKATIDPIERKLLDYRQRAIKILANSYYGYYGYARARWYCKECAESVTAWGREYITMTIKEIEEKYGFKVIYSDTDGFFATIPGADAETVKKKAMEFLKYINAKLPGALELEYEGFYKRGFFVTKKKYAVIDEEGKITTRGLEIVRRDWSEIAKETQARVLEALLKDGDVEKAVRIVKEVTEKLSKYEVPPEKLVIHEQITRDLKDYKATGPHVAVAKRLAARGVKIRPGTVISYIVLKGSGRIGDRAIPFDEFDPTKHKYDAEYYIENQVLPAVERILRAFGYRKEDLRYQKTRQVGLSAWLKPKGT

SEQ ID NO: 299 - protein, 774 aa, synthetic construct
MILDTDYITEDGKPVIRIFKKENGEFKIEYDRTFEPYFYALLKDDSAIEEVKKITAERHGTVVTVKRVEKVQKKFLGRPVEVWKLYFTHPQDVPAIRDKIREHPAVIDIYEYDIPFAKRYLIDKGLVPMEGDEELKMLAFDHETLYHEGEEFAEGPILMISYADEEGARVITWKNVDLPYVDVVSTEREMIKRFLRVVKEKDPDVLITYNGDNFDFAYLKKRCEKLGINFALGRDGSEPKIQRMGDRFAVEVKGRIHFDLYPVIRRTINLPTYTLEAVYEAVFGQPKEKVYAEEITTAWETGENLERVARYSMEDAKVTYELGKEFLPMEAQLSRLIGQSLWDVSRSSTGNLVEWFLLRKAYERNELAPNKPDEKELARRRQSYEGGYVKEPERGLWENIVYLDFRSLYPSIIITHNVSPDTLNREGCKEYDVAPQVGHRFCKDFPGFIPSLLGDLLEERQKIKKKMKATIDPIERKLLDYRQRAIKILANSYYGYYGYARARWYCKECAESVTAWGREYITMTIKEIEEKYGFKVIYSDTDGFFATIPGADAETVKKKAMEFLKYINAKLPGALELEYEGFYKRGFFVTKKKYAVIDEEGKITTRGLEIVRRDWSEIAKETQARVLEALLKDGDVEKAVRIVKEVTEKLSKYEVPPEKLVIHEQITRDLKDYKATGPHVAVAKRLAARGVKIRPGTVISYIVLKGSGRIGDRAIPFDEFDPTKHKYDAEYYIENQVLPAVERILRAFGYRKEDLRYQKTRQVGLSAWLKPKGT

SEQ ID NO: 300 - protein, 774 aa, synthetic construct
MILDTDYITEDGKPVIRIFKKENGEFKIEYDRTFEPYFYALLKDDSAIEEVKKITAERHGTVVTVKRVEKVQKKFLGRPVEVWKLYFTHPQDVPAIRDKIREHPAVIDIYEYDIPFAKRYLIDKGLVPMEGDEELKMLAFDKETLYHEGEEFAEGPILMISYADEEGARVITWKNVDLPYVDVVSTEREMIKRFLRVVKEKDPDVLITYNGDNFDFAYLKKRCEKLGINFALGRDGSEPKIQRMGDRFAVEVKGRIHFDLYPVIRRTINLPTYTLEAVYEAVFGQPKEKVYAEEITTAWETGENLERVARYSMEDAKVTYELGKEFLPMEAQLSRLIGQSLWDVSRSSTGNLVEWFLLRKAYERNELAPNKPDEKELARRRQSYEGGYVKEPERGLWENIVYLDFRSLYPSIIITHNVSPDTLNREGCKEYDVAPQVGHRFCKDFPGFIPSLLGDLLEERQKIKKKMKATIDPIERKLLDYRQRAIKILANSYYGYYGYARARWYCKECAESVTAWGREYITMTIKEIEEKYGFKVIYSDTDGFFATIPGADAETVKKKAMEFLKYINAKLPGALELEYEGFYKRGFFVTKKKYAVIDEEGKITTRGLEIVRRDWSEIAKETQARVLEALLKDGDVEKAVRIVKEVTEKLSKYEVPPEKLVIHEQITRDLKDYKATGPHVAVAKRLAARGVKIRPGTVISYIVLKGSGRIGDRAIPFDEFDPTKHKYDAEYYIENQVLPAVERILRAFGYRKEDLRYQKTRQVGLSAWLKPKGT

SEQ ID NO: 301 - protein, 774 aa, synthetic construct
MILDTDYITEDGKPVIRIFKKENGEFKIEYDRTFEPYFYALLKDDSAIEEVKKITAERHGTVVTVKRVEKVQKKFLGRPVEVWKLYFTHPQDVPAIRDKIREHPAVIDIYEYDIPFAKRYLIDKGLVPMEGDEELKMLAFDPETLYHEGEEFAEGPILMISYADEEGARVITWKNVDLPYVDVVSTEREMIKRFLRVVKEKDPDVLITYNGDNFDFAYLKKRCEKLGINFALGRDGSEPKIQRMGDRFAVEVKGRIHFDLYPVIRRTINLPTYTLEAVYEAVFGQPKEKVYAEEITTAWETGENLERVARYSMEDAKVTYELGKEFLPMEAQLSRLIGQSLWDVSRSSTGNLVEWFLLRKAYERNELAPNKPDEKELARRRQSYEGGYVKEPERGLWENIVYLDFRSLYPSIIITHNVSPDTLNREGCKEYDVAPQVGHRFCKDFPGFIPSLLGDLLEERQKIKKKMKATIDPIERKLLDYRQRAIKILANSYYGYYGYARARWYCKECAESVTAWGREYITMTIKEIEEKYGFKVIYSDTDGFFATIPGADAETVKKKAMEFLKYINAKLPGALELEYEGFYKRGFFVTKKKYAVIDEEGKITTRGLEIVRRDWSEIAKETQARVLEALLKDGDVEKAVRIVKEVTEKLSKYEVPPEKLVIHEQITRDLKDYKATGPHVAVAKRLAARGVKIRPGTVISYIVLKGSGRIGDRAIPFDEFDPTKHKYDAEYYIENQVLPAVERILRAFGYRKEDLRYQKTRQVGLSAWLKPKGT

SEQ ID NO: 302 - protein, 774 aa, synthetic construct
MILDTDYITEDGKPVIRIFKKENGEFKIEYDRTFEPYFYALLKDDSAIEEVKKITAERHGTVVTVKRVEKVQKKFLGRPVEVWKLYFTHPQDVPAIRDKIREHPAVIDIYEYDIPFAKRYLIDKGLVPMEGDEELKMLAFDRETLYHEGEEFAEGPILMISYADEEGARVITWKNVDLPYVDVVSTEREMIKRFLRVVKEKDPDVLITYNGDNFDFAYLKKRCEKLGINFALGRDGSEPKIQRMGDRFAVEVKGRIHFDLYPVIRRTINLPTYTLEAVYEAVFGQPKEKVYAEEITTAWETGENLERVARYSMEDAKVTYELGKEFLPMEAQLSRLIGQSLWDVSRSSTGNLVEWFLLRKAYERNELAPNKPDEKELARRRQSYEGGYVKEPERGLWENIVYLDFRSLYPSIIITHNVSPDTLNREGCKEYDVAPQVGHRFCKDFPGFIPSLLGDLLEERQKIKKKMKATIDPIERKLLDYRQRAIKILANSYYGYYGYARARWYCKECAESVTAWGREYITMTIKEIEEKYGFKVIYSDTDGFFATIPGADAETVKKKAMEFLKYINAKLPGALELEYEGFYKRGFFVTKKKYAVIDEEGKITTRGLEIVRRDWSEIAKETQARVLEALLKDGDVEKAVRIVKEVTEKLSKYEVPPEKLVIHEQITRDLKDYKATGPHVAVAKRLAARGVKIRPGTVISYIVLKGSGRIGDRAIPFDEFDPTKHKYDAEYYIENQVLPAVERILRAFGYRKEDLRYQKTRQVGLSAWLKPKGT

SEQ ID NO: 303 - protein, 774 aa, synthetic construct
MILDTDYITEDGKPVIRIFKKENGEFKIEYDRTFEPYFYALLKDDSAIEEVKKITAERHGTVVTVKRVEKVQKKFLGRPVEVWKLYFTHPQDVPAIRDKIREHPAVIDIYEYDIPFAKRYLIDKGLVPMEGDEELKMLAFDWETLYHEGEEFAEGPILMISYADEEGARVITWKNVDLPYVDVVSTEREMIKRFLRVVKEKDPDVLITYNGDNFDFAYLKKRCEKLGINFALGRDGSEPKIQRMGDRFAVEVKGRIHFDLYPVIRRTINLPTYTLEAVYEAVFGQPKEKVYAEEITTAWETGENLERVARYSMEDAKVTYELGKEFLPMEAQLSRLIGQSLWDVSRSSTGNLVEWFLLRKAYERNELAPNKPDEKELARRRQSYEGGYVKEPERGLWENIVYLDFRSLYPSIIITHNVSPDTLNREGCKEYDVAPQVGHRFCKDFPGFIPSLLGDLLEERQKIKKKMKATIDPIERKLLDYRQRAIKILANSYYGYYGYARARWYCKECAESVTAWGREYITMTIKEIEEKYGFKVIYSDTDGFFATIPGADAETVKKKAMEFLKYINAKLPGALELEYEGFYKRGFFVTKKKYAVIDEEGKITTRGLEIVRRDWSEIAKETQARVLEALLKDGDVEKAVRIVKEVTEKLSKYEVPPEKLVIHEQITRDLKDYKATGPHVAVAKRLAARGVKIRPGTVISYIVLKGSGRIGDRAIPFDEFDPTKHKYDAEYYIENQVLPAVERILRAFGYRKEDLRYQKTRQVGLSAWLKPKGT

SEQ ID NO: 304 - protein, 774 aa, synthetic construct
MILDTDYITEDGKPVIRIFKKENGEFKIEYDRTFEPYFYALLKDDSAIEEVKKITAERHGTVVTVKRVEKVQKKFLGRPVEVWKLYFTHPQDVPAIRDKIREHPAVIDIYEYDIPFAKRYLIDKGLVPMEGDEELKMLAFDYETLYHEGEEFAEGPILMISYADEEGARVITWKNVDLPYVDVVSTEREMIKRFLRVVKEKDPDVLITYNGDNFDFAYLKKRCEKLGINFALGRDGSEPKIQRMGDRFAVEVKGRIHFDLYPVIRRTINLPTYTLEAVYEAVFGQPKEKVYAEEITTAWETGENLERVARYSMEDAKVTYELGKEFLPMEAQLSRLIGQSLWDVSRSSTGNLVEWFLLRKAYERNELAPNKPDEKELARRRQSYEGGYVKEPERGLWENIVYLDFRSLYPSIIITHNVSPDTLNREGCKEYDVAPQVGHRFCKDFPGFIPSLLGDLLEERQKIKKKMKATIDPIERKLLDYRQRAIKILANSYYGYYGYARARWYCKECAESVTAWGREYITMTIKEIEEKYGFKVIYSDTDGFFATIPGADAETVKKKAMEFLKYINAKLPGALELEYEGFYKRGFFVTKKKYAVIDEEGKITTRGLEIVRRDWSEIAKETQARVLEALLKDGDVEKAVRIVKEVTEKLSKYEVPPEKLVIHEQITRDLKDYKATGPHVAVAKRLAARGVKIRPGTVISYIVLKGSGRIGDRAIPFDEFDPTKHKYDAEYYIENQVLPAVERILRAFGYRKEDLRYQKTRQVGLSAWLKPKGT

SEQ ID NO: 305 - protein, 774 aa, synthetic construct
MILDTDYITEDGKPVIRIFKKENGEFKIEYDRTFEPYFYALLKDDSAIEEVKKITAERHGTVVTVKRVEKVQKKFLGRPVEVWKLYFTHPQDVPAIRDKIREHPAVIDIYEYDIPFAKRYLIDKGLVPMEGDEELKMLAFDIATLYHEGEEFAEGPILMISYADEEGARVITWKNVDLPYVDVVSTEREMIKRFLRVVKEKDPDVLITYNGDNFDFAYLKKRCEKLGINFALGRDGSEPKIQRMGDRFAVEVKGRIHFDLYPVIRRTINLPTYTLEAVYEAVFGQPKEKVYAEEITTAWETGENLERVARYSMEDAKVTYELGKEFLPMEAQLSRLIGQSLWDVSRSSTGNLVEWFLLRKAYERNELAPNKPDEKELARRRQSYEGGYVKEPERGLWENIVYLDFRSLYPSIIITHNVSPDTLNREGCKEYDVAPQVGHRFCKDFPGFIPSLLGDLLEERQKIKKKMKATIDPIERKLLDYRQRAIKILANSYYGYYGYARARWYCKECAESVTAWGREYITMTIKEIEEKYGFKVIYSDTDGFFATIPGADAETVKKKAMEFLKYINAKLPGALELEYEGFYKRGFFVTKKKYAVIDEEGKITTRGLEIVRRDWSEIAKETQARVLEALLKDGDVEKAVRIVKEVTEKLSKYEVPPEKLVIHEQITRDLKDYKATGPHVAVAKRLAARGVKIRPGTVISYIVLKGSGRIGDRAIPFDEFDPTKHKYDAEYYIENQVLPAVERILRAFGYRKEDLRYQKTRQVGLSAWLKPKGT

SEQ ID NO: 306 - protein, 774 aa, synthetic construct
MILDTDYITEDGKPVIRIFKKENGEFKIEYDRTFEPYFYALLKDDSAIEEVKKITAERHGTVVTVKRVEKVQKKFLGRPVEVWKLYFTHPQDVPAIRDKIREHPAVIDIYEYDIPFAKRYLIDKGLVPMEGDEELKMLAFDICTLYHEGEEFAEGPILMISYADEEGARVITWKNVDLPYVDVVSTEREMIKRFLRVVKEKDPDVLITYNGDNFDFAYLKKRCEKLGINFALGRDGSEPKIQRMGDRFAVEVKGRIHFDLYPVIRRTINLPTYTLEAVYEAVFGQPKEKVYAEEITTAWETGENLERVARYSMEDAKVTYELGKEFLPMEAQLSRLIGQSLWDVSRSSTGNLVEWFLLRKAYERNELAPNKPDEKELARRRQSYEGGYVKEPERGLWENIVYLDFRSLYPSIIITHNVSPDTLNREGCKEYDVAPQVGHRFCKDFPGFIPSLLGDLLEERQKIKKKMKATIDPIERKLLDYRQRAIKILANSYYGYYGYARARWYCKECAESVTAWGREYITMTIKEIEEKYGFKVIYSDTDGFFATIPGADAETVKKKAMEFLKYINAKLPGALELEYEGFYKRGFFVTKKKYAVIDEEGKITTRGLEIVRRDWSEIAKETQARVLEALLKDGDVEKAVRIVKEVTEKLSKYEVPPEKLVIHEQITRDLKDYKATGPHVAVAKRLAARGVKIRPGTVISYIVLKGSGRIGDRAIPFDEFDPTKHKYDAEYYIENQVLPAVERILRAFGYRKEDLRYQKTRQVGLSAWLKPKGT

SEQ ID NO: 307 - protein, 774 aa, synthetic construct
MILDTDYITEDGKPVIRIFKKENGEFKIEYDRTFEPYFYALLKDDSAIEEVKKITAERHGTVVTVKRVEKVQKKFLGRPVEVWKLYFTHPQDVPAIRDKIREHPAVIDIYEYDIPFAKRYLIDKGLVPMEGDEELKMLAFDIFTLYHEGEEFAEGPILMISYADEEGARVITWKNVDLPYVDVVSTEREMIKRFLRVVKEKDPDVLITYNGDNFDFAYLKKRCEKLGINFALGRDGSEPKIQRMGDRFAVEVKGRIHFDLYPVIRRTINLPTYTLEAVYEAVFGQPKEKVYAEEITTAWETGENLERVARYSMEDAKVTYELGKEFLPMEAQLSRLIGQSLWDVSRSSTGNLVEWFLLRKAYERNELAPNKPDEKELARRRQSYEGGYVKEPERGLWENIVYLDFRSLYPSIIITHNVSPDTLNREGCKEYDVAPQVGHRFCKDFPGFIPSLLGDLLEERQKIKKKMKATIDPIERKLLDYRQRAIKILANSYYGYYGYARARWYCKECAESVTAWGREYITMTIKEIEEKYGFKVIYSDTDGFFATIPGADAETVKKKAMEFLKYINAKLPGALELEYEGFYKRGFFVTKKKYAVIDEEGKITTRGLEIVRRDWSEIAKETQARVLEALLKDGDVEKAVRIVKEVTEKLSKYEVPPEKLVIHEQITRDLKDYKATGPHVAVAKRLAARGVKIRPGTVISYIVLKGSGRIGDRAIPFDEFDPTKHKYDAEYYIENQVLPAVERILRAFGYRKEDLRYQKTRQVGLSAWLKPKGT

SEQ ID NO: 308 - protein, 774 aa, synthetic construct
MILDTDYITEDGKPVIRIFKKENGEFKIEYDRTFEPYFYALLKDDSAIEEVKKITAERHGTVVTVKRVEKVQKKFLGRPVEVWKLYFTHPQDVPAIRDKIREHPAVIDIYEYDIPFAKRYLIDKGLVPMEGDEELKMLAFDIGTLYHEGEEFAEGPILMISYADEEGARVITWKNVDLPYVDVVSTEREMIKRFLRVVKEKDPDVLITYNGDNFDFAYLKKRCEKLGINFALGRDGSEPKIQRMGDRFAVEVKGRIHFDLYPVIRRTINLPTYTLEAVYEAVFGQPKEKVYAEEITTAWETGENLERVARYSMEDAKVTYELGKEFLPMEAQLSRLIGQSLWDVSRSSTGNLVEWFLLRKAYERNELAPNKPDEKELARRRQSYEGGYVKEPERGLWENIVYLDFRSLYPSIIITHNVSPDTLNREGCKEYDVAPQVGHRFCKDFPGFIPSLLGDLLEERQKIKKKMKATIDPIERKLLDYRQRAIKILANSYYGYYGYARARWYCKECAESVTAWGREYITMTIKEIEEKYGFKVIYSDTDGFFATIPGADAETVKKKAMEFLKYINAKLPGALELEYEGFYKRGFFVTKKKYAVIDEEGKITTRGLEIVRRDWSEIAKETQARVLEALLKDGDVEKAVRIVKEVTEKLSKYEVPPEKLVIHEQITRDLKDYKATGPHVAVAKRLAARGVKIRPGTVISYIVLKGSGRIGDRAIPFDEFDPTKHKYDAEYYIENQVLPAVERILRAFGYRKEDLRYQKTRQVGLSAWLKPKGT

SEQ ID NO: 309 - protein, 774 aa, synthetic construct
MILDTDYITEDGKPVIRIFKKENGEFKIEYDRTFEPYFYALLKDDSAIEEVKKITAERHGTVVTVKRVEKVQKKFLGRPVEVWKLYFTHPQDVPAIRDKIREHPAVIDIYEYDIPFAKRYLIDKGLVPMEGDEELKMLAFDIHTLYHEGEEFAEGPILMISYADEEGARVITWKNVDLPYVDVVSTEREMIKRFLRVVKEKDPDVLITYNGDNFDFAYLKKRCEKLGINFALGRDGSEPKIQRMGDRFAVEVKGRIHFDLYPVIRRTINLPTYTLEAVYEAVFGQPKEKVYAEEITTAWETGENLERVARYSMEDAKVTYELGKEFLPMEAQLSRLIGQSLWDVSRSSTGNLVEWFLLRKAYERNELAPNKPDEKELARRRQSYEGGYVKEPERGLWENIVYLDFRSLYPSIIITHNVSPDTLNREGCKEYDVAPQVGHRFCKDFPGFIPSLLGDLLEERQKIKKKMKATIDPIERKLLDYRQRAIKILANSYYGYYGYARARWYCKECAESVTAWGREYITMTIKEIEEKYGFKVIYSDTDGFFATIPGADAETVKKKAMEFLKYINAKLPGALELEYEGFYKRGFFVTKKKYAVIDEEGKITTRGLEIVRRDWSEIAKETQARVLEALLKDGDVEKAVRIVKEVTEKLSKYEVPPEKLVIHEQITRDLKDYKATGPHVAVAKRLAARGVKIRPGTVISYIVLKGSGRIGDRAIPFDEFDPTKHKYDAEYYIENQVLPAVERILRAFGYRKEDLRYQKTRQVGLSAWLKPKGT

SEQ ID NO: 310 - protein, 774 aa, synthetic construct
MILDTDYITEDGKPVIRIFKKENGEFKIEYDRTFEPYFYALLKDDSAIEEVKKITAERHGTVVTVKRVEKVQKKFLGRPVEVWKLYFTHPQDVPAIRDKIREHPAVIDIYEYDIPFAKRYLIDKGLVPMEGDEELKMLAFDIITLYHEGEEFAEGPILMISYADEEGARVITWKNVDLPYVDVVSTEREMIKRFLRVVKEKDPDVLITYNGDNFDFAYLKKRCEKLGINFALGRDGSEPKIQRMGDRFAVEVKGRIHFDLYPVIRRTINLPTYTLEAVYEAVFGQPKEKVYAEEITTAWETGENLERVARYSMEDAKVTYELGKEFLPMEAQLSRLIGQSLWDVSRSSTGNLVEWFLLRKAYERNELAPNKPDEKELARRRQSYEGGYVKEPERGLWENIVYLDFRSLYPSIIITHNVSPDTLNREGCKEYDVAPQVGHRFCKDFPGFIPSLLGDLLEERQKIKKKMKATIDPIERKLLDYRQRAIKILANSYYGYYGYARARWYCKECAESVTAWGREYITMTIKEIEEKYGFKVIYSDTDGFFATIPGADAETVKKKAMEFLKYINAKLPGALELEYEGFYKRGFFVTKKKYAVIDEEGKITTRGLEIVRRDWSEIAKETQARVLEALLKDGDVEKAVRIVKEVTEKLSKYEVPPEKLVIHEQITRDLKDYKATGPHVAVAKRLAARGVKIRPGTVISYIVLKGSGRIGDRAIPFDEFDPTKHKYDAEYYIENQVLPAVERILRAFGYRKEDLRYQKTRQVGLSAWLKPKGT

SEQ ID NO: 311 - protein, 774 aa, synthetic construct
MILDTDYITEDGKPVIRIFKKENGEFKIEYDRTFEPYFYALLKDDSAIEEVKKITAERHGTVVTVKRVEKVQKKFLGRPVEVWKLYFTHPQDVPAIRDKIREHPAVIDIYEYDIPFAKRYLIDKGLVPMEGDEELKMLAFDIKTLYHEGEEFAEGPILMISYADEEGARVITWKNVDLPYVDVVSTEREMIKRFLRVVKEKDPDVLITYNGDNFDFAYLKKRCEKLGINFALGRDGSEPKIQRMGDRFAVEVKGRIHFDLYPVIRRTINLPTYTLEAVYEAVFGQPKEKVYAEEITTAWETGENLERVARYSMEDAKVTYELGKEFLPMEAQLSRLIGQSLWDVSRSSTGNLVEWFLLRKAYERNELAPNKPDEKELARRRQSYEGGYVKEPERGLWENIVYLDFRSLYPSIIITHNVSPDTLNREGCKEYDVAPQVGHRFCKDFPGFIPSLLGDLLEERQKIKKKMKATIDPIERKLLDYRQRAIKILANSYYGYYGYARARWYCKECAESVTAWGREYITMTIKEIEEKYGFKVIYSDTDGFFATIPGADAETVKKKAMEFLKYINAKLPGALELEYEGFYKRGFFVTKKKYAVIDEEGKITTRGLEIVRRDWSEIAKETQARVLEALLKDGDVEKAVRIVKEVTEKLSKYEVPPEKLVIHEQITRDLKDYKATGPHVAVAKRLAARGVKIRPGTVISYIVLKGSGRIGDRAIPFDEFDPTKHKYDAEYYIENQVLPAVERILRAFGYRKEDLRYQKTRQVGLSAWLKPKGT

SEQ ID NO: 312 - protein, 774 aa, synthetic construct
MILDTDYITEDGKPVIRIFKKENGEFKIEYDRTFEPYFYALLKDDSAIEEVKKITAERHGTVVTVKRVEKVQKKFLGRPVEVWKLYFTHPQDVPAIRDKIREHPAVIDIYEYDIPFAKRYLIDKGLVPMEGDEELKMLAFDILTLYHEGEEFAEGPILMISYADEEGARVITWKNVDLPYVDVVSTEREMIKRFLRVVKEKDPDVLITYNGDNFDFAYLKKRCEKLGINFALGRDGSEPKIQRMGDRFAVEVKGRIHFDLYPVIRRTINLPTYTLEAVYEAVFGQPKEKVYAEEITTAWETGENLERVARYSMEDAKVTYELGKEFLPMEAQLSRLIGQSLWDVSRSSTGNLVEWFLLRKAYERNELAPNKPDEKELARRRQSYEGGYVKEPERGLWENIVYLDFRSLYPSIIITHNVSPDTLNREGCKEYDVAPQVGHRFCKDFPGFIPSLLGDLLEERQKIKKKMKATIDPIERKLLDYRQRAIKILANSYYGYYGYARARWYCKECAESVTAWGREYITMTIKEIEEKYGFKVIYSDTDGFFATIPGADAETVKKKAMEFLKYINAKLPGALELEYEGFYKRGFFVTKKKYAVIDEEGKITTRGLEIVRRDWSEIAKETQARVLEALLKDGDVEKAVRIVKEVTEKLSKYEVPPEKLVIHEQITRDLKDYKATGPHVAVAKRLAARGVKIRPGTVISYIVLKGSGRIGDRAIPFDEFDPTKHKYDAEYYIENQVLPAVERILRAFGYRKEDLRYQKTRQVGLSAWLKPKGT

SEQ ID NO: 313 - protein, 774 aa, synthetic construct
MILDTDYITEDGKPVIRIFKKENGEFKIEYDRTFEPYFYALLKDDSAIEEVKKITAERHGTVVTVKRVEKVQKKFLGRPVEVWKLYFTHPQDVPAIRDKIREHPAVIDIYEYDIPFAKRYLIDKGLVPMEGDEELKMLAFDIMTLYHEGEEFAEGPILMISYADEEGARVITWKNVDLPYVDVVSTEREMIKRFLRVVKEKDPDVLITYNGDNFDFAYLKKRCEKLGINFALGRDGSEPKIQRMGDRFAVEVKGRIHFDLYPVIRRTINLPTYTLEAVYEAVFGQPKEKVYAEEITTAWETGENLERVARYSMEDAKVTYELGKEFLPMEAQLSRLIGQSLWDVSRSSTGNLVEWFLLRKAYERNELAPNKPDEKELARRRQSYEGGYVKEPERGLWENIVYLDFRSLYPSIIITHNVSPDTLNREGCKEYDVAPQVGHRFCKDFPGFIPSLLGDLLEERQKIKKKMKATIDPIERKLLDYRQRAIKILANSYYGYYGYARARWYCKECAESVTAWGREYITMTIKEIEEKYGFKVIYSDTDGFFATIPGADAETVKKKAMEFLKYINAKLPGALELEYEGFYKRGFFVTKKKYAVIDEEGKITTRGLEIVRRDWSEIAKETQARVLEALLKDGDVEKAVRIVKEVTEKLSKYEVPPEKLVIHEQITRDLKDYKATGPHVAVAKRLAARGVKIRPGTVISYIVLKGSGRIGDRAIPFDEFDPTKHKYDAEYYIENQVLPAVERILRAFGYRKEDLRYQKTRQVGLSAWLKPKGT

SEQ ID NO: 314 - protein, 774 aa, synthetic construct
MILDTDYITEDGKPVIRIFKKENGEFKIEYDRTFEPYFYALLKDDSAIEEVKKITAERHGTVVTVKRVEKVQKKFLGRPVEVWKLYFTHPQDVPAIRDKIREHPAVIDIYEYDIPFAKRYLIDKGLVPMEGDEELKMLAFDINTLYHEGEEFAEGPILMISYADEEGARVITWKNVDLPYVDVVSTEREMIKRFLRVVKEKDPDVLITYNGDNFDFAYLKKRCEKLGINFALGRDGSEPKIQRMGDRFAVEVKGRIHFDLYPVIRRTINLPTYTLEAVYEAVFGQPKEKVYAEEITTAWETGENLERVARYSMEDAKVTYELGKEFLPMEAQLSRLIGQSLWDVSRSSTGNLVEWFLLRKAYERNELAPNKPDEKELARRRQSYEGGYVKEPERGLWENIVYLDFRSLYPSIIITHNVSPDTLNREGCKEYDVAPQVGHRFCKDFPGFIPSLLGDLLEERQKIKKKMKATIDPIERKLLDYRQRAIKILANSYYGYYGYARARWYCKECAESVTAWGREYITMTIKEIEEKYGFKVIYSDTDGFFATIPGADAETVKKKAMEFLKYINAKLPGALELEYEGFYKRGFFVTKKKYAVIDEEGKITTRGLEIVRRDWSEIAKETQARVLEALLKDGDVEKAVRIVKEVTEKLSKYEVPPEKLVIHEQITRDLKDYKATGPHVAVAKRLAARGVKIRPGTVISYIVLKGSGRIGDRAIPFDEFDPTKHKYDAEYYIENQVLPAVERILRAFGYRKEDLRYQKTRQVGLSAWLKPKGT

SEQ ID NO: 315 - protein, 774 aa, synthetic construct
MILDTDYITEDGKPVIRIFKKENGEFKIEYDRTFEPYFYALLKDDSAIEEVKKITAERHGTVVTVKRVEKVQKKFLGRPVEVWKLYFTHPQDVPAIRDKIREHPAVIDIYEYDIPFAKRYLIDKGLVPMEGDEELKMLAFDIPTLYHEGEEFAEGPILMISYADEEGARVITWKNVDLPYVDVVSTEREMIKRFLRVVKEKDPDVLITYNGDNFDFAYLKKRCEKLGINFALGRDGSEPKIQRMGDRFAVEVKGRIHFDLYPVIRRTINLPTYTLEAVYEAVFGQPKEKVYAEEITTAWETGENLERVARYSMEDAKVTYELGKEFLPMEAQLSRLIGQSLWDVSRSSTGNLVEWFLLRKAYERNELAPNKPDEKELARRRQSYEGGYVKEPERGLWENIVYLDFRSLYPSIIITHNVSPDTLNREGCKEYDVAPQVGHRFCKDFPGFIPSLLGDLLEERQKIKKKMKATIDPIERKLLDYRQRAIKILANSYYGYYGYARARWYCKECAESVTAWGREYITMTIKEIEEKYGFKVIYSDTDGFFATIPGADAETVKKKAMEFLKYINAKLPGALELEYEGFYKRGFFVTKKKYAVIDEEGKITTRGLEIVRRDWSEIAKETQARVLEALLKDGDVEKAVRIVKEVTEKLSKYEVPPEKLVIHEQITRDLKDYKATGPHVAVAKRLAARGVKIRPGTVISYIVLKGSGRIGDRAIPFDEFDPTKHKYDAEYYIENQVLPAVERILRAFGYRKEDLRYQKTRQVGLSAWLKPKGT

SEQ ID NO: 316 - protein, 774 aa, synthetic construct
MILDTDYITEDGKPVIRIFKKENGEFKIEYDRTFEPYFYALLKDDSAIEEVKKITAERHGTVVTVKRVEKVQKKFLGRPVEVWKLYFTHPQDVPAIRDKIREHPAVIDIYEYDIPFAKRYLIDKGLVPMEGDEELKMLAFDIQTLYHEGEEFAEGPILMISYADEEGARVITWKNVDLPYVDVVSTEREMIKRFLRVVKEKDPDVLITYNGDNFDFAYLKKRCEKLGINFALGRDGSEPKIQRMGDRFAVEVKGRIHFDLYPVIRRTINLPTYTLEAVYEAVFGQPKEKVYAEEITTAWETGENLERVARYSMEDAKVTYELGKEFLPMEAQLSRLIGQSLWDVSRSSTGNLVEWFLLRKAYERNELAPNKPDEKELARRRQSYEGGYVKEPERGLWENIVYLDFRSLYPSIIITHNVSPDTLNREGCKEYDVAPQVGHRFCKDFPGFIPSLLGDLLEERQKIKKKMKATIDPIERKLLDYRQRAIKILANSYYGYYGYARARWYCKECAESVTAWGREYITMTIKEIEEKYGFKVIYSDTDGFFATIPGADAETVKKKAMEFLKYINAKLPGALELEYEGFYKRGFFVTKKKYAVIDEEGKITTRGLEIVRRDWSEIAKETQARVLEALLKDGDVEKAVRIVKEVTEKLSKYEVPPEKLVIHEQITRDLKDYKATGPHVAVAKRLAARGVKIRPGTVISYIVLKGSGRIGDRAIPFDEFDPTKHKYDAEYYIENQVLPAVERILRAFGYRKEDLRYQKTRQVGLSAWLKPKGT

SEQ ID NO: 317 - protein, 774 aa, synthetic construct
MILDTDYITEDGKPVIRIFKKENGEFKIEYDRTFEPYFYALLKDDSAIEEVKKITAERHGTVVTVKRVEKVQKKFLGRPVEVWKLYFTHPQDVPAIRDKIREHPAVIDIYEYDIPFAKRYLIDKGLVPMEGDEELKMLAFDIRTLYHEGEEFAEGPILMISYADEEGARVITWKNVDLPYVDVVSTEREMIKRFLRVVKEKDPDVLITYNGDNFDFAYLKKRCEKLGINFALGRDGSEPKIQRMGDRFAVEVKGRIHFDLYPVIRRTINLPTYTLEAVYEAVFGQPKEKVYAEEITTAWETGENLERVARYSMEDAKVTYELGKEFLPMEAQLSRLIGQSLWDVSRSSTGNLVEWFLLRKAYERNELAPNKPDEKELARRRQSYEGGYVKEPERGLWENIVYLDFRSLYPSIIITHNVSPDTLNREGCKEYDVAPQVGHRFCKDFPGFIPSLLGDLLEERQKIKKKMKATIDPIERKLLDYRQRAIKILANSYYGYYGYARARWYCKECAESVTAWGREYITMTIKEIEEKYGFKVIYSDTDGFFATIPGADAETVKKKAMEFLKYINAKLPGALELEYEGFYKRGFFVTKKKYAVIDEEGKITTRGLEIVRRDWSEIAKETQARVLEALLKDGDVEKAVRIVKEVTEKLSKYEVPPEKLVIHEQITRDLKDYKATGPHVAVAKRLAARGVKIRPGTVISYIVLKGSGRIGDRAIPFDEFDPTKHKYDAEYYIENQVLPAVERILRAFGYRKEDLRYQKTRQVGLSAWLKPKGT

SEQ ID NO: 318 - protein, 774 aa, synthetic construct
MILDTDYITEDGKPVIRIFKKENGEFKIEYDRTFEPYFYALLKDDSAIEEVKKITAERHGTVVTVKRVEKVQKKFLGRPVEVWKLYFTHPQDVPAIRDKIREHPAVIDIYEYDIPFAKRYLIDKGLVPMEGDEELKMLAFDISTLYHEGEEFAEGPILMISYADEEGARVITWKNVDLPYVDVVSTEREMIKRFLRVVKEKDPDVLITYNGDNFDFAYLKKRCEKLGINFALGRDGSEPKIQRMGDRFAVEVKGRIHFDLYPVIRRTINLPTYTLEAVYEAVFGQPKEKVYAEEITTAWETGENLERVARYSMEDAKVTYELGKEFLPMEAQLSRLIGQSLWDVSRSSTGNLVEWFLLRKAYERNELAPNKPDEKELARRRQSYEGGYVKEPERGLWENIVYLDFRSLYPSIIITHNVSPDTLNREGCKEYDVAPQVGHRFCKDFPGFIPSLLGDLLEERQKIKKKMKATIDPIERKLLDYRQRAIKILANSYYGYYGYARARWYCKECAESVTAWGREYITMTIKEIEEKYGFKVIYSDTDGFFATIPGADAETVKKKAMEFLKYINAKLPGALELEYEGFYKRGFFVTKKKYAVIDEEGKITTRGLEIVRRDWSEIAKETQARVLEALLKDGDVEKAVRIVKEVTEKLSKYEVPPEKLVIHEQITRDLKDYKATGPHVAVAKRLAARGVKIRPGTVISYIVLKGSGRIGDRAIPFDEFDPTKHKYDAEYYIENQVLPAVERILRAFGYRKEDLRYQKTRQVGLSAWLKPKGT

SEQ ID NO: 319 - protein, 774 aa, synthetic construct
MILDTDYITEDGKPVIRIFKKENGEFKIEYDRTFEPYFYALLKDDSAIEEVKKITAERHGTVVTVKRVEKVQKKFLGRPVEVWKLYFTHPQDVPAIRDKIREHPAVIDIYEYDIPFAKRYLIDKGLVPMEGDEELKMLAFDITTLYHEGEEFAEGPILMISYADEEGARVITWKNVDLPYVDVVSTEREMIKRFLRVVKEKDPDVLITYNGDNFDFAYLKKRCEKLGINFALGRDGSEPKIQRMGDRFAVEVKGRIHFDLYPVIRRTINLPTYTLEAVYEAVFGQPKEKVYAEEITTAWETGENLERVARYSMEDAKVTYELGKEFLPMEAQLSRLIGQSLWDVSRSSTGNLVEWFLLRKAYERNELAPNKPDEKELARRRQSYEGGYVKEPERGLWENIVYLDFRSLYPSIIITHNVSPDTLNREGCKEYDVAPQVGHRFCKDFPGFIPSLLGDLLEERQKIKKKMKATIDPIERKLLDYRQRAIKILANSYYGYYGYARARWYCKECAESVTAWGREYITMTIKEIEEKYGFKVIYSDTDGFFATIPGADAETVKKKAMEFLKYINAKLPGALELEYEGFYKRGFFVTKKKYAVIDEEGKITTRGLEIVRRDWSEIAKETQARVLEALLKDGDVEKAVRIVKEVTEKLSKYEVPPEKLVIHEQITRDLKDYKATGPHVAVAKRLAARGVKIRPGTVISYIVLKGSGRIGDRAIPFDEFDPTKHKYDAEYYIENQVLPAVERILRAFGYRKEDLRYQKTRQVGLSAWLKPKGT

SEQ ID NO: 320 - protein, 774 aa, synthetic construct
MILDTDYITEDGKPVIRIFKKENGEFKIEYDRTFEPYFYALLKDDSAIEEVKKITAERHGTVVTVKRVEKVQKKFLGRPVEVWKLYFTHPQDVPAIRDKIREHPAVIDIYEYDIPFAKRYLIDKGLVPMEGDEELKMLAFDIVTLYHEGEEFAEGPILMISYADEEGARVITWKNVDLPYVDVVSTEREMIKRFLRVVKEKDPDVLITYNGDNFDFAYLKKRCEKLGINFALGRDGSEPKIQRMGDRFAVEVKGRIHFDLYPVIRRTINLPTYTLEAVYEAVFGQPKEKVYAEEITTAWETGENLERVARYSMEDAKVTYELGKEFLPMEAQLSRLIGQSLWDVSRSSTGNLVEWFLLRKAYERNELAPNKPDEKELARRRQSYEGGYVKEPERGLWENIVYLDFRSLYPSIIITHNVSPDTLNREGCKEYDVAPQVGHRFCKDFPGFIPSLLGDLLEERQKIKKKMKATIDPIERKLLDYRQRAIKILANSYYGYYGYARARWYCKECAESVTAWGREYITMTIKEIEEKYGFKVIYSDTDGFFATIPGADAETVKKKAMEFLKYINAKLPGALELEYEGFYKRGFFVTKKKYAVIDEEGKITTRGLEIVRRDWSEIAKETQARVLEALLKDGDVEKAVRIVKEVTEKLSKYEVPPEKLVIHEQITRDLKDYKATGPHVAVAKRLAARGVKIRPGTVISYIVLKGSGRIGDRAIPFDEFDPTKHKYDAEYYIENQVLPAVERILRAFGYRKEDLRYQKTRQVGLSAWLKPKGT

SEQ ID NO: 321 - protein, 774 aa, synthetic construct
MILDTDYITEDGKPVIRIFKKENGEFKIEYDRTFEPYFYALLKDDSAIEEVKKITAERHGTVVTVKRVEKVQKKFLGRPVEVWKLYFTHPQDVPAIRDKIREHPAVIDIYEYDIPFAKRYLIDKGLVPMEGDEELKMLAFDIWTLYHEGEEFAEGPILMISYADEEGARVITWKNVDLPYVDVVSTEREMIKRFLRVVKEKDPDVLITYNGDNFDFAYLKKRCEKLGINFALGRDGSEPKIQRMGDRFAVEVKGRIHFDLYPVIRRTINLPTYTLEAVYEAVFGQPKEKVYAEEITTAWETGENLERVARYSMEDAKVTYELGKEFLPMEAQLSRLIGQSLWDVSRSSTGNLVEWFLLRKAYERNELAPNKPDEKELARRRQSYEGGYVKEPERGLWENIVYLDFRSLYPSIIITHNVSPDTLNREGCKEYDVAPQVGHRFCKDFPGFIPSLLGDLLEERQKIKKKMKATIDPIERKLLDYRQRAIKILANSYYGYYGYARARWYCKECAESVTAWGREYITMTIKEIEEKYGFKVIYSDTDGFFATIPGADAETVKKKAMEFLKYINAKLPGALELEYEGFYKRGFFVTKKKYAVIDEEGKITTRGLEIVRRDWSEIAKETQARVLEALLKDGDVEKAVRIVKEVTEKLSKYEVPPEKLVIHEQITRDLKDYKATGPHVAVAKRLAARGVKIRPGTVISYIVLKGSGRIGDRAIPFDEFDPTKHKYDAEYYIENQVLPAVERILRAFGYRKEDLRYQKTRQVGLSAWLKPKGT

SEQ ID NO: 322 - protein, 774 aa, synthetic construct
MILDTDYITEDGKPVIRIFKKENGEFKIEYDRTFEPYFYALLKDDSAIEEVKKITAERHGTVVTVKRVEKVQKKFLGRPVEVWKLYFTHPQDVPAIRDKIREHPAVIDIYEYDIPFAKRYLIDKGLVPMEGDEELKMLAFDIYTLYHEGEEFAEGPILMISYADEEGARVITWKNVDLPYVDVVSTEREMIKRFLRVVKEKDPDVLITYNGDNFDFAYLKKRCEKLGINFALGRDGSEPKIQRMGDRFAVEVKGRIHFDLYPVIRRTINLPTYTLEAVYEAVFGQPKEKVYAEEITTAWETGENLERVARYSMEDAKVTYELGKEFLPMEAQLSRLIGQSLWDVSRSSTGNLVEWFLLRKAYERNELAPNKPDEKELARRRQSYEGGYVKEPERGLWENIVYLDFRSLYPSIIITHNVSPDTLNREGCKEYDVAPQVGHRFCKDFPGFIPSLLGDLLEERQKIKKKMKATIDPIERKLLDYRQRAIKILANSYYGYYGYARARWYCKECAESVTAWGREYITMTIKEIEEKYGFKVIYSDTDGFFATIPGADAETVKKKAMEFLKYINAKLPGALELEYEGFYKRGFFVTKKKYAVIDEEGKITTRGLEIVRRDWSEIAKETQARVLEALLKDGDVEKAVRIVKEVTEKLSKYEVPPEKLVIHEQITRDLKDYKATGPHVAVAKRLAARGVKIRPGTVISYIVLKGSGRIGDRAIPFDEFDPTKHKYDAEYYIENQVLPAVERILRAFGYRKEDLRYQKTRQVGLSAWLKPKGT

SEQ ID NO: 323 - protein, 774 aa, synthetic construct
MILDTDYITEDGKPVIRIFKKENGEFKIEYDRTFEPYFYALLKDDSAIEEVKKITAERHGTVVTVKRVEKVQKKFLGRPVEVWKLYFTHPQDVPAIRDKIREHPAVIDIYEYDIPFAKRYLIDKGLVPMEGDEELKMLAFDIEALYHEGEEFAEGPILMISYADEEGARVITWKNVDLPYVDVVSTEREMIKRFLRVVKEKDPDVLITYNGDNFDFAYLKKRCEKLGINFALGRDGSEPKIQRMGDRFAVEVKGRIHFDLYPVIRRTINLPTYTLEAVYEAVFGQPKEKVYAEEITTAWETGENLERVARYSMEDAKVTYELGKEFLPMEAQLSRLIGQSLWDVSRSSTGNLVEWFLLRKAYERNELAPNKPDEKELARRRQSYEGGYVKEPERGLWENIVYLDFRSLYPSIIITHNVSPDTLNREGCKEYDVAPQVGHRFCKDFPGFIPSLLGDLLEERQKIKKKMKATIDPIERKLLDYRQRAIKILANSYYGYYGYARARWYCKECAESVTAWGREYITMTIKEIEEKYGFKVIYSDTDGFFATIPGADAETVKKKAMEFLKYINAKLPGALELEYEGFYKRGFFVTKKKYAVIDEEGKITTRGLEIVRRDWSEIAKETQARVLEALLKDGDVEKAVRIVKEVTEKLSKYEVPPEKLVIHEQITRDLKDYKATGPHVAVAKRLAARGVKIRPGTVISYIVLKGSGRIGDRAIPFDEFDPTKHKYDAEYYIENQVLPAVERILRAFGYRKEDLRYQKTRQVGLSAWLKPKGT

SEQ ID NO: 324 - protein, 774 aa, synthetic construct
MILDTDYITEDGKPVIRIFKKENGEFKIEYDRTFEPYFYALLKDDSAIEEVKKITAERHGTVVTVKRVEKVQKKFLGRPVEVWKLYFTHPQDVPAIRDKIREHPAVIDIYEYDIPFAKRYLIDKGLVPMEGDEELKMLAFDIEDLYHEGEEFAEGPILMISYADEEGARVITWKNVDLPYVDVVSTEREMIKRFLRVVKEKDPDVLITYNGDNFDFAYLKKRCEKLGINFALGRDGSEPKIQRMGDRFAVEVKGRIHFDLYPVIRRTINLPTYTLEAVYEAVFGQPKEKVYAEEITTAWETGENLERVARYSMEDAKVTYELGKEFLPMEAQLSRLIGQSLWDVSRSSTGNLVEWFLLRKAYERNELAPNKPDEKELARRRQSYEGGYVKEPERGLWENIVYLDFRSLYPSIIITHNVSPDTLNREGCKEYDVAPQVGHRFCKDFPGFIPSLLGDLLEERQKIKKKMKATIDPIERKLLDYRQRAIKILANSYYGYYGYARARWYCKECAESVTAWGREYITMTIKEIEEKYGFKVIYSDTDGFFATIPGADAETVKKKAMEFLKYINAKLPGALELEYEGFYKRGFFVTKKKYAVIDEEGKITTRGLEIVRRDWSEIAKETQARVLEALLKDGDVEKAVRIVKEVTEKLSKYEVPPEKLVIHEQITRDLKDYKATGPHVAVAKRLAARGVKIRPGTVISYIVLKGSGRIGDRAIPFDEFDPTKHKYDAEYYIENQVLPAVERILRAFGYRKEDLRYQKTRQVGLSAWLKPKGT

SEQ ID NO: 325 - protein, 774 aa, synthetic construct
MILDTDYITEDGKPVIRIFKKENGEFKIEYDRTFEPYFYALLKDDSAIEEVKKITAERHGTVVTVKRVEKVQKKFLGRPVEVWKLYFTHPQDVPAIRDKIREHPAVIDIYEYDIPFAKRYLIDKGLVPMEGDEELKMLAFDIEELYHEGEEFAEGPILMISYADEEGARVITWKNVDLPYVDVVSTEREMIKRFLRVVKEKDPDVLITYNGDNFDFAYLKKRCEKLGINFALGRDGSEPKIQRMGDRFAVEVKGRIHFDLYPVIRRTINLPTYTLEAVYEAVFGQPKEKVYAEEITTAWETGENLERVARYSMEDAKVTYELGKEFLPMEAQLSRLIGQSLWDVSRSSTGNLVEWFLLRKAYERNELAPNKPDEKELARRRQSYEGGYVKEPERGLWENIVYLDFRSLYPSIIITHNVSPDTLNREGCKEYDVAPQVGHRFCKDFPGFIPSLLGDLLEERQKIKKKMKATIDPIERKLLDYRQRAIKILANSYYGYYGYARARWYCKECAESVTAWGREYITMTIKEIEEKYGFKVIYSDTDGFFATIPGADAETVKKKAMEFLKYINAKLPGALELEYEGFYKRGFFVTKKKYAVIDEEGKITTRGLEIVRRDWSEIAKETQARVLEALLKDGDVEKAVRIVKEVTEKLSKYEVPPEKLVIHEQITRDLKDYKATGPHVAVAKRLAARGVKIRPGTVISYIVLKGSGRIGDRAIPFDEFDPTKHKYDAEYYIENQVLPAVERILRAFGYRKEDLRYQKTRQVGLSAWLKPKGT

SEQ ID NO: 326 - protein, 774 aa, synthetic construct
MILDTDYITEDGKPVIRIFKKENGEFKIEYDRTFEPYFYALLKDDSAIEEVKKITAERHGTVVTVKRVEKVQKKFLGRPVEVWKLYFTHPQDVPAIRDKIREHPAVIDIYEYDIPFAKRYLIDKGLVPMEGDEELKMLAFDIEFLYHEGEEFAEGPILMISYADEEGARVITWKNVDLPYVDVVSTEREMIKRFLRVVKEKDPDVLITYNGDNFDFAYLKKRCEKLGINFALGRDGSEPKIQRMGDRFAVEVKGRIHFDLYPVIRRTINLPTYTLEAVYEAVFGQPKEKVYAEEITTAWETGENLERVARYSMEDAKVTYELGKEFLPMEAQLSRLIGQSLWDVSRSSTGNLVEWFLLRKAYERNELAPNKPDEKELARRRQSYEGGYVKEPERGLWENIVYLDFRSLYPSIIITHNVSPDTLNREGCKEYDVAPQVGHRFCKDFPGFIPSLLGDLLEERQKIKKKMKATIDPIERKLLDYRQRAIKILANSYYGYYGYARARWYCKECAESVTAWGREYITMTIKEIEEKYGFKVIYSDTDGFFATIPGADAETVKKKAMEFLKYINAKLPGALELEYEGFYKRGFFVTKKKYAVIDEEGKITTRGLEIVRRDWSEIAKETQARVLEALLKDGDVEKAVRIVKEVTEKLSKYEVPPEKLVIHEQITRDLKDYKATGPHVAVAKRLAARGVKIRPGTVISYIVLKGSGRIGDRAIPFDEFDPTKHKYDAEYYIENQVLPAVERILRAFGYRKEDLRYQKTRQVGLSAWLKPKGT

SEQ ID NO: 327 - protein, 774 aa, synthetic construct
MILDTDYITEDGKPVIRIFKKENGEFKIEYDRTFEPYFYALLKDDSAIEEVKKITAERHGTVVTVKRVEKVQKKFLGRPVEVWKLYFTHPQDVPAIRDKIREHPAVIDIYEYDIPFAKRYLIDKGLVPMEGDEELKMLAFDIEGLYHEGEEFAEGPILMISYADEEGARVITWKNVDLPYVDVVSTEREMIKRFLRVVKEKDPDVLITYNGDNFDFAYLKKRCEKLGINFALGRDGSEPKIQRMGDRFAVEVKGRIHFDLYPVIRRTINLPTYTLEAVYEAVFGQPKEKVYAEEITTAWETGENLERVARYSMEDAKVTYELGKEFLPMEAQLSRLIGQSLWDVSRSSTGNLVEWFLLRKAYERNELAPNKPDEKELARRRQSYEGGYVKEPERGLWENIVYLDFRSLYPSIIITHNVSPDTLNREGCKEYDVAPQVGHRFCKDFPGFIPSLLGDLLEERQKIKKKMKATIDPIERKLLDYRQRAIKILANSYYGYYGYARARWYCKECAESVTAWGREYITMTIKEIEEKYGFKVIYSDTDGFFATIPGADAETVKKKAMEFLKYINAKLPGALELEYEGFYKRGFFVTKKKYAVIDEEGKITTRGLEIVRRDWSEIAKETQARVLEALLKDGDVEKAVRIVKEVTEKLSKYEVPPEKLVIHEQITRDLKDYKATGPHVAVAKRLAARGVKIRPGTVISYIVLKGSGRIGDRAIPFDEFDPTKHKYDAEYYIENQVLPAVERILRAFGYRKEDLRYQKTRQVGLSAWLKPKGT

SEQ ID NO: 328 - protein, 774 aa, synthetic construct
MILDTDYITEDGKPVIRIFKKENGEFKIEYDRTFEPYFYALLKDDSAIEEVKKITAERHGTVVTVKRVEKVQKKFLGRPVEVWKLYFTHPQDVPAIRDKIREHPAVIDIYEYDIPFAKRYLIDKGLVPMEGDEELKMLAFDIEHLYHEGEEFAEGPILMISYADEEGARVITWKNVDLPYVDVVSTEREMIKRFLRVVKEKDPDVLITYNGDNFDFAYLKKRCEKLGINFALGRDGSEPKIQRMGDRFAVEVKGRIHFDLYPVIRRTINLPTYTLEAVYEAVFGQPKEKVYAEEITTAWETGENLERVARYSMEDAKVTYELGKEFLPMEAQLSRLIGQSLWDVSRSSTGNLVEWFLLRKAYERNELAPNKPDEKELARRRQSYEGGYVKEPERGLWENIVYLDFRSLYPSIIITHNVSPDTLNREGCKEYDVAPQVGHRFCKDFPGFIPSLLGDLLEERQKIKKKMKATIDPIERKLLDYRQRAIKILANSYYGYYGYARARWYCKECAESVTAWGREYITMTIKEIEEKYGFKVIYSDTDGFFATIPGADAETVKKKAMEFLKYINAKLPGALELEYEGFYKRGFFVTKKKYAVIDEEGKITTRGLEIVRRDWSEIAKETQARVLEALLKDGDVEKAVRIVKEVTEKLSKYEVPPEKLVIHEQITRDLKDYKATGPHVAVAKRLAARGVKIRPGTVISYIVLKGSGRIGDRAIPFDEFDPTKHKYDAEYYIENQVLPAVERILRAFGYRKEDLRYQKTRQVGLSAWLKPKGT

SEQ ID NO: 329 - protein, 774 aa, synthetic construct
MILDTDYITEDGKPVIRIFKKENGEFKIEYDRTFEPYFYALLKDDSAIEEVKKITAERHGTVVTVKRVEKVQKKFLGRPVEVWKLYFTHPQDVPAIRDKIREHPAVIDIYEYDIPFAKRYLIDKGLVPMEGDEELKMLAFDIEKLYHEGEEFAEGPILMISYADEEGARVITWKNVDLPYVDVVSTEREMIKRFLRVVKEKDPDVLITYNGDNFDFAYLKKRCEKLGINFALGRDGSEPKIQRMGDRFAVEVKGRIHFDLYPVIRRTINLPTYTLEAVYEAVFGQPKEKVYAEEITTAWETGENLERVARYSMEDAKVTYELGKEFLPMEAQLSRLIGQSLWDVSRSSTGNLVEWFLLRKAYERNELAPNKPDEKELARRRQSYEGGYVKEPERGLWENIVYLDFRSLYPSIIITHNVSPDTLNREGCKEYDVAPQVGHRFCKDFPGFIPSLLGDLLEERQKIKKKMKATIDPIERKLLDYRQRAIKILANSYYGYYGYARARWYCKECAESVTAWGREYITMTIKEIEEKYGFKVIYSDTDGFFATIPGADAETVKKKAMEFLKYINAKLPGALELEYEGFYKRGFFVTKKKYAVIDEEGKITTRGLEIVRRDWSEIAKETQARVLEALLKDGDVEKAVRIVKEVTEKLSKYEVPPEKLVIHEQITRDLKDYKATGPHVAVAKRLAARGVKIRPGTVISYIVLKGSGRIGDRAIPFDEFDPTKHKYDAEYYIENQVLPAVERILRAFGYRKEDLRYQKTRQVGLSAWLKPKGT

SEQ ID NO: 330 - protein, 774 aa, synthetic construct
MILDTDYITEDGKPVIRIFKKENGEFKIEYDRTFEPYFYALLKDDSAIEEVKKITAERHGTVVTVKRVEKVQKKFLGRPVEVWKLYFTHPQDVPAIRDKIREHPAVIDIYEYDIPFAKRYLIDKGLVPMEGDEELKMLAFDIELLYHEGEEFAEGPILMISYADEEGARVITWKNVDLPYVDVVSTEREMIKRFLRVVKEKDPDVLITYNGDNFDFAYLKKRCEKLGINFALGRDGSEPKIQRMGDRFAVEVKGRIHFDLYPVIRRTINLPTYTLEAVYEAVFGQPKEKVYAEEITTAWETGENLERVARYSMEDAKVTYELGKEFLPMEAQLSRLIGQSLWDVSRSSTGNLVEWFLLRKAYERNELAPNKPDEKELARRRQSYEGGYVKEPERGLWENIVYLDFRSLYPSIIITHNVSPDTLNREGCKEYDVAPQVGHRFCKDFPGFIPSLLGDLLEERQKIKKKMKATIDPIERKLLDYRQRAIKILANSYYGYYGYARARWYCKECAESVTAWGREYITMTIKEIEEKYGFKVIYSDTDGFFATIPGADAETVKKKAMEFLKYINAKLPGALELEYEGFYKRGFFVTKKKYAVIDEEGKITTRGLEIVRRDWSEIAKETQARVLEALLKDGDVEKAVRIVKEVTEKLSKYEVPPEKLVIHEQITRDLKDYKATGPHVAVAKRLAARGVKIRPGTVISYIVLKGSGRIGDRAIPFDEFDPTKHKYDAEYYIENQVLPAVERILRAFGYRKEDLRYQKTRQVGLSAWLKPKGT

SEQ ID NO: 331 - protein, 774 aa, synthetic construct
MILDTDYITEDGKPVIRIFKKENGEFKIEYDRTFEPYFYALLKDDSAIEEVKKITAERHGTVVTVKRVEKVQKKFLGRPVEVWKLYFTHPQDVPAIRDKIREHPAVIDIYEYDIPFAKRYLIDKGLVPMEGDEELKMLAFDIEMLYHEGEEFAEGPILMISYADEEGARVITWKNVDLPYVDVVSTEREMIKRFLRVVKEKDPDVLITYNGDNFDFAYLKKRCEKLGINFALGRDGSEPKIQRMGDRFAVEVKGRIHFDLYPVIRRTINLPTYTLEAVYEAVFGQPKEKVYAEEITTAWETGENLERVARYSMEDAKVTYELGKEFLPMEAQLSRLIGQSLWDVSRSSTGNLVEWFLLRKAYERNELAPNKPDEKELARRRQSYEGGYVKEPERGLWENIVYLDFRSLYPSIIITHNVSPDTLNREGCKEYDVAPQVGHRFCKDFPGFIPSLLGDLLEERQKIKKKMKATIDPIERKLLDYRQRAIKILANSYYGYYGYARARWYCKECAESVTAWGREYITMTIKEIEEKYGFKVIYSDTDGFFATIPGADAETVKKKAMEFLKYINAKLPGALELEYEGFYKRGFFVTKKKYAVIDEEGKITTRGLEIVRRDWSEIAKETQARVLEALLKDGDVEKAVRIVKEVTEKLSKYEVPPEKLVIHEQITRDLKDYKATGPHVAVAKRLAARGVKIRPGTVISYIVLKGSGRIGDRAIPFDEFDPTKHKYDAEYYIENQVLPAVERILRAFGYRKEDLRYQKTRQVGLSAWLKPKGT

SEQ ID NO: 332 - protein, 774 aa, synthetic construct
MILDTDYITEDGKPVIRIFKKENGEFKIEYDRTFEPYFYALLKDDSAIEEVKKITAERHGTVVTVKRVEKVQKKFLGRPVEVWKLYFTHPQDVPAIRDKIREHPAVIDIYEYDIPFAKRYLIDKGLVPMEGDEELKMLAFDIEPLYHEGEEFAEGPILMISYADEEGARVITWKNVDLPYVDVVSTEREMIKRFLRVVKEKDPDVLITYNGDNFDFAYLKKRCEKLGINFALGRDGSEPKIQRMGDRFAVEVKGRIHFDLYPVIRRTINLPTYTLEAVYEAVFGQPKEKVYAEEITTAWETGENLERVARYSMEDAKVTYELGKEFLPMEAQLSRLIGQSLWDVSRSSTGNLVEWFLLRKAYERNELAPNKPDEKELARRRQSYEGGYVKEPERGLWENIVYLDFRSLYPSIIITHNVSPDTLNREGCKEYDVAPQVGHRFCKDFPGFIPSLLGDLLEERQKIKKKMKATIDPIERKLLDYRQRAIKILANSYYGYYGYARARWYCKECAESVTAWGREYITMTIKEIEEKYGFKVIYSDTDGFFATIPGADAETVKKKAMEFLKYINAKLPGALELEYEGFYKRGFFVTKKKYAVIDEEGKITTRGLEIVRRDWSEIAKETQARVLEALLKDGDVEKAVRIVKEVTEKLSKYEVPPEKLVIHEQITRDLKDYKATGPHVAVAKRLAARGVKIRPGTVISYIVLKGSGRIGDRAIPFDEFDPTKHKYDAEYYIENQVLPAVERILRAFGYRKEDLRYQKTRQVGLSAWLKPKGT

SEQ ID NO: 333 - protein, 774 aa, synthetic construct
MILDTDYITEDGKPVIRIFKKENGEFKIEYDRTFEPYFYALLKDDSAIEEVKKITAERHGTVVTVKRVEKVQKKFLGRPVEVWKLYFTHPQDVPAIRDKIREHPAVIDIYEYDIPFAKRYLIDKGLVPMEGDEELKMLAFDIEQLYHEGEEFAEGPILMISYADEEGARVITWKNVDLPYVDVVSTEREMIKRFLRVVKEKDPDVLITYNGDNFDFAYLKKRCEKLGINFALGRDGSEPKIQRMGDRFAVEVKGRIHFDLYPVIRRTINLPTYTLEAVYEAVFGQPKEKVYAEEITTAWETGENLERVARYSMEDAKVTYELGKEFLPMEAQLSRLIGQSLWDVSRSSTGNLVEWFLLRKAYERNELAPNKPDEKELARRRQSYEGGYVKEPERGLWENIVYLDFRSLYPSIIITHNVSPDTLNREGCKEYDVAPQVGHRFCKDFPGFIPSLLGDLLEERQKIKKKMKATIDPIERKLLDYRQRAIKILANSYYGYYGYARARWYCKECAESVTAWGREYITMTIKEIEEKYGFKVIYSDTDGFFATIPGADAETVKKKAMEFLKYINAKLPGALELEYEGFYKRGFFVTKKKYAVIDEEGKITTRGLEIVRRDWSEIAKETQARVLEALLKDGDVEKAVRIVKEVTEKLSKYEVPPEKLVIHEQITRDLKDYKATGPHVAVAKRLAARGVKIRPGTVISYIVLKGSGRIGDRAIPFDEFDPTKHKYDAEYYIENQVLPAVERILRAFGYRKEDLRYQKTRQVGLSAWLKPKGT

SEQ ID NO: 334 - protein, 774 aa, synthetic construct
MILDTDYITEDGKPVIRIFKKENGEFKIEYDRTFEPYFYALLKDDSAIEEVKKITAERHGTVVTVKRVEKVQKKFLGRPVEVWKLYFTHPQDVPAIRDKIREHPAVIDIYEYDIPFAKRYLIDKGLVPMEGDEELKMLAFDIERLYHEGEEFAEGPILMISYADEEGARVITWKNVDLPYVDVVSTEREMIKRFLRVVKEKDPDVLITYNGDNFDFAYLKKRCEKLGINFALGRDGSEPKIQRMGDRFAVEVKGRIHFDLYPVIRRTINLPTYTLEAVYEAVFGQPKEKVYAEEITTAWETGENLERVARYSMEDAKVTYELGKEFLPMEAQLSRLIGQSLWDVSRSSTGNLVEWFLLRKAYERNELAPNKPDEKELARRRQSYEGGYVKEPERGLWENIVYLDFRSLYPSIIITHNVSPDTLNREGCKEYDVAPQVGHRFCKDFPGFIPSLLGDLLEERQKIKKKMKATIDPIERKLLDYRQRAIKILANSYYGYYGYARARWYCKECAESVTAWGREYITMTIKEIEEKYGFKVIYSDTDGFFATIPGADAETVKKKAMEFLKYINAKLPGALELEYEGFYKRGFFVTKKKYAVIDEEGKITTRGLEIVRRDWSEIAKETQARVLEALLKDGDVEKAVRIVKEVTEKLSKYEVPPEKLVIHEQITRDLKDYKATGPHVAVAKRLAARGVKIRPGTVISYIVLKGSGRIGDRAIPFDEFDPTKHKYDAEYYIENQVLPAVERILRAFGYRKEDLRYQKTRQVGLSAWLKPKGT

SEQ ID NO: 335 - protein, 774 aa, synthetic construct
MILDTDYITEDGKPVIRIFKKENGEFKIEYDRTFEPYFYALLKDDSAIEEVKKITAERHGTVVTVKRVEKVQKKFLGRPVEVWKLYFTHPQDVPAIRDKIREHPAVIDIYEYDIPFAKRYLIDKGLVPMEGDEELKMLAFDIEWLYHEGEEFAEGPILMISYADEEGARVITWKNVDLPYVDVVSTEREMIKRFLRVVKEKDPDVLITYNGDNFDFAYLKKRCEKLGINFALGRDGSEPKIQRMGDRFAVEVKGRIHFDLYPVIRRTINLPTYTLEAVYEAVFGQPKEKVYAEEITTAWETGENLERVARYSMEDAKVTYELGKEFLPMEAQLSRLIGQSLWDVSRSSTGNLVEWFLLRKAYERNELAPNKPDEKELARRRQSYEGGYVKEPERGLWENIVYLDFRSLYPSIIITHNVSPDTLNREGCKEYDVAPQVGHRFCKDFPGFIPSLLGDLLEERQKIKKKMKATIDPIERKLLDYRQRAIKILANSYYGYYGYARARWYCKECAESVTAWGREYITMTIKEIEEKYGFKVIYSDTDGFFATIPGADAETVKKKAMEFLKYINAKLPGALELEYEGFYKRGFFVTKKKYAVIDEEGKITTRGLEIVRRDWSEIAKETQARVLEALLKDGDVEKAVRIVKEVTEKLSKYEVPPEKLVIHEQITRDLKDYKATGPHVAVAKRLAARGVKIRPGTVISYIVLKGSGRIGDRAIPFDEFDPTKHKYDAEYYIENQVLPAVERILRAFGYRKEDLRYQKTRQVGLSAWLKPKGT

SEQ ID NO: 336 - protein, 774 aa, synthetic construct
MILDTDYITEDGKPVIRIFKKENGEFKIEYDRTFEPYFYALLKDDSAIEEVKKITAERHGTVVTVKRVEKVQKKFLGRPVEVWKLYFTHPQDVPAIRDKIREHPAVIDIYEYDIPFAKRYLIDKGLVPMEGDEELKMLAFDIEYLYHEGEEFAEGPILMISYADEEGARVITWKNVDLPYVDVVSTEREMIKRFLRVVKEKDPDVLITYNGDNFDFAYLKKRCEKLGINFALGRDGSEPKIQRMGDRFAVEVKGRIHFDLYPVIRRTINLPTYTLEAVYEAVFGQPKEKVYAEEITTAWETGENLERVARYSMEDAKVTYELGKEFLPMEAQLSRLIGQSLWDVSRSSTGNLVEWFLLRKAYERNELAPNKPDEKELARRRQSYEGGYVKEPERGLWENIVYLDFRSLYPSIIITHNVSPDTLNREGCKEYDVAPQVGHRFCKDFPGFIPSLLGDLLEERQKIKKKMKATIDPIERKLLDYRQRAIKILANSYYGYYGYARARWYCKECAESVTAWGREYITMTIKEIEEKYGFKVIYSDTDGFFATIPGADAETVKKKAMEFLKYINAKLPGALELEYEGFYKRGFFVTKKKYAVIDEEGKITTRGLEIVRRDWSEIAKETQARVLEALLKDGDVEKAVRIVKEVTEKLSKYEVPPEKLVIHEQITRDLKDYKATGPHVAVAKRLAARGVKIRPGTVISYIVLKGSGRIGDRAIPFDEFDPTKHKYDAEYYIENQVLPAVERILRAFGYRKEDLRYQKTRQVGLSAWLKPKGT

SEQ ID NO: 337 - protein, 774 aa, synthetic construct
MILDTDYITEDGKPVIRIFKKENGEFKIEYDRTFEPYFYALLKDDSAIEEVKKITAERHGTVVTVKRVEKVQKKFLGRPVEVWKLYFTHPQDVPAIRDKIREHPAVIDIYEYDIPFAKRYLIDKGLVPMEGDEELKMLAFDIETGYHEGEEFAEGPILMISYADEEGARVITWKNVDLPYVDVVSTEREMIKRFLRVVKEKDPDVLITYNGDNFDFAYLKKRCEKLGINFALGRDGSEPKIQRMGDRFAVEVKGRIHFDLYPVIRRTINLPTYTLEAVYEAVFGQPKEKVYAEEITTAWETGENLERVARYSMEDAKVTYELGKEFLPMEAQLSRLIGQSLWDVSRSSTGNLVEWFLLRKAYERNELAPNKPDEKELARRRQSYEGGYVKEPERGLWENIVYLDFRSLYPSIIITHNVSPDTLNREGCKEYDVAPQVGHRFCKDFPGFIPSLLGDLLEERQKIKKKMKATIDPIERKLLDYRQRAIKILANSYYGYYGYARARWYCKECAESVTAWGREYITMTIKEIEEKYGFKVIYSDTDGFFATIPGADAETVKKKAMEFLKYINAKLPGALELEYEGFYKRGFFVTKKKYAVIDEEGKITTRGLEIVRRDWSEIAKETQARVLEALLKDGDVEKAVRIVKEVTEKLSKYEVPPEKLVIHEQITRDLKDYKATGPHVAVAKRLAARGVKIRPGTVISYIVLKGSGRIGDRAIPFDEFDPTKHKYDAEYYIENQVLPAVERILRAFGYRKEDLRYQKTRQVGLSAWLKPKGT

SEQ ID NO: 338 - protein, 774 aa, synthetic construct
MILDTDYITEDGKPVIRIFKKENGEFKIEYDRTFEPYFYALLKDDSAIEEVKKITAERHGTVVTVKRVEKVQKKFLGRPVEVWKLYFTHPQDVPAIRDKIREHPAVIDIYEYDIPFAKRYLIDKGLVPMEGDEELKMLAFDIETLDHEGEEFAEGPILMISYADEEGARVITWKNVDLPYVDVVSTEREMIKRFLRVVKEKDPDVLITYNGDNFDFAYLKKRCEKLGINFALGRDGSEPKIQRMGDRFAVEVKGRIHFDLYPVIRRTINLPTYTLEAVYEAVFGQPKEKVYAEEITTAWETGENLERVARYSMEDAKVTYELGKEFLPMEAQLSRLIGQSLWDVSRSSTGNLVEWFLLRKAYERNELAPNKPDEKELARRRQSYEGGYVKEPERGLWENIVYLDFRSLYPSIIITHNVSPDTLNREGCKEYDVAPQVGHRFCKDFPGFIPSLLGDLLEERQKIKKKMKATIDPIERKLLDYRQRAIKILANSYYGYYGYARARWYCKECAESVTAWGREYITMTIKEIEEKYGFKVIYSDTDGFFATIPGADAETVKKKAMEFLKYINAKLPGALELEYEGFYKRGFFVTKKKYAVIDEEGKITTRGLEIVRRDWSEIAKETQARVLEALLKDGDVEKAVRIVKEVTEKLSKYEVPPEKLVIHEQITRDLKDYKATGPHVAVAKRLAARGVKIRPGTVISYIVLKGSGRIGDRAIPFDEFDPTKHKYDAEYYIENQVLPAVERILRAFGYRKEDLRYQKTRQVGLSAWLKPKGT

SEQ ID NO: 339 - protein, 774 aa, synthetic construct
MILDTDYITEDGKPVIRIFKKENGEFKIEYDRTFEPYFYALLKDDSAIEEVKKITAERHGTVVTVKRVEKVQKKFLGRPVEVWKLYFTHPQDVPAIRDKIREHPAVIDIYEYDIPFAKRYLIDKGLVPMEGDEELKMLAFDIETLEHEGEEFAEGPILMISYADEEGARVITWKNVDLPYVDVVSTEREMIKRFLRVVKEKDPDVLITYNGDNFDFAYLKKRCEKLGINFALGRDGSEPKIQRMGDRFAVEVKGRIHFDLYPVIRRTINLPTYTLEAVYEAVFGQPKEKVYAEEITTAWETGENLERVARYSMEDAKVTYELGKEFLPMEAQLSRLIGQSLWDVSRSSTGNLVEWFLLRKAYERNELAPNKPDEKELARRRQSYEGGYVKEPERGLWENIVYLDFRSLYPSIIITHNVSPDTLNREGCKEYDVAPQVGHRFCKDFPGFIPSLLGDLLEERQKIKKKMKATIDPIERKLLDYRQRAIKILANSYYGYYGYARARWYCKECAESVTAWGREYITMTIKEIEEKYGFKVIYSDTDGFFATIPGADAETVKKKAMEFLKYINAKLPGALELEYEGFYKRGFFVTKKKYAVIDEEGKITTRGLEIVRRDWSEIAKETQARVLEALLKDGDVEKAVRIVKEVTEKLSKYEVPPEKLVIHEQITRDLKDYKATGPHVAVAKRLAARGVKIRPGTVISYIVLKGSGRIGDRAIPFDEFDPTKHKYDAEYYIENQVLPAVERILRAFGYRKEDLRYQKTRQVGLSAWLKPKGT

SEQ ID NO: 340 - protein, 774 aa, synthetic construct
MILDTDYITEDGKPVIRIFKKENGEFKIEYDRTFEPYFYALLKDDSAIEEVKKITAERHGTVVTVKRVEKVQKKFLGRPVEVWKLYFTHPQDVPAIRDKIREHPAVIDIYEYDIPFAKRYLIDKGLVPMEGDEELKMLAFDIETLYHELEEFAEGPILMISYADEEGARVITWKNVDLPYVDVVSTEREMIKRFLRVVKEKDPDVLITYNGDNFDFAYLKKRCEKLGINFALGRDGSEPKIQRMGDRFAVEVKGRIHFDLYPVIRRTINLPTYTLEAVYEAVFGQPKEKVYAEEITTAWETGENLERVARYSMEDAKVTYELGKEFLPMEAQLSRLIGQSLWDVSRSSTGNLVEWFLLRKAYERNELAPNKPDEKELARRRQSYEGGYVKEPERGLWENIVYLDFRSLYPSIIITHNVSPDTLNREGCKEYDVAPQVGHRFCKDFPGFIPSLLGDLLEERQKIKKKMKATIDPIERKLLDYRQRAIKILANSYYGYYGYARARWYCKECAESVTAWGREYITMTIKEIEEKYGFKVIYSDTDGFFATIPGADAETVKKKAMEFLKYINAKLPGALELEYEGFYKRGFFVTKKKYAVIDEEGKITTRGLEIVRRDWSEIAKETQARVLEALLKDGDVEKAVRIVKEVTEKLSKYEVPPEKLVIHEQITRDLKDYKATGPHVAVAKRLAARGVKIRPGTVISYIVLKGSGRIGDRAIPFDEFDPTKHKYDAEYYIENQVLPAVERILRAFGYRKEDLRYQKTRQVGLSAWLKPKGT

SEQ ID NO: 341 - protein, 774 aa, synthetic construct
MILDTDYITEDGKPVIRIFKKENGEFKIEYDRTFEPYFYALLKDDSAIEEVKKITAERHGTVVTVKRVEKVQKKFLGRPVEVWKLYFTHPQDVPAIRDKIREHPAVIDIYEYDIPFAKRYLIDKGLVPMEGDEELKMLAFDIETLYHEGEEAAEGPILMISYADEEGARVITWKNVDLPYVDVVSTEREMIKRFLRVVKEKDPDVLITYNGDNFDFAYLKKRCEKLGINFALGRDGSEPKIQRMGDRFAVEVKGRIHFDLYPVIRRTINLPTYTLEAVYEAVFGQPKEKVYAEEITTAWETGENLERVARYSMEDAKVTYELGKEFLPMEAQLSRLIGQSLWDVSRSSTGNLVEWFLLRKAYERNELAPNKPDEKELARRRQSYEGGYVKEPERGLWENIVYLDFRSLYPSIIITHNVSPDTLNREGCKEYDVAPQVGHRFCKDFPGFIPSLLGDLLEERQKIKKKMKATIDPIERKLLDYRQRAIKILANSYYGYYGYARARWYCKECAESVTAWGREYITMTIKEIEEKYGFKVIYSDTDGFFATIPGADAETVKKKAMEFLKYINAKLPGALELEYEGFYKRGFFVTKKKYAVIDEEGKITTRGLEIVRRDWSEIAKETQARVLEALLKDGDVEKAVRIVKEVTEKLSKYEVPPEKLVIHEQITRDLKDYKATGPHVAVAKRLAARGVKIRPGTVISYIVLKGSGRIGDRAIPFDEFDPTKHKYDAEYYIENQVLPAVERILRAFGYRKEDLRYQKTRQVGLSAWLKPKGT

SEQ ID NO: 342 - protein, 774 aa, synthetic construct
MILDTDYITEDGKPVIRIFKKENGEFKIEYDRTFEPYFYALLKDDSAIEEVKKITAERHGTVVTVKRVEKVQKKFLGRPVEVWKLYFTHPQDVPAIRDKIREHPAVIDIYEYDIPFAKRYLIDKGLVPMEGDEELKMLAFDIETLYHEGEEDAEGPILMISYADEEGARVITWKNVDLPYVDVVSTEREMIKRFLRVVKEKDPDVLITYNGDNFDFAYLKKRCEKLGINFALGRDGSEPKIQRMGDRFAVEVKGRIHFDLYPVIRRTINLPTYTLEAVYEAVFGQPKEKVYAEEITTAWETGENLERVARYSMEDAKVTYELGKEFLPMEAQLSRLIGQSLWDVSRSSTGNLVEWFLLRKAYERNELAPNKPDEKELARRRQSYEGGYVKEPERGLWENIVYLDFRSLYPSIIITHNVSPDTLNREGCKEYDVAPQVGHRFCKDFPGFIPSLLGDLLEERQKIKKKMKATIDPIERKLLDYRQRAIKILANSYYGYYGYARARWYCKECAESVTAWGREYITMTIKEIEEKYGFKVIYSDTDGFFATIPGADAETVKKKAMEFLKYINAKLPGALELEYEGFYKRGFFVTKKKYAVIDEEGKITTRGLEIVRRDWSEIAKETQARVLEALLKDGDVEKAVRIVKEVTEKLSKYEVPPEKLVIHEQITRDLKDYKATGPHVAVAKRLAARGVKIRPGTVISYIVLKGSGRIGDRAIPFDEFDPTKHKYDAEYYIENQVLPAVERILRAFGYRKEDLRYQKTRQVGLSAWLKPKGT

SEQ ID NO: 343 - protein, 774 aa, synthetic construct
MILDTDYITEDGKPVIRIFKKENGEFKIEYDRTFEPYFYALLKDDSAIEEVKKITAERHGTVVTVKRVEKVQKKFLGRPVEVWKLYFTHPQDVPAIRDKIREHPAVIDIYEYDIPFAKRYLIDKGLVPMEGDEELKMLAFDIETLYHEGEEEAEGPILMISYADEEGARVITWKNVDLPYVDVVSTEREMIKRFLRVVKEKDPDVLITYNGDNFDFAYLKKRCEKLGINFALGRDGSEPKIQRMGDRFAVEVKGRIHFDLYPVIRRTINLPTYTLEAVYEAVFGQPKEKVYAEEITTAWETGENLERVARYSMEDAKVTYELGKEFLPMEAQLSRLIGQSLWDVSRSSTGNLVEWFLLRKAYERNELAPNKPDEKELARRRQSYEGGYVKEPERGLWENIVYLDFRSLYPSIIITHNVSPDTLNREGCKEYDVAPQVGHRFCKDFPGFIPSLLGDLLEERQKIKKKMKATIDPIERKLLDYRQRAIKILANSYYGYYGYARARWYCKECAESVTAWGREYITMTIKEIEEKYGFKVIYSDTDGFFATIPGADAETVKKKAMEFLKYINAKLPGALELEYEGFYKRGFFVTKKKYAVIDEEGKITTRGLEIVRRDWSEIAKETQARVLEALLKDGDVEKAVRIVKEVTEKLSKYEVPPEKLVIHEQITRDLKDYKATGPHVAVAKRLAARGVKIRPGTVISYIVLKGSGRIGDRAIPFDEFDPTKHKYDAEYYIENQVLPAVERILRAFGYRKEDLRYQKTRQVGLSAWLKPKGT

SEQ ID NO: 344 - protein, 774 aa, synthetic construct
MILDTDYITEDGKPVIRIFKKENGEFKIEYDRTFEPYFYALLKDDSAIEEVKKITAERHGTVVTVKRVEKVQKKFLGRPVEVWKLYFTHPQDVPAIRDKIREHPAVIDIYEYDIPFAKRYLIDKGLVPMEGDEELKMLAFDIETLYHEGEENAEGPILMISYADEEGARVITWKNVDLPYVDVVSTEREMIKRFLRVVKEKDPDVLITYNGDNFDFAYLKKRCEKLGINFALGRDGSEPKIQRMGDRFAVEVKGRIHFDLYPVIRRTINLPTYTLEAVYEAVFGQPKEKVYAEEITTAWETGENLERVARYSMEDAKVTYELGKEFLPMEAQLSRLIGQSLWDVSRSSTGNLVEWFLLRKAYERNELAPNKPDEKELARRRQSYEGGYVKEPERGLWENIVYLDFRSLYPSIIITHNVSPDTLNREGCKEYDVAPQVGHRFCKDFPGFIPSLLGDLLEERQKIKKKMKATIDPIERKLLDYRQRAIKILANSYYGYYGYARARWYCKECAESVTAWGREYITMTIKEIEEKYGFKVIYSDTDGFFATIPGADAETVKKKAMEFLKYINAKLPGALELEYEGFYKRGFFVTKKKYAVIDEEGKITTRGLEIVRRDWSEIAKETQARVLEALLKDGDVEKAVRIVKEVTEKLSKYEVPPEKLVIHEQITRDLKDYKATGPHVAVAKRLAARGVKIRPGTVISYIVLKGSGRIGDRAIPFDEFDPTKHKYDAEYYIENQVLPAVERILRAFGYRKEDLRYQKTRQVGLSAWLKPKGT

SEQ ID NO: 345 - protein, 774 aa, synthetic construct
MILDTDYITEDGKPVIRIFKKENGEFKIEYDRTFEPYFYALLKDDSAIEEVKKITAERHGTVVTVKRVEKVQKKFLGRPVEVWKLYFTHPQDVPAIRDKIREHPAVIDIYEYDIPFAKRYLIDKGLVPMEGDEELKMLAFDIETLYHEGEESAEGPILMISYADEEGARVITWKNVDLPYVDVVSTEREMIKRFLRVVKEKDPDVLITYNGDNFDFAYLKKRCEKLGINFALGRDGSEPKIQRMGDRFAVEVKGRIHFDLYPVIRRTINLPTYTLEAVYEAVFGQPKEKVYAEEITTAWETGENLERVARYSMEDAKVTYELGKEFLPMEAQLSRLIGQSLWDVSRSSTGNLVEWFLLRKAYERNELAPNKPDEKELARRRQSYEGGYVKEPERGLWENIVYLDFRSLYPSIIITHNVSPDTLNREGCKEYDVAPQVGHRFCKDFPGFIPSLLGDLLEERQKIKKKMKATIDPIERKLLDYRQRAIKILANSYYGYYGYARARWYCKECAESVTAWGREYITMTIKEIEEKYGFKVIYSDTDGFFATIPGADAETVKKKAMEFLKYINAKLPGALELEYEGFYKRGFFVTKKKYAVIDEEGKITTRGLEIVRRDWSEIAKETQARVLEALLKDGDVEKAVRIVKEVTEKLSKYEVPPEKLVIHEQITRDLKDYKATGPHVAVAKRLAARGVKIRPGTVISYIVLKGSGRIGDRAIPFDEFDPTKHKYDAEYYIENQVLPAVERILRAFGYRKEDLRYQKTRQVGLSAWLKPKGT

SEQ ID NO: 346 - protein, 774 aa, synthetic construct
MILDTDYITEDGKPVIRIFKKENGEFKIEYDRTFEPYFYALLKDDSAIEEVKKITAERHGTVVTVKRVEKVQKKFLGRPVEVWKLYFTHPQDVPAIRDKIREHPAVIDIYEYDIPFAKRYLIDKGLVPMEGDEELKMLAFDIETLYHEGEEFAPGPILMISYADEEGARVITWKNVDLPYVDVVSTEREMIKRFLRVVKEKDPDVLITYNGDNFDFAYLKKRCEKLGINFALGRDGSEPKIQRMGDRFAVEVKGRIHFDLYPVIRRTINLPTYTLEAVYEAVFGQPKEKVYAEEITTAWETGENLERVARYSMEDAKVTYELGKEFLPMEAQLSRLIGQSLWDVSRSSTGNLVEWFLLRKAYERNELAPNKPDEKELARRRQSYEGGYVKEPERGLWENIVYLDFRSLYPSIIITHNVSPDTLNREGCKEYDVAPQVGHRFCKDFPGFIPSLLGDLLEERQKIKKKMKATIDPIERKLLDYRQRAIKILANSYYGYYGYARARWYCKECAESVTAWGREYITMTIKEIEEKYGFKVIYSDTDGFFATIPGADAETVKKKAMEFLKYINAKLPGALELEYEGFYKRGFFVTKKKYAVIDEEGKITTRGLEIVRRDWSEIAKETQARVLEALLKDGDVEKAVRIVKEVTEKLSKYEVPPEKLVIHEQITRDLKDYKATGPHVAVAKRLAARGVKIRPGTVISYIVLKGSGRIGDRAIPFDEFDPTKHKYDAEYYIENQVLPAVERILRAFGYRKEDLRYQKTRQVGLSAWLKPKGT

SEQ ID NO: 347 - protein, 774 aa, synthetic construct
MILDTDYITEDGKPVIRIFKKENGEFKIEYDRTFEPYFYALLKDDSAIEEVKKITAERHGTVVTVKRVEKVQKKFLGRPVEVWKLYFTHPQDVPAIRDKIREHPAVIDIYEYDIPFAKRYLIDKGLVPMEGDEELKMLAFDIETLYHEGEEFAYGPILMISYADEEGARVITWKNVDLPYVDVVSTEREMIKRFLRVVKEKDPDVLITYNGDNFDFAYLKKRCEKLGINFALGRDGSEPKIQRMGDRFAVEVKGRIHFDLYPVIRRTINLPTYTLEAVYEAVFGQPKEKVYAEEITTAWETGENLERVARYSMEDAKVTYELGKEFLPMEAQLSRLIGQSLWDVSRSSTGNLVEWFLLRKAYERNELAPNKPDEKELARRRQSYEGGYVKEPERGLWENIVYLDFRSLYPSIIITHNVSPDTLNREGCKEYDVAPQVGHRFCKDFPGFIPSLLGDLLEERQKIKKKMKATIDPIERKLLDYRQRAIKILANSYYGYYGYARARWYCKECAESVTAWGREYITMTIKEIEEKYGFKVIYSDTDGFFATIPGADAETVKKKAMEFLKYINAKLPGALELEYEGFYKRGFFVTKKKYAVIDEEGKITTRGLEIVRRDWSEIAKETQARVLEALLKDGDVEKAVRIVKEVTEKLSKYEVPPEKLVIHEQITRDLKDYKATGPHVAVAKRLAARGVKIRPGTVISYIVLKGSGRIGDRAIPFDEFDPTKHKYDAEYYIENQVLPAVERILRAFGYRKEDLRYQKTRQVGLSAWLKPKGT

SEQ ID NO: 348 - protein, 774 aa, synthetic construct
MILDTDYITEDGKPVIRIFKKENGEFKIEYDRTFEPYFYALLKDDSAIEEVKKITAERHGTVVTVKRVEKVQKKFLGRPVEVWKLYFTHPQDVPAIRDKIREHPAVIDIYEYDIPFAKRYLIDKGLVPMEGDEELKMLAFDIETLYHEGEEFAEIPILMISYADEEGARVITWKNVDLPYVDVVSTEREMIKRFLRVVKEKDPDVLITYNGDNFDFAYLKKRCEKLGINFALGRDGSEPKIQRMGDRFAVEVKGRIHFDLYPVIRRTINLPTYTLEAVYEAVFGQPKEKVYAEEITTAWETGENLERVARYSMEDAKVTYELGKEFLPMEAQLSRLIGQSLWDVSRSSTGNLVEWFLLRKAYERNELAPNKPDEKELARRRQSYEGGYVKEPERGLWENIVYLDFRSLYPSIIITHNVSPDTLNREGCKEYDVAPQVGHRFCKDFPGFIPSLLGDLLEERQKIKKKMKATIDPIERKLLDYRQRAIKILANSYYGYYGYARARWYCKECAESVTAWGREYITMTIKEIEEKYGFKVIYSDTDGFFATIPGADAETVKKKAMEFLKYINAKLPGALELEYEGFYKRGFFVTKKKYAVIDEEGKITTRGLEIVRRDWSEIAKETQARVLEALLKDGDVEKAVRIVKEVTEKLSKYEVPPEKLVIHEQITRDLKDYKATGPHVAVAKRLAARGVKIRPGTVISYIVLKGSGRIGDRAIPFDEFDPTKHKYDAEYYIENQVLPAVERILRAFGYRKEDLRYQKTRQVGLSAWLKPKGT

SEQ ID NO: 349 - protein, 774 aa, synthetic construct
MILDTDYITEDGKPVIRIFKKENGEFKIEYDRTFEPYFYALLKDDSAIEEVKKITAERHGTVVTVKRVEKVQKKFLGRPVEVWKLYFTHPQDVPAIRDKIREHPAVIDIYEYDIPFAKRYLIDKGLVPMEGDEELKMLAFDIETLYHEGEEFAEVPILMISYADEEGARVITWKNVDLPYVDVVSTEREMIKRFLRVVKEKDPDVLITYNGDNFDFAYLKKRCEKLGINFALGRDGSEPKIQRMGDRFAVEVKGRIHFDLYPVIRRTINLPTYTLEAVYEAVFGQPKEKVYAEEITTAWETGENLERVARYSMEDAKVTYELGKEFLPMEAQLSRLIGQSLWDVSRSSTGNLVEWFLLRKAYERNELAPNKPDEKELARRRQSYEGGYVKEPERGLWENIVYLDFRSLYPSIIITHNVSPDTLNREGCKEYDVAPQVGHRFCKDFPGFIPSLLGDLLEERQKIKKKMKATIDPIERKLLDYRQRAIKILANSYYGYYGYARARWYCKECAESVTAWGREYITMTIKEIEEKYGFKVIYSDTDGFFATIPGADAETVKKKAMEFLKYINAKLPGALELEYEGFYKRGFFVTKKKYAVIDEEGKITTRGLEIVRRDWSEIAKETQARVLEALLKDGDVEKAVRIVKEVTEKLSKYEVPPEKLVIHEQITRDLKDYKATGPHVAVAKRLAARGVKIRPGTVISYIVLKGSGRIGDRAIPFDEFDPTKHKYDAEYYIENQVLPAVERILRAFGYRKEDLRYQKTRQVGLSAWLKPKGT

SEQ ID NO: 350 - protein, 774 aa, synthetic construct
MILDTDYITEDGKPVIRIFKKENGEFKIEYDRTFEPYFYALLKDDSAIEEVKKITAERHGTVVTVKRVEKVQKKFLGRPVEVWKLYFTHPQDVPAIRDKIREHPAVIDIYEYDIPFAKRYLIDKGLVPMEGDEELKMLAFDIETLYHEGEEFAEGPELMISYADEEGARVITWKNVDLPYVDVVSTEREMIKRFLRVVKEKDPDVLITYNGDNFDFAYLKKRCEKLGINFALGRDGSEPKIQRMGDRFAVEVKGRIHFDLYPVIRRTINLPTYTLEAVYEAVFGQPKEKVYAEEITTAWETGENLERVARYSMEDAKVTYELGKEFLPMEAQLSRLIGQSLWDVSRSSTGNLVEWFLLRKAYERNELAPNKPDEKELARRRQSYEGGYVKEPERGLWENIVYLDFRSLYPSIIITHNVSPDTLNREGCKEYDVAPQVGHRFCKDFPGFIPSLLGDLLEERQKIKKKMKATIDPIERKLLDYRQRAIKILANSYYGYYGYARARWYCKECAESVTAWGREYITMTIKEIEEKYGFKVIYSDTDGFFATIPGADAETVKKKAMEFLKYINAKLPGALELEYEGFYKRGFFVTKKKYAVIDEEGKITTRGLEIVRRDWSEIAKETQARVLEALLKDGDVEKAVRIVKEVTEKLSKYEVPPEKLVIHEQITRDLKDYKATGPHVAVAKRLAARGVKIRPGTVISYIVLKGSGRIGDRAIPFDEFDPTKHKYDAEYYIENQVLPAVERILRAFGYRKEDLRYQKTRQVGLSAWLKPKGT

SEQ ID NO: 351 - protein, 774 aa, synthetic construct
MILDTDYITEDGKPVIRIFKKENGEFKIEYDRTFEPYFYALLKDDSAIEEVKKITAERHGTVVTVKRVEKVQKKFLGRPVEVWKLYFTHPQDVPAIRDKIREHPAVIDIYEYDIPFAKRYLIDKGLVPMEGDEELKMLAFDIETLYHEGEEFAEGPFLMISYADEEGARVITWKNVDLPYVDVVSTEREMIKRFLRVVKEKDPDVLITYNGDNFDFAYLKKRCEKLGINFALGRDGSEPKIQRMGDRFAVEVKGRIHFDLYPVIRRTINLPTYTLEAVYEAVFGQPKEKVYAEEITTAWETGENLERVARYSMEDAKVTYELGKEFLPMEAQLSRLIGQSLWDVSRSSTGNLVEWFLLRKAYERNELAPNKPDEKELARRRQSYEGGYVKEPERGLWENIVYLDFRSLYPSIIITHNVSPDTLNREGCKEYDVAPQVGHRFCKDFPGFIPSLLGDLLEERQKIKKKMKATIDPIERKLLDYRQRAIKILANSYYGYYGYARARWYCKECAESVTAWGREYITMTIKEIEEKYGFKVIYSDTDGFFATIPGADAETVKKKAMEFLKYINAKLPGALELEYEGFYKRGFFVTKKKYAVIDEEGKITTRGLEIVRRDWSEIAKETQARVLEALLKDGDVEKAVRIVKEVTEKLSKYEVPPEKLVIHEQITRDLKDYKATGPHVAVAKRLAARGVKIRPGTVISYIVLKGSGRIGDRAIPFDEFDPTKHKYDAEYYIENQVLPAVERILRAFGYRKEDLRYQKTRQVGLSAWLKPKGT

SEQ ID NO: 352 - protein, 774 aa, synthetic construct
MILDTDYITEDGKPVIRIFKKENGEFKIEYDRTFEPYFYALLKDDSAIEEVKKITAERHGTVVTVKRVEKVQKKFLGRPVEVWKLYFTHPQDVPAIRDKIREHPAVIDIYEYDIPFAKRYLIDKGLVPMEGDEELKMLAFDIETLYHEGEEFAEGPRLMISYADEEGARVITWKNVDLPYVDVVSTEREMIKRFLRVVKEKDPDVLITYNGDNFDFAYLKKRCEKLGINFALGRDGSEPKIQRMGDRFAVEVKGRIHFDLYPVIRRTINLPTYTLEAVYEAVFGQPKEKVYAEEITTAWETGENLERVARYSMEDAKVTYELGKEFLPMEAQLSRLIGQSLWDVSRSSTGNLVEWFLLRKAYERNELAPNKPDEKELARRRQSYEGGYVKEPERGLWENIVYLDFRSLYPSIIITHNVSPDTLNREGCKEYDVAPQVGHRFCKDFPGFIPSLLGDLLEERQKIKKKMKATIDPIERKLLDYRQRAIKILANSYYGYYGYARARWYCKECAESVTAWGREYITMTIKEIEEKYGFKVIYSDTDGFFATIPGADAETVKKKAMEFLKYINAKLPGALELEYEGFYKRGFFVTKKKYAVIDEEGKITTRGLEIVRRDWSEIAKETQARVLEALLKDGDVEKAVRIVKEVTEKLSKYEVPPEKLVIHEQITRDLKDYKATGPHVAVAKRLAARGVKIRPGTVISYIVLKGSGRIGDRAIPFDEFDPTKHKYDAEYYIENQVLPAVERILRAFGYRKEDLRYQKTRQVGLSAWLKPKGT

SEQ ID NO: 353 - protein, 774 aa, synthetic construct
MILDTDYITEDGKPVIRIFKKENGEFKIEYDRTFEPYFYALLKDDSAIEEVKKITAERHGTVVTVKRVEKVQKKFLGRPVEVWKLYFTHPQDVPAIRDKIREHPAVIDIYEYDIPFAKRYLIDKGLVPMEGDEELKMLAFDIETLYHEGEEFAEGPWLMISYADEEGARVITWKNVDLPYVDVVSTEREMIKRFLRVVKEKDPDVLITYNGDNFDFAYLKKRCEKLGINFALGRDGSEPKIQRMGDRFAVEVKGRIHFDLYPVIRRTINLPTYTLEAVYEAVFGQPKEKVYAEEITTAWETGENLERVARYSMEDAKVTYELGKEFLPMEAQLSRLIGQSLWDVSRSSTGNLVEWFLLRKAYERNELAPNKPDEKELARRRQSYEGGYVKEPERGLWENIVYLDFRSLYPSIIITHNVSPDTLNREGCKEYDVAPQVGHRFCKDFPGFIPSLLGDLLEERQKIKKKMKATIDPIERKLLDYRQRAIKILANSYYGYYGYARARWYCKECAESVTAWGREYITMTIKEIEEKYGFKVIYSDTDGFFATIPGADAETVKKKAMEFLKYINAKLPGALELEYEGFYKRGFFVTKKKYAVIDEEGKITTRGLEIVRRDWSEIAKETQARVLEALLKDGDVEKAVRIVKEVTEKLSKYEVPPEKLVIHEQITRDLKDYKATGPHVAVAKRLAARGVKIRPGTVISYIVLKGSGRIGDRAIPFDEFDPTKHKYDAEYYIENQVLPAVERILRAFGYRKEDLRYQKTRQVGLSAWLKPKGT

SEQ ID NO: 354 - protein, 774 aa, synthetic construct
MILDTDYITEDGKPVIRIFKKENGEFKIEYDRTFEPYFYALLKDDSAIEEVKKITAERHGTVVTVKRVEKVQKKFLGRPVEVWKLYFTHPQDVPAIRDKIREHPAVIDIYEYDIPFAKRYLIDKGLVPMEGDEELKMLAFDIETLYHEGEEFAEGPYLMISYADEEGARVITWKNVDLPYVDVVSTEREMIKRFLRVVKEKDPDVLITYNGDNFDFAYLKKRCEKLGINFALGRDGSEPKIQRMGDRFAVEVKGRIHFDLYPVIRRTINLPTYTLEAVYEAVFGQPKEKVYAEEITTAWETGENLERVARYSMEDAKVTYELGKEFLPMEAQLSRLIGQSLWDVSRSSTGNLVEWFLLRKAYERNELAPNKPDEKELARRRQSYEGGYVKEPERGLWENIVYLDFRSLYPSIIITHNVSPDTLNREGCKEYDVAPQVGHRFCKDFPGFIPSLLGDLLEERQKIKKKMKATIDPIERKLLDYRQRAIKILANSYYGYYGYARARWYCKECAESVTAWGREYITMTIKEIEEKYGFKVIYSDTDGFFATIPGADAETVKKKAMEFLKYINAKLPGALELEYEGFYKRGFFVTKKKYAVIDEEGKITTRGLEIVRRDWSEIAKETQARVLEALLKDGDVEKAVRIVKEVTEKLSKYEVPPEKLVIHEQITRDLKDYKATGPHVAVAKRLAARGVKIRPGTVISYIVLKGSGRIGDRAIPFDEFDPTKHKYDAEYYIENQVLPAVERILRAFGYRKEDLRYQKTRQVGLSAWLKPKGT

SEQ ID NO: 355 - protein, 774 aa, synthetic construct
MILDTDYITEDGKPVIRIFKKENGEFKIEYDRTFEPYFYALLKDDSAIEEVKKITAERHGTVVTVKRVEKVQKKFLGRPVEVWKLYFTHPQDVPAIRDKIREHPAVIDIYEYDIPFAKRYLIDKGLVPMEGDEELKMLAFDIETLYHEGEEFAEGPIDMISYADEEGARVITWKNVDLPYVDVVSTEREMIKRFLRVVKEKDPDVLITYNGDNFDFAYLKKRCEKLGINFALGRDGSEPKIQRMGDRFAVEVKGRIHFDLYPVIRRTINLPTYTLEAVYEAVFGQPKEKVYAEEITTAWETGENLERVARYSMEDAKVTYELGKEFLPMEAQLSRLIGQSLWDVSRSSTGNLVEWFLLRKAYERNELAPNKPDEKELARRRQSYEGGYVKEPERGLWENIVYLDFRSLYPSIIITHNVSPDTLNREGCKEYDVAPQVGHRFCKDFPGFIPSLLGDLLEERQKIKKKMKATIDPIERKLLDYRQRAIKILANSYYGYYGYARARWYCKECAESVTAWGREYITMTIKEIEEKYGFKVIYSDTDGFFATIPGADAETVKKKAMEFLKYINAKLPGALELEYEGFYKRGFFVTKKKYAVIDEEGKITTRGLEIVRRDWSEIAKETQARVLEALLKDGDVEKAVRIVKEVTEKLSKYEVPPEKLVIHEQITRDLKDYKATGPHVAVAKRLAARGVKIRPGTVISYIVLKGSGRIGDRAIPFDEFDPTKHKYDAEYYIENQVLPAVERILRAFGYRKEDLRYQKTRQVGLSAWLKPKGT

SEQ ID NO: 356 - protein, 774 aa, synthetic construct
MILDTDYITEDGKPVIRIFKKENGEFKIEYDRTFEPYFYALLKDDSAIEEVKKITAERHGTVVTVKRVEKVQKKFLGRPVEVWKLYFTHPQDVPAIRDKIREHPAVIDIYEYDIPFAKRYLIDKGLVPMEGDEELKMLAFDIETLYHEGEEFAEGPIHMISYADEEGARVITWKNVDLPYVDVVSTEREMIKRFLRVVKEKDPDVLITYNGDNFDFAYLKKRCEKLGINFALGRDGSEPKIQRMGDRFAVEVKGRIHFDLYPVIRRTINLPTYTLEAVYEAVFGQPKEKVYAEEITTAWETGENLERVARYSMEDAKVTYELGKEFLPMEAQLSRLIGQSLWDVSRSSTGNLVEWFLLRKAYERNELAPNKPDEKELARRRQSYEGGYVKEPERGLWENIVYLDFRSLYPSIIITHNVSPDTLNREGCKEYDVAPQVGHRFCKDFPGFIPSLLGDLLEERQKIKKKMKATIDPIERKLLDYRQRAIKILANSYYGYYGYARARWYCKECAESVTAWGREYITMTIKEIEEKYGFKVIYSDTDGFFATIPGADAETVKKKAMEFLKYINAKLPGALELEYEGFYKRGFFVTKKKYAVIDEEGKITTRGLEIVRRDWSEIAKETQARVLEALLKDGDVEKAVRIVKEVTEKLSKYEVPPEKLVIHEQITRDLKDYKATGPHVAVAKRLAARGVKIRPGTVISYIVLKGSGRIGDRAIPFDEFDPTKHKYDAEYYIENQVLPAVERILRAFGYRKEDLRYQKTRQVGLSAWLKPKGT

SEQ ID NO: 357 - protein, 774 aa, synthetic construct
MILDTDYITEDGKPVIRIFKKENGEFKIEYDRTFEPYFYALLKDDSAIEEVKKITAERHGTVVTVKRVEKVQKKFLGRPVEVWKLYFTHPQDVPAIRDKIREHPAVIDIYEYDIPFAKRYLIDKGLVPMEGDEELKMLAFDIETLYHEGEEFAEGPIKMISYADEEGARVITWKNVDLPYVDVVSTEREMIKRFLRVVKEKDPDVLITYNGDNFDFAYLKKRCEKLGINFALGRDGSEPKIQRMGDRFAVEVKGRIHFDLYPVIRRTINLPTYTLEAVYEAVFGQPKEKVYAEEITTAWETGENLERVARYSMEDAKVTYELGKEFLPMEAQLSRLIGQSLWDVSRSSTGNLVEWFLLRKAYERNELAPNKPDEKELARRRQSYEGGYVKEPERGLWENIVYLDFRSLYPSIIITHNVSPDTLNREGCKEYDVAPQVGHRFCKDFPGFIPSLLGDLLEERQKIKKKMKATIDPIERKLLDYRQRAIKILANSYYGYYGYARARWYCKECAESVTAWGREYITMTIKEIEEKYGFKVIYSDTDGFFATIPGADAETVKKKAMEFLKYINAKLPGALELEYEGFYKRGFFVTKKKYAVIDEEGKITTRGLEIVRRDWSEIAKETQARVLEALLKDGDVEKAVRIVKEVTEKLSKYEVPPEKLVIHEQITRDLKDYKATGPHVAVAKRLAARGVKIRPGTVISYIVLKGSGRIGDRAIPFDEFDPTKHKYDAEYYIENQVLPAVERILRAFGYRKEDLRYQKTRQVGLSAWLKPKGT

SEQ ID NO: 358 - protein, 774 aa, synthetic construct
MILDTDYITEDGKPVIRIFKKENGEFKIEYDRTFEPYFYALLKDDSAIEEVKKITAERHGTVVTVKRVEKVQKKFLGRPVEVWKLYFTHPQDVPAIRDKIREHPAVIDIYEYDIPFAKRYLIDKGLVPMEGDEELKMLAFDIETLYHEGEEFAEGPIQMISYADEEGARVITWKNVDLPYVDVVSTEREMIKRFLRVVKEKDPDVLITYNGDNFDFAYLKKRCEKLGINFALGRDGSEPKIQRMGDRFAVEVKGRIHFDLYPVIRRTINLPTYTLEAVYEAVFGQPKEKVYAEEITTAWETGENLERVARYSMEDAKVTYELGKEFLPMEAQLSRLIGQSLWDVSRSSTGNLVEWFLLRKAYERNELAPNKPDEKELARRRQSYEGGYVKEPERGLWENIVYLDFRSLYPSIIITHNVSPDTLNREGCKEYDVAPQVGHRFCKDFPGFIPSLLGDLLEERQKIKKKMKATIDPIERKLLDYRQRAIKILANSYYGYYGYARARWYCKECAESVTAWGREYITMTIKEIEEKYGFKVIYSDTDGFFATIPGADAETVKKKAMEFLKYINAKLPGALELEYEGFYKRGFFVTKKKYAVIDEEGKITTRGLEIVRRDWSEIAKETQARVLEALLKDGDVEKAVRIVKEVTEKLSKYEVPPEKLVIHEQITRDLKDYKATGPHVAVAKRLAARGVKIRPGTVISYIVLKGSGRIGDRAIPFDEFDPTKHKYDAEYYIENQVLPAVERILRAFGYRKEDLRYQKTRQVGLSAWLKPKGT

SEQ ID NO: 359 - protein, 774 aa, synthetic construct
MILDTDYITEDGKPVIRIFKKENGEFKIEYDRTFEPYFYALLKDDSAIEEVKKITAERHGTVVTVKRVEKVQKKFLGRPVEVWKLYFTHPQDVPAIRDKIREHPAVIDIYEYDIPFAKRYLIDKGLVPMEGDEELKMLAFDIETLYHEGEEFAEGPIRMISYADEEGARVITWKNVDLPYVDVVSTEREMIKRFLRVVKEKDPDVLITYNGDNFDFAYLKKRCEKLGINFALGRDGSEPKIQRMGDRFAVEVKGRIHFDLYPVIRRTINLPTYTLEAVYEAVFGQPKEKVYAEEITTAWETGENLERVARYSMEDAKVTYELGKEFLPMEAQLSRLIGQSLWDVSRSSTGNLVEWFLLRKAYERNELAPNKPDEKELARRRQSYEGGYVKEPERGLWENIVYLDFRSLYPSIIITHNVSPDTLNREGCKEYDVAPQVGHRFCKDFPGFIPSLLGDLLEERQKIKKKMKATIDPIERKLLDYRQRAIKILANSYYGYYGYARARWYCKECAESVTAWGREYITMTIKEIEEKYGFKVIYSDTDGFFATIPGADAETVKKKAMEFLKYINAKLPGALELEYEGFYKRGFFVTKKKYAVIDEEGKITTRGLEIVRRDWSEIAKETQARVLEALLKDGDVEKAVRIVKEVTEKLSKYEVPPEKLVIHEQITRDLKDYKATGPHVAVAKRLAARGVKIRPGTVISYIVLKGSGRIGDRAIPFDEFDPTKHKYDAEYYIENQVLPAVERILRAFGYRKEDLRYQKTRQVGLSAWLKPKGT

SEQ ID NO: 360 - protein, 774 aa, synthetic construct
MILDTDYITEDGKPVIRIFKKENGEFKIEYDRTFEPYFYALLKDDSAIEEVKKITAERHGTVVTVKRVEKVQKKFLGRPVEVWKLYFTHPQDVPAIRDKIREHPAVIDIYEYDIPFAKRYLIDKGLVPMEGDEELKMLAFDIETLYHEGEEFAEGPIWMISYADEEGARVITWKNVDLPYVDVVSTEREMIKRFLRVVKEKDPDVLITYNGDNFDFAYLKKRCEKLGINFALGRDGSEPKIQRMGDRFAVEVKGRIHFDLYPVIRRTINLPTYTLEAVYEAVFGQPKEKVYAEEITTAWETGENLERVARYSMEDAKVTYELGKEFLPMEAQLSRLIGQSLWDVSRSSTGNLVEWFLLRKAYERNELAPNKPDEKELARRRQSYEGGYVKEPERGLWENIVYLDFRSLYPSIIITHNVSPDTLNREGCKEYDVAPQVGHRFCKDFPGFIPSLLGDLLEERQKIKKKMKATIDPIERKLLDYRQRAIKILANSYYGYYGYARARWYCKECAESVTAWGREYITMTIKEIEEKYGFKVIYSDTDGFFATIPGADAETVKKKAMEFLKYINAKLPGALELEYEGFYKRGFFVTKKKYAVIDEEGKITTRGLEIVRRDWSEIAKETQARVLEALLKDGDVEKAVRIVKEVTEKLSKYEVPPEKLVIHEQITRDLKDYKATGPHVAVAKRLAARGVKIRPGTVISYIVLKGSGRIGDRAIPFDEFDPTKHKYDAEYYIENQVLPAVERILRAFGYRKEDLRYQKTRQVGLSAWLKPKGT

SEQ ID NO: 361 - protein, 774 aa, synthetic construct
MILDTDYITEDGKPVIRIFKKENGEFKIEYDRTFEPYFYALLKDDSAIEEVKKITAERHGTVVTVKRVEKVQKKFLGRPVEVWKLYFTHPQDVPAIRDKIREHPAVIDIYEYDIPFAKRYLIDKGLVPMEGDEELKMLAFDIETLYHEGEEFAEGPIYMISYADEEGARVITWKNVDLPYVDVVSTEREMIKRFLRVVKEKDPDVLITYNGDNFDFAYLKKRCEKLGINFALGRDGSEPKIQRMGDRFAVEVKGRIHFDLYPVIRRTINLPTYTLEAVYEAVFGQPKEKVYAEEITTAWETGENLERVARYSMEDAKVTYELGKEFLPMEAQLSRLIGQSLWDVSRSSTGNLVEWFLLRKAYERNELAPNKPDEKELARRRQSYEGGYVKEPERGLWENIVYLDFRSLYPSIIITHNVSPDTLNREGCKEYDVAPQVGHRFCKDFPGFIPSLLGDLLEERQKIKKKMKATIDPIERKLLDYRQRAIKILANSYYGYYGYARARWYCKECAESVTAWGREYITMTIKEIEEKYGFKVIYSDTDGFFATIPGADAETVKKKAMEFLKYINAKLPGALELEYEGFYKRGFFVTKKKYAVIDEEGKITTRGLEIVRRDWSEIAKETQARVLEALLKDGDVEKAVRIVKEVTEKLSKYEVPPEKLVIHEQITRDLKDYKATGPHVAVAKRLAARGVKIRPGTVISYIVLKGSGRIGDRAIPFDEFDPTKHKYDAEYYIENQVLPAVERILRAFGYRKEDLRYQKTRQVGLSAWLKPKGT

SEQ ID NO: 362 - protein, 774 aa, synthetic construct
MILDTDYITEDGKPVIRIFKKENGEFKIEYDRTFEPYFYALLKDDSAIEEVKKITAERHGTVVTVKRVEKVQKKFLGRPVEVWKLYFTHPQDVPAIRDKIREHPAVIDIYEYDIPFAKRYLIDKGLVPMEGDEELKMLAFDIETLYHEGEEFAEGPILEISYADEEGARVITWKNVDLPYVDVVSTEREMIKRFLRVVKEKDPDVLITYNGDNFDFAYLKKRCEKLGINFALGRDGSEPKIQRMGDRFAVEVKGRIHFDLYPVIRRTINLPTYTLEAVYEAVFGQPKEKVYAEEITTAWETGENLERVARYSMEDAKVTYELGKEFLPMEAQLSRLIGQSLWDVSRSSTGNLVEWFLLRKAYERNELAPNKPDEKELARRRQSYEGGYVKEPERGLWENIVYLDFRSLYPSIIITHNVSPDTLNREGCKEYDVAPQVGHRFCKDFPGFIPSLLGDLLEERQKIKKKMKATIDPIERKLLDYRQRAIKILANSYYGYYGYARARWYCKECAESVTAWGREYITMTIKEIEEKYGFKVIYSDTDGFFATIPGADAETVKKKAMEFLKYINAKLPGALELEYEGFYKRGFFVTKKKYAVIDEEGKITTRGLEIVRRDWSEIAKETQARVLEALLKDGDVEKAVRIVKEVTEKLSKYEVPPEKLVIHEQITRDLKDYKATGPHVAVAKRLAARGVKIRPGTVISYIVLKGSGRIGDRAIPFDEFDPTKHKYDAEYYIENQVLPAVERILRAFGYRKEDLRYQKTRQVGLSAWLKPKGT

SEQ ID NO: 363 - protein, 774 aa, synthetic construct
MILDTDYITEDGKPVIRIFKKENGEFKIEYDRTFEPYFYALLKDDSAIEEVKKITAERHGTVVTVKRVEKVQKKFLGRPVEVWKLYFTHPQDVPAIRDKIREHPAVIDIYEYDIPFAKRYLIDKGLVPMEGDEELKMLAFDIETLYHEGEEFAEGPILGISYADEEGARVITWKNVDLPYVDVVSTEREMIKRFLRVVKEKDPDVLITYNGDNFDFAYLKKRCEKLGINFALGRDGSEPKIQRMGDRFAVEVKGRIHFDLYPVIRRTINLPTYTLEAVYEAVFGQPKEKVYAEEITTAWETGENLERVARYSMEDAKVTYELGKEFLPMEAQLSRLIGQSLWDVSRSSTGNLVEWFLLRKAYERNELAPNKPDEKELARRRQSYEGGYVKEPERGLWENIVYLDFRSLYPSIIITHNVSPDTLNREGCKEYDVAPQVGHRFCKDFPGFIPSLLGDLLEERQKIKKKMKATIDPIERKLLDYRQRAIKILANSYYGYYGYARARWYCKECAESVTAWGREYITMTIKEIEEKYGFKVIYSDTDGFFATIPGADAETVKKKAMEFLKYINAKLPGALELEYEGFYKRGFFVTKKKYAVIDEEGKITTRGLEIVRRDWSEIAKETQARVLEALLKDGDVEKAVRIVKEVTEKLSKYEVPPEKLVIHEQITRDLKDYKATGPHVAVAKRLAARGVKIRPGTVISYIVLKGSGRIGDRAIPFDEFDPTKHKYDAEYYIENQVLPAVERILRAFGYRKEDLRYQKTRQVGLSAWLKPKGT

SEQ ID NO: 364 - protein, 774 aa, synthetic construct
MILDTDYITEDGKPVIRIFKKENGEFKIEYDRTFEPYFYALLKDDSAIEEVKKITAERHGTVVTVKRVEKVQKKFLGRPVEVWKLYFTHPQDVPAIRDKIREHPAVIDIYEYDIPFAKRYLIDKGLVPMEGDEELKMLAFDIETLYHEGEEFAEGPILPISYADEEGARVITWKNVDLPYVDVVSTEREMIKRFLRVVKEKDPDVLITYNGDNFDFAYLKKRCEKLGINFALGRDGSEPKIQRMGDRFAVEVKGRIHFDLYPVIRRTINLPTYTLEAVYEAVFGQPKEKVYAEEITTAWETGENLERVARYSMEDAKVTYELGKEFLPMEAQLSRLIGQSLWDVSRSSTGNLVEWFLLRKAYERNELAPNKPDEKELARRRQSYEGGYVKEPERGLWENIVYLDFRSLYPSIIITHNVSPDTLNREGCKEYDVAPQVGHRFCKDFPGFIPSLLGDLLEERQKIKKKMKATIDPIERKLLDYRQRAIKILANSYYGYYGYARARWYCKECAESVTAWGREYITMTIKEIEEKYGFKVIYSDTDGFFATIPGADAETVKKKAMEFLKYINAKLPGALELEYEGFYKRGFFVTKKKYAVIDEEGKITTRGLEIVRRDWSEIAKETQARVLEALLKDGDVEKAVRIVKEVTEKLSKYEVPPEKLVIHEQITRDLKDYKATGPHVAVAKRLAARGVKIRPGTVISYIVLKGSGRIGDRAIPFDEFDPTKHKYDAEYYIENQVLPAVERILRAFGYRKEDLRYQKTRQVGLSAWLKPKGT

SEQ ID NO: 365 - protein, 774 aa, synthetic construct
MILDTDYITEDGKPVIRIFKKENGEFKIEYDRTFEPYFYALLKDDSAIEEVKKITAERHGTVVTVKRVEKVQKKFLGRPVEVWKLYFTHPQDVPAIRDKIREHPAVIDIYEYDIPFAKRYLIDKGLVPMEGDEELKMLAFDIETLYHEGEEFAEGPILRISYADEEGARVITWKNVDLPYVDVVSTEREMIKRFLRVVKEKDPDVLITYNGDNFDFAYLKKRCEKLGINFALGRDGSEPKIQRMGDRFAVEVKGRIHFDLYPVIRRTINLPTYTLEAVYEAVFGQPKEKVYAEEITTAWETGENLERVARYSMEDAKVTYELGKEFLPMEAQLSRLIGQSLWDVSRSSTGNLVEWFLLRKAYERNELAPNKPDEKELARRRQSYEGGYVKEPERGLWENIVYLDFRSLYPSIIITHNVSPDTLNREGCKEYDVAPQVGHRFCKDFPGFIPSLLGDLLEERQKIKKKMKATIDPIERKLLDYRQRAIKILANSYYGYYGYARARWYCKECAESVTAWGREYITMTIKEIEEKYGFKVIYSDTDGFFATIPGADAETVKKKAMEFLKYINAKLPGALELEYEGFYKRGFFVTKKKYAVIDEEGKITTRGLEIVRRDWSEIAKETQARVLEALLKDGDVEKAVRIVKEVTEKLSKYEVPPEKLVIHEQITRDLKDYKATGPHVAVAKRLAARGVKIRPGTVISYIVLKGSGRIGDRAIPFDEFDPTKHKYDAEYYIENQVLPAVERILRAFGYRKEDLRYQKTRQVGLSAWLKPKGT

SEQ ID NO: 366 - protein, 774 aa, synthetic construct
MILDTDYITEDGKPVIRIFKKENGEFKIEYDRTFEPYFYALLKDDSAIEEVKKITAERHGTVVTVKRVEKVQKKFLGRPVEVWKLYFTHPQDVPAIRDKIREHPAVIDIYEYDIPFAKRYLIDKGLVPMEGDEELKMLAFDIETLYHEGEEFAEGPILMFSYADEEGARVITWKNVDLPYVDVVSTEREMIKRFLRVVKEKDPDVLITYNGDNFDFAYLKKRCEKLGINFALGRDGSEPKIQRMGDRFAVEVKGRIHFDLYPVIRRTINLPTYTLEAVYEAVFGQPKEKVYAEEITTAWETGENLERVARYSMEDAKVTYELGKEFLPMEAQLSRLIGQSLWDVSRSSTGNLVEWFLLRKAYERNELAPNKPDEKELARRRQSYEGGYVKEPERGLWENIVYLDFRSLYPSIIITHNVSPDTLNREGCKEYDVAPQVGHRFCKDFPGFIPSLLGDLLEERQKIKKKMKATIDPIERKLLDYRQRAIKILANSYYGYYGYARARWYCKECAESVTAWGREYITMTIKEIEEKYGFKVIYSDTDGFFATIPGADAETVKKKAMEFLKYINAKLPGALELEYEGFYKRGFFVTKKKYAVIDEEGKITTRGLEIVRRDWSEIAKETQARVLEALLKDGDVEKAVRIVKEVTEKLSKYEVPPEKLVIHEQITRDLKDYKATGPHVAVAKRLAARGVKIRPGTVISYIVLKGSGRIGDRAIPFDEFDPTKHKYDAEYYIENQVLPAVERILRAFGYRKEDLRYQKTRQVGLSAWLKPKGT

SEQ ID NO: 367 - protein, 774 aa, synthetic construct
MILDTDYITEDGKPVIRIFKKENGEFKIEYDRTFEPYFYALLKDDSAIEEVKKITAERHGTVVTVKRVEKVQKKFLGRPVEVWKLYFTHPQDVPAIRDKIREHPAVIDIYEYDIPFAKRYLIDKGLVPMEGDEELKMLAFDIETLYHEGEEFAEGPILMIDYADEEGARVITWKNVDLPYVDVVSTEREMIKRFLRVVKEKDPDVLITYNGDNFDFAYLKKRCEKLGINFALGRDGSEPKIQRMGDRFAVEVKGRIHFDLYPVIRRTINLPTYTLEAVYEAVFGQPKEKVYAEEITTAWETGENLERVARYSMEDAKVTYELGKEFLPMEAQLSRLIGQSLWDVSRSSTGNLVEWFLLRKAYERNELAPNKPDEKELARRRQSYEGGYVKEPERGLWENIVYLDFRSLYPSIIITHNVSPDTLNREGCKEYDVAPQVGHRFCKDFPGFIPSLLGDLLEERQKIKKKMKATIDPIERKLLDYRQRAIKILANSYYGYYGYARARWYCKECAESVTAWGREYITMTIKEIEEKYGFKVIYSDTDGFFATIPGADAETVKKKAMEFLKYINAKLPGALELEYEGFYKRGFFVTKKKYAVIDEEGKITTRGLEIVRRDWSEIAKETQARVLEALLKDGDVEKAVRIVKEVTEKLSKYEVPPEKLVIHEQITRDLKDYKATGPHVAVAKRLAARGVKIRPGTVISYIVLKGSGRIGDRAIPFDEFDPTKHKYDAEYYIENQVLPAVERILRAFGYRKEDLRYQKTRQVGLSAWLKPKGT

SEQ ID NO: 368 - protein, 774 aa, synthetic construct
MILDTDYITEDGKPVIRIFKKENGEFKIEYDRTFEPYFYALLKDDSAIEEVKKITAERHGTVVTVKRVEKVQKKFLGRPVEVWKLYFTHPQDVPAIRDKIREHPAVIDIYEYDIPFAKRYLIDKGLVPMEGDEELKMLAFDIETLYHEGEEFAEGPILMIEYADEEGARVITWKNVDLPYVDVVSTEREMIKRFLRVVKEKDPDVLITYNGDNFDFAYLKKRCEKLGINFALGRDGSEPKIQRMGDRFAVEVKGRIHFDLYPVIRRTINLPTYTLEAVYEAVFGQPKEKVYAEEITTAWETGENLERVARYSMEDAKVTYELGKEFLPMEAQLSRLIGQSLWDVSRSSTGNLVEWFLLRKAYERNELAPNKPDEKELARRRQSYEGGYVKEPERGLWENIVYLDFRSLYPSIIITHNVSPDTLNREGCKEYDVAPQVGHRFCKDFPGFIPSLLGDLLEERQKIKKKMKATIDPIERKLLDYRQRAIKILANSYYGYYGYARARWYCKECAESVTAWGREYITMTIKEIEEKYGFKVIYSDTDGFFATIPGADAETVKKKAMEFLKYINAKLPGALELEYEGFYKRGFFVTKKKYAVIDEEGKITTRGLEIVRRDWSEIAKETQARVLEALLKDGDVEKAVRIVKEVTEKLSKYEVPPEKLVIHEQITRDLKDYKATGPHVAVAKRLAARGVKIRPGTVISYIVLKGSGRIGDRAIPFDEFDPTKHKYDAEYYIENQVLPAVERILRAFGYRKEDLRYQKTRQVGLSAWLKPKGT

SEQ ID NO: 369 - protein, 774 aa, synthetic construct
MILDTDYITEDGKPVIRIFKKENGEFKIEYDRTFEPYFYALLKDDSAIEEVKKITAERHGTVVTVKRVEKVQKKFLGRPVEVWKLYFTHPQDVPAIRDKIREHPAVIDIYEYDIPFAKRYLIDKGLVPMEGDEELKMLAFDIETLYHEGEEFAEGPILMIFYADEEGARVITWKNVDLPYVDVVSTEREMIKRFLRVVKEKDPDVLITYNGDNFDFAYLKKRCEKLGINFALGRDGSEPKIQRMGDRFAVEVKGRIHFDLYPVIRRTINLPTYTLEAVYEAVFGQPKEKVYAEEITTAWETGENLERVARYSMEDAKVTYELGKEFLPMEAQLSRLIGQSLWDVSRSSTGNLVEWFLLRKAYERNELAPNKPDEKELARRRQSYEGGYVKEPERGLWENIVYLDFRSLYPSIIITHNVSPDTLNREGCKEYDVAPQVGHRFCKDFPGFIPSLLGDLLEERQKIKKKMKATIDPIERKLLDYRQRAIKILANSYYGYYGYARARWYCKECAESVTAWGREYITMTIKEIEEKYGFKVIYSDTDGFFATIPGADAETVKKKAMEFLKYINAKLPGALELEYEGFYKRGFFVTKKKYAVIDEEGKITTRGLEIVRRDWSEIAKETQARVLEALLKDGDVEKAVRIVKEVTEKLSKYEVPPEKLVIHEQITRDLKDYKATGPHVAVAKRLAARGVKIRPGTVISYIVLKGSGRIGDRAIPFDEFDPTKHKYDAEYYIENQVLPAVERILRAFGYRKEDLRYQKTRQVGLSAWLKPKGT

SEQ ID NO: 370 - protein, 774 aa, synthetic construct
MILDTDYITEDGKPVIRIFKKENGEFKIEYDRTFEPYFYALLKDDSAIEEVKKITAERHGTVVTVKRVEKVQKKFLGRPVEVWKLYFTHPQDVPAIRDKIREHPAVIDIYEYDIPFAKRYLIDKGLVPMEGDEELKMLAFDIETLYHEGEEFAEGPILMIHYADEEGARVITWKNVDLPYVDVVSTEREMIKRFLRVVKEKDPDVLITYNGDNFDFAYLKKRCEKLGINFALGRDGSEPKIQRMGDRFAVEVKGRIHFDLYPVIRRTINLPTYTLEAVYEAVFGQPKEKVYAEEITTAWETGENLERVARYSMEDAKVTYELGKEFLPMEAQLSRLIGQSLWDVSRSSTGNLVEWFLLRKAYERNELAPNKPDEKELARRRQSYEGGYVKEPERGLWENIVYLDFRSLYPSIIITHNVSPDTLNREGCKEYDVAPQVGHRFCKDFPGFIPSLLGDLLEERQKIKKKMKATIDPIERKLLDYRQRAIKILANSYYGYYGYARARWYCKECAESVTAWGREYITMTIKEIEEKYGFKVIYSDTDGFFATIPGADAETVKKKAMEFLKYINAKLPGALELEYEGFYKRGFFVTKKKYAVIDEEGKITTRGLEIVRRDWSEIAKETQARVLEALLKDGDVEKAVRIVKEVTEKLSKYEVPPEKLVIHEQITRDLKDYKATGPHVAVAKRLAARGVKIRPGTVISYIVLKGSGRIGDRAIPFDEFDPTKHKYDAEYYIENQVLPAVERILRAFGYRKEDLRYQKTRQVGLSAWLKPKGT

SEQ ID NO: 371 - protein, 774 aa, synthetic construct
MILDTDYITEDGKPVIRIFKKENGEFKIEYDRTFEPYFYALLKDDSAIEEVKKITAERHGTVVTVKRVEKVQKKFLGRPVEVWKLYFTHPQDVPAIRDKIREHPAVIDIYEYDIPFAKRYLIDKGLVPMEGDEELKMLAFDIETLYHEGEEFAEGPILMIKYADEEGARVITWKNVDLPYVDVVSTEREMIKRFLRVVKEKDPDVLITYNGDNFDFAYLKKRCEKLGINFALGRDGSEPKIQRMGDRFAVEVKGRIHFDLYPVIRRTINLPTYTLEAVYEAVFGQPKEKVYAEEITTAWETGENLERVARYSMEDAKVTYELGKEFLPMEAQLSRLIGQSLWDVSRSSTGNLVEWFLLRKAYERNELAPNKPDEKELARRRQSYEGGYVKEPERGLWENIVYLDFRSLYPSIIITHNVSPDTLNREGCKEYDVAPQVGHRFCKDFPGFIPSLLGDLLEERQKIKKKMKATIDPIERKLLDYRQRAIKILANSYYGYYGYARARWYCKECAESVTAWGREYITMTIKEIEEKYGFKVIYSDTDGFFATIPGADAETVKKKAMEFLKYINAKLPGALELEYEGFYKRGFFVTKKKYAVIDEEGKITTRGLEIVRRDWSEIAKETQARVLEALLKDGDVEKAVRIVKEVTEKLSKYEVPPEKLVIHEQITRDLKDYKATGPHVAVAKRLAARGVKIRPGTVISYIVLKGSGRIGDRAIPFDEFDPTKHKYDAEYYIENQVLPAVERILRAFGYRKEDLRYQKTRQVGLSAWLKPKGT

SEQ ID NO: 372 - protein, 774 aa, synthetic construct
MILDTDYITEDGKPVIRIFKKENGEFKIEYDRTFEPYFYALLKDDSAIEEVKKITAERHGTVVTVKRVEKVQKKFLGRPVEVWKLYFTHPQDVPAIRDKIREHPAVIDIYEYDIPFAKRYLIDKGLVPMEGDEELKMLAFDIETLYHEGEEFAEGPILMILYADEEGARVITWKNVDLPYVDVVSTEREMIKRFLRVVKEKDPDVLITYNGDNFDFAYLKKRCEKLGINFALGRDGSEPKIQRMGDRFAVEVKGRIHFDLYPVIRRTINLPTYTLEAVYEAVFGQPKEKVYAEEITTAWETGENLERVARYSMEDAKVTYELGKEFLPMEAQLSRLIGQSLWDVSRSSTGNLVEWFLLRKAYERNELAPNKPDEKELARRRQSYEGGYVKEPERGLWENIVYLDFRSLYPSIIITHNVSPDTLNREGCKEYDVAPQVGHRFCKDFPGFIPSLLGDLLEERQKIKKKMKATIDPIERKLLDYRQRAIKILANSYYGYYGYARARWYCKECAESVTAWGREYITMTIKEIEEKYGFKVIYSDTDGFFATIPGADAETVKKKAMEFLKYINAKLPGALELEYEGFYKRGFFVTKKKYAVIDEEGKITTRGLEIVRRDWSEIAKETQARVLEALLKDGDVEKAVRIVKEVTEKLSKYEVPPEKLVIHEQITRDLKDYKATGPHVAVAKRLAARGVKIRPGTVISYIVLKGSGRIGDRAIPFDEFDPTKHKYDAEYYIENQVLPAVERILRAFGYRKEDLRYQKTRQVGLSAWLKPKGT

SEQ ID NO: 373 - protein, 774 aa, synthetic construct
MILDTDYITEDGKPVIRIFKKENGEFKIEYDRTFEPYFYALLKDDSAIEEVKKITAERHGTVVTVKRVEKVQKKFLGRPVEVWKLYFTHPQDVPAIRDKIREHPAVIDIYEYDIPFAKRYLIDKGLVPMEGDEELKMLAFDIETLYHEGEEFAEGPILMIMYADEEGARVITWKNVDLPYVDVVSTEREMIKRFLRVVKEKDPDVLITYNGDNFDFAYLKKRCEKLGINFALGRDGSEPKIQRMGDRFAVEVKGRIHFDLYPVIRRTINLPTYTLEAVYEAVFGQPKEKVYAEEITTAWETGENLERVARYSMEDAKVTYELGKEFLPMEAQLSRLIGQSLWDVSRSSTGNLVEWFLLRKAYERNELAPNKPDEKELARRRQSYEGGYVKEPERGLWENIVYLDFRSLYPSIIITHNVSPDTLNREGCKEYDVAPQVGHRFCKDFPGFIPSLLGDLLEERQKIKKKMKATIDPIERKLLDYRQRAIKILANSYYGYYGYARARWYCKECAESVTAWGREYITMTIKEIEEKYGFKVIYSDTDGFFATIPGADAETVKKKAMEFLKYINAKLPGALELEYEGFYKRGFFVTKKKYAVIDEEGKITTRGLEIVRRDWSEIAKETQARVLEALLKDGDVEKAVRIVKEVTEKLSKYEVPPEKLVIHEQITRDLKDYKATGPHVAVAKRLAARGVKIRPGTVISYIVLKGSGRIGDRAIPFDEFDPTKHKYDAEYYIENQVLPAVERILRAFGYRKEDLRYQKTRQVGLSAWLKPKGT

SEQ ID NO: 374 - protein, 774 aa, synthetic construct
MILDTDYITEDGKPVIRIFKKENGEFKIEYDRTFEPYFYALLKDDSAIEEVKKITAERHGTVVTVKRVEKVQKKFLGRPVEVWKLYFTHPQDVPAIRDKIREHPAVIDIYEYDIPFAKRYLIDKGLVPMEGDEELKMLAFDIETLYHEGEEFAEGPILMINYADEEGARVITWKNVDLPYVDVVSTEREMIKRFLRVVKEKDPDVLITYNGDNFDFAYLKKRCEKLGINFALGRDGSEPKIQRMGDRFAVEVKGRIHFDLYPVIRRTINLPTYTLEAVYEAVFGQPKEKVYAEEITTAWETGENLERVARYSMEDAKVTYELGKEFLPMEAQLSRLIGQSLWDVSRSSTGNLVEWFLLRKAYERNELAPNKPDEKELARRRQSYEGGYVKEPERGLWENIVYLDFRSLYPSIIITHNVSPDTLNREGCKEYDVAPQVGHRFCKDFPGFIPSLLGDLLEERQKIKKKMKATIDPIERKLLDYRQRAIKILANSYYGYYGYARARWYCKECAESVTAWGREYITMTIKEIEEKYGFKVIYSDTDGFFATIPGADAETVKKKAMEFLKYINAKLPGALELEYEGFYKRGFFVTKKKYAVIDEEGKITTRGLEIVRRDWSEIAKETQARVLEALLKDGDVEKAVRIVKEVTEKLSKYEVPPEKLVIHEQITRDLKDYKATGPHVAVAKRLAARGVKIRPGTVISYIVLKGSGRIGDRAIPFDEFDPTKHKYDAEYYIENQVLPAVERILRAFGYRKEDLRYQKTRQVGLSAWLKPKGT

SEQ ID NO: 375 - protein, 774 aa, synthetic construct
MILDTDYITEDGKPVIRIFKKENGEFKIEYDRTFEPYFYALLKDDSAIEEVKKITAERHGTVVTVKRVEKVQKKFLGRPVEVWKLYFTHPQDVPAIRDKIREHPAVIDIYEYDIPFAKRYLIDKGLVPMEGDEELKMLAFDIETLYHEGEEFAEGPILMIPYADEEGARVITWKNVDLPYVDVVSTEREMIKRFLRVVKEKDPDVLITYNGDNFDFAYLKKRCEKLGINFALGRDGSEPKIQRMGDRFAVEVKGRIHFDLYPVIRRTINLPTYTLEAVYEAVFGQPKEKVYAEEITTAWETGENLERVARYSMEDAKVTYELGKEFLPMEAQLSRLIGQSLWDVSRSSTGNLVEWFLLRKAYERNELAPNKPDEKELARRRQSYEGGYVKEPERGLWENIVYLDFRSLYPSIIITHNVSPDTLNREGCKEYDVAPQVGHRFCKDFPGFIPSLLGDLLEERQKIKKKMKATIDPIERKLLDYRQRAIKILANSYYGYYGYARARWYCKECAESVTAWGREYITMTIKEIEEKYGFKVIYSDTDGFFATIPGADAETVKKKAMEFLKYINAKLPGALELEYEGFYKRGFFVTKKKYAVIDEEGKITTRGLEIVRRDWSEIAKETQARVLEALLKDGDVEKAVRIVKEVTEKLSKYEVPPEKLVIHEQITRDLKDYKATGPHVAVAKRLAARGVKIRPGTVISYIVLKGSGRIGDRAIPFDEFDPTKHKYDAEYYIENQVLPAVERILRAFGYRKEDLRYQKTRQVGLSAWLKPKGT

SEQ ID NO: 376 - protein, 774 aa, synthetic construct
MILDTDYITEDGKPVIRIFKKENGEFKIEYDRTFEPYFYALLKDDSAIEEVKKITAERHGTVVTVKRVEKVQKKFLGRPVEVWKLYFTHPQDVPAIRDKIREHPAVIDIYEYDIPFAKRYLIDKGLVPMEGDEELKMLAFDIETLYHEGEEFAEGPILMIRYADEEGARVITWKNVDLPYVDVVSTEREMIKRFLRVVKEKDPDVLITYNGDNFDFAYLKKRCEKLGINFALGRDGSEPKIQRMGDRFAVEVKGRIHFDLYPVIRRTINLPTYTLEAVYEAVFGQPKEKVYAEEITTAWETGENLERVARYSMEDAKVTYELGKEFLPMEAQLSRLIGQSLWDVSRSSTGNLVEWFLLRKAYERNELAPNKPDEKELARRRQSYEGGYVKEPERGLWENIVYLDFRSLYPSIIITHNVSPDTLNREGCKEYDVAPQVGHRFCKDFPGFIPSLLGDLLEERQKIKKKMKATIDPIERKLLDYRQRAIKILANSYYGYYGYARARWYCKECAESVTAWGREYITMTIKEIEEKYGFKVIYSDTDGFFATIPGADAETVKKKAMEFLKYINAKLPGALELEYEGFYKRGFFVTKKKYAVIDEEGKITTRGLEIVRRDWSEIAKETQARVLEALLKDGDVEKAVRIVKEVTEKLSKYEVPPEKLVIHEQITRDLKDYKATGPHVAVAKRLAARGVKIRPGTVISYIVLKGSGRIGDRAIPFDEFDPTKHKYDAEYYIENQVLPAVERILRAFGYRKEDLRYQKTRQVGLSAWLKPKGT

SEQ ID NO: 377 - protein, 774 aa, synthetic construct
MILDTDYITEDGKPVIRIFKKENGEFKIEYDRTFEPYFYALLKDDSAIEEVKKITAERHGTVVTVKRVEKVQKKFLGRPVEVWKLYFTHPQDVPAIRDKIREHPAVIDIYEYDIPFAKRYLIDKGLVPMEGDEELKMLAFDIETLYHEGEEFAEGPILMITYADEEGARVITWKNVDLPYVDVVSTEREMIKRFLRVVKEKDPDVLITYNGDNFDFAYLKKRCEKLGINFALGRDGSEPKIQRMGDRFAVEVKGRIHFDLYPVIRRTINLPTYTLEAVYEAVFGQPKEKVYAEEITTAWETGENLERVARYSMEDAKVTYELGKEFLPMEAQLSRLIGQSLWDVSRSSTGNLVEWFLLRKAYERNELAPNKPDEKELARRRQSYEGGYVKEPERGLWENIVYLDFRSLYPSIIITHNVSPDTLNREGCKEYDVAPQVGHRFCKDFPGFIPSLLGDLLEERQKIKKKMKATIDPIERKLLDYRQRAIKILANSYYGYYGYARARWYCKECAESVTAWGREYITMTIKEIEEKYGFKVIYSDTDGFFATIPGADAETVKKKAMEFLKYINAKLPGALELEYEGFYKRGFFVTKKKYAVIDEEGKITTRGLEIVRRDWSEIAKETQARVLEALLKDGDVEKAVRIVKEVTEKLSKYEVPPEKLVIHEQITRDLKDYKATGPHVAVAKRLAARGVKIRPGTVISYIVLKGSGRIGDRAIPFDEFDPTKHKYDAEYYIENQVLPAVERILRAFGYRKEDLRYQKTRQVGLSAWLKPKGT

SEQ ID NO: 378 - protein, 774 aa, synthetic construct
MILDTDYITEDGKPVIRIFKKENGEFKIEYDRTFEPYFYALLKDDSAIEEVKKITAERHGTVVTVKRVEKVQKKFLGRPVEVWKLYFTHPQDVPAIRDKIREHPAVIDIYEYDIPFAKRYLIDKGLVPMEGDEELKMLAFDIETLYHEGEEFAEGPILMIWYADEEGARVITWKNVDLPYVDVVSTEREMIKRFLRVVKEKDPDVLITYNGDNFDFAYLKKRCEKLGINFALGRDGSEPKIQRMGDRFAVEVKGRIHFDLYPVIRRTINLPTYTLEAVYEAVFGQPKEKVYAEEITTAWETGENLERVARYSMEDAKVTYELGKEFLPMEAQLSRLIGQSLWDVSRSSTGNLVEWFLLRKAYERNELAPNKPDEKELARRRQSYEGGYVKEPERGLWENIVYLDFRSLYPSIIITHNVSPDTLNREGCKEYDVAPQVGHRFCKDFPGFIPSLLGDLLEERQKIKKKMKATIDPIERKLLDYRQRAIKILANSYYGYYGYARARWYCKECAESVTAWGREYITMTIKEIEEKYGFKVIYSDTDGFFATIPGADAETVKKKAMEFLKYINAKLPGALELEYEGFYKRGFFVTKKKYAVIDEEGKITTRGLEIVRRDWSEIAKETQARVLEALLKDGDVEKAVRIVKEVTEKLSKYEVPPEKLVIHEQITRDLKDYKATGPHVAVAKRLAARGVKIRPGTVISYIVLKGSGRIGDRAIPFDEFDPTKHKYDAEYYIENQVLPAVERILRAFGYRKEDLRYQKTRQVGLSAWLKPKGT

SEQ ID NO: 379 - protein, 774 aa, synthetic construct
MILDTDYITEDGKPVIRIFKKENGEFKIEYDRTFEPYFYALLKDDSAIEEVKKITAERHGTVVTVKRVEKVQKKFLGRPVEVWKLYFTHPQDVPAIRDKIREHPAVIDIYEYDIPFAKRYLIDKGLVPMEGDEELKMLAFDIETLYHEGEEFAEGPILMIYYADEEGARVITWKNVDLPYVDVVSTEREMIKRFLRVVKEKDPDVLITYNGDNFDFAYLKKRCEKLGINFALGRDGSEPKIQRMGDRFAVEVKGRIHFDLYPVIRRTINLPTYTLEAVYEAVFGQPKEKVYAEEITTAWETGENLERVARYSMEDAKVTYELGKEFLPMEAQLSRLIGQSLWDVSRSSTGNLVEWFLLRKAYERNELAPNKPDEKELARRRQSYEGGYVKEPERGLWENIVYLDFRSLYPSIIITHNVSPDTLNREGCKEYDVAPQVGHRFCKDFPGFIPSLLGDLLEERQKIKKKMKATIDPIERKLLDYRQRAIKILANSYYGYYGYARARWYCKECAESVTAWGREYITMTIKEIEEKYGFKVIYSDTDGFFATIPGADAETVKKKAMEFLKYINAKLPGALELEYEGFYKRGFFVTKKKYAVIDEEGKITTRGLEIVRRDWSEIAKETQARVLEALLKDGDVEKAVRIVKEVTEKLSKYEVPPEKLVIHEQITRDLKDYKATGPHVAVAKRLAARGVKIRPGTVISYIVLKGSGRIGDRAIPFDEFDPTKHKYDAEYYIENQVLPAVERILRAFGYRKEDLRYQKTRQVGLSAWLKPKGT

SEQ ID NO: 380 - protein, 774 aa, synthetic construct
MILDTDYITEDGKPVIRIFKKENGEFKIEYDRTFEPYFYALLKDDSAIEEVKKITAERHGTVVTVKRVEKVQKKFLGRPVEVWKLYFTHPQDVPAIRDKIREHPAVIDIYEYDIPFAKRYLIDKGLVPMEGDEELKMLAFDIETLYHEGEEFAEGPILMISPADEEGARVITWKNVDLPYVDVVSTEREMIKRFLRVVKEKDPDVLITYNGDNFDFAYLKKRCEKLGINFALGRDGSEPKIQRMGDRFAVEVKGRIHFDLYPVIRRTINLPTYTLEAVYEAVFGQPKEKVYAEEITTAWETGENLERVARYSMEDAKVTYELGKEFLPMEAQLSRLIGQSLWDVSRSSTGNLVEWFLLRKAYERNELAPNKPDEKELARRRQSYEGGYVKEPERGLWENIVYLDFRSLYPSIIITHNVSPDTLNREGCKEYDVAPQVGHRFCKDFPGFIPSLLGDLLEERQKIKKKMKATIDPIERKLLDYRQRAIKILANSYYGYYGYARARWYCKECAESVTAWGREYITMTIKEIEEKYGFKVIYSDTDGFFATIPGADAETVKKKAMEFLKYINAKLPGALELEYEGFYKRGFFVTKKKYAVIDEEGKITTRGLEIVRRDWSEIAKETQARVLEALLKDGDVEKAVRIVKEVTEKLSKYEVPPEKLVIHEQITRDLKDYKATGPHVAVAKRLAARGVKIRPGTVISYIVLKGSGRIGDRAIPFDEFDPTKHKYDAEYYIENQVLPAVERILRAFGYRKEDLRYQKTRQVGLSAWLKPKGT

SEQ ID NO: 381 - protein, 774 aa, synthetic construct
MILDTDYITEDGKPVIRIFKKENGEFKIEYDRTFEPYFYALLKDDSAIEEVKKITAERHGTVVTVKRVEKVQKKFLGRPVEVWKLYFTHPQDVPAIRDKIREHPAVIDIYEYDIPFAKRYLIDKGLVPMEGDEELKMLAFDIETLYHEGEEFAEGPILMISYADEEGCRVITWKNVDLPYVDVVSTEREMIKRFLRVVKEKDPDVLITYNGDNFDFAYLKKRCEKLGINFALGRDGSEPKIQRMGDRFAVEVKGRIHFDLYPVIRRTINLPTYTLEAVYEAVFGQPKEKVYAEEITTAWETGENLERVARYSMEDAKVTYELGKEFLPMEAQLSRLIGQSLWDVSRSSTGNLVEWFLLRKAYERNELAPNKPDEKELARRRQSYEGGYVKEPERGLWENIVYLDFRSLYPSIIITHNVSPDTLNREGCKEYDVAPQVGHRFCKDFPGFIPSLLGDLLEERQKIKKKMKATIDPIERKLLDYRQRAIKILANSYYGYYGYARARWYCKECAESVTAWGREYITMTIKEIEEKYGFKVIYSDTDGFFATIPGADAETVKKKAMEFLKYINAKLPGALELEYEGFYKRGFFVTKKKYAVIDEEGKITTRGLEIVRRDWSEIAKETQARVLEALLKDGDVEKAVRIVKEVTEKLSKYEVPPEKLVIHEQITRDLKDYKATGPHVAVAKRLAARGVKIRPGTVISYIVLKGSGRIGDRAIPFDEFDPTKHKYDAEYYIENQVLPAVERILRAFGYRKEDLRYQKTRQVGLSAWLKPKGT

SEQ ID NO: 382 - protein, 774 aa, synthetic construct
MILDTDYITEDGKPVIRIFKKENGEFKIEYDRTFEPYFYALLKDDSAIEEVKKITAERHGTVVTVKRVEKVQKKFLGRPVEVWKLYFTHPQDVPAIRDKIREHPAVIDIYEYDIPFAKRYLIDKGLVPMEGDEELKMLAFDIETLYHEGEEFAEGPILMISYADEEGERVITWKNVDLPYVDVVSTEREMIKRFLRVVKEKDPDVLITYNGDNFDFAYLKKRCEKLGINFALGRDGSEPKIQRMGDRFAVEVKGRIHFDLYPVIRRTINLPTYTLEAVYEAVFGQPKEKVYAEEITTAWETGENLERVARYSMEDAKVTYELGKEFLPMEAQLSRLIGQSLWDVSRSSTGNLVEWFLLRKAYERNELAPNKPDEKELARRRQSYEGGYVKEPERGLWENIVYLDFRSLYPSIIITHNVSPDTLNREGCKEYDVAPQVGHRFCKDFPGFIPSLLGDLLEERQKIKKKMKATIDPIERKLLDYRQRAIKILANSYYGYYGYARARWYCKECAESVTAWGREYITMTIKEIEEKYGFKVIYSDTDGFFATIPGADAETVKKKAMEFLKYINAKLPGALELEYEGFYKRGFFVTKKKYAVIDEEGKITTRGLEIVRRDWSEIAKETQARVLEALLKDGDVEKAVRIVKEVTEKLSKYEVPPEKLVIHEQITRDLKDYKATGPHVAVAKRLAARGVKIRPGTVISYIVLKGSGRIGDRAIPFDEFDPTKHKYDAEYYIENQVLPAVERILRAFGYRKEDLRYQKTRQVGLSAWLKPKGT

SEQ ID NO: 383 - protein, 774 aa, synthetic construct
MILDTDYITEDGKPVIRIFKKENGEFKIEYDRTFEPYFYALLKDDSAIEEVKKITAERHGTVVTVKRVEKVQKKFLGRPVEVWKLYFTHPQDVPAIRDKIREHPAVIDIYEYDIPFAKRYLIDKGLVPMEGDEELKMLAFDIETLYHEGEEFAEGPILMISYADEEGFRVITWKNVDLPYVDVVSTEREMIKRFLRVVKEKDPDVLITYNGDNFDFAYLKKRCEKLGINFALGRDGSEPKIQRMGDRFAVEVKGRIHFDLYPVIRRTINLPTYTLEAVYEAVFGQPKEKVYAEEITTAWETGENLERVARYSMEDAKVTYELGKEFLPMEAQLSRLIGQSLWDVSRSSTGNLVEWFLLRKAYERNELAPNKPDEKELARRRQSYEGGYVKEPERGLWENIVYLDFRSLYPSIIITHNVSPDTLNREGCKEYDVAPQVGHRFCKDFPGFIPSLLGDLLEERQKIKKKMKATIDPIERKLLDYRQRAIKILANSYYGYYGYARARWYCKECAESVTAWGREYITMTIKEIEEKYGFKVIYSDTDGFFATIPGADAETVKKKAMEFLKYINAKLPGALELEYEGFYKRGFFVTKKKYAVIDEEGKITTRGLEIVRRDWSEIAKETQARVLEALLKDGDVEKAVRIVKEVTEKLSKYEVPPEKLVIHEQITRDLKDYKATGPHVAVAKRLAARGVKIRPGTVISYIVLKGSGRIGDRAIPFDEFDPTKHKYDAEYYIENQVLPAVERILRAFGYRKEDLRYQKTRQVGLSAWLKPKGT

SEQ ID NO: 384 - protein, 774 aa, synthetic construct
MILDTDYITEDGKPVIRIFKKENGEFKIEYDRTFEPYFYALLKDDSAIEEVKKITAERHGTVVTVKRVEKVQKKFLGRPVEVWKLYFTHPQDVPAIRDKIREHPAVIDIYEYDIPFAKRYLIDKGLVPMEGDEELKMLAFDIETLYHEGEEFAEGPILMISYADEEGGRVITWKNVDLPYVDVVSTEREMIKRFLRVVKEKDPDVLITYNGDNFDFAYLKKRCEKLGINFALGRDGSEPKIQRMGDRFAVEVKGRIHFDLYPVIRRTINLPTYTLEAVYEAVFGQPKEKVYAEEITTAWETGENLERVARYSMEDAKVTYELGKEFLPMEAQLSRLIGQSLWDVSRSSTGNLVEWFLLRKAYERNELAPNKPDEKELARRRQSYEGGYVKEPERGLWENIVYLDFRSLYPSIIITHNVSPDTLNREGCKEYDVAPQVGHRFCKDFPGFIPSLLGDLLEERQKIKKKMKATIDPIERKLLDYRQRAIKILANSYYGYYGYARARWYCKECAESVTAWGREYITMTIKEIEEKYGFKVIYSDTDGFFATIPGADAETVKKKAMEFLKYINAKLPGALELEYEGFYKRGFFVTKKKYAVIDEEGKITTRGLEIVRRDWSEIAKETQARVLEALLKDGDVEKAVRIVKEVTEKLSKYEVPPEKLVIHEQITRDLKDYKATGPHVAVAKRLAARGVKIRPGTVISYIVLKGSGRIGDRAIPFDEFDPTKHKYDAEYYIENQVLPAVERILRAFGYRKEDLRYQKTRQVGLSAWLKPKGT

SEQ ID NO: 385 - protein, 774 aa, synthetic construct
MILDTDYITEDGKPVIRIFKKENGEFKIEYDRTFEPYFYALLKDDSAIEEVKKITAERHGTVVTVKRVEKVQKKFLGRPVEVWKLYFTHPQDVPAIRDKIREHPAVIDIYEYDIPFAKRYLIDKGLVPMEGDEELKMLAFDIETLYHEGEEFAEGPILMISYADEEGNRVITWKNVDLPYVDVVSTEREMIKRFLRVVKEKDPDVLITYNGDNFDFAYLKKRCEKLGINFALGRDGSEPKIQRMGDRFAVEVKGRIHFDLYPVIRRTINLPTYTLEAVYEAVFGQPKEKVYAEEITTAWETGENLERVARYSMEDAKVTYELGKEFLPMEAQLSRLIGQSLWDVSRSSTGNLVEWFLLRKAYERNELAPNKPDEKELARRRQSYEGGYVKEPERGLWENIVYLDFRSLYPSIIITHNVSPDTLNREGCKEYDVAPQVGHRFCKDFPGFIPSLLGDLLEERQKIKKKMKATIDPIERKLLDYRQRAIKILANSYYGYYGYARARWYCKECAESVTAWGREYITMTIKEIEEKYGFKVIYSDTDGFFATIPGADAETVKKKAMEFLKYINAKLPGALELEYEGFYKRGFFVTKKKYAVIDEEGKITTRGLEIVRRDWSEIAKETQARVLEALLKDGDVEKAVRIVKEVTEKLSKYEVPPEKLVIHEQITRDLKDYKATGPHVAVAKRLAARGVKIRPGTVISYIVLKGSGRIGDRAIPFDEFDPTKHKYDAEYYIENQVLPAVERILRAFGYRKEDLRYQKTRQVGLSAWLKPKGT

SEQ ID NO: 386 - protein, 774 aa, synthetic construct
MILDTDYITEDGKPVIRIFKKENGEFKIEYDRTFEPYFYALLKDDSAIEEVKKITAERHGTVVTVKRVEKVQKKFLGRPVEVWKLYFTHPQDVPAIRDKIREHPAVIDIYEYDIPFAKRYLIDKGLVPMEGDEELKMLAFDIETLYHEGEEFAEGPILMISYADEEGTRVITWKNVDLPYVDVVSTEREMIKRFLRVVKEKDPDVLITYNGDNFDFAYLKKRCEKLGINFALGRDGSEPKIQRMGDRFAVEVKGRIHFDLYPVIRRTINLPTYTLEAVYEAVFGQPKEKVYAEEITTAWETGENLERVARYSMEDAKVTYELGKEFLPMEAQLSRLIGQSLWDVSRSSTGNLVEWFLLRKAYERNELAPNKPDEKELARRRQSYEGGYVKEPERGLWENIVYLDFRSLYPSIIITHNVSPDTLNREGCKEYDVAPQVGHRFCKDFPGFIPSLLGDLLEERQKIKKKMKATIDPIERKLLDYRQRAIKILANSYYGYYGYARARWYCKECAESVTAWGREYITMTIKEIEEKYGFKVIYSDTDGFFATIPGADAETVKKKAMEFLKYINAKLPGALELEYEGFYKRGFFVTKKKYAVIDEEGKITTRGLEIVRRDWSEIAKETQARVLEALLKDGDVEKAVRIVKEVTEKLSKYEVPPEKLVIHEQITRDLKDYKATGPHVAVAKRLAARGVKIRPGTVISYIVLKGSGRIGDRAIPFDEFDPTKHKYDAEYYIENQVLPAVERILRAFGYRKEDLRYQKTRQVGLSAWLKPKGT

SEQ ID NO: 387 - protein, 774 aa, synthetic construct
MILDTDYITEDGKPVIRIFKKENGEFKIEYDRTFEPYFYALLKDDSAIEEVKKITAERHGTVVTVKRVEKVQKKFLGRPVEVWKLYFTHPQDVPAIRDKIREHPAVIDIYEYDIPFAKRYLIDKGLVPMEGDEELKMLAFDIETLYHEGEEFAEGPILMISYADEEGARAITWKNVDLPYVDVVSTEREMIKRFLRVVKEKDPDVLITYNGDNFDFAYLKKRCEKLGINFALGRDGSEPKIQRMGDRFAVEVKGRIHFDLYPVIRRTINLPTYTLEAVYEAVFGQPKEKVYAEEITTAWETGENLERVARYSMEDAKVTYELGKEFLPMEAQLSRLIGQSLWDVSRSSTGNLVEWFLLRKAYERNELAPNKPDEKELARRRQSYEGGYVKEPERGLWENIVYLDFRSLYPSIIITHNVSPDTLNREGCKEYDVAPQVGHRFCKDFPGFIPSLLGDLLEERQKIKKKMKATIDPIERKLLDYRQRAIKILANSYYGYYGYARARWYCKECAESVTAWGREYITMTIKEIEEKYGFKVIYSDTDGFFATIPGADAETVKKKAMEFLKYINAKLPGALELEYEGFYKRGFFVTKKKYAVIDEEGKITTRGLEIVRRDWSEIAKETQARVLEALLKDGDVEKAVRIVKEVTEKLSKYEVPPEKLVIHEQITRDLKDYKATGPHVAVAKRLAARGVKIRPGTVISYIVLKGSGRIGDRAIPFDEFDPTKHKYDAEYYIENQVLPAVERILRAFGYRKEDLRYQKTRQVGLSAWLKPKGT

SEQ ID NO: 388 - protein, 774 aa, synthetic construct
MILDTDYITEDGKPVIRIFKKENGEFKIEYDRTFEPYFYALLKDDSAIEEVKKITAERHGTVVTVKRVEKVQKKFLGRPVEVWKLYFTHPQDVPAIRDKIREHPAVIDIYEYDIPFAKRYLIDKGLVPMEGDEELKMLAFDIETLYHEGEEFAEGPILMISYADEEGARGITWKNVDLPYVDVVSTEREMIKRFLRVVKEKDPDVLITYNGDNFDFAYLKKRCEKLGINFALGRDGSEPKIQRMGDRFAVEVKGRIHFDLYPVIRRTINLPTYTLEAVYEAVFGQPKEKVYAEEITTAWETGENLERVARYSMEDAKVTYELGKEFLPMEAQLSRLIGQSLWDVSRSSTGNLVEWFLLRKAYERNELAPNKPDEKELARRRQSYEGGYVKEPERGLWENIVYLDFRSLYPSIIITHNVSPDTLNREGCKEYDVAPQVGHRFCKDFPGFIPSLLGDLLEERQKIKKKMKATIDPIERKLLDYRQRAIKILANSYYGYYGYARARWYCKECAESVTAWGREYITMTIKEIEEKYGFKVIYSDTDGFFATIPGADAETVKKKAMEFLKYINAKLPGALELEYEGFYKRGFFVTKKKYAVIDEEGKITTRGLEIVRRDWSEIAKETQARVLEALLKDGDVEKAVRIVKEVTEKLSKYEVPPEKLVIHEQITRDLKDYKATGPHVAVAKRLAARGVKIRPGTVISYIVLKGSGRIGDRAIPFDEFDPTKHKYDAEYYIENQVLPAVERILRAFGYRKEDLRYQKTRQVGLSAWLKPKGT

SEQ ID NO: 389 - protein, 774 aa, synthetic construct
MILDTDYITEDGKPVIRIFKKENGEFKIEYDRTFEPYFYALLKDDSAIEEVKKITAERHGTVVTVKRVEKVQKKFLGRPVEVWKLYFTHPQDVPAIRDKIREHPAVIDIYEYDIPFAKRYLIDKGLVPMEGDEELKMLAFDIETLYHEGEEFAEGPILMISYADEEGARHITWKNVDLPYVDVVSTEREMIKRFLRVVKEKDPDVLITYNGDNFDFAYLKKRCEKLGINFALGRDGSEPKIQRMGDRFAVEVKGRIHFDLYPVIRRTINLPTYTLEAVYEAVFGQPKEKVYAEEITTAWETGENLERVARYSMEDAKVTYELGKEFLPMEAQLSRLIGQSLWDVSRSSTGNLVEWFLLRKAYERNELAPNKPDEKELARRRQSYEGGYVKEPERGLWENIVYLDFRSLYPSIIITHNVSPDTLNREGCKEYDVAPQVGHRFCKDFPGFIPSLLGDLLEERQKIKKKMKATIDPIERKLLDYRQRAIKILANSYYGYYGYARARWYCKECAESVTAWGREYITMTIKEIEEKYGFKVIYSDTDGFFATIPGADAETVKKKAMEFLKYINAKLPGALELEYEGFYKRGFFVTKKKYAVIDEEGKITTRGLEIVRRDWSEIAKETQARVLEALLKDGDVEKAVRIVKEVTEKLSKYEVPPEKLVIHEQITRDLKDYKATGPHVAVAKRLAARGVKIRPGTVISYIVLKGSGRIGDRAIPFDEFDPTKHKYDAEYYIENQVLPAVERILRAFGYRKEDLRYQKTRQVGLSAWLKPKGT

SEQ ID NO: 390 - protein, 774 aa, synthetic construct
MILDTDYITEDGKPVIRIFKKENGEFKIEYDRTFEPYFYALLKDDSAIEEVKKITAERHGTVVTVKRVEKVQKKFLGRPVEVWKLYFTHPQDVPAIRDKIREHPAVIDIYEYDIPFAKRYLIDKGLVPMEGDEELKMLAFDIETLYHEGEEFAEGPILMISYADEEGARRITWKNVDLPYVDVVSTEREMIKRFLRVVKEKDPDVLITYNGDNFDFAYLKKRCEKLGINFALGRDGSEPKIQRMGDRFAVEVKGRIHFDLYPVIRRTINLPTYTLEAVYEAVFGQPKEKVYAEEITTAWETGENLERVARYSMEDAKVTYELGKEFLPMEAQLSRLIGQSLWDVSRSSTGNLVEWFLLRKAYERNELAPNKPDEKELARRRQSYEGGYVKEPERGLWENIVYLDFRSLYPSIIITHNVSPDTLNREGCKEYDVAPQVGHRFCKDFPGFIPSLLGDLLEERQKIKKKMKATIDPIERKLLDYRQRAIKILANSYYGYYGYARARWYCKECAESVTAWGREYITMTIKEIEEKYGFKVIYSDTDGFFATIPGADAETVKKKAMEFLKYINAKLPGALELEYEGFYKRGFFVTKKKYAVIDEEGKITTRGLEIVRRDWSEIAKETQARVLEALLKDGDVEKAVRIVKEVTEKLSKYEVPPEKLVIHEQITRDLKDYKATGPHVAVAKRLAARGVKIRPGTVISYIVLKGSGRIGDRAIPFDEFDPTKHKYDAEYYIENQVLPAVERILRAFGYRKEDLRYQKTRQVGLSAWLKPKGT

SEQ ID NO: 391 - protein, 774 aa, synthetic construct
MILDTDYITEDGKPVIRIFKKENGEFKIEYDRTFEPYFYALLKDDSAIEEVKKITAERHGTVVTVKRVEKVQKKFLGRPVEVWKLYFTHPQDVPAIRDKIREHPAVIDIYEYDIPFAKRYLIDKGLVPMEGDEELKMLAFDIETLYHEGEEFAEGPILMISYADEEGARSITWKNVDLPYVDVVSTEREMIKRFLRVVKEKDPDVLITYNGDNFDFAYLKKRCEKLGINFALGRDGSEPKIQRMGDRFAVEVKGRIHFDLYPVIRRTINLPTYTLEAVYEAVFGQPKEKVYAEEITTAWETGENLERVARYSMEDAKVTYELGKEFLPMEAQLSRLIGQSLWDVSRSSTGNLVEWFLLRKAYERNELAPNKPDEKELARRRQSYEGGYVKEPERGLWENIVYLDFRSLYPSIIITHNVSPDTLNREGCKEYDVAPQVGHRFCKDFPGFIPSLLGDLLEERQKIKKKMKATIDPIERKLLDYRQRAIKILANSYYGYYGYARARWYCKECAESVTAWGREYITMTIKEIEEKYGFKVIYSDTDGFFATIPGADAETVKKKAMEFLKYINAKLPGALELEYEGFYKRGFFVTKKKYAVIDEEGKITTRGLEIVRRDWSEIAKETQARVLEALLKDGDVEKAVRIVKEVTEKLSKYEVPPEKLVIHEQITRDLKDYKATGPHVAVAKRLAARGVKIRPGTVISYIVLKGSGRIGDRAIPFDEFDPTKHKYDAEYYIENQVLPAVERILRAFGYRKEDLRYQKTRQVGLSAWLKPKGT

SEQ ID NO: 392 - protein, 774 aa, synthetic construct
MILDTDYITEDGKPVIRIFKKENGEFKIEYDRTFEPYFYALLKDDSAIEEVKKITAERHGTVVTVKRVEKVQKKFLGRPVEVWKLYFTHPQDVPAIRDKIREHPAVIDIYEYDIPFAKRYLIDKGLVPMEGDEELKMLAFDIETLYHEGEEFAEGPILMISYADEEGARWITWKNVDLPYVDVVSTEREMIKRFLRVVKEKDPDVLITYNGDNFDFAYLKKRCEKLGINFALGRDGSEPKIQRMGDRFAVEVKGRIHFDLYPVIRRTINLPTYTLEAVYEAVFGQPKEKVYAEEITTAWETGENLERVARYSMEDAKVTYELGKEFLPMEAQLSRLIGQSLWDVSRSSTGNLVEWFLLRKAYERNELAPNKPDEKELARRRQSYEGGYVKEPERGLWENIVYLDFRSLYPSIIITHNVSPDTLNREGCKEYDVAPQVGHRFCKDFPGFIPSLLGDLLEERQKIKKKMKATIDPIERKLLDYRQRAIKILANSYYGYYGYARARWYCKECAESVTAWGREYITMTIKEIEEKYGFKVIYSDTDGFFATIPGADAETVKKKAMEFLKYINAKLPGALELEYEGFYKRGFFVTKKKYAVIDEEGKITTRGLEIVRRDWSEIAKETQARVLEALLKDGDVEKAVRIVKEVTEKLSKYEVPPEKLVIHEQITRDLKDYKATGPHVAVAKRLAARGVKIRPGTVISYIVLKGSGRIGDRAIPFDEFDPTKHKYDAEYYIENQVLPAVERILRAFGYRKEDLRYQKTRQVGLSAWLKPKGT

SEQ ID NO: 393 - protein, 774 aa, synthetic construct
MILDTDYITEDGKPVIRIFKKENGEFKIEYDRTFEPYFYALLKDDSAIEEVKKITAERHGTVVTVKRVEKVQKKFLGRPVEVWKLYFTHPQDVPAIRDKIREHPAVIDIYEYDIPFAKRYLIDKGLVPMEGDEELKMLAFDIETLYHEGEEFAEGPILMISYADEEGARYITWKNVDLPYVDVVSTEREMIKRFLRVVKEKDPDVLITYNGDNFDFAYLKKRCEKLGINFALGRDGSEPKIQRMGDRFAVEVKGRIHFDLYPVIRRTINLPTYTLEAVYEAVFGQPKEKVYAEEITTAWETGENLERVARYSMEDAKVTYELGKEFLPMEAQLSRLIGQSLWDVSRSSTGNLVEWFLLRKAYERNELAPNKPDEKELARRRQSYEGGYVKEPERGLWENIVYLDFRSLYPSIIITHNVSPDTLNREGCKEYDVAPQVGHRFCKDFPGFIPSLLGDLLEERQKIKKKMKATIDPIERKLLDYRQRAIKILANSYYGYYGYARARWYCKECAESVTAWGREYITMTIKEIEEKYGFKVIYSDTDGFFATIPGADAETVKKKAMEFLKYINAKLPGALELEYEGFYKRGFFVTKKKYAVIDEEGKITTRGLEIVRRDWSEIAKETQARVLEALLKDGDVEKAVRIVKEVTEKLSKYEVPPEKLVIHEQITRDLKDYKATGPHVAVAKRLAARGVKIRPGTVISYIVLKGSGRIGDRAIPFDEFDPTKHKYDAEYYIENQVLPAVERILRAFGYRKEDLRYQKTRQVGLSAWLKPKGT

SEQ ID NO: 394 - protein, 774 aa, synthetic construct
MILDTDYITEDGKPVIRIFKKENGEFKIEYDRTFEPYFYALLKDDSAIEEVKKITAERHGTVVTVKRVEKVQKKFLGRPVEVWKLYFTHPQDVPAIRDKIREHPAVIDIYEYDIPFAKRYLIDKGLVPMEGDEELKMLAFDIETLYHEGEEFAEGPILMISYADEEGARVIRWKNVDLPYVDVVSTEREMIKRFLRVVKEKDPDVLITYNGDNFDFAYLKKRCEKLGINFALGRDGSEPKIQRMGDRFAVEVKGRIHFDLYPVIRRTINLPTYTLEAVYEAVFGQPKEKVYAEEITTAWETGENLERVARYSMEDAKVTYELGKEFLPMEAQLSRLIGQSLWDVSRSSTGNLVEWFLLRKAYERNELAPNKPDEKELARRRQSYEGGYVKEPERGLWENIVYLDFRSLYPSIIITHNVSPDTLNREGCKEYDVAPQVGHRFCKDFPGFIPSLLGDLLEERQKIKKKMKATIDPIERKLLDYRQRAIKILANSYYGYYGYARARWYCKECAESVTAWGREYITMTIKEIEEKYGFKVIYSDTDGFFATIPGADAETVKKKAMEFLKYINAKLPGALELEYEGFYKRGFFVTKKKYAVIDEEGKITTRGLEIVRRDWSEIAKETQARVLEALLKDGDVEKAVRIVKEVTEKLSKYEVPPEKLVIHEQITRDLKDYKATGPHVAVAKRLAARGVKIRPGTVISYIVLKGSGRIGDRAIPFDEFDPTKHKYDAEYYIENQVLPAVERILRAFGYRKEDLRYQKTRQVGLSAWLKPKGT

SEQ ID NO: 395 - protein, 774 aa, synthetic construct
MILDTDYITEDGKPVIRIFKKENGEFKIEYDRTFEPYFYALLKDDSAIEEVKKITAERHGTVVTVKRVEKVQKKFLGRPVEVWKLYFTHPQDVPAIRDKIREHPAVIDIYEYDIPFAKRYLIDKGLVPMEGDEELKMLAFDIETLYHEGEEFAEGPILMISYADEEGARVITWKNVDLPYVDVVSTWREMIKRFLRVVKEKDPDVLITYNGDNFDFAYLKKRCEKLGINFALGRDGSEPKIQRMGDRFAVEVKGRIHFDLYPVIRRTINLPTYTLEAVYEAVFGQPKEKVYAEEITTAWETGENLERVARYSMEDAKVTYELGKEFLPMEAQLSRLIGQSLWDVSRSSTGNLVEWFLLRKAYERNELAPNKPDEKELARRRQSYEGGYVKEPERGLWENIVYLDFRSLYPSIIITHNVSPDTLNREGCKEYDVAPQVGHRFCKDFPGFIPSLLGDLLEERQKIKKKMKATIDPIERKLLDYRQRAIKILANSYYGYYGYARARWYCKECAESVTAWGREYITMTIKEIEEKYGFKVIYSDTDGFFATIPGADAETVKKKAMEFLKYINAKLPGALELEYEGFYKRGFFVTKKKYAVIDEEGKITTRGLEIVRRDWSEIAKETQARVLEALLKDGDVEKAVRIVKEVTEKLSKYEVPPEKLVIHEQITRDLKDYKATGPHVAVAKRLAARGVKIRPGTVISYIVLKGSGRIGDRAIPFDEFDPTKHKYDAEYYIENQVLPAVERILRAFGYRKEDLRYQKTRQVGLSAWLKPKGT

SEQ ID NO: 396 - protein, 774 aa, synthetic construct
MILDTDYITEDGKPVIRIFKKENGEFKIEYDRTFEPYFYALLKDDSAIEEVKKITAERHGTVVTVKRVEKVQKKFLGRPVEVWKLYFTHPQDVPAIRDKIREHPAVIDIYEYDIPFAKRYLIDKGLVPMEGDEELKMLAFDIETLYHEGEEFAEGPILMISYADEEGARVITWKNVDLPYVDVVSTEREMFKRFLRVVKEKDPDVLITYNGDNFDFAYLKKRCEKLGINFALGRDGSEPKIQRMGDRFAVEVKGRIHFDLYPVIRRTINLPTYTLEAVYEAVFGQPKEKVYAEEITTAWETGENLERVARYSMEDAKVTYELGKEFLPMEAQLSRLIGQSLWDVSRSSTGNLVEWFLLRKAYERNELAPNKPDEKELARRRQSYEGGYVKEPERGLWENIVYLDFRSLYPSIIITHNVSPDTLNREGCKEYDVAPQVGHRFCKDFPGFIPSLLGDLLEERQKIKKKMKATIDPIERKLLDYRQRAIKILANSYYGYYGYARARWYCKECAESVTAWGREYITMTIKEIEEKYGFKVIYSDTDGFFATIPGADAETVKKKAMEFLKYINAKLPGALELEYEGFYKRGFFVTKKKYAVIDEEGKITTRGLEIVRRDWSEIAKETQARVLEALLKDGDVEKAVRIVKEVTEKLSKYEVPPEKLVIHEQITRDLKDYKATGPHVAVAKRLAARGVKIRPGTVISYIVLKGSGRIGDRAIPFDEFDPTKHKYDAEYYIENQVLPAVERILRAFGYRKEDLRYQKTRQVGLSAWLKPKGT

SEQ ID NO: 397 - protein, 774 aa, synthetic construct
MILDTDYITEDGKPVIRIFKKENGEFKIEYDRTFEPYFYALLKDDSAIEEVKKITAERHGTVVTVKRVEKVQKKFLGRPVEVWKLYFTHPQDVPAIRDKIREHPAVIDIYEYDIPFAKRYLIDKGLVPMEGDEELKMLAFDIETLYHEGEEFAEGPILMISYADEEGARVITWKNVDLPYVDVVSTEREMYKRFLRVVKEKDPDVLITYNGDNFDFAYLKKRCEKLGINFALGRDGSEPKIQRMGDRFAVEVKGRIHFDLYPVIRRTINLPTYTLEAVYEAVFGQPKEKVYAEEITTAWETGENLERVARYSMEDAKVTYELGKEFLPMEAQLSRLIGQSLWDVSRSSTGNLVEWFLLRKAYERNELAPNKPDEKELARRRQSYEGGYVKEPERGLWENIVYLDFRSLYPSIIITHNVSPDTLNREGCKEYDVAPQVGHRFCKDFPGFIPSLLGDLLEERQKIKKKMKATIDPIERKLLDYRQRAIKILANSYYGYYGYARARWYCKECAESVTAWGREYITMTIKEIEEKYGFKVIYSDTDGFFATIPGADAETVKKKAMEFLKYINAKLPGALELEYEGFYKRGFFVTKKKYAVIDEEGKITTRGLEIVRRDWSEIAKETQARVLEALLKDGDVEKAVRIVKEVTEKLSKYEVPPEKLVIHEQITRDLKDYKATGPHVAVAKRLAARGVKIRPGTVISYIVLKGSGRIGDRAIPFDEFDPTKHKYDAEYYIENQVLPAVERILRAFGYRKEDLRYQKTRQVGLSAWLKPKGT

SEQ ID NO: 398 - protein, 774 aa, synthetic construct
MILDTDYITEDGKPVIRIFKKENGEFKIEYDRTFEPYFYALLKDDSAIEEVKKITAERHGTVVTVKRVEKVQKKFLGRPVEVWKLYFTHPQDVPAIRDKIREHPAVIDIYEYDIPFAKRYLIDKGLVPMEGDEELKMLAFDIETLYHEGEEFAEGPILMISYADEEGARVITWKNVDLPYVDVVSTEREMIKRGLRVVKEKDPDVLITYNGDNFDFAYLKKRCEKLGINFALGRDGSEPKIQRMGDRFAVEVKGRIHFDLYPVIRRTINLPTYTLEAVYEAVFGQPKEKVYAEEITTAWETGENLERVARYSMEDAKVTYELGKEFLPMEAQLSRLIGQSLWDVSRSSTGNLVEWFLLRKAYERNELAPNKPDEKELARRRQSYEGGYVKEPERGLWENIVYLDFRSLYPSIIITHNVSPDTLNREGCKEYDVAPQVGHRFCKDFPGFIPSLLGDLLEERQKIKKKMKATIDPIERKLLDYRQRAIKILANSYYGYYGYARARWYCKECAESVTAWGREYITMTIKEIEEKYGFKVIYSDTDGFFATIPGADAETVKKKAMEFLKYINAKLPGALELEYEGFYKRGFFVTKKKYAVIDEEGKITTRGLEIVRRDWSEIAKETQARVLEALLKDGDVEKAVRIVKEVTEKLSKYEVPPEKLVIHEQITRDLKDYKATGPHVAVAKRLAARGVKIRPGTVISYIVLKGSGRIGDRAIPFDEFDPTKHKYDAEYYIENQVLPAVERILRAFGYRKEDLRYQKTRQVGLSAWLKPKGT

SEQ ID NO: 399 - protein, 774 aa, synthetic construct
MILDTDYITEDGKPVIRIFKKENGEFKIEYDRTFEPYFYALLKDDSAIEEVKKITAERHGTVVTVKRVEKVQKKFLGRPVEVWKLYFTHPQDVPAIRDKIREHPAVIDIYEYDIPFAKRYLIDKGLVPMEGDEELKMLAFDIETLYHEGEEFAEGPILMISYADEEGARVITWKNVDLPYVDVVSTEREMIKRFLRVVFEKDPDVLITYNGDNFDFAYLKKRCEKLGINFALGRDGSEPKIQRMGDRFAVEVKGRIHFDLYPVIRRTINLPTYTLEAVYEAVFGQPKEKVYAEEITTAWETGENLERVARYSMEDAKVTYELGKEFLPMEAQLSRLIGQSLWDVSRSSTGNLVEWFLLRKAYERNELAPNKPDEKELARRRQSYEGGYVKEPERGLWENIVYLDFRSLYPSIIITHNVSPDTLNREGCKEYDVAPQVGHRFCKDFPGFIPSLLGDLLEERQKIKKKMKATIDPIERKLLDYRQRAIKILANSYYGYYGYARARWYCKECAESVTAWGREYITMTIKEIEEKYGFKVIYSDTDGFFATIPGADAETVKKKAMEFLKYINAKLPGALELEYEGFYKRGFFVTKKKYAVIDEEGKITTRGLEIVRRDWSEIAKETQARVLEALLKDGDVEKAVRIVKEVTEKLSKYEVPPEKLVIHEQITRDLKDYKATGPHVAVAKRLAARGVKIRPGTVISYIVLKGSGRIGDRAIPFDEFDPTKHKYDAEYYIENQVLPAVERILRAFGYRKEDLRYQKTRQVGLSAWLKPKGT

SEQ ID NO: 400 - protein, 774 aa, synthetic construct
MILDTDYITEDGKPVIRIFKKENGEFKIEYDRTFEPYFYALLKDDSAIEEVKKITAERHGTVVTVKRVEKVQKKFLGRPVEVWKLYFTHPQDVPAIRDKIREHPAVIDIYEYDIPFAKRYLIDKGLVPMEGDEELKMLAFDIETLYHEGEEFAEGPILMISYADEEGARVITWKNVDLPYVDVVSTEREMIKRFLRVVKEKDPDVLIEYNGDNFDFAYLKKRCEKLGINFALGRDGSEPKIQRMGDRFAVEVKGRIHFDLYPVIRRTINLPTYTLEAVYEAVFGQPKEKVYAEEITTAWETGENLERVARYSMEDAKVTYELGKEFLPMEAQLSRLIGQSLWDVSRSSTGNLVEWFLLRKAYERNELAPNKPDEKELARRRQSYEGGYVKEPERGLWENIVYLDFRSLYPSIIITHNVSPDTLNREGCKEYDVAPQVGHRFCKDFPGFIPSLLGDLLEERQKIKKKMKATIDPIERKLLDYRQRAIKILANSYYGYYGYARARWYCKECAESVTAWGREYITMTIKEIEEKYGFKVIYSDTDGFFATIPGADAETVKKKAMEFLKYINAKLPGALELEYEGFYKRGFFVTKKKYAVIDEEGKITTRGLEIVRRDWSEIAKETQARVLEALLKDGDVEKAVRIVKEVTEKLSKYEVPPEKLVIHEQITRDLKDYKATGPHVAVAKRLAARGVKIRPGTVISYIVLKGSGRIGDRAIPFDEFDPTKHKYDAEYYIENQVLPAVERILRAFGYRKEDLRYQKTRQVGLSAWLKPKGT

SEQ ID NO: 401 - protein, 774 aa, synthetic construct
MILDTDYITEDGKPVIRIFKKENGEFKIEYDRTFEPYFYALLKDDSAIEEVKKITAERHGTVVTVKRVEKVQKKFLGRPVEVWKLYFTHPQDVPAIRDKIREHPAVIDIYEYDIPFAKRYLIDKGLVPMEGDEELKMLAFDIETLYHEGEEFAEGPILMISYADEEGARVITWKNVDLPYVDVVSTEREMIKRFLRVVKEKDPDVLIFYNGDNFDFAYLKKRCEKLGINFALGRDGSEPKIQRMGDRFAVEVKGRIHFDLYPVIRRTINLPTYTLEAVYEAVFGQPKEKVYAEEITTAWETGENLERVARYSMEDAKVTYELGKEFLPMEAQLSRLIGQSLWDVSRSSTGNLVEWFLLRKAYERNELAPNKPDEKELARRRQSYEGGYVKEPERGLWENIVYLDFRSLYPSIIITHNVSPDTLNREGCKEYDVAPQVGHRFCKDFPGFIPSLLGDLLEERQKIKKKMKATIDPIERKLLDYRQRAIKILANSYYGYYGYARARWYCKECAESVTAWGREYITMTIKEIEEKYGFKVIYSDTDGFFATIPGADAETVKKKAMEFLKYINAKLPGALELEYEGFYKRGFFVTKKKYAVIDEEGKITTRGLEIVRRDWSEIAKETQARVLEALLKDGDVEKAVRIVKEVTEKLSKYEVPPEKLVIHEQITRDLKDYKATGPHVAVAKRLAARGVKIRPGTVISYIVLKGSGRIGDRAIPFDEFDPTKHKYDAEYYIENQVLPAVERILRAFGYRKEDLRYQKTRQVGLSAWLKPKGT

SEQ ID NO: 402 - protein, 774 aa, synthetic construct
MILDTDYITEDGKPVIRIFKKENGEFKIEYDRTFEPYFYALLKDDSAIEEVKKITAERHGTVVTVKRVEKVQKKFLGRPVEVWKLYFTHPQDVPAIRDKIREHPAVIDIYEYDIPFAKRYLIDKGLVPMEGDEELKMLAFDIETLYHEGEEFAEGPILMISYADEEGARVITWKNVDLPYVDVVSTEREMIKRFLRVVKEKDPDVLIHYNGDNFDFAYLKKRCEKLGINFALGRDGSEPKIQRMGDRFAVEVKGRIHFDLYPVIRRTINLPTYTLEAVYEAVFGQPKEKVYAEEITTAWETGENLERVARYSMEDAKVTYELGKEFLPMEAQLSRLIGQSLWDVSRSSTGNLVEWFLLRKAYERNELAPNKPDEKELARRRQSYEGGYVKEPERGLWENIVYLDFRSLYPSIIITHNVSPDTLNREGCKEYDVAPQVGHRFCKDFPGFIPSLLGDLLEERQKIKKKMKATIDPIERKLLDYRQRAIKILANSYYGYYGYARARWYCKECAESVTAWGREYITMTIKEIEEKYGFKVIYSDTDGFFATIPGADAETVKKKAMEFLKYINAKLPGALELEYEGFYKRGFFVTKKKYAVIDEEGKITTRGLEIVRRDWSEIAKETQARVLEALLKDGDVEKAVRIVKEVTEKLSKYEVPPEKLVIHEQITRDLKDYKATGPHVAVAKRLAARGVKIRPGTVISYIVLKGSGRIGDRAIPFDEFDPTKHKYDAEYYIENQVLPAVERILRAFGYRKEDLRYQKTRQVGLSAWLKPKGT

SEQ ID NO: 403 - protein, 774 aa, synthetic construct
MILDTDYITEDGKPVIRIFKKENGEFKIEYDRTFEPYFYALLKDDSAIEEVKKITAERHGTVVTVKRVEKVQKKFLGRPVEVWKLYFTHPQDVPAIRDKIREHPAVIDIYEYDIPFAKRYLIDKGLVPMEGDEELKMLAFDIETLYHEGEEFAEGPILMISYADEEGARVITWKNVDLPYVDVVSTEREMIKRFLRVVKEKDPDVLIIYNGDNFDFAYLKKRCEKLGINFALGRDGSEPKIQRMGDRFAVEVKGRIHFDLYPVIRRTINLPTYTLEAVYEAVFGQPKEKVYAEEITTAWETGENLERVARYSMEDAKVTYELGKEFLPMEAQLSRLIGQSLWDVSRSSTGNLVEWFLLRKAYERNELAPNKPDEKELARRRQSYEGGYVKEPERGLWENIVYLDFRSLYPSIIITHNVSPDTLNREGCKEYDVAPQVGHRFCKDFPGFIPSLLGDLLEERQKIKKKMKATIDPIERKLLDYRQRAIKILANSYYGYYGYARARWYCKECAESVTAWGREYITMTIKEIEEKYGFKVIYSDTDGFFATIPGADAETVKKKAMEFLKYINAKLPGALELEYEGFYKRGFFVTKKKYAVIDEEGKITTRGLEIVRRDWSEIAKETQARVLEALLKDGDVEKAVRIVKEVTEKLSKYEVPPEKLVIHEQITRDLKDYKATGPHVAVAKRLAARGVKIRPGTVISYIVLKGSGRIGDRAIPFDEFDPTKHKYDAEYYIENQVLPAVERILRAFGYRKEDLRYQKTRQVGLSAWLKPKGT

SEQ ID NO: 404 - protein, 774 aa, synthetic construct
MILDTDYITEDGKPVIRIFKKENGEFKIEYDRTFEPYFYALLKDDSAIEEVKKITAERHGTVVTVKRVEKVQKKFLGRPVEVWKLYFTHPQDVPAIRDKIREHPAVIDIYEYDIPFAKRYLIDKGLVPMEGDEELKMLAFDIETLYHEGEEFAEGPILMISYADEEGARVITWKNVDLPYVDVVSTEREMIKRFLRVVKEKDPDVLIKYNGDNFDFAYLKKRCEKLGINFALGRDGSEPKIQRMGDRFAVEVKGRIHFDLYPVIRRTINLPTYTLEAVYEAVFGQPKEKVYAEEITTAWETGENLERVARYSMEDAKVTYELGKEFLPMEAQLSRLIGQSLWDVSRSSTGNLVEWFLLRKAYERNELAPNKPDEKELARRRQSYEGGYVKEPERGLWENIVYLDFRSLYPSIIITHNVSPDTLNREGCKEYDVAPQVGHRFCKDFPGFIPSLLGDLLEERQKIKKKMKATIDPIERKLLDYRQRAIKILANSYYGYYGYARARWYCKECAESVTAWGREYITMTIKEIEEKYGFKVIYSDTDGFFATIPGADAETVKKKAMEFLKYINAKLPGALELEYEGFYKRGFFVTKKKYAVIDEEGKITTRGLEIVRRDWSEIAKETQARVLEALLKDGDVEKAVRIVKEVTEKLSKYEVPPEKLVIHEQITRDLKDYKATGPHVAVAKRLAARGVKIRPGTVISYIVLKGSGRIGDRAIPFDEFDPTKHKYDAEYYIENQVLPAVERILRAFGYRKEDLRYQKTRQVGLSAWLKPKGT

SEQ ID NO: 405 - protein, 774 aa, synthetic construct
MILDTDYITEDGKPVIRIFKKENGEFKIEYDRTFEPYFYALLKDDSAIEEVKKITAERHGTVVTVKRVEKVQKKFLGRPVEVWKLYFTHPQDVPAIRDKIREHPAVIDIYEYDIPFAKRYLIDKGLVPMEGDEELKMLAFDIETLYHEGEEFAEGPILMISYADEEGARVITWKNVDLPYVDVVSTEREMIKRFLRVVKEKDPDVLINYNGDNFDFAYLKKRCEKLGINFALGRDGSEPKIQRMGDRFAVEVKGRIHFDLYPVIRRTINLPTYTLEAVYEAVFGQPKEKVYAEEITTAWETGENLERVARYSMEDAKVTYELGKEFLPMEAQLSRLIGQSLWDVSRSSTGNLVEWFLLRKAYERNELAPNKPDEKELARRRQSYEGGYVKEPERGLWENIVYLDFRSLYPSIIITHNVSPDTLNREGCKEYDVAPQVGHRFCKDFPGFIPSLLGDLLEERQKIKKKMKATIDPIERKLLDYRQRAIKILANSYYGYYGYARARWYCKECAESVTAWGREYITMTIKEIEEKYGFKVIYSDTDGFFATIPGADAETVKKKAMEFLKYINAKLPGALELEYEGFYKRGFFVTKKKYAVIDEEGKITTRGLEIVRRDWSEIAKETQARVLEALLKDGDVEKAVRIVKEVTEKLSKYEVPPEKLVIHEQITRDLKDYKATGPHVAVAKRLAARGVKIRPGTVISYIVLKGSGRIGDRAIPFDEFDPTKHKYDAEYYIENQVLPAVERILRAFGYRKEDLRYQKTRQVGLSAWLKPKGT

SEQ ID NO: 406 - protein, 774 aa, synthetic construct
MILDTDYITEDGKPVIRIFKKENGEFKIEYDRTFEPYFYALLKDDSAIEEVKKITAERHGTVVTVKRVEKVQKKFLGRPVEVWKLYFTHPQDVPAIRDKIREHPAVIDIYEYDIPFAKRYLIDKGLVPMEGDEELKMLAFDIETLYHEGEEFAEGPILMISYADEEGARVITWKNVDLPYVDVVSTEREMIKRFLRVVKEKDPDVLIQYNGDNFDFAYLKKRCEKLGINFALGRDGSEPKIQRMGDRFAVEVKGRIHFDLYPVIRRTINLPTYTLEAVYEAVFGQPKEKVYAEEITTAWETGENLERVARYSMEDAKVTYELGKEFLPMEAQLSRLIGQSLWDVSRSSTGNLVEWFLLRKAYERNELAPNKPDEKELARRRQSYEGGYVKEPERGLWENIVYLDFRSLYPSIIITHNVSPDTLNREGCKEYDVAPQVGHRFCKDFPGFIPSLLGDLLEERQKIKKKMKATIDPIERKLLDYRQRAIKILANSYYGYYGYARARWYCKECAESVTAWGREYITMTIKEIEEKYGFKVIYSDTDGFFATIPGADAETVKKKAMEFLKYINAKLPGALELEYEGFYKRGFFVTKKKYAVIDEEGKITTRGLEIVRRDWSEIAKETQARVLEALLKDGDVEKAVRIVKEVTEKLSKYEVPPEKLVIHEQITRDLKDYKATGPHVAVAKRLAARGVKIRPGTVISYIVLKGSGRIGDRAIPFDEFDPTKHKYDAEYYIENQVLPAVERILRAFGYRKEDLRYQKTRQVGLSAWLKPKGT

SEQ ID NO: 407 - protein, 774 aa, synthetic construct
MILDTDYITEDGKPVIRIFKKENGEFKIEYDRTFEPYFYALLKDDSAIEEVKKITAERHGTVVTVKRVEKVQKKFLGRPVEVWKLYFTHPQDVPAIRDKIREHPAVIDIYEYDIPFAKRYLIDKGLVPMEGDEELKMLAFDIETLYHEGEEFAEGPILMISYADEEGARVITWKNVDLPYVDVVSTEREMIKRFLRVVKEKDPDVLIRYNGDNFDFAYLKKRCEKLGINFALGRDGSEPKIQRMGDRFAVEVKGRIHFDLYPVIRRTINLPTYTLEAVYEAVFGQPKEKVYAEEITTAWETGENLERVARYSMEDAKVTYELGKEFLPMEAQLSRLIGQSLWDVSRSSTGNLVEWFLLRKAYERNELAPNKPDEKELARRRQSYEGGYVKEPERGLWENIVYLDFRSLYPSIIITHNVSPDTLNREGCKEYDVAPQVGHRFCKDFPGFIPSLLGDLLEERQKIKKKMKATIDPIERKLLDYRQRAIKILANSYYGYYGYARARWYCKECAESVTAWGREYITMTIKEIEEKYGFKVIYSDTDGFFATIPGADAETVKKKAMEFLKYINAKLPGALELEYEGFYKRGFFVTKKKYAVIDEEGKITTRGLEIVRRDWSEIAKETQARVLEALLKDGDVEKAVRIVKEVTEKLSKYEVPPEKLVIHEQITRDLKDYKATGPHVAVAKRLAARGVKIRPGTVISYIVLKGSGRIGDRAIPFDEFDPTKHKYDAEYYIENQVLPAVERILRAFGYRKEDLRYQKTRQVGLSAWLKPKGT

SEQ ID NO: 408 - protein, 774 aa, synthetic construct
MILDTDYITEDGKPVIRIFKKENGEFKIEYDRTFEPYFYALLKDDSAIEEVKKITAERHGTVVTVKRVEKVQKKFLGRPVEVWKLYFTHPQDVPAIRDKIREHPAVIDIYEYDIPFAKRYLIDKGLVPMEGDEELKMLAFDIETLYHEGEEFAEGPILMISYADEEGARVITWKNVDLPYVDVVSTEREMIKRFLRVVKEKDPDVLIVYNGDNFDFAYLKKRCEKLGINFALGRDGSEPKIQRMGDRFAVEVKGRIHFDLYPVIRRTINLPTYTLEAVYEAVFGQPKEKVYAEEITTAWETGENLERVARYSMEDAKVTYELGKEFLPMEAQLSRLIGQSLWDVSRSSTGNLVEWFLLRKAYERNELAPNKPDEKELARRRQSYEGGYVKEPERGLWENIVYLDFRSLYPSIIITHNVSPDTLNREGCKEYDVAPQVGHRFCKDFPGFIPSLLGDLLEERQKIKKKMKATIDPIERKLLDYRQRAIKILANSYYGYYGYARARWYCKECAESVTAWGREYITMTIKEIEEKYGFKVIYSDTDGFFATIPGADAETVKKKAMEFLKYINAKLPGALELEYEGFYKRGFFVTKKKYAVIDEEGKITTRGLEIVRRDWSEIAKETQARVLEALLKDGDVEKAVRIVKEVTEKLSKYEVPPEKLVIHEQITRDLKDYKATGPHVAVAKRLAARGVKIRPGTVISYIVLKGSGRIGDRAIPFDEFDPTKHKYDAEYYIENQVLPAVERILRAFGYRKEDLRYQKTRQVGLSAWLKPKGT

SEQ ID NO: 409 - protein, 774 aa, synthetic construct
MILDTDYITEDGKPVIRIFKKENGEFKIEYDRTFEPYFYALLKDDSAIEEVKKITAERHGTVVTVKRVEKVQKKFLGRPVEVWKLYFTHPQDVPAIRDKIREHPAVIDIYEYDIPFAKRYLIDKGLVPMEGDEELKMLAFDIETLYHEGEEFAEGPILMISYADEEGARVITWKNVDLPYVDVVSTEREMIKRFLRVVKEKDPDVLIWYNGDNFDFAYLKKRCEKLGINFALGRDGSEPKIQRMGDRFAVEVKGRIHFDLYPVIRRTINLPTYTLEAVYEAVFGQPKEKVYAEEITTAWETGENLERVARYSMEDAKVTYELGKEFLPMEAQLSRLIGQSLWDVSRSSTGNLVEWFLLRKAYERNELAPNKPDEKELARRRQSYEGGYVKEPERGLWENIVYLDFRSLYPSIIITHNVSPDTLNREGCKEYDVAPQVGHRFCKDFPGFIPSLLGDLLEERQKIKKKMKATIDPIERKLLDYRQRAIKILANSYYGYYGYARARWYCKECAESVTAWGREYITMTIKEIEEKYGFKVIYSDTDGFFATIPGADAETVKKKAMEFLKYINAKLPGALELEYEGFYKRGFFVTKKKYAVIDEEGKITTRGLEIVRRDWSEIAKETQARVLEALLKDGDVEKAVRIVKEVTEKLSKYEVPPEKLVIHEQITRDLKDYKATGPHVAVAKRLAARGVKIRPGTVISYIVLKGSGRIGDRAIPFDEFDPTKHKYDAEYYIENQVLPAVERILRAFGYRKEDLRYQKTRQVGLSAWLKPKGT

SEQ ID NO: 410 - protein, 774 aa, synthetic construct
MILDTDYITEDGKPVIRIFKKENGEFKIEYDRTFEPYFYALLKDDSAIEEVKKITAERHGTVVTVKRVEKVQKKFLGRPVEVWKLYFTHPQDVPAIRDKIREHPAVIDIYEYDIPFAKRYLIDKGLVPMEGDEELKMLAFDIETLYHEGEEFAEGPILMISYADEEGARVITWKNVDLPYVDVVSTEREMIKRFLRVVKEKDPDVLIYYNGDNFDFAYLKKRCEKLGINFALGRDGSEPKIQRMGDRFAVEVKGRIHFDLYPVIRRTINLPTYTLEAVYEAVFGQPKEKVYAEEITTAWETGENLERVARYSMEDAKVTYELGKEFLPMEAQLSRLIGQSLWDVSRSSTGNLVEWFLLRKAYERNELAPNKPDEKELARRRQSYEGGYVKEPERGLWENIVYLDFRSLYPSIIITHNVSPDTLNREGCKEYDVAPQVGHRFCKDFPGFIPSLLGDLLEERQKIKKKMKATIDPIERKLLDYRQRAIKILANSYYGYYGYARARWYCKECAESVTAWGREYITMTIKEIEEKYGFKVIYSDTDGFFATIPGADAETVKKKAMEFLKYINAKLPGALELEYEGFYKRGFFVTKKKYAVIDEEGKITTRGLEIVRRDWSEIAKETQARVLEALLKDGDVEKAVRIVKEVTEKLSKYEVPPEKLVIHEQITRDLKDYKATGPHVAVAKRLAARGVKIRPGTVISYIVLKGSGRIGDRAIPFDEFDPTKHKYDAEYYIENQVLPAVERILRAFGYRKEDLRYQKTRQVGLSAWLKPKGT

SEQ ID NO: 411 - protein, 774 aa, synthetic construct
MILDTDYITEDGKPVIRIFKKENGEFKIEYDRTFEPYFYALLKDDSAIEEVKKITAERHGTVVTVKRVEKVQKKFLGRPVEVWKLYFTHPQDVPAIRDKIREHPAVIDIYEYDIPFAKRYLIDKGLVPMEGDEELKMLAFDIETLYHEGEEFAEGPILMISYADEEGARVITWKNVDLPYVDVVSTEREMIKRFLRVVKEKDPDVLITANGDNFDFAYLKKRCEKLGINFALGRDGSEPKIQRMGDRFAVEVKGRIHFDLYPVIRRTINLPTYTLEAVYEAVFGQPKEKVYAEEITTAWETGENLERVARYSMEDAKVTYELGKEFLPMEAQLSRLIGQSLWDVSRSSTGNLVEWFLLRKAYERNELAPNKPDEKELARRRQSYEGGYVKEPERGLWENIVYLDFRSLYPSIIITHNVSPDTLNREGCKEYDVAPQVGHRFCKDFPGFIPSLLGDLLEERQKIKKKMKATIDPIERKLLDYRQRAIKILANSYYGYYGYARARWYCKECAESVTAWGREYITMTIKEIEEKYGFKVIYSDTDGFFATIPGADAETVKKKAMEFLKYINAKLPGALELEYEGFYKRGFFVTKKKYAVIDEEGKITTRGLEIVRRDWSEIAKETQARVLEALLKDGDVEKAVRIVKEVTEKLSKYEVPPEKLVIHEQITRDLKDYKATGPHVAVAKRLAARGVKIRPGTVISYIVLKGSGRIGDRAIPFDEFDPTKHKYDAEYYIENQVLPAVERILRAFGYRKEDLRYQKTRQVGLSAWLKPKGT

SEQ ID NO: 412 - protein, 774 aa, synthetic construct
MILDTDYITEDGKPVIRIFKKENGEFKIEYDRTFEPYFYALLKDDSAIEEVKKITAERHGTVVTVKRVEKVQKKFLGRPVEVWKLYFTHPQDVPAIRDKIREHPAVIDIYEYDIPFAKRYLIDKGLVPMEGDEELKMLAFDIETLYHEGEEFAEGPILMISYADEEGARVITWKNVDLPYVDVVSTEREMIKRFLRVVKEKDPDVLITCNGDNFDFAYLKKRCEKLGINFALGRDGSEPKIQRMGDRFAVEVKGRIHFDLYPVIRRTINLPTYTLEAVYEAVFGQPKEKVYAEEITTAWETGENLERVARYSMEDAKVTYELGKEFLPMEAQLSRLIGQSLWDVSRSSTGNLVEWFLLRKAYERNELAPNKPDEKELARRRQSYEGGYVKEPERGLWENIVYLDFRSLYPSIIITHNVSPDTLNREGCKEYDVAPQVGHRFCKDFPGFIPSLLGDLLEERQKIKKKMKATIDPIERKLLDYRQRAIKILANSYYGYYGYARARWYCKECAESVTAWGREYITMTIKEIEEKYGFKVIYSDTDGFFATIPGADAETVKKKAMEFLKYINAKLPGALELEYEGFYKRGFFVTKKKYAVIDEEGKITTRGLEIVRRDWSEIAKETQARVLEALLKDGDVEKAVRIVKEVTEKLSKYEVPPEKLVIHEQITRDLKDYKATGPHVAVAKRLAARGVKIRPGTVISYIVLKGSGRIGDRAIPFDEFDPTKHKYDAEYYIENQVLPAVERILRAFGYRKEDLRYQKTRQVGLSAWLKPKGT

SEQ ID NO: 413 - protein, 774 aa, synthetic construct
MILDTDYITEDGKPVIRIFKKENGEFKIEYDRTFEPYFYALLKDDSAIEEVKKITAERHGTVVTVKRVEKVQKKFLGRPVEVWKLYFTHPQDVPAIRDKIREHPAVIDIYEYDIPFAKRYLIDKGLVPMEGDEELKMLAFDIETLYHEGEEFAEGPILMISYADEEGARVITWKNVDLPYVDVVSTEREMIKRFLRVVKEKDPDVLITENGDNFDFAYLKKRCEKLGINFALGRDGSEPKIQRMGDRFAVEVKGRIHFDLYPVIRRTINLPTYTLEAVYEAVFGQPKEKVYAEEITTAWETGENLERVARYSMEDAKVTYELGKEFLPMEAQLSRLIGQSLWDVSRSSTGNLVEWFLLRKAYERNELAPNKPDEKELARRRQSYEGGYVKEPERGLWENIVYLDFRSLYPSIIITHNVSPDTLNREGCKEYDVAPQVGHRFCKDFPGFIPSLLGDLLEERQKIKKKMKATIDPIERKLLDYRQRAIKILANSYYGYYGYARARWYCKECAESVTAWGREYITMTIKEIEEKYGFKVIYSDTDGFFATIPGADAETVKKKAMEFLKYINAKLPGALELEYEGFYKRGFFVTKKKYAVIDEEGKITTRGLEIVRRDWSEIAKETQARVLEALLKDGDVEKAVRIVKEVTEKLSKYEVPPEKLVIHEQITRDLKDYKATGPHVAVAKRLAARGVKIRPGTVISYIVLKGSGRIGDRAIPFDEFDPTKHKYDAEYYIENQVLPAVERILRAFGYRKEDLRYQKTRQVGLSAWLKPKGT

SEQ ID NO: 414 - protein, 774 aa, synthetic construct
MILDTDYITEDGKPVIRIFKKENGEFKIEYDRTFEPYFYALLKDDSAIEEVKKITAERHGTVVTVKRVEKVQKKFLGRPVEVWKLYFTHPQDVPAIRDKIREHPAVIDIYEYDIPFAKRYLIDKGLVPMEGDEELKMLAFDIETLYHEGEEFAEGPILMISYADEEGARVITWKNVDLPYVDVVSTEREMIKRFLRVVKEKDPDVLITGNGDNFDFAYLKKRCEKLGINFALGRDGSEPKIQRMGDRFAVEVKGRIHFDLYPVIRRTINLPTYTLEAVYEAVFGQPKEKVYAEEITTAWETGENLERVARYSMEDAKVTYELGKEFLPMEAQLSRLIGQSLWDVSRSSTGNLVEWFLLRKAYERNELAPNKPDEKELARRRQSYEGGYVKEPERGLWENIVYLDFRSLYPSIIITHNVSPDTLNREGCKEYDVAPQVGHRFCKDFPGFIPSLLGDLLEERQKIKKKMKATIDPIERKLLDYRQRAIKILANSYYGYYGYARARWYCKECAESVTAWGREYITMTIKEIEEKYGFKVIYSDTDGFFATIPGADAETVKKKAMEFLKYINAKLPGALELEYEGFYKRGFFVTKKKYAVIDEEGKITTRGLEIVRRDWSEIAKETQARVLEALLKDGDVEKAVRIVKEVTEKLSKYEVPPEKLVIHEQITRDLKDYKATGPHVAVAKRLAARGVKIRPGTVISYIVLKGSGRIGDRAIPFDEFDPTKHKYDAEYYIENQVLPAVERILRAFGYRKEDLRYQKTRQVGLSAWLKPKGT

SEQ ID NO: 415 - protein, 774 aa, synthetic construct
MILDTDYITEDGKPVIRIFKKENGEFKIEYDRTFEPYFYALLKDDSAIEEVKKITAERHGTVVTVKRVEKVQKKFLGRPVEVWKLYFTHPQDVPAIRDKIREHPAVIDIYEYDIPFAKRYLIDKGLVPMEGDEELKMLAFDIETLYHEGEEFAEGPILMISYADEEGARVITWKNVDLPYVDVVSTEREMIKRFLRVVKEKDPDVLITHNGDNFDFAYLKKRCEKLGINFALGRDGSEPKIQRMGDRFAVEVKGRIHFDLYPVIRRTINLPTYTLEAVYEAVFGQPKEKVYAEEITTAWETGENLERVARYSMEDAKVTYELGKEFLPMEAQLSRLIGQSLWDVSRSSTGNLVEWFLLRKAYERNELAPNKPDEKELARRRQSYEGGYVKEPERGLWENIVYLDFRSLYPSIIITHNVSPDTLNREGCKEYDVAPQVGHRFCKDFPGFIPSLLGDLLEERQKIKKKMKATIDPIERKLLDYRQRAIKILANSYYGYYGYARARWYCKECAESVTAWGREYITMTIKEIEEKYGFKVIYSDTDGFFATIPGADAETVKKKAMEFLKYINAKLPGALELEYEGFYKRGFFVTKKKYAVIDEEGKITTRGLEIVRRDWSEIAKETQARVLEALLKDGDVEKAVRIVKEVTEKLSKYEVPPEKLVIHEQITRDLKDYKATGPHVAVAKRLAARGVKIRPGTVISYIVLKGSGRIGDRAIPFDEFDPTKHKYDAEYYIENQVLPAVERILRAFGYRKEDLRYQKTRQVGLSAWLKPKGT

SEQ ID NO: 416 - protein, 774 aa, synthetic construct
MILDTDYITEDGKPVIRIFKKENGEFKIEYDRTFEPYFYALLKDDSAIEEVKKITAERHGTVVTVKRVEKVQKKFLGRPVEVWKLYFTHPQDVPAIRDKIREHPAVIDIYEYDIPFAKRYLIDKGLVPMEGDEELKMLAFDIETLYHEGEEFAEGPILMISYADEEGARVITWKNVDLPYVDVVSTEREMIKRFLRVVKEKDPDVLITINGDNFDFAYLKKRCEKLGINFALGRDGSEPKIQRMGDRFAVEVKGRIHFDLYPVIRRTINLPTYTLEAVYEAVFGQPKEKVYAEEITTAWETGENLERVARYSMEDAKVTYELGKEFLPMEAQLSRLIGQSLWDVSRSSTGNLVEWFLLRKAYERNELAPNKPDEKELARRRQSYEGGYVKEPERGLWENIVYLDFRSLYPSIIITHNVSPDTLNREGCKEYDVAPQVGHRFCKDFPGFIPSLLGDLLEERQKIKKKMKATIDPIERKLLDYRQRAIKILANSYYGYYGYARARWYCKECAESVTAWGREYITMTIKEIEEKYGFKVIYSDTDGFFATIPGADAETVKKKAMEFLKYINAKLPGALELEYEGFYKRGFFVTKKKYAVIDEEGKITTRGLEIVRRDWSEIAKETQARVLEALLKDGDVEKAVRIVKEVTEKLSKYEVPPEKLVIHEQITRDLKDYKATGPHVAVAKRLAARGVKIRPGTVISYIVLKGSGRIGDRAIPFDEFDPTKHKYDAEYYIENQVLPAVERILRAFGYRKEDLRYQKTRQVGLSAWLKPKGT

SEQ ID NO: 417 - protein, 774 aa, synthetic construct
MILDTDYITEDGKPVIRIFKKENGEFKIEYDRTFEPYFYALLKDDSAIEEVKKITAERHGTVVTVKRVEKVQKKFLGRPVEVWKLYFTHPQDVPAIRDKIREHPAVIDIYEYDIPFAKRYLIDKGLVPMEGDEELKMLAFDIETLYHEGEEFAEGPILMISYADEEGARVITWKNVDLPYVDVVSTEREMIKRFLRVVKEKDPDVLITLNGDNFDFAYLKKRCEKLGINFALGRDGSEPKIQRMGDRFAVEVKGRIHFDLYPVIRRTINLPTYTLEAVYEAVFGQPKEKVYAEEITTAWETGENLERVARYSMEDAKVTYELGKEFLPMEAQLSRLIGQSLWDVSRSSTGNLVEWFLLRKAYERNELAPNKPDEKELARRRQSYEGGYVKEPERGLWENIVYLDFRSLYPSIIITHNVSPDTLNREGCKEYDVAPQVGHRFCKDFPGFIPSLLGDLLEERQKIKKKMKATIDPIERKLLDYRQRAIKILANSYYGYYGYARARWYCKECAESVTAWGREYITMTIKEIEEKYGFKVIYSDTDGFFATIPGADAETVKKKAMEFLKYINAKLPGALELEYEGFYKRGFFVTKKKYAVIDEEGKITTRGLEIVRRDWSEIAKETQARVLEALLKDGDVEKAVRIVKEVTEKLSKYEVPPEKLVIHEQITRDLKDYKATGPHVAVAKRLAARGVKIRPGTVISYIVLKGSGRIGDRAIPFDEFDPTKHKYDAEYYIENQVLPAVERILRAFGYRKEDLRYQKTRQVGLSAWLKPKGT

SEQ ID NO: 418 - protein, 774 aa, synthetic construct
MILDTDYITEDGKPVIRIFKKENGEFKIEYDRTFEPYFYALLKDDSAIEEVKKITAERHGTVVTVKRVEKVQKKFLGRPVEVWKLYFTHPQDVPAIRDKIREHPAVIDIYEYDIPFAKRYLIDKGLVPMEGDEELKMLAFDIETLYHEGEEFAEGPILMISYADEEGARVITWKNVDLPYVDVVSTEREMIKRFLRVVKEKDPDVLITMNGDNFDFAYLKKRCEKLGINFALGRDGSEPKIQRMGDRFAVEVKGRIHFDLYPVIRRTINLPTYTLEAVYEAVFGQPKEKVYAEEITTAWETGENLERVARYSMEDAKVTYELGKEFLPMEAQLSRLIGQSLWDVSRSSTGNLVEWFLLRKAYERNELAPNKPDEKELARRRQSYEGGYVKEPERGLWENIVYLDFRSLYPSIIITHNVSPDTLNREGCKEYDVAPQVGHRFCKDFPGFIPSLLGDLLEERQKIKKKMKATIDPIERKLLDYRQRAIKILANSYYGYYGYARARWYCKECAESVTAWGREYITMTIKEIEEKYGFKVIYSDTDGFFATIPGADAETVKKKAMEFLKYINAKLPGALELEYEGFYKRGFFVTKKKYAVIDEEGKITTRGLEIVRRDWSEIAKETQARVLEALLKDGDVEKAVRIVKEVTEKLSKYEVPPEKLVIHEQITRDLKDYKATGPHVAVAKRLAARGVKIRPGTVISYIVLKGSGRIGDRAIPFDEFDPTKHKYDAEYYIENQVLPAVERILRAFGYRKEDLRYQKTRQVGLSAWLKPKGT

SEQ ID NO: 419 - protein, 774 aa, synthetic construct
MILDTDYITEDGKPVIRIFKKENGEFKIEYDRTFEPYFYALLKDDSAIEEVKKITAERHGTVVTVKRVEKVQKKFLGRPVEVWKLYFTHPQDVPAIRDKIREHPAVIDIYEYDIPFAKRYLIDKGLVPMEGDEELKMLAFDIETLYHEGEEFAEGPILMISYADEEGARVITWKNVDLPYVDVVSTEREMIKRFLRVVKEKDPDVLITNNGDNFDFAYLKKRCEKLGINFALGRDGSEPKIQRMGDRFAVEVKGRIHFDLYPVIRRTINLPTYTLEAVYEAVFGQPKEKVYAEEITTAWETGENLERVARYSMEDAKVTYELGKEFLPMEAQLSRLIGQSLWDVSRSSTGNLVEWFLLRKAYERNELAPNKPDEKELARRRQSYEGGYVKEPERGLWENIVYLDFRSLYPSIIITHNVSPDTLNREGCKEYDVAPQVGHRFCKDFPGFIPSLLGDLLEERQKIKKKMKATIDPIERKLLDYRQRAIKILANSYYGYYGYARARWYCKECAESVTAWGREYITMTIKEIEEKYGFKVIYSDTDGFFATIPGADAETVKKKAMEFLKYINAKLPGALELEYEGFYKRGFFVTKKKYAVIDEEGKITTRGLEIVRRDWSEIAKETQARVLEALLKDGDVEKAVRIVKEVTEKLSKYEVPPEKLVIHEQITRDLKDYKATGPHVAVAKRLAARGVKIRPGTVISYIVLKGSGRIGDRAIPFDEFDPTKHKYDAEYYIENQVLPAVERILRAFGYRKEDLRYQKTRQVGLSAWLKPKGT

SEQ ID NO: 420 - protein, 774 aa, synthetic construct
MILDTDYITEDGKPVIRIFKKENGEFKIEYDRTFEPYFYALLKDDSAIEEVKKITAERHGTVVTVKRVEKVQKKFLGRPVEVWKLYFTHPQDVPAIRDKIREHPAVIDIYEYDIPFAKRYLIDKGLVPMEGDEELKMLAFDIETLYHEGEEFAEGPILMISYADEEGARVITWKNVDLPYVDVVSTEREMIKRFLRVVKEKDPDVLITPNGDNFDFAYLKKRCEKLGINFALGRDGSEPKIQRMGDRFAVEVKGRIHFDLYPVIRRTINLPTYTLEAVYEAVFGQPKEKVYAEEITTAWETGENLERVARYSMEDAKVTYELGKEFLPMEAQLSRLIGQSLWDVSRSSTGNLVEWFLLRKAYERNELAPNKPDEKELARRRQSYEGGYVKEPERGLWENIVYLDFRSLYPSIIITHNVSPDTLNREGCKEYDVAPQVGHRFCKDFPGFIPSLLGDLLEERQKIKKKMKATIDPIERKLLDYRQRAIKILANSYYGYYGYARARWYCKECAESVTAWGREYITMTIKEIEEKYGFKVIYSDTDGFFATIPGADAETVKKKAMEFLKYINAKLPGALELEYEGFYKRGFFVTKKKYAVIDEEGKITTRGLEIVRRDWSEIAKETQARVLEALLKDGDVEKAVRIVKEVTEKLSKYEVPPEKLVIHEQITRDLKDYKATGPHVAVAKRLAARGVKIRPGTVISYIVLKGSGRIGDRAIPFDEFDPTKHKYDAEYYIENQVLPAVERILRAFGYRKEDLRYQKTRQVGLSAWLKPKGT

SEQ ID NO: 421 - protein, 774 aa, synthetic construct
MILDTDYITEDGKPVIRIFKKENGEFKIEYDRTFEPYFYALLKDDSAIEEVKKITAERHGTVVTVKRVEKVQKKFLGRPVEVWKLYFTHPQDVPAIRDKIREHPAVIDIYEYDIPFAKRYLIDKGLVPMEGDEELKMLAFDIETLYHEGEEFAEGPILMISYADEEGARVITWKNVDLPYVDVVSTEREMIKRFLRVVKEKDPDVLITSNGDNFDFAYLKKRCEKLGINFALGRDGSEPKIQRMGDRFAVEVKGRIHFDLYPVIRRTINLPTYTLEAVYEAVFGQPKEKVYAEEITTAWETGENLERVARYSMEDAKVTYELGKEFLPMEAQLSRLIGQSLWDVSRSSTGNLVEWFLLRKAYERNELAPNKPDEKELARRRQSYEGGYVKEPERGLWENIVYLDFRSLYPSIIITHNVSPDTLNREGCKEYDVAPQVGHRFCKDFPGFIPSLLGDLLEERQKIKKKMKATIDPIERKLLDYRQRAIKILANSYYGYYGYARARWYCKECAESVTAWGREYITMTIKEIEEKYGFKVIYSDTDGFFATIPGADAETVKKKAMEFLKYINAKLPGALELEYEGFYKRGFFVTKKKYAVIDEEGKITTRGLEIVRRDWSEIAKETQARVLEALLKDGDVEKAVRIVKEVTEKLSKYEVPPEKLVIHEQITRDLKDYKATGPHVAVAKRLAARGVKIRPGTVISYIVLKGSGRIGDRAIPFDEFDPTKHKYDAEYYIENQVLPAVERILRAFGYRKEDLRYQKTRQVGLSAWLKPKGT

SEQ ID NO: 422 - protein, 774 aa, synthetic construct
MILDTDYITEDGKPVIRIFKKENGEFKIEYDRTFEPYFYALLKDDSAIEEVKKITAERHGTVVTVKRVEKVQKKFLGRPVEVWKLYFTHPQDVPAIRDKIREHPAVIDIYEYDIPFAKRYLIDKGLVPMEGDEELKMLAFDIETLYHEGEEFAEGPILMISYADEEGARVITWKNVDLPYVDVVSTEREMIKRFLRVVKEKDPDVLITTNGDNFDFAYLKKRCEKLGINFALGRDGSEPKIQRMGDRFAVEVKGRIHFDLYPVIRRTINLPTYTLEAVYEAVFGQPKEKVYAEEITTAWETGENLERVARYSMEDAKVTYELGKEFLPMEAQLSRLIGQSLWDVSRSSTGNLVEWFLLRKAYERNELAPNKPDEKELARRRQSYEGGYVKEPERGLWENIVYLDFRSLYPSIIITHNVSPDTLNREGCKEYDVAPQVGHRFCKDFPGFIPSLLGDLLEERQKIKKKMKATIDPIERKLLDYRQRAIKILANSYYGYYGYARARWYCKECAESVTAWGREYITMTIKEIEEKYGFKVIYSDTDGFFATIPGADAETVKKKAMEFLKYINAKLPGALELEYEGFYKRGFFVTKKKYAVIDEEGKITTRGLEIVRRDWSEIAKETQARVLEALLKDGDVEKAVRIVKEVTEKLSKYEVPPEKLVIHEQITRDLKDYKATGPHVAVAKRLAARGVKIRPGTVISYIVLKGSGRIGDRAIPFDEFDPTKHKYDAEYYIENQVLPAVERILRAFGYRKEDLRYQKTRQVGLSAWLKPKGT

SEQ ID NO: 423 - protein, 774 aa, synthetic construct
MILDTDYITEDGKPVIRIFKKENGEFKIEYDRTFEPYFYALLKDDSAIEEVKKITAERHGTVVTVKRVEKVQKKFLGRPVEVWKLYFTHPQDVPAIRDKIREHPAVIDIYEYDIPFAKRYLIDKGLVPMEGDEELKMLAFDIETLYHEGEEFAEGPILMISYADEEGARVITWKNVDLPYVDVVSTEREMIKRFLRVVKEKDPDVLITVNGDNFDFAYLKKRCEKLGINFALGRDGSEPKIQRMGDRFAVEVKGRIHFDLYPVIRRTINLPTYTLEAVYEAVFGQPKEKVYAEEITTAWETGENLERVARYSMEDAKVTYELGKEFLPMEAQLSRLIGQSLWDVSRSSTGNLVEWFLLRKAYERNELAPNKPDEKELARRRQSYEGGYVKEPERGLWENIVYLDFRSLYPSIIITHNVSPDTLNREGCKEYDVAPQVGHRFCKDFPGFIPSLLGDLLEERQKIKKKMKATIDPIERKLLDYRQRAIKILANSYYGYYGYARARWYCKECAESVTAWGREYITMTIKEIEEKYGFKVIYSDTDGFFATIPGADAETVKKKAMEFLKYINAKLPGALELEYEGFYKRGFFVTKKKYAVIDEEGKITTRGLEIVRRDWSEIAKETQARVLEALLKDGDVEKAVRIVKEVTEKLSKYEVPPEKLVIHEQITRDLKDYKATGPHVAVAKRLAARGVKIRPGTVISYIVLKGSGRIGDRAIPFDEFDPTKHKYDAEYYIENQVLPAVERILRAFGYRKEDLRYQKTRQVGLSAWLKPKGT

SEQ ID NO: 424 - protein, 774 aa, synthetic construct
MILDTDYITEDGKPVIRIFKKENGEFKIEYDRTFEPYFYALLKDDSAIEEVKKITAERHGTVVTVKRVEKVQKKFLGRPVEVWKLYFTHPQDVPAIRDKIREHPAVIDIYEYDIPFAKRYLIDKGLVPMEGDEELKMLAFDIETLYHEGEEFAEGPILMISYADEEGARVITWKNVDLPYVDVVSTEREMIKRFLRVVKEKDPDVLITWNGDNFDFAYLKKRCEKLGINFALGRDGSEPKIQRMGDRFAVEVKGRIHFDLYPVIRRTINLPTYTLEAVYEAVFGQPKEKVYAEEITTAWETGENLERVARYSMEDAKVTYELGKEFLPMEAQLSRLIGQSLWDVSRSSTGNLVEWFLLRKAYERNELAPNKPDEKELARRRQSYEGGYVKEPERGLWENIVYLDFRSLYPSIIITHNVSPDTLNREGCKEYDVAPQVGHRFCKDFPGFIPSLLGDLLEERQKIKKKMKATIDPIERKLLDYRQRAIKILANSYYGYYGYARARWYCKECAESVTAWGREYITMTIKEIEEKYGFKVIYSDTDGFFATIPGADAETVKKKAMEFLKYINAKLPGALELEYEGFYKRGFFVTKKKYAVIDEEGKITTRGLEIVRRDWSEIAKETQARVLEALLKDGDVEKAVRIVKEVTEKLSKYEVPPEKLVIHEQITRDLKDYKATGPHVAVAKRLAARGVKIRPGTVISYIVLKGSGRIGDRAIPFDEFDPTKHKYDAEYYIENQVLPAVERILRAFGYRKEDLRYQKTRQVGLSAWLKPKGT

SEQ ID NO: 425 - protein, 774 aa, synthetic construct
MILDTDYITEDGKPVIRIFKKENGEFKIEYDRTFEPYFYALLKDDSAIEEVKKITAERHGTVVTVKRVEKVQKKFLGRPVEVWKLYFTHPQDVPAIRDKIREHPAVIDIYEYDIPFAKRYLIDKGLVPMEGDEELKMLAFDIETLYHEGEEFAEGPILMISYADEEGARVITWKNVDLPYVDVVSTEREMIKRFLRVVKEKDPDVLITYCGDNFDFAYLKKRCEKLGINFALGRDGSEPKIQRMGDRFAVEVKGRIHFDLYPVIRRTINLPTYTLEAVYEAVFGQPKEKVYAEEITTAWETGENLERVARYSMEDAKVTYELGKEFLPMEAQLSRLIGQSLWDVSRSSTGNLVEWFLLRKAYERNELAPNKPDEKELARRRQSYEGGYVKEPERGLWENIVYLDFRSLYPSIIITHNVSPDTLNREGCKEYDVAPQVGHRFCKDFPGFIPSLLGDLLEERQKIKKKMKATIDPIERKLLDYRQRAIKILANSYYGYYGYARARWYCKECAESVTAWGREYITMTIKEIEEKYGFKVIYSDTDGFFATIPGADAETVKKKAMEFLKYINAKLPGALELEYEGFYKRGFFVTKKKYAVIDEEGKITTRGLEIVRRDWSEIAKETQARVLEALLKDGDVEKAVRIVKEVTEKLSKYEVPPEKLVIHEQITRDLKDYKATGPHVAVAKRLAARGVKIRPGTVISYIVLKGSGRIGDRAIPFDEFDPTKHKYDAEYYIENQVLPAVERILRAFGYRKEDLRYQKTRQVGLSAWLKPKGT

SEQ ID NO: 426 - protein, 774 aa, synthetic construct
MILDTDYITEDGKPVIRIFKKENGEFKIEYDRTFEPYFYALLKDDSAIEEVKKITAERHGTVVTVKRVEKVQKKFLGRPVEVWKLYFTHPQDVPAIRDKIREHPAVIDIYEYDIPFAKRYLIDKGLVPMEGDEELKMLAFDIETLYHEGEEFAEGPILMISYADEEGARVITWKNVDLPYVDVVSTEREMIKRFLRVVKEKDPDVLITYDGDNFDFAYLKKRCEKLGINFALGRDGSEPKIQRMGDRFAVEVKGRIHFDLYPVIRRTINLPTYTLEAVYEAVFGQPKEKVYAEEITTAWETGENLERVARYSMEDAKVTYELGKEFLPMEAQLSRLIGQSLWDVSRSSTGNLVEWFLLRKAYERNELAPNKPDEKELARRRQSYEGGYVKEPERGLWENIVYLDFRSLYPSIIITHNVSPDTLNREGCKEYDVAPQVGHRFCKDFPGFIPSLLGDLLEERQKIKKKMKATIDPIERKLLDYRQRAIKILANSYYGYYGYARARWYCKECAESVTAWGREYITMTIKEIEEKYGFKVIYSDTDGFFATIPGADAETVKKKAMEFLKYINAKLPGALELEYEGFYKRGFFVTKKKYAVIDEEGKITTRGLEIVRRDWSEIAKETQARVLEALLKDGDVEKAVRIVKEVTEKLSKYEVPPEKLVIHEQITRDLKDYKATGPHVAVAKRLAARGVKIRPGTVISYIVLKGSGRIGDRAIPFDEFDPTKHKYDAEYYIENQVLPAVERILRAFGYRKEDLRYQKTRQVGLSAWLKPKGT

SEQ ID NO: 427 - protein, 774 aa, synthetic construct
MILDTDYITEDGKPVIRIFKKENGEFKIEYDRTFEPYFYALLKDDSAIEEVKKITAERHGTVVTVKRVEKVQKKFLGRPVEVWKLYFTHPQDVPAIRDKIREHPAVIDIYEYDIPFAKRYLIDKGLVPMEGDEELKMLAFDIETLYHEGEEFAEGPILMISYADEEGARVITWKNVDLPYVDVVSTEREMIKRFLRVVKEKDPDVLITYEGDNFDFAYLKKRCEKLGINFALGRDGSEPKIQRMGDRFAVEVKGRIHFDLYPVIRRTINLPTYTLEAVYEAVFGQPKEKVYAEEITTAWETGENLERVARYSMEDAKVTYELGKEFLPMEAQLSRLIGQSLWDVSRSSTGNLVEWFLLRKAYERNELAPNKPDEKELARRRQSYEGGYVKEPERGLWENIVYLDFRSLYPSIIITHNVSPDTLNREGCKEYDVAPQVGHRFCKDFPGFIPSLLGDLLEERQKIKKKMKATIDPIERKLLDYRQRAIKILANSYYGYYGYARARWYCKECAESVTAWGREYITMTIKEIEEKYGFKVIYSDTDGFFATIPGADAETVKKKAMEFLKYINAKLPGALELEYEGFYKRGFFVTKKKYAVIDEEGKITTRGLEIVRRDWSEIAKETQARVLEALLKDGDVEKAVRIVKEVTEKLSKYEVPPEKLVIHEQITRDLKDYKATGPHVAVAKRLAARGVKIRPGTVISYIVLKGSGRIGDRAIPFDEFDPTKHKYDAEYYIENQVLPAVERILRAFGYRKEDLRYQKTRQVGLSAWLKPKGT

SEQ ID NO: 428 - protein, 774 aa, synthetic construct
MILDTDYITEDGKPVIRIFKKENGEFKIEYDRTFEPYFYALLKDDSAIEEVKKITAERHGTVVTVKRVEKVQKKFLGRPVEVWKLYFTHPQDVPAIRDKIREHPAVIDIYEYDIPFAKRYLIDKGLVPMEGDEELKMLAFDIETLYHEGEEFAEGPILMISYADEEGARVITWKNVDLPYVDVVSTEREMIKRFLRVVKEKDPDVLITYGGDNFDFAYLKKRCEKLGINFALGRDGSEPKIQRMGDRFAVEVKGRIHFDLYPVIRRTINLPTYTLEAVYEAVFGQPKEKVYAEEITTAWETGENLERVARYSMEDAKVTYELGKEFLPMEAQLSRLIGQSLWDVSRSSTGNLVEWFLLRKAYERNELAPNKPDEKELARRRQSYEGGYVKEPERGLWENIVYLDFRSLYPSIIITHNVSPDTLNREGCKEYDVAPQVGHRFCKDFPGFIPSLLGDLLEERQKIKKKMKATIDPIERKLLDYRQRAIKILANSYYGYYGYARARWYCKECAESVTAWGREYITMTIKEIEEKYGFKVIYSDTDGFFATIPGADAETVKKKAMEFLKYINAKLPGALELEYEGFYKRGFFVTKKKYAVIDEEGKITTRGLEIVRRDWSEIAKETQARVLEALLKDGDVEKAVRIVKEVTEKLSKYEVPPEKLVIHEQITRDLKDYKATGPHVAVAKRLAARGVKIRPGTVISYIVLKGSGRIGDRAIPFDEFDPTKHKYDAEYYIENQVLPAVERILRAFGYRKEDLRYQKTRQVGLSAWLKPKGT

SEQ ID NO: 429 - protein, 774 aa, synthetic construct
MILDTDYITEDGKPVIRIFKKENGEFKIEYDRTFEPYFYALLKDDSAIEEVKKITAERHGTVVTVKRVEKVQKKFLGRPVEVWKLYFTHPQDVPAIRDKIREHPAVIDIYEYDIPFAKRYLIDKGLVPMEGDEELKMLAFDIETLYHEGEEFAEGPILMISYADEEGARVITWKNVDLPYVDVVSTEREMIKRFLRVVKEKDPDVLITYMGDNFDFAYLKKRCEKLGINFALGRDGSEPKIQRMGDRFAVEVKGRIHFDLYPVIRRTINLPTYTLEAVYEAVFGQPKEKVYAEEITTAWETGENLERVARYSMEDAKVTYELGKEFLPMEAQLSRLIGQSLWDVSRSSTGNLVEWFLLRKAYERNELAPNKPDEKELARRRQSYEGGYVKEPERGLWENIVYLDFRSLYPSIIITHNVSPDTLNREGCKEYDVAPQVGHRFCKDFPGFIPSLLGDLLEERQKIKKKMKATIDPIERKLLDYRQRAIKILANSYYGYYGYARARWYCKECAESVTAWGREYITMTIKEIEEKYGFKVIYSDTDGFFATIPGADAETVKKKAMEFLKYINAKLPGALELEYEGFYKRGFFVTKKKYAVIDEEGKITTRGLEIVRRDWSEIAKETQARVLEALLKDGDVEKAVRIVKEVTEKLSKYEVPPEKLVIHEQITRDLKDYKATGPHVAVAKRLAARGVKIRPGTVISYIVLKGSGRIGDRAIPFDEFDPTKHKYDAEYYIENQVLPAVERILRAFGYRKEDLRYQKTRQVGLSAWLKPKGT

SEQ ID NO: 430 - protein, 774 aa, synthetic construct
MILDTDYITEDGKPVIRIFKKENGEFKIEYDRTFEPYFYALLKDDSAIEEVKKITAERHGTVVTVKRVEKVQKKFLGRPVEVWKLYFTHPQDVPAIRDKIREHPAVIDIYEYDIPFAKRYLIDKGLVPMEGDEELKMLAFDIETLYHEGEEFAEGPILMISYADEEGARVITWKNVDLPYVDVVSTEREMIKRFLRVVKEKDPDVLITYPGDNFDFAYLKKRCEKLGINFALGRDGSEPKIQRMGDRFAVEVKGRIHFDLYPVIRRTINLPTYTLEAVYEAVFGQPKEKVYAEEITTAWETGENLERVARYSMEDAKVTYELGKEFLPMEAQLSRLIGQSLWDVSRSSTGNLVEWFLLRKAYERNELAPNKPDEKELARRRQSYEGGYVKEPERGLWENIVYLDFRSLYPSIIITHNVSPDTLNREGCKEYDVAPQVGHRFCKDFPGFIPSLLGDLLEERQKIKKKMKATIDPIERKLLDYRQRAIKILANSYYGYYGYARARWYCKECAESVTAWGREYITMTIKEIEEKYGFKVIYSDTDGFFATIPGADAETVKKKAMEFLKYINAKLPGALELEYEGFYKRGFFVTKKKYAVIDEEGKITTRGLEIVRRDWSEIAKETQARVLEALLKDGDVEKAVRIVKEVTEKLSKYEVPPEKLVIHEQITRDLKDYKATGPHVAVAKRLAARGVKIRPGTVISYIVLKGSGRIGDRAIPFDEFDPTKHKYDAEYYIENQVLPAVERILRAFGYRKEDLRYQKTRQVGLSAWLKPKGT

SEQ ID NO: 431 - protein, 774 aa, synthetic construct
MILDTDYITEDGKPVIRIFKKENGEFKIEYDRTFEPYFYALLKDDSAIEEVKKITAERHGTVVTVKRVEKVQKKFLGRPVEVWKLYFTHPQDVPAIRDKIREHPAVIDIYEYDIPFAKRYLIDKGLVPMEGDEELKMLAFDIETLYHEGEEFAEGPILMISYADEEGARVITWKNVDLPYVDVVSTEREMIKRFLRVVKEKDPDVLITYQGDNFDFAYLKKRCEKLGINFALGRDGSEPKIQRMGDRFAVEVKGRIHFDLYPVIRRTINLPTYTLEAVYEAVFGQPKEKVYAEEITTAWETGENLERVARYSMEDAKVTYELGKEFLPMEAQLSRLIGQSLWDVSRSSTGNLVEWFLLRKAYERNELAPNKPDEKELARRRQSYEGGYVKEPERGLWENIVYLDFRSLYPSIIITHNVSPDTLNREGCKEYDVAPQVGHRFCKDFPGFIPSLLGDLLEERQKIKKKMKATIDPIERKLLDYRQRAIKILANSYYGYYGYARARWYCKECAESVTAWGREYITMTIKEIEEKYGFKVIYSDTDGFFATIPGADAETVKKKAMEFLKYINAKLPGALELEYEGFYKRGFFVTKKKYAVIDEEGKITTRGLEIVRRDWSEIAKETQARVLEALLKDGDVEKAVRIVKEVTEKLSKYEVPPEKLVIHEQITRDLKDYKATGPHVAVAKRLAARGVKIRPGTVISYIVLKGSGRIGDRAIPFDEFDPTKHKYDAEYYIENQVLPAVERILRAFGYRKEDLRYQKTRQVGLSAWLKPKGT

SEQ ID NO: 432 - protein, 774 aa, synthetic construct
MILDTDYITEDGKPVIRIFKKENGEFKIEYDRTFEPYFYALLKDDSAIEEVKKITAERHGTVVTVKRVEKVQKKFLGRPVEVWKLYFTHPQDVPAIRDKIREHPAVIDIYEYDIPFAKRYLIDKGLVPMEGDEELKMLAFDIETLYHEGEEFAEGPILMISYADEEGARVITWKNVDLPYVDVVSTEREMIKRFLRVVKEKDPDVLITYSGDNFDFAYLKKRCEKLGINFALGRDGSEPKIQRMGDRFAVEVKGRIHFDLYPVIRRTINLPTYTLEAVYEAVFGQPKEKVYAEEITTAWETGENLERVARYSMEDAKVTYELGKEFLPMEAQLSRLIGQSLWDVSRSSTGNLVEWFLLRKAYERNELAPNKPDEKELARRRQSYEGGYVKEPERGLWENIVYLDFRSLYPSIIITHNVSPDTLNREGCKEYDVAPQVGHRFCKDFPGFIPSLLGDLLEERQKIKKKMKATIDPIERKLLDYRQRAIKILANSYYGYYGYARARWYCKECAESVTAWGREYITMTIKEIEEKYGFKVIYSDTDGFFATIPGADAETVKKKAMEFLKYINAKLPGALELEYEGFYKRGFFVTKKKYAVIDEEGKITTRGLEIVRRDWSEIAKETQARVLEALLKDGDVEKAVRIVKEVTEKLSKYEVPPEKLVIHEQITRDLKDYKATGPHVAVAKRLAARGVKIRPGTVISYIVLKGSGRIGDRAIPFDEFDPTKHKYDAEYYIENQVLPAVERILRAFGYRKEDLRYQKTRQVGLSAWLKPKGT

SEQ ID NO: 433 - protein, 774 aa, synthetic construct
MILDTDYITEDGKPVIRIFKKENGEFKIEYDRTFEPYFYALLKDDSAIEEVKKITAERHGTVVTVKRVEKVQKKFLGRPVEVWKLYFTHPQDVPAIRDKIREHPAVIDIYEYDIPFAKRYLIDKGLVPMEGDEELKMLAFDIETLYHEGEEFAEGPILMISYADEEGARVITWKNVDLPYVDVVSTEREMIKRFLRVVKEKDPDVLITYTGDNFDFAYLKKRCEKLGINFALGRDGSEPKIQRMGDRFAVEVKGRIHFDLYPVIRRTINLPTYTLEAVYEAVFGQPKEKVYAEEITTAWETGENLERVARYSMEDAKVTYELGKEFLPMEAQLSRLIGQSLWDVSRSSTGNLVEWFLLRKAYERNELAPNKPDEKELARRRQSYEGGYVKEPERGLWENIVYLDFRSLYPSIIITHNVSPDTLNREGCKEYDVAPQVGHRFCKDFPGFIPSLLGDLLEERQKIKKKMKATIDPIERKLLDYRQRAIKILANSYYGYYGYARARWYCKECAESVTAWGREYITMTIKEIEEKYGFKVIYSDTDGFFATIPGADAETVKKKAMEFLKYINAKLPGALELEYEGFYKRGFFVTKKKYAVIDEEGKITTRGLEIVRRDWSEIAKETQARVLEALLKDGDVEKAVRIVKEVTEKLSKYEVPPEKLVIHEQITRDLKDYKATGPHVAVAKRLAARGVKIRPGTVISYIVLKGSGRIGDRAIPFDEFDPTKHKYDAEYYIENQVLPAVERILRAFGYRKEDLRYQKTRQVGLSAWLKPKGT

SEQ ID NO: 434 - protein, 774 aa, synthetic construct
MILDTDYITEDGKPVIRIFKKENGEFKIEYDRTFEPYFYALLKDDSAIEEVKKITAERHGTVVTVKRVEKVQKKFLGRPVEVWKLYFTHPQDVPAIRDKIREHPAVIDIYEYDIPFAKRYLIDKGLVPMEGDEELKMLAFDIETLYHEGEEFAEGPILMISYADEEGARVITWKNVDLPYVDVVSTEREMIKRFLRVVKEKDPDVLITYNCDNFDFAYLKKRCEKLGINFALGRDGSEPKIQRMGDRFAVEVKGRIHFDLYPVIRRTINLPTYTLEAVYEAVFGQPKEKVYAEEITTAWETGENLERVARYSMEDAKVTYELGKEFLPMEAQLSRLIGQSLWDVSRSSTGNLVEWFLLRKAYERNELAPNKPDEKELARRRQSYEGGYVKEPERGLWENIVYLDFRSLYPSIIITHNVSPDTLNREGCKEYDVAPQVGHRFCKDFPGFIPSLLGDLLEERQKIKKKMKATIDPIERKLLDYRQRAIKILANSYYGYYGYARARWYCKECAESVTAWGREYITMTIKEIEEKYGFKVIYSDTDGFFATIPGADAETVKKKAMEFLKYINAKLPGALELEYEGFYKRGFFVTKKKYAVIDEEGKITTRGLEIVRRDWSEIAKETQARVLEALLKDGDVEKAVRIVKEVTEKLSKYEVPPEKLVIHEQITRDLKDYKATGPHVAVAKRLAARGVKIRPGTVISYIVLKGSGRIGDRAIPFDEFDPTKHKYDAEYYIENQVLPAVERILRAFGYRKEDLRYQKTRQVGLSAWLKPKGT

SEQ ID NO: 435 - protein, 774 aa, synthetic construct
MILDTDYITEDGKPVIRIFKKENGEFKIEYDRTFEPYFYALLKDDSAIEEVKKITAERHGTVVTVKRVEKVQKKFLGRPVEVWKLYFTHPQDVPAIRDKIREHPAVIDIYEYDIPFAKRYLIDKGLVPMEGDEELKMLAFDIETLYHEGEEFAEGPILMISYADEEGARVITWKNVDLPYVDVVSTEREMIKRFLRVVKEKDPDVLITYNDDNFDFAYLKKRCEKLGINFALGRDGSEPKIQRMGDRFAVEVKGRIHFDLYPVIRRTINLPTYTLEAVYEAVFGQPKEKVYAEEITTAWETGENLERVARYSMEDAKVTYELGKEFLPMEAQLSRLIGQSLWDVSRSSTGNLVEWFLLRKAYERNELAPNKPDEKELARRRQSYEGGYVKEPERGLWENIVYLDFRSLYPSIIITHNVSPDTLNREGCKEYDVAPQVGHRFCKDFPGFIPSLLGDLLEERQKIKKKMKATIDPIERKLLDYRQRAIKILANSYYGYYGYARARWYCKECAESVTAWGREYITMTIKEIEEKYGFKVIYSDTDGFFATIPGADAETVKKKAMEFLKYINAKLPGALELEYEGFYKRGFFVTKKKYAVIDEEGKITTRGLEIVRRDWSEIAKETQARVLEALLKDGDVEKAVRIVKEVTEKLSKYEVPPEKLVIHEQITRDLKDYKATGPHVAVAKRLAARGVKIRPGTVISYIVLKGSGRIGDRAIPFDEFDPTKHKYDAEYYIENQVLPAVERILRAFGYRKEDLRYQKTRQVGLSAWLKPKGT

SEQ ID NO: 436 - protein, 774 aa, synthetic construct
MILDTDYITEDGKPVIRIFKKENGEFKIEYDRTFEPYFYALLKDDSAIEEVKKITAERHGTVVTVKRVEKVQKKFLGRPVEVWKLYFTHPQDVPAIRDKIREHPAVIDIYEYDIPFAKRYLIDKGLVPMEGDEELKMLAFDIETLYHEGEEFAEGPILMISYADEEGARVITWKNVDLPYVDVVSTEREMIKRFLRVVKEKDPDVLITYNEDNFDFAYLKKRCEKLGINFALGRDGSEPKIQRMGDRFAVEVKGRIHFDLYPVIRRTINLPTYTLEAVYEAVFGQPKEKVYAEEITTAWETGENLERVARYSMEDAKVTYELGKEFLPMEAQLSRLIGQSLWDVSRSSTGNLVEWFLLRKAYERNELAPNKPDEKELARRRQSYEGGYVKEPERGLWENIVYLDFRSLYPSIIITHNVSPDTLNREGCKEYDVAPQVGHRFCKDFPGFIPSLLGDLLEERQKIKKKMKATIDPIERKLLDYRQRAIKILANSYYGYYGYARARWYCKECAESVTAWGREYITMTIKEIEEKYGFKVIYSDTDGFFATIPGADAETVKKKAMEFLKYINAKLPGALELEYEGFYKRGFFVTKKKYAVIDEEGKITTRGLEIVRRDWSEIAKETQARVLEALLKDGDVEKAVRIVKEVTEKLSKYEVPPEKLVIHEQITRDLKDYKATGPHVAVAKRLAARGVKIRPGTVISYIVLKGSGRIGDRAIPFDEFDPTKHKYDAEYYIENQVLPAVERILRAFGYRKEDLRYQKTRQVGLSAWLKPKGT

SEQ ID NO: 437 - protein, 774 aa, synthetic construct
MILDTDYITEDGKPVIRIFKKENGEFKIEYDRTFEPYFYALLKDDSAIEEVKKITAERHGTVVTVKRVEKVQKKFLGRPVEVWKLYFTHPQDVPAIRDKIREHPAVIDIYEYDIPFAKRYLIDKGLVPMEGDEELKMLAFDIETLYHEGEEFAEGPILMISYADEEGARVITWKNVDLPYVDVVSTEREMIKRFLRVVKEKDPDVLITYNFDNFDFAYLKKRCEKLGINFALGRDGSEPKIQRMGDRFAVEVKGRIHFDLYPVIRRTINLPTYTLEAVYEAVFGQPKEKVYAEEITTAWETGENLERVARYSMEDAKVTYELGKEFLPMEAQLSRLIGQSLWDVSRSSTGNLVEWFLLRKAYERNELAPNKPDEKELARRRQSYEGGYVKEPERGLWENIVYLDFRSLYPSIIITHNVSPDTLNREGCKEYDVAPQVGHRFCKDFPGFIPSLLGDLLEERQKIKKKMKATIDPIERKLLDYRQRAIKILANSYYGYYGYARARWYCKECAESVTAWGREYITMTIKEIEEKYGFKVIYSDTDGFFATIPGADAETVKKKAMEFLKYINAKLPGALELEYEGFYKRGFFVTKKKYAVIDEEGKITTRGLEIVRRDWSEIAKETQARVLEALLKDGDVEKAVRIVKEVTEKLSKYEVPPEKLVIHEQITRDLKDYKATGPHVAVAKRLAARGVKIRPGTVISYIVLKGSGRIGDRAIPFDEFDPTKHKYDAEYYIENQVLPAVERILRAFGYRKEDLRYQKTRQVGLSAWLKPKGT

SEQ ID NO: 438 - protein, 774 aa, synthetic construct
MILDTDYITEDGKPVIRIFKKENGEFKIEYDRTFEPYFYALLKDDSAIEEVKKITAERHGTVVTVKRVEKVQKKFLGRPVEVWKLYFTHPQDVPAIRDKIREHPAVIDIYEYDIPFAKRYLIDKGLVPMEGDEELKMLAFDIETLYHEGEEFAEGPILMISYADEEGARVITWKNVDLPYVDVVSTEREMIKRFLRVVKEKDPDVLITYNHDNFDFAYLKKRCEKLGINFALGRDGSEPKIQRMGDRFAVEVKGRIHFDLYPVIRRTINLPTYTLEAVYEAVFGQPKEKVYAEEITTAWETGENLERVARYSMEDAKVTYELGKEFLPMEAQLSRLIGQSLWDVSRSSTGNLVEWFLLRKAYERNELAPNKPDEKELARRRQSYEGGYVKEPERGLWENIVYLDFRSLYPSIIITHNVSPDTLNREGCKEYDVAPQVGHRFCKDFPGFIPSLLGDLLEERQKIKKKMKATIDPIERKLLDYRQRAIKILANSYYGYYGYARARWYCKECAESVTAWGREYITMTIKEIEEKYGFKVIYSDTDGFFATIPGADAETVKKKAMEFLKYINAKLPGALELEYEGFYKRGFFVTKKKYAVIDEEGKITTRGLEIVRRDWSEIAKETQARVLEALLKDGDVEKAVRIVKEVTEKLSKYEVPPEKLVIHEQITRDLKDYKATGPHVAVAKRLAARGVKIRPGTVISYIVLKGSGRIGDRAIPFDEFDPTKHKYDAEYYIENQVLPAVERILRAFGYRKEDLRYQKTRQVGLSAWLKPKGT

SEQ ID NO: 439 - protein, 774 aa, synthetic construct
MILDTDYITEDGKPVIRIFKKENGEFKIEYDRTFEPYFYALLKDDSAIEEVKKITAERHGTVVTVKRVEKVQKKFLGRPVEVWKLYFTHPQDVPAIRDKIREHPAVIDIYEYDIPFAKRYLIDKGLVPMEGDEELKMLAFDIETLYHEGEEFAEGPILMISYADEEGARVITWKNVDLPYVDVVSTEREMIKRFLRVVKEKDPDVLITYNIDNFDFAYLKKRCEKLGINFALGRDGSEPKIQRMGDRFAVEVKGRIHFDLYPVIRRTINLPTYTLEAVYEAVFGQPKEKVYAEEITTAWETGENLERVARYSMEDAKVTYELGKEFLPMEAQLSRLIGQSLWDVSRSSTGNLVEWFLLRKAYERNELAPNKPDEKELARRRQSYEGGYVKEPERGLWENIVYLDFRSLYPSIIITHNVSPDTLNREGCKEYDVAPQVGHRFCKDFPGFIPSLLGDLLEERQKIKKKMKATIDPIERKLLDYRQRAIKILANSYYGYYGYARARWYCKECAESVTAWGREYITMTIKEIEEKYGFKVIYSDTDGFFATIPGADAETVKKKAMEFLKYINAKLPGALELEYEGFYKRGFFVTKKKYAVIDEEGKITTRGLEIVRRDWSEIAKETQARVLEALLKDGDVEKAVRIVKEVTEKLSKYEVPPEKLVIHEQITRDLKDYKATGPHVAVAKRLAARGVKIRPGTVISYIVLKGSGRIGDRAIPFDEFDPTKHKYDAEYYIENQVLPAVERILRAFGYRKEDLRYQKTRQVGLSAWLKPKGT

SEQ ID NO: 440 - protein, 774 aa, synthetic construct
MILDTDYITEDGKPVIRIFKKENGEFKIEYDRTFEPYFYALLKDDSAIEEVKKITAERHGTVVTVKRVEKVQKKFLGRPVEVWKLYFTHPQDVPAIRDKIREHPAVIDIYEYDIPFAKRYLIDKGLVPMEGDEELKMLAFDIETLYHEGEEFAEGPILMISYADEEGARVITWKNVDLPYVDVVSTEREMIKRFLRVVKEKDPDVLITYNKDNFDFAYLKKRCEKLGINFALGRDGSEPKIQRMGDRFAVEVKGRIHFDLYPVIRRTINLPTYTLEAVYEAVFGQPKEKVYAEEITTAWETGENLERVARYSMEDAKVTYELGKEFLPMEAQLSRLIGQSLWDVSRSSTGNLVEWFLLRKAYERNELAPNKPDEKELARRRQSYEGGYVKEPERGLWENIVYLDFRSLYPSIIITHNVSPDTLNREGCKEYDVAPQVGHRFCKDFPGFIPSLLGDLLEERQKIKKKMKATIDPIERKLLDYRQRAIKILANSYYGYYGYARARWYCKECAESVTAWGREYITMTIKEIEEKYGFKVIYSDTDGFFATIPGADAETVKKKAMEFLKYINAKLPGALELEYEGFYKRGFFVTKKKYAVIDEEGKITTRGLEIVRRDWSEIAKETQARVLEALLKDGDVEKAVRIVKEVTEKLSKYEVPPEKLVIHEQITRDLKDYKATGPHVAVAKRLAARGVKIRPGTVISYIVLKGSGRIGDRAIPFDEFDPTKHKYDAEYYIENQVLPAVERILRAFGYRKEDLRYQKTRQVGLSAWLKPKGT

SEQ ID NO: 441 - protein, 774 aa, synthetic construct
MILDTDYITEDGKPVIRIFKKENGEFKIEYDRTFEPYFYALLKDDSAIEEVKKITAERHGTVVTVKRVEKVQKKFLGRPVEVWKLYFTHPQDVPAIRDKIREHPAVIDIYEYDIPFAKRYLIDKGLVPMEGDEELKMLAFDIETLYHEGEEFAEGPILMISYADEEGARVITWKNVDLPYVDVVSTEREMIKRFLRVVKEKDPDVLITYNLDNFDFAYLKKRCEKLGINFALGRDGSEPKIQRMGDRFAVEVKGRIHFDLYPVIRRTINLPTYTLEAVYEAVFGQPKEKVYAEEITTAWETGENLERVARYSMEDAKVTYELGKEFLPMEAQLSRLIGQSLWDVSRSSTGNLVEWFLLRKAYERNELAPNKPDEKELARRRQSYEGGYVKEPERGLWENIVYLDFRSLYPSIIITHNVSPDTLNREGCKEYDVAPQVGHRFCKDFPGFIPSLLGDLLEERQKIKKKMKATIDPIERKLLDYRQRAIKILANSYYGYYGYARARWYCKECAESVTAWGREYITMTIKEIEEKYGFKVIYSDTDGFFATIPGADAETVKKKAMEFLKYINAKLPGALELEYEGFYKRGFFVTKKKYAVIDEEGKITTRGLEIVRRDWSEIAKETQARVLEALLKDGDVEKAVRIVKEVTEKLSKYEVPPEKLVIHEQITRDLKDYKATGPHVAVAKRLAARGVKIRPGTVISYIVLKGSGRIGDRAIPFDEFDPTKHKYDAEYYIENQVLPAVERILRAFGYRKEDLRYQKTRQVGLSAWLKPKGT

SEQ ID NO: 442 - protein, 774 aa, synthetic construct
MILDTDYITEDGKPVIRIFKKENGEFKIEYDRTFEPYFYALLKDDSAIEEVKKITAERHGTVVTVKRVEKVQKKFLGRPVEVWKLYFTHPQDVPAIRDKIREHPAVIDIYEYDIPFAKRYLIDKGLVPMEGDEELKMLAFDIETLYHEGEEFAEGPILMISYADEEGARVITWKNVDLPYVDVVSTEREMIKRFLRVVKEKDPDVLITYNMDNFDFAYLKKRCEKLGINFALGRDGSEPKIQRMGDRFAVEVKGRIHFDLYPVIRRTINLPTYTLEAVYEAVFGQPKEKVYAEEITTAWETGENLERVARYSMEDAKVTYELGKEFLPMEAQLSRLIGQSLWDVSRSSTGNLVEWFLLRKAYERNELAPNKPDEKELARRRQSYEGGYVKEPERGLWENIVYLDFRSLYPSIIITHNVSPDTLNREGCKEYDVAPQVGHRFCKDFPGFIPSLLGDLLEERQKIKKKMKATIDPIERKLLDYRQRAIKILANSYYGYYGYARARWYCKECAESVTAWGREYITMTIKEIEEKYGFKVIYSDTDGFFATIPGADAETVKKKAMEFLKYINAKLPGALELEYEGFYKRGFFVTKKKYAVIDEEGKITTRGLEIVRRDWSEIAKETQARVLEALLKDGDVEKAVRIVKEVTEKLSKYEVPPEKLVIHEQITRDLKDYKATGPHVAVAKRLAARGVKIRPGTVISYIVLKGSGRIGDRAIPFDEFDPTKHKYDAEYYIENQVLPAVERILRAFGYRKEDLRYQKTRQVGLSAWLKPKGT

SEQ ID NO: 443 - protein, 774 aa, synthetic construct
MILDTDYITEDGKPVIRIFKKENGEFKIEYDRTFEPYFYALLKDDSAIEEVKKITAERHGTVVTVKRVEKVQKKFLGRPVEVWKLYFTHPQDVPAIRDKIREHPAVIDIYEYDIPFAKRYLIDKGLVPMEGDEELKMLAFDIETLYHEGEEFAEGPILMISYADEEGARVITWKNVDLPYVDVVSTEREMIKRFLRVVKEKDPDVLITYNNDNFDFAYLKKRCEKLGINFALGRDGSEPKIQRMGDRFAVEVKGRIHFDLYPVIRRTINLPTYTLEAVYEAVFGQPKEKVYAEEITTAWETGENLERVARYSMEDAKVTYELGKEFLPMEAQLSRLIGQSLWDVSRSSTGNLVEWFLLRKAYERNELAPNKPDEKELARRRQSYEGGYVKEPERGLWENIVYLDFRSLYPSIIITHNVSPDTLNREGCKEYDVAPQVGHRFCKDFPGFIPSLLGDLLEERQKIKKKMKATIDPIERKLLDYRQRAIKILANSYYGYYGYARARWYCKECAESVTAWGREYITMTIKEIEEKYGFKVIYSDTDGFFATIPGADAETVKKKAMEFLKYINAKLPGALELEYEGFYKRGFFVTKKKYAVIDEEGKITTRGLEIVRRDWSEIAKETQARVLEALLKDGDVEKAVRIVKEVTEKLSKYEVPPEKLVIHEQITRDLKDYKATGPHVAVAKRLAARGVKIRPGTVISYIVLKGSGRIGDRAIPFDEFDPTKHKYDAEYYIENQVLPAVERILRAFGYRKEDLRYQKTRQVGLSAWLKPKGT

SEQ ID NO: 444 - protein, 774 aa, synthetic construct
MILDTDYITEDGKPVIRIFKKENGEFKIEYDRTFEPYFYALLKDDSAIEEVKKITAERHGTVVTVKRVEKVQKKFLGRPVEVWKLYFTHPQDVPAIRDKIREHPAVIDIYEYDIPFAKRYLIDKGLVPMEGDEELKMLAFDIETLYHEGEEFAEGPILMISYADEEGARVITWKNVDLPYVDVVSTEREMIKRFLRVVKEKDPDVLITYNPDNFDFAYLKKRCEKLGINFALGRDGSEPKIQRMGDRFAVEVKGRIHFDLYPVIRRTINLPTYTLEAVYEAVFGQPKEKVYAEEITTAWETGENLERVARYSMEDAKVTYELGKEFLPMEAQLSRLIGQSLWDVSRSSTGNLVEWFLLRKAYERNELAPNKPDEKELARRRQSYEGGYVKEPERGLWENIVYLDFRSLYPSIIITHNVSPDTLNREGCKEYDVAPQVGHRFCKDFPGFIPSLLGDLLEERQKIKKKMKATIDPIERKLLDYRQRAIKILANSYYGYYGYARARWYCKECAESVTAWGREYITMTIKEIEEKYGFKVIYSDTDGFFATIPGADAETVKKKAMEFLKYINAKLPGALELEYEGFYKRGFFVTKKKYAVIDEEGKITTRGLEIVRRDWSEIAKETQARVLEALLKDGDVEKAVRIVKEVTEKLSKYEVPPEKLVIHEQITRDLKDYKATGPHVAVAKRLAARGVKIRPGTVISYIVLKGSGRIGDRAIPFDEFDPTKHKYDAEYYIENQVLPAVERILRAFGYRKEDLRYQKTRQVGLSAWLKPKGT

SEQ ID NO: 445 - protein, 774 aa, synthetic construct
MILDTDYITEDGKPVIRIFKKENGEFKIEYDRTFEPYFYALLKDDSAIEEVKKITAERHGTVVTVKRVEKVQKKFLGRPVEVWKLYFTHPQDVPAIRDKIREHPAVIDIYEYDIPFAKRYLIDKGLVPMEGDEELKMLAFDIETLYHEGEEFAEGPILMISYADEEGARVITWKNVDLPYVDVVSTEREMIKRFLRVVKEKDPDVLITYNQDNFDFAYLKKRCEKLGINFALGRDGSEPKIQRMGDRFAVEVKGRIHFDLYPVIRRTINLPTYTLEAVYEAVFGQPKEKVYAEEITTAWETGENLERVARYSMEDAKVTYELGKEFLPMEAQLSRLIGQSLWDVSRSSTGNLVEWFLLRKAYERNELAPNKPDEKELARRRQSYEGGYVKEPERGLWENIVYLDFRSLYPSIIITHNVSPDTLNREGCKEYDVAPQVGHRFCKDFPGFIPSLLGDLLEERQKIKKKMKATIDPIERKLLDYRQRAIKILANSYYGYYGYARARWYCKECAESVTAWGREYITMTIKEIEEKYGFKVIYSDTDGFFATIPGADAETVKKKAMEFLKYINAKLPGALELEYEGFYKRGFFVTKKKYAVIDEEGKITTRGLEIVRRDWSEIAKETQARVLEALLKDGDVEKAVRIVKEVTEKLSKYEVPPEKLVIHEQITRDLKDYKATGPHVAVAKRLAARGVKIRPGTVISYIVLKGSGRIGDRAIPFDEFDPTKHKYDAEYYIENQVLPAVERILRAFGYRKEDLRYQKTRQVGLSAWLKPKGT

SEQ ID NO: 446 - protein, 774 aa, synthetic construct
MILDTDYITEDGKPVIRIFKKENGEFKIEYDRTFEPYFYALLKDDSAIEEVKKITAERHGTVVTVKRVEKVQKKFLGRPVEVWKLYFTHPQDVPAIRDKIREHPAVIDIYEYDIPFAKRYLIDKGLVPMEGDEELKMLAFDIETLYHEGEEFAEGPILMISYADEEGARVITWKNVDLPYVDVVSTEREMIKRFLRVVKEKDPDVLITYNRDNFDFAYLKKRCEKLGINFALGRDGSEPKIQRMGDRFAVEVKGRIHFDLYPVIRRTINLPTYTLEAVYEAVFGQPKEKVYAEEITTAWETGENLERVARYSMEDAKVTYELGKEFLPMEAQLSRLIGQSLWDVSRSSTGNLVEWFLLRKAYERNELAPNKPDEKELARRRQSYEGGYVKEPERGLWENIVYLDFRSLYPSIIITHNVSPDTLNREGCKEYDVAPQVGHRFCKDFPGFIPSLLGDLLEERQKIKKKMKATIDPIERKLLDYRQRAIKILANSYYGYYGYARARWYCKECAESVTAWGREYITMTIKEIEEKYGFKVIYSDTDGFFATIPGADAETVKKKAMEFLKYINAKLPGALELEYEGFYKRGFFVTKKKYAVIDEEGKITTRGLEIVRRDWSEIAKETQARVLEALLKDGDVEKAVRIVKEVTEKLSKYEVPPEKLVIHEQITRDLKDYKATGPHVAVAKRLAARGVKIRPGTVISYIVLKGSGRIGDRAIPFDEFDPTKHKYDAEYYIENQVLPAVERILRAFGYRKEDLRYQKTRQVGLSAWLKPKGT

SEQ ID NO: 447 - protein, 774 aa, synthetic construct
MILDTDYITEDGKPVIRIFKKENGEFKIEYDRTFEPYFYALLKDDSAIEEVKKITAERHGTVVTVKRVEKVQKKFLGRPVEVWKLYFTHPQDVPAIRDKIREHPAVIDIYEYDIPFAKRYLIDKGLVPMEGDEELKMLAFDIETLYHEGEEFAEGPILMISYADEEGARVITWKNVDLPYVDVVSTEREMIKRFLRVVKEKDPDVLITYNSDNFDFAYLKKRCEKLGINFALGRDGSEPKIQRMGDRFAVEVKGRIHFDLYPVIRRTINLPTYTLEAVYEAVFGQPKEKVYAEEITTAWETGENLERVARYSMEDAKVTYELGKEFLPMEAQLSRLIGQSLWDVSRSSTGNLVEWFLLRKAYERNELAPNKPDEKELARRRQSYEGGYVKEPERGLWENIVYLDFRSLYPSIIITHNVSPDTLNREGCKEYDVAPQVGHRFCKDFPGFIPSLLGDLLEERQKIKKKMKATIDPIERKLLDYRQRAIKILANSYYGYYGYARARWYCKECAESVTAWGREYITMTIKEIEEKYGFKVIYSDTDGFFATIPGADAETVKKKAMEFLKYINAKLPGALELEYEGFYKRGFFVTKKKYAVIDEEGKITTRGLEIVRRDWSEIAKETQARVLEALLKDGDVEKAVRIVKEVTEKLSKYEVPPEKLVIHEQITRDLKDYKATGPHVAVAKRLAARGVKIRPGTVISYIVLKGSGRIGDRAIPFDEFDPTKHKYDAEYYIENQVLPAVERILRAFGYRKEDLRYQKTRQVGLSAWLKPKGT

SEQ ID NO: 448 - protein, 774 aa, synthetic construct
MILDTDYITEDGKPVIRIFKKENGEFKIEYDRTFEPYFYALLKDDSAIEEVKKITAERHGTVVTVKRVEKVQKKFLGRPVEVWKLYFTHPQDVPAIRDKIREHPAVIDIYEYDIPFAKRYLIDKGLVPMEGDEELKMLAFDIETLYHEGEEFAEGPILMISYADEEGARVITWKNVDLPYVDVVSTEREMIKRFLRVVKEKDPDVLITYNTDNFDFAYLKKRCEKLGINFALGRDGSEPKIQRMGDRFAVEVKGRIHFDLYPVIRRTINLPTYTLEAVYEAVFGQPKEKVYAEEITTAWETGENLERVARYSMEDAKVTYELGKEFLPMEAQLSRLIGQSLWDVSRSSTGNLVEWFLLRKAYERNELAPNKPDEKELARRRQSYEGGYVKEPERGLWENIVYLDFRSLYPSIIITHNVSPDTLNREGCKEYDVAPQVGHRFCKDFPGFIPSLLGDLLEERQKIKKKMKATIDPIERKLLDYRQRAIKILANSYYGYYGYARARWYCKECAESVTAWGREYITMTIKEIEEKYGFKVIYSDTDGFFATIPGADAETVKKKAMEFLKYINAKLPGALELEYEGFYKRGFFVTKKKYAVIDEEGKITTRGLEIVRRDWSEIAKETQARVLEALLKDGDVEKAVRIVKEVTEKLSKYEVPPEKLVIHEQITRDLKDYKATGPHVAVAKRLAARGVKIRPGTVISYIVLKGSGRIGDRAIPFDEFDPTKHKYDAEYYIENQVLPAVERILRAFGYRKEDLRYQKTRQVGLSAWLKPKGT

SEQ ID NO: 449 - protein, 774 aa, synthetic construct
MILDTDYITEDGKPVIRIFKKENGEFKIEYDRTFEPYFYALLKDDSAIEEVKKITAERHGTVVTVKRVEKVQKKFLGRPVEVWKLYFTHPQDVPAIRDKIREHPAVIDIYEYDIPFAKRYLIDKGLVPMEGDEELKMLAFDIETLYHEGEEFAEGPILMISYADEEGARVITWKNVDLPYVDVVSTEREMIKRFLRVVKEKDPDVLITYNVDNFDFAYLKKRCEKLGINFALGRDGSEPKIQRMGDRFAVEVKGRIHFDLYPVIRRTINLPTYTLEAVYEAVFGQPKEKVYAEEITTAWETGENLERVARYSMEDAKVTYELGKEFLPMEAQLSRLIGQSLWDVSRSSTGNLVEWFLLRKAYERNELAPNKPDEKELARRRQSYEGGYVKEPERGLWENIVYLDFRSLYPSIIITHNVSPDTLNREGCKEYDVAPQVGHRFCKDFPGFIPSLLGDLLEERQKIKKKMKATIDPIERKLLDYRQRAIKILANSYYGYYGYARARWYCKECAESVTAWGREYITMTIKEIEEKYGFKVIYSDTDGFFATIPGADAETVKKKAMEFLKYINAKLPGALELEYEGFYKRGFFVTKKKYAVIDEEGKITTRGLEIVRRDWSEIAKETQARVLEALLKDGDVEKAVRIVKEVTEKLSKYEVPPEKLVIHEQITRDLKDYKATGPHVAVAKRLAARGVKIRPGTVISYIVLKGSGRIGDRAIPFDEFDPTKHKYDAEYYIENQVLPAVERILRAFGYRKEDLRYQKTRQVGLSAWLKPKGT

SEQ ID NO: 450 - protein, 774 aa, synthetic construct
MILDTDYITEDGKPVIRIFKKENGEFKIEYDRTFEPYFYALLKDDSAIEEVKKITAERHGTVVTVKRVEKVQKKFLGRPVEVWKLYFTHPQDVPAIRDKIREHPAVIDIYEYDIPFAKRYLIDKGLVPMEGDEELKMLAFDIETLYHEGEEFAEGPILMISYADEEGARVITWKNVDLPYVDVVSTEREMIKRFLRVVKEKDPDVLITYNWDNFDFAYLKKRCEKLGINFALGRDGSEPKIQRMGDRFAVEVKGRIHFDLYPVIRRTINLPTYTLEAVYEAVFGQPKEKVYAEEITTAWETGENLERVARYSMEDAKVTYELGKEFLPMEAQLSRLIGQSLWDVSRSSTGNLVEWFLLRKAYERNELAPNKPDEKELARRRQSYEGGYVKEPERGLWENIVYLDFRSLYPSIIITHNVSPDTLNREGCKEYDVAPQVGHRFCKDFPGFIPSLLGDLLEERQKIKKKMKATIDPIERKLLDYRQRAIKILANSYYGYYGYARARWYCKECAESVTAWGREYITMTIKEIEEKYGFKVIYSDTDGFFATIPGADAETVKKKAMEFLKYINAKLPGALELEYEGFYKRGFFVTKKKYAVIDEEGKITTRGLEIVRRDWSEIAKETQARVLEALLKDGDVEKAVRIVKEVTEKLSKYEVPPEKLVIHEQITRDLKDYKATGPHVAVAKRLAARGVKIRPGTVISYIVLKGSGRIGDRAIPFDEFDPTKHKYDAEYYIENQVLPAVERILRAFGYRKEDLRYQKTRQVGLSAWLKPKGT

SEQ ID NO: 451 - protein, 774 aa, synthetic construct
MILDTDYITEDGKPVIRIFKKENGEFKIEYDRTFEPYFYALLKDDSAIEEVKKITAERHGTVVTVKRVEKVQKKFLGRPVEVWKLYFTHPQDVPAIRDKIREHPAVIDIYEYDIPFAKRYLIDKGLVPMEGDEELKMLAFDIETLYHEGEEFAEGPILMISYADEEGARVITWKNVDLPYVDVVSTEREMIKRFLRVVKEKDPDVLITYNYDNFDFAYLKKRCEKLGINFALGRDGSEPKIQRMGDRFAVEVKGRIHFDLYPVIRRTINLPTYTLEAVYEAVFGQPKEKVYAEEITTAWETGENLERVARYSMEDAKVTYELGKEFLPMEAQLSRLIGQSLWDVSRSSTGNLVEWFLLRKAYERNELAPNKPDEKELARRRQSYEGGYVKEPERGLWENIVYLDFRSLYPSIIITHNVSPDTLNREGCKEYDVAPQVGHRFCKDFPGFIPSLLGDLLEERQKIKKKMKATIDPIERKLLDYRQRAIKILANSYYGYYGYARARWYCKECAESVTAWGREYITMTIKEIEEKYGFKVIYSDTDGFFATIPGADAETVKKKAMEFLKYINAKLPGALELEYEGFYKRGFFVTKKKYAVIDEEGKITTRGLEIVRRDWSEIAKETQARVLEALLKDGDVEKAVRIVKEVTEKLSKYEVPPEKLVIHEQITRDLKDYKATGPHVAVAKRLAARGVKIRPGTVISYIVLKGSGRIGDRAIPFDEFDPTKHKYDAEYYIENQVLPAVERILRAFGYRKEDLRYQKTRQVGLSAWLKPKGT

SEQ ID NO: 452 - protein, 774 aa, synthetic construct
MILDTDYITEDGKPVIRIFKKENGEFKIEYDRTFEPYFYALLKDDSAIEEVKKITAERHGTVVTVKRVEKVQKKFLGRPVEVWKLYFTHPQDVPAIRDKIREHPAVIDIYEYDIPFAKRYLIDKGLVPMEGDEELKMLAFDIETLYHEGEEFAEGPILMISYADEEGARVITWKNVDLPYVDVVSTEREMIKRFLRVVKEKDPDVLITYNGFNFDFAYLKKRCEKLGINFALGRDGSEPKIQRMGDRFAVEVKGRIHFDLYPVIRRTINLPTYTLEAVYEAVFGQPKEKVYAEEITTAWETGENLERVARYSMEDAKVTYELGKEFLPMEAQLSRLIGQSLWDVSRSSTGNLVEWFLLRKAYERNELAPNKPDEKELARRRQSYEGGYVKEPERGLWENIVYLDFRSLYPSIIITHNVSPDTLNREGCKEYDVAPQVGHRFCKDFPGFIPSLLGDLLEERQKIKKKMKATIDPIERKLLDYRQRAIKILANSYYGYYGYARARWYCKECAESVTAWGREYITMTIKEIEEKYGFKVIYSDTDGFFATIPGADAETVKKKAMEFLKYINAKLPGALELEYEGFYKRGFFVTKKKYAVIDEEGKITTRGLEIVRRDWSEIAKETQARVLEALLKDGDVEKAVRIVKEVTEKLSKYEVPPEKLVIHEQITRDLKDYKATGPHVAVAKRLAARGVKIRPGTVISYIVLKGSGRIGDRAIPFDEFDPTKHKYDAEYYIENQVLPAVERILRAFGYRKEDLRYQKTRQVGLSAWLKPKGT

SEQ ID NO: 453 - protein, 774 aa, synthetic construct
MILDTDYITEDGKPVIRIFKKENGEFKIEYDRTFEPYFYALLKDDSAIEEVKKITAERHGTVVTVKRVEKVQKKFLGRPVEVWKLYFTHPQDVPAIRDKIREHPAVIDIYEYDIPFAKRYLIDKGLVPMEGDEELKMLAFDIETLYHEGEEFAEGPILMISYADEEGARVITWKNVDLPYVDVVSTEREMIKRFLRVVKEKDPDVLITYNGINFDFAYLKKRCEKLGINFALGRDGSEPKIQRMGDRFAVEVKGRIHFDLYPVIRRTINLPTYTLEAVYEAVFGQPKEKVYAEEITTAWETGENLERVARYSMEDAKVTYELGKEFLPMEAQLSRLIGQSLWDVSRSSTGNLVEWFLLRKAYERNELAPNKPDEKELARRRQSYEGGYVKEPERGLWENIVYLDFRSLYPSIIITHNVSPDTLNREGCKEYDVAPQVGHRFCKDFPGFIPSLLGDLLEERQKIKKKMKATIDPIERKLLDYRQRAIKILANSYYGYYGYARARWYCKECAESVTAWGREYITMTIKEIEEKYGFKVIYSDTDGFFATIPGADAETVKKKAMEFLKYINAKLPGALELEYEGFYKRGFFVTKKKYAVIDEEGKITTRGLEIVRRDWSEIAKETQARVLEALLKDGDVEKAVRIVKEVTEKLSKYEVPPEKLVIHEQITRDLKDYKATGPHVAVAKRLAARGVKIRPGTVISYIVLKGSGRIGDRAIPFDEFDPTKHKYDAEYYIENQVLPAVERILRAFGYRKEDLRYQKTRQVGLSAWLKPKGT

SEQ ID NO: 454 - protein, 774 aa, synthetic construct
MILDTDYITEDGKPVIRIFKKENGEFKIEYDRTFEPYFYALLKDDSAIEEVKKITAERHGTVVTVKRVEKVQKKFLGRPVEVWKLYFTHPQDVPAIRDKIREHPAVIDIYEYDIPFAKRYLIDKGLVPMEGDEELKMLAFDIETLYHEGEEFAEGPILMISYADEEGARVITWKNVDLPYVDVVSTEREMIKRFLRVVKEKDPDVLITYNGKNFDFAYLKKRCEKLGINFALGRDGSEPKIQRMGDRFAVEVKGRIHFDLYPVIRRTINLPTYTLEAVYEAVFGQPKEKVYAEEITTAWETGENLERVARYSMEDAKVTYELGKEFLPMEAQLSRLIGQSLWDVSRSSTGNLVEWFLLRKAYERNELAPNKPDEKELARRRQSYEGGYVKEPERGLWENIVYLDFRSLYPSIIITHNVSPDTLNREGCKEYDVAPQVGHRFCKDFPGFIPSLLGDLLEERQKIKKKMKATIDPIERKLLDYRQRAIKILANSYYGYYGYARARWYCKECAESVTAWGREYITMTIKEIEEKYGFKVIYSDTDGFFATIPGADAETVKKKAMEFLKYINAKLPGALELEYEGFYKRGFFVTKKKYAVIDEEGKITTRGLEIVRRDWSEIAKETQARVLEALLKDGDVEKAVRIVKEVTEKLSKYEVPPEKLVIHEQITRDLKDYKATGPHVAVAKRLAARGVKIRPGTVISYIVLKGSGRIGDRAIPFDEFDPTKHKYDAEYYIENQVLPAVERILRAFGYRKEDLRYQKTRQVGLSAWLKPKGT

SEQ ID NO: 455 - protein, 774 aa, synthetic construct
MILDTDYITEDGKPVIRIFKKENGEFKIEYDRTFEPYFYALLKDDSAIEEVKKITAERHGTVVTVKRVEKVQKKFLGRPVEVWKLYFTHPQDVPAIRDKIREHPAVIDIYEYDIPFAKRYLIDKGLVPMEGDEELKMLAFDIETLYHEGEEFAEGPILMISYADEEGARVITWKNVDLPYVDVVSTEREMIKRFLRVVKEKDPDVLITYNGLNFDFAYLKKRCEKLGINFALGRDGSEPKIQRMGDRFAVEVKGRIHFDLYPVIRRTINLPTYTLEAVYEAVFGQPKEKVYAEEITTAWETGENLERVARYSMEDAKVTYELGKEFLPMEAQLSRLIGQSLWDVSRSSTGNLVEWFLLRKAYERNELAPNKPDEKELARRRQSYEGGYVKEPERGLWENIVYLDFRSLYPSIIITHNVSPDTLNREGCKEYDVAPQVGHRFCKDFPGFIPSLLGDLLEERQKIKKKMKATIDPIERKLLDYRQRAIKILANSYYGYYGYARARWYCKECAESVTAWGREYITMTIKEIEEKYGFKVIYSDTDGFFATIPGADAETVKKKAMEFLKYINAKLPGALELEYEGFYKRGFFVTKKKYAVIDEEGKITTRGLEIVRRDWSEIAKETQARVLEALLKDGDVEKAVRIVKEVTEKLSKYEVPPEKLVIHEQITRDLKDYKATGPHVAVAKRLAARGVKIRPGTVISYIVLKGSGRIGDRAIPFDEFDPTKHKYDAEYYIENQVLPAVERILRAFGYRKEDLRYQKTRQVGLSAWLKPKGT

SEQ ID NO: 456 - protein, 774 aa, synthetic construct
MILDTDYITEDGKPVIRIFKKENGEFKIEYDRTFEPYFYALLKDDSAIEEVKKITAERHGTVVTVKRVEKVQKKFLGRPVEVWKLYFTHPQDVPAIRDKIREHPAVIDIYEYDIPFAKRYLIDKGLVPMEGDEELKMLAFDIETLYHEGEEFAEGPILMISYADEEGARVITWKNVDLPYVDVVSTEREMIKRFLRVVKEKDPDVLITYNGMNFDFAYLKKRCEKLGINFALGRDGSEPKIQRMGDRFAVEVKGRIHFDLYPVIRRTINLPTYTLEAVYEAVFGQPKEKVYAEEITTAWETGENLERVARYSMEDAKVTYELGKEFLPMEAQLSRLIGQSLWDVSRSSTGNLVEWFLLRKAYERNELAPNKPDEKELARRRQSYEGGYVKEPERGLWENIVYLDFRSLYPSIIITHNVSPDTLNREGCKEYDVAPQVGHRFCKDFPGFIPSLLGDLLEERQKIKKKMKATIDPIERKLLDYRQRAIKILANSYYGYYGYARARWYCKECAESVTAWGREYITMTIKEIEEKYGFKVIYSDTDGFFATIPGADAETVKKKAMEFLKYINAKLPGALELEYEGFYKRGFFVTKKKYAVIDEEGKITTRGLEIVRRDWSEIAKETQARVLEALLKDGDVEKAVRIVKEVTEKLSKYEVPPEKLVIHEQITRDLKDYKATGPHVAVAKRLAARGVKIRPGTVISYIVLKGSGRIGDRAIPFDEFDPTKHKYDAEYYIENQVLPAVERILRAFGYRKEDLRYQKTRQVGLSAWLKPKGT

SEQ ID NO: 457 - protein, 774 aa, synthetic construct
MILDTDYITEDGKPVIRIFKKENGEFKIEYDRTFEPYFYALLKDDSAIEEVKKITAERHGTVVTVKRVEKVQKKFLGRPVEVWKLYFTHPQDVPAIRDKIREHPAVIDIYEYDIPFAKRYLIDKGLVPMEGDEELKMLAFDIETLYHEGEEFAEGPILMISYADEEGARVITWKNVDLPYVDVVSTEREMIKRFLRVVKEKDPDVLITYNGPNFDFAYLKKRCEKLGINFALGRDGSEPKIQRMGDRFAVEVKGRIHFDLYPVIRRTINLPTYTLEAVYEAVFGQPKEKVYAEEITTAWETGENLERVARYSMEDAKVTYELGKEFLPMEAQLSRLIGQSLWDVSRSSTGNLVEWFLLRKAYERNELAPNKPDEKELARRRQSYEGGYVKEPERGLWENIVYLDFRSLYPSIIITHNVSPDTLNREGCKEYDVAPQVGHRFCKDFPGFIPSLLGDLLEERQKIKKKMKATIDPIERKLLDYRQRAIKILANSYYGYYGYARARWYCKECAESVTAWGREYITMTIKEIEEKYGFKVIYSDTDGFFATIPGADAETVKKKAMEFLKYINAKLPGALELEYEGFYKRGFFVTKKKYAVIDEEGKITTRGLEIVRRDWSEIAKETQARVLEALLKDGDVEKAVRIVKEVTEKLSKYEVPPEKLVIHEQITRDLKDYKATGPHVAVAKRLAARGVKIRPGTVISYIVLKGSGRIGDRAIPFDEFDPTKHKYDAEYYIENQVLPAVERILRAFGYRKEDLRYQKTRQVGLSAWLKPKGT

SEQ ID NO: 458 - protein, 774 aa, synthetic construct
MILDTDYITEDGKPVIRIFKKENGEFKIEYDRTFEPYFYALLKDDSAIEEVKKITAERHGTVVTVKRVEKVQKKFLGRPVEVWKLYFTHPQDVPAIRDKIREHPAVIDIYEYDIPFAKRYLIDKGLVPMEGDEELKMLAFDIETLYHEGEEFAEGPILMISYADEEGARVITWKNVDLPYVDVVSTEREMIKRFLRVVKEKDPDVLITYNGQNFDFAYLKKRCEKLGINFALGRDGSEPKIQRMGDRFAVEVKGRIHFDLYPVIRRTINLPTYTLEAVYEAVFGQPKEKVYAEEITTAWETGENLERVARYSMEDAKVTYELGKEFLPMEAQLSRLIGQSLWDVSRSSTGNLVEWFLLRKAYERNELAPNKPDEKELARRRQSYEGGYVKEPERGLWENIVYLDFRSLYPSIIITHNVSPDTLNREGCKEYDVAPQVGHRFCKDFPGFIPSLLGDLLEERQKIKKKMKATIDPIERKLLDYRQRAIKILANSYYGYYGYARARWYCKECAESVTAWGREYITMTIKEIEEKYGFKVIYSDTDGFFATIPGADAETVKKKAMEFLKYINAKLPGALELEYEGFYKRGFFVTKKKYAVIDEEGKITTRGLEIVRRDWSEIAKETQARVLEALLKDGDVEKAVRIVKEVTEKLSKYEVPPEKLVIHEQITRDLKDYKATGPHVAVAKRLAARGVKIRPGTVISYIVLKGSGRIGDRAIPFDEFDPTKHKYDAEYYIENQVLPAVERILRAFGYRKEDLRYQKTRQVGLSAWLKPKGT

SEQ ID NO: 459 - protein, 774 aa, synthetic construct
MILDTDYITEDGKPVIRIFKKENGEFKIEYDRTFEPYFYALLKDDSAIEEVKKITAERHGTVVTVKRVEKVQKKFLGRPVEVWKLYFTHPQDVPAIRDKIREHPAVIDIYEYDIPFAKRYLIDKGLVPMEGDEELKMLAFDIETLYHEGEEFAEGPILMISYADEEGARVITWKNVDLPYVDVVSTEREMIKRFLRVVKEKDPDVLITYNGRNFDFAYLKKRCEKLGINFALGRDGSEPKIQRMGDRFAVEVKGRIHFDLYPVIRRTINLPTYTLEAVYEAVFGQPKEKVYAEEITTAWETGENLERVARYSMEDAKVTYELGKEFLPMEAQLSRLIGQSLWDVSRSSTGNLVEWFLLRKAYERNELAPNKPDEKELARRRQSYEGGYVKEPERGLWENIVYLDFRSLYPSIIITHNVSPDTLNREGCKEYDVAPQVGHRFCKDFPGFIPSLLGDLLEERQKIKKKMKATIDPIERKLLDYRQRAIKILANSYYGYYGYARARWYCKECAESVTAWGREYITMTIKEIEEKYGFKVIYSDTDGFFATIPGADAETVKKKAMEFLKYINAKLPGALELEYEGFYKRGFFVTKKKYAVIDEEGKITTRGLEIVRRDWSEIAKETQARVLEALLKDGDVEKAVRIVKEVTEKLSKYEVPPEKLVIHEQITRDLKDYKATGPHVAVAKRLAARGVKIRPGTVISYIVLKGSGRIGDRAIPFDEFDPTKHKYDAEYYIENQVLPAVERILRAFGYRKEDLRYQKTRQVGLSAWLKPKGT

SEQ ID NO: 460 - protein, 774 aa, synthetic construct
MILDTDYITEDGKPVIRIFKKENGEFKIEYDRTFEPYFYALLKDDSAIEEVKKITAERHGTVVTVKRVEKVQKKFLGRPVEVWKLYFTHPQDVPAIRDKIREHPAVIDIYEYDIPFAKRYLIDKGLVPMEGDEELKMLAFDIETLYHEGEEFAEGPILMISYADEEGARVITWKNVDLPYVDVVSTEREMIKRFLRVVKEKDPDVLITYNGVNFDFAYLKKRCEKLGINFALGRDGSEPKIQRMGDRFAVEVKGRIHFDLYPVIRRTINLPTYTLEAVYEAVFGQPKEKVYAEEITTAWETGENLERVARYSMEDAKVTYELGKEFLPMEAQLSRLIGQSLWDVSRSSTGNLVEWFLLRKAYERNELAPNKPDEKELARRRQSYEGGYVKEPERGLWENIVYLDFRSLYPSIIITHNVSPDTLNREGCKEYDVAPQVGHRFCKDFPGFIPSLLGDLLEERQKIKKKMKATIDPIERKLLDYRQRAIKILANSYYGYYGYARARWYCKECAESVTAWGREYITMTIKEIEEKYGFKVIYSDTDGFFATIPGADAETVKKKAMEFLKYINAKLPGALELEYEGFYKRGFFVTKKKYAVIDEEGKITTRGLEIVRRDWSEIAKETQARVLEALLKDGDVEKAVRIVKEVTEKLSKYEVPPEKLVIHEQITRDLKDYKATGPHVAVAKRLAARGVKIRPGTVISYIVLKGSGRIGDRAIPFDEFDPTKHKYDAEYYIENQVLPAVERILRAFGYRKEDLRYQKTRQVGLSAWLKPKGT

SEQ ID NO: 461 - protein, 774 aa, synthetic construct
MILDTDYITEDGKPVIRIFKKENGEFKIEYDRTFEPYFYALLKDDSAIEEVKKITAERHGTVVTVKRVEKVQKKFLGRPVEVWKLYFTHPQDVPAIRDKIREHPAVIDIYEYDIPFAKRYLIDKGLVPMEGDEELKMLAFDIETLYHEGEEFAEGPILMISYADEEGARVITWKNVDLPYVDVVSTEREMIKRFLRVVKEKDPDVLITYNGWNFDFAYLKKRCEKLGINFALGRDGSEPKIQRMGDRFAVEVKGRIHFDLYPVIRRTINLPTYTLEAVYEAVFGQPKEKVYAEEITTAWETGENLERVARYSMEDAKVTYELGKEFLPMEAQLSRLIGQSLWDVSRSSTGNLVEWFLLRKAYERNELAPNKPDEKELARRRQSYEGGYVKEPERGLWENIVYLDFRSLYPSIIITHNVSPDTLNREGCKEYDVAPQVGHRFCKDFPGFIPSLLGDLLEERQKIKKKMKATIDPIERKLLDYRQRAIKILANSYYGYYGYARARWYCKECAESVTAWGREYITMTIKEIEEKYGFKVIYSDTDGFFATIPGADAETVKKKAMEFLKYINAKLPGALELEYEGFYKRGFFVTKKKYAVIDEEGKITTRGLEIVRRDWSEIAKETQARVLEALLKDGDVEKAVRIVKEVTEKLSKYEVPPEKLVIHEQITRDLKDYKATGPHVAVAKRLAARGVKIRPGTVISYIVLKGSGRIGDRAIPFDEFDPTKHKYDAEYYIENQVLPAVERILRAFGYRKEDLRYQKTRQVGLSAWLKPKGT

SEQ ID NO: 462 - protein, 774 aa, synthetic construct
MILDTDYITEDGKPVIRIFKKENGEFKIEYDRTFEPYFYALLKDDSAIEEVKKITAERHGTVVTVKRVEKVQKKFLGRPVEVWKLYFTHPQDVPAIRDKIREHPAVIDIYEYDIPFAKRYLIDKGLVPMEGDEELKMLAFDIETLYHEGEEFAEGPILMISYADEEGARVITWKNVDLPYVDVVSTEREMIKRFLRVVKEKDPDVLITYNGYNFDFAYLKKRCEKLGINFALGRDGSEPKIQRMGDRFAVEVKGRIHFDLYPVIRRTINLPTYTLEAVYEAVFGQPKEKVYAEEITTAWETGENLERVARYSMEDAKVTYELGKEFLPMEAQLSRLIGQSLWDVSRSSTGNLVEWFLLRKAYERNELAPNKPDEKELARRRQSYEGGYVKEPERGLWENIVYLDFRSLYPSIIITHNVSPDTLNREGCKEYDVAPQVGHRFCKDFPGFIPSLLGDLLEERQKIKKKMKATIDPIERKLLDYRQRAIKILANSYYGYYGYARARWYCKECAESVTAWGREYITMTIKEIEEKYGFKVIYSDTDGFFATIPGADAETVKKKAMEFLKYINAKLPGALELEYEGFYKRGFFVTKKKYAVIDEEGKITTRGLEIVRRDWSEIAKETQARVLEALLKDGDVEKAVRIVKEVTEKLSKYEVPPEKLVIHEQITRDLKDYKATGPHVAVAKRLAARGVKIRPGTVISYIVLKGSGRIGDRAIPFDEFDPTKHKYDAEYYIENQVLPAVERILRAFGYRKEDLRYQKTRQVGLSAWLKPKGT

SEQ ID NO: 463 - protein, 774 aa, synthetic construct
MILDTDYITEDGKPVIRIFKKENGEFKIEYDRTFEPYFYALLKDDSAIEEVKKITAERHGTVVTVKRVEKVQKKFLGRPVEVWKLYFTHPQDVPAIRDKIREHPAVIDIYEYDIPFAKRYLIDKGLVPMEGDEELKMLAFDIETLYHEGEEFAEGPILMISYADEEGARVITWKNVDLPYVDVVSTEREMIKRFLRVVKEKDPDVLITYNGDDFDFAYLKKRCEKLGINFALGRDGSEPKIQRMGDRFAVEVKGRIHFDLYPVIRRTINLPTYTLEAVYEAVFGQPKEKVYAEEITTAWETGENLERVARYSMEDAKVTYELGKEFLPMEAQLSRLIGQSLWDVSRSSTGNLVEWFLLRKAYERNELAPNKPDEKELARRRQSYEGGYVKEPERGLWENIVYLDFRSLYPSIIITHNVSPDTLNREGCKEYDVAPQVGHRFCKDFPGFIPSLLGDLLEERQKIKKKMKATIDPIERKLLDYRQRAIKILANSYYGYYGYARARWYCKECAESVTAWGREYITMTIKEIEEKYGFKVIYSDTDGFFATIPGADAETVKKKAMEFLKYINAKLPGALELEYEGFYKRGFFVTKKKYAVIDEEGKITTRGLEIVRRDWSEIAKETQARVLEALLKDGDVEKAVRIVKEVTEKLSKYEVPPEKLVIHEQITRDLKDYKATGPHVAVAKRLAARGVKIRPGTVISYIVLKGSGRIGDRAIPFDEFDPTKHKYDAEYYIENQVLPAVERILRAFGYRKEDLRYQKTRQVGLSAWLKPKGT

SEQ ID NO: 464 - protein, 774 aa, synthetic construct
MILDTDYITEDGKPVIRIFKKENGEFKIEYDRTFEPYFYALLKDDSAIEEVKKITAERHGTVVTVKRVEKVQKKFLGRPVEVWKLYFTHPQDVPAIRDKIREHPAVIDIYEYDIPFAKRYLIDKGLVPMEGDEELKMLAFDIETLYHEGEEFAEGPILMISYADEEGARVITWKNVDLPYVDVVSTEREMIKRFLRVVKEKDPDVLITYNGDEFDFAYLKKRCEKLGINFALGRDGSEPKIQRMGDRFAVEVKGRIHFDLYPVIRRTINLPTYTLEAVYEAVFGQPKEKVYAEEITTAWETGENLERVARYSMEDAKVTYELGKEFLPMEAQLSRLIGQSLWDVSRSSTGNLVEWFLLRKAYERNELAPNKPDEKELARRRQSYEGGYVKEPERGLWENIVYLDFRSLYPSIIITHNVSPDTLNREGCKEYDVAPQVGHRFCKDFPGFIPSLLGDLLEERQKIKKKMKATIDPIERKLLDYRQRAIKILANSYYGYYGYARARWYCKECAESVTAWGREYITMTIKEIEEKYGFKVIYSDTDGFFATIPGADAETVKKKAMEFLKYINAKLPGALELEYEGFYKRGFFVTKKKYAVIDEEGKITTRGLEIVRRDWSEIAKETQARVLEALLKDGDVEKAVRIVKEVTEKLSKYEVPPEKLVIHEQITRDLKDYKATGPHVAVAKRLAARGVKIRPGTVISYIVLKGSGRIGDRAIPFDEFDPTKHKYDAEYYIENQVLPAVERILRAFGYRKEDLRYQKTRQVGLSAWLKPKGT

SEQ ID NO: 465 - protein, 774 aa, synthetic construct
MILDTDYITEDGKPVIRIFKKENGEFKIEYDRTFEPYFYALLKDDSAIEEVKKITAERHGTVVTVKRVEKVQKKFLGRPVEVWKLYFTHPQDVPAIRDKIREHPAVIDIYEYDIPFAKRYLIDKGLVPMEGDEELKMLAFDIETLYHEGEEFAEGPILMISYADEEGARVITWKNVDLPYVDVVSTEREMIKRFLRVVKEKDPDVLITYNGDNADFAYLKKRCEKLGINFALGRDGSEPKIQRMGDRFAVEVKGRIHFDLYPVIRRTINLPTYTLEAVYEAVFGQPKEKVYAEEITTAWETGENLERVARYSMEDAKVTYELGKEFLPMEAQLSRLIGQSLWDVSRSSTGNLVEWFLLRKAYERNELAPNKPDEKELARRRQSYEGGYVKEPERGLWENIVYLDFRSLYPSIIITHNVSPDTLNREGCKEYDVAPQVGHRFCKDFPGFIPSLLGDLLEERQKIKKKMKATIDPIERKLLDYRQRAIKILANSYYGYYGYARARWYCKECAESVTAWGREYITMTIKEIEEKYGFKVIYSDTDGFFATIPGADAETVKKKAMEFLKYINAKLPGALELEYEGFYKRGFFVTKKKYAVIDEEGKITTRGLEIVRRDWSEIAKETQARVLEALLKDGDVEKAVRIVKEVTEKLSKYEVPPEKLVIHEQITRDLKDYKATGPHVAVAKRLAARGVKIRPGTVISYIVLKGSGRIGDRAIPFDEFDPTKHKYDAEYYIENQVLPAVERILRAFGYRKEDLRYQKTRQVGLSAWLKPKGT

SEQ ID NO: 466 - protein, 774 aa, synthetic construct
MILDTDYITEDGKPVIRIFKKENGEFKIEYDRTFEPYFYALLKDDSAIEEVKKITAERHGTVVTVKRVEKVQKKFLGRPVEVWKLYFTHPQDVPAIRDKIREHPAVIDIYEYDIPFAKRYLIDKGLVPMEGDEELKMLAFDIETLYHEGEEFAEGPILMISYADEEGARVITWKNVDLPYVDVVSTEREMIKRFLRVVKEKDPDVLITYNGDNCDFAYLKKRCEKLGINFALGRDGSEPKIQRMGDRFAVEVKGRIHFDLYPVIRRTINLPTYTLEAVYEAVFGQPKEKVYAEEITTAWETGENLERVARYSMEDAKVTYELGKEFLPMEAQLSRLIGQSLWDVSRSSTGNLVEWFLLRKAYERNELAPNKPDEKELARRRQSYEGGYVKEPERGLWENIVYLDFRSLYPSIIITHNVSPDTLNREGCKEYDVAPQVGHRFCKDFPGFIPSLLGDLLEERQKIKKKMKATIDPIERKLLDYRQRAIKILANSYYGYYGYARARWYCKECAESVTAWGREYITMTIKEIEEKYGFKVIYSDTDGFFATIPGADAETVKKKAMEFLKYINAKLPGALELEYEGFYKRGFFVTKKKYAVIDEEGKITTRGLEIVRRDWSEIAKETQARVLEALLKDGDVEKAVRIVKEVTEKLSKYEVPPEKLVIHEQITRDLKDYKATGPHVAVAKRLAARGVKIRPGTVISYIVLKGSGRIGDRAIPFDEFDPTKHKYDAEYYIENQVLPAVERILRAFGYRKEDLRYQKTRQVGLSAWLKPKGT

SEQ ID NO: 467 - protein, 774 aa, synthetic construct
MILDTDYITEDGKPVIRIFKKENGEFKIEYDRTFEPYFYALLKDDSAIEEVKKITAERHGTVVTVKRVEKVQKKFLGRPVEVWKLYFTHPQDVPAIRDKIREHPAVIDIYEYDIPFAKRYLIDKGLVPMEGDEELKMLAFDIETLYHEGEEFAEGPILMISYADEEGARVITWKNVDLPYVDVVSTEREMIKRFLRVVKEKDPDVLITYNGDNDDFAYLKKRCEKLGINFALGRDGSEPKIQRMGDRFAVEVKGRIHFDLYPVIRRTINLPTYTLEAVYEAVFGQPKEKVYAEEITTAWETGENLERVARYSMEDAKVTYELGKEFLPMEAQLSRLIGQSLWDVSRSSTGNLVEWFLLRKAYERNELAPNKPDEKELARRRQSYEGGYVKEPERGLWENIVYLDFRSLYPSIIITHNVSPDTLNREGCKEYDVAPQVGHRFCKDFPGFIPSLLGDLLEERQKIKKKMKATIDPIERKLLDYRQRAIKILANSYYGYYGYARARWYCKECAESVTAWGREYITMTIKEIEEKYGFKVIYSDTDGFFATIPGADAETVKKKAMEFLKYINAKLPGALELEYEGFYKRGFFVTKKKYAVIDEEGKITTRGLEIVRRDWSEIAKETQARVLEALLKDGDVEKAVRIVKEVTEKLSKYEVPPEKLVIHEQITRDLKDYKATGPHVAVAKRLAARGVKIRPGTVISYIVLKGSGRIGDRAIPFDEFDPTKHKYDAEYYIENQVLPAVERILRAFGYRKEDLRYQKTRQVGLSAWLKPKGT

SEQ ID NO: 468 - protein, 774 aa, synthetic construct
MILDTDYITEDGKPVIRIFKKENGEFKIEYDRTFEPYFYALLKDDSAIEEVKKITAERHGTVVTVKRVEKVQKKFLGRPVEVWKLYFTHPQDVPAIRDKIREHPAVIDIYEYDIPFAKRYLIDKGLVPMEGDEELKMLAFDIETLYHEGEEFAEGPILMISYADEEGARVITWKNVDLPYVDVVSTEREMIKRFLRVVKEKDPDVLITYNGDNEDFAYLKKRCEKLGINFALGRDGSEPKIQRMGDRFAVEVKGRIHFDLYPVIRRTINLPTYTLEAVYEAVFGQPKEKVYAEEITTAWETGENLERVARYSMEDAKVTYELGKEFLPMEAQLSRLIGQSLWDVSRSSTGNLVEWFLLRKAYERNELAPNKPDEKELARRRQSYEGGYVKEPERGLWENIVYLDFRSLYPSIIITHNVSPDTLNREGCKEYDVAPQVGHRFCKDFPGFIPSLLGDLLEERQKIKKKMKATIDPIERKLLDYRQRAIKILANSYYGYYGYARARWYCKECAESVTAWGREYITMTIKEIEEKYGFKVIYSDTDGFFATIPGADAETVKKKAMEFLKYINAKLPGALELEYEGFYKRGFFVTKKKYAVIDEEGKITTRGLEIVRRDWSEIAKETQARVLEALLKDGDVEKAVRIVKEVTEKLSKYEVPPEKLVIHEQITRDLKDYKATGPHVAVAKRLAARGVKIRPGTVISYIVLKGSGRIGDRAIPFDEFDPTKHKYDAEYYIENQVLPAVERILRAFGYRKEDLRYQKTRQVGLSAWLKPKGT

SEQ ID NO: 469 - protein, 774 aa, synthetic construct
MILDTDYITEDGKPVIRIFKKENGEFKIEYDRTFEPYFYALLKDDSAIEEVKKITAERHGTVVTVKRVEKVQKKFLGRPVEVWKLYFTHPQDVPAIRDKIREHPAVIDIYEYDIPFAKRYLIDKGLVPMEGDEELKMLAFDIETLYHEGEEFAEGPILMISYADEEGARVITWKNVDLPYVDVVSTEREMIKRFLRVVKEKDPDVLITYNGDNGDFAYLKKRCEKLGINFALGRDGSEPKIQRMGDRFAVEVKGRIHFDLYPVIRRTINLPTYTLEAVYEAVFGQPKEKVYAEEITTAWETGENLERVARYSMEDAKVTYELGKEFLPMEAQLSRLIGQSLWDVSRSSTGNLVEWFLLRKAYERNELAPNKPDEKELARRRQSYEGGYVKEPERGLWENIVYLDFRSLYPSIIITHNVSPDTLNREGCKEYDVAPQVGHRFCKDFPGFIPSLLGDLLEERQKIKKKMKATIDPIERKLLDYRQRAIKILANSYYGYYGYARARWYCKECAESVTAWGREYITMTIKEIEEKYGFKVIYSDTDGFFATIPGADAETVKKKAMEFLKYINAKLPGALELEYEGFYKRGFFVTKKKYAVIDEEGKITTRGLEIVRRDWSEIAKETQARVLEALLKDGDVEKAVRIVKEVTEKLSKYEVPPEKLVIHEQITRDLKDYKATGPHVAVAKRLAARGVKIRPGTVISYIVLKGSGRIGDRAIPFDEFDPTKHKYDAEYYIENQVLPAVERILRAFGYRKEDLRYQKTRQVGLSAWLKPKGT

SEQ ID NO: 470 - protein, 774 aa, synthetic construct
MILDTDYITEDGKPVIRIFKKENGEFKIEYDRTFEPYFYALLKDDSAIEEVKKITAERHGTVVTVKRVEKVQKKFLGRPVEVWKLYFTHPQDVPAIRDKIREHPAVIDIYEYDIPFAKRYLIDKGLVPMEGDEELKMLAFDIETLYHEGEEFAEGPILMISYADEEGARVITWKNVDLPYVDVVSTEREMIKRFLRVVKEKDPDVLITYNGDNHDFAYLKKRCEKLGINFALGRDGSEPKIQRMGDRFAVEVKGRIHFDLYPVIRRTINLPTYTLEAVYEAVFGQPKEKVYAEEITTAWETGENLERVARYSMEDAKVTYELGKEFLPMEAQLSRLIGQSLWDVSRSSTGNLVEWFLLRKAYERNELAPNKPDEKELARRRQSYEGGYVKEPERGLWENIVYLDFRSLYPSIIITHNVSPDTLNREGCKEYDVAPQVGHRFCKDFPGFIPSLLGDLLEERQKIKKKMKATIDPIERKLLDYRQRAIKILANSYYGYYGYARARWYCKECAESVTAWGREYITMTIKEIEEKYGFKVIYSDTDGFFATIPGADAETVKKKAMEFLKYINAKLPGALELEYEGFYKRGFFVTKKKYAVIDEEGKITTRGLEIVRRDWSEIAKETQARVLEALLKDGDVEKAVRIVKEVTEKLSKYEVPPEKLVIHEQITRDLKDYKATGPHVAVAKRLAARGVKIRPGTVISYIVLKGSGRIGDRAIPFDEFDPTKHKYDAEYYIENQVLPAVERILRAFGYRKEDLRYQKTRQVGLSAWLKPKGT

SEQ ID NO: 471 - protein, 774 aa, synthetic construct
MILDTDYITEDGKPVIRIFKKENGEFKIEYDRTFEPYFYALLKDDSAIEEVKKITAERHGTVVTVKRVEKVQKKFLGRPVEVWKLYFTHPQDVPAIRDKIREHPAVIDIYEYDIPFAKRYLIDKGLVPMEGDEELKMLAFDIETLYHEGEEFAEGPILMISYADEEGARVITWKNVDLPYVDVVSTEREMIKRFLRVVKEKDPDVLITYNGDNIDFAYLKKRCEKLGINFALGRDGSEPKIQRMGDRFAVEVKGRIHFDLYPVIRRTINLPTYTLEAVYEAVFGQPKEKVYAEEITTAWETGENLERVARYSMEDAKVTYELGKEFLPMEAQLSRLIGQSLWDVSRSSTGNLVEWFLLRKAYERNELAPNKPDEKELARRRQSYEGGYVKEPERGLWENIVYLDFRSLYPSIIITHNVSPDTLNREGCKEYDVAPQVGHRFCKDFPGFIPSLLGDLLEERQKIKKKMKATIDPIERKLLDYRQRAIKILANSYYGYYGYARARWYCKECAESVTAWGREYITMTIKEIEEKYGFKVIYSDTDGFFATIPGADAETVKKKAMEFLKYINAKLPGALELEYEGFYKRGFFVTKKKYAVIDEEGKITTRGLEIVRRDWSEIAKETQARVLEALLKDGDVEKAVRIVKEVTEKLSKYEVPPEKLVIHEQITRDLKDYKATGPHVAVAKRLAARGVKIRPGTVISYIVLKGSGRIGDRAIPFDEFDPTKHKYDAEYYIENQVLPAVERILRAFGYRKEDLRYQKTRQVGLSAWLKPKGT

SEQ ID NO: 472 - protein, 774 aa, synthetic construct
MILDTDYITEDGKPVIRIFKKENGEFKIEYDRTFEPYFYALLKDDSAIEEVKKITAERHGTVVTVKRVEKVQKKFLGRPVEVWKLYFTHPQDVPAIRDKIREHPAVIDIYEYDIPFAKRYLIDKGLVPMEGDEELKMLAFDIETLYHEGEEFAEGPILMISYADEEGARVITWKNVDLPYVDVVSTEREMIKRFLRVVKEKDPDVLITYNGDNKDFAYLKKRCEKLGINFALGRDGSEPKIQRMGDRFAVEVKGRIHFDLYPVIRRTINLPTYTLEAVYEAVFGQPKEKVYAEEITTAWETGENLERVARYSMEDAKVTYELGKEFLPMEAQLSRLIGQSLWDVSRSSTGNLVEWFLLRKAYERNELAPNKPDEKELARRRQSYEGGYVKEPERGLWENIVYLDFRSLYPSIIITHNVSPDTLNREGCKEYDVAPQVGHRFCKDFPGFIPSLLGDLLEERQKIKKKMKATIDPIERKLLDYRQRAIKILANSYYGYYGYARARWYCKECAESVTAWGREYITMTIKEIEEKYGFKVIYSDTDGFFATIPGADAETVKKKAMEFLKYINAKLPGALELEYEGFYKRGFFVTKKKYAVIDEEGKITTRGLEIVRRDWSEIAKETQARVLEALLKDGDVEKAVRIVKEVTEKLSKYEVPPEKLVIHEQITRDLKDYKATGPHVAVAKRLAARGVKIRPGTVISYIVLKGSGRIGDRAIPFDEFDPTKHKYDAEYYIENQVLPAVERILRAFGYRKEDLRYQKTRQVGLSAWLKPKGT

SEQ ID NO: 473 - protein, 774 aa, synthetic construct
MILDTDYITEDGKPVIRIFKKENGEFKIEYDRTFEPYFYALLKDDSAIEEVKKITAERHGTVVTVKRVEKVQKKFLGRPVEVWKLYFTHPQDVPAIRDKIREHPAVIDIYEYDIPFAKRYLIDKGLVPMEGDEELKMLAFDIETLYHEGEEFAEGPILMISYADEEGARVITWKNVDLPYVDVVSTEREMIKRFLRVVKEKDPDVLITYNGDNLDFAYLKKRCEKLGINFALGRDGSEPKIQRMGDRFAVEVKGRIHFDLYPVIRRTINLPTYTLEAVYEAVFGQPKEKVYAEEITTAWETGENLERVARYSMEDAKVTYELGKEFLPMEAQLSRLIGQSLWDVSRSSTGNLVEWFLLRKAYERNELAPNKPDEKELARRRQSYEGGYVKEPERGLWENIVYLDFRSLYPSIIITHNVSPDTLNREGCKEYDVAPQVGHRFCKDFPGFIPSLLGDLLEERQKIKKKMKATIDPIERKLLDYRQRAIKILANSYYGYYGYARARWYCKECAESVTAWGREYITMTIKEIEEKYGFKVIYSDTDGFFATIPGADAETVKKKAMEFLKYINAKLPGALELEYEGFYKRGFFVTKKKYAVIDEEGKITTRGLEIVRRDWSEIAKETQARVLEALLKDGDVEKAVRIVKEVTEKLSKYEVPPEKLVIHEQITRDLKDYKATGPHVAVAKRLAARGVKIRPGTVISYIVLKGSGRIGDRAIPFDEFDPTKHKYDAEYYIENQVLPAVERILRAFGYRKEDLRYQKTRQVGLSAWLKPKGT

SEQ ID NO: 474 - protein, 774 aa, synthetic construct
MILDTDYITEDGKPVIRIFKKENGEFKIEYDRTFEPYFYALLKDDSAIEEVKKITAERHGTVVTVKRVEKVQKKFLGRPVEVWKLYFTHPQDVPAIRDKIREHPAVIDIYEYDIPFAKRYLIDKGLVPMEGDEELKMLAFDIETLYHEGEEFAEGPILMISYADEEGARVITWKNVDLPYVDVVSTEREMIKRFLRVVKEKDPDVLITYNGDNMDFAYLKKRCEKLGINFALGRDGSEPKIQRMGDRFAVEVKGRIHFDLYPVIRRTINLPTYTLEAVYEAVFGQPKEKVYAEEITTAWETGENLERVARYSMEDAKVTYELGKEFLPMEAQLSRLIGQSLWDVSRSSTGNLVEWFLLRKAYERNELAPNKPDEKELARRRQSYEGGYVKEPERGLWENIVYLDFRSLYPSIIITHNVSPDTLNREGCKEYDVAPQVGHRFCKDFPGFIPSLLGDLLEERQKIKKKMKATIDPIERKLLDYRQRAIKILANSYYGYYGYARARWYCKECAESVTAWGREYITMTIKEIEEKYGFKVIYSDTDGFFATIPGADAETVKKKAMEFLKYINAKLPGALELEYEGFYKRGFFVTKKKYAVIDEEGKITTRGLEIVRRDWSEIAKETQARVLEALLKDGDVEKAVRIVKEVTEKLSKYEVPPEKLVIHEQITRDLKDYKATGPHVAVAKRLAARGVKIRPGTVISYIVLKGSGRIGDRAIPFDEFDPTKHKYDAEYYIENQVLPAVERILRAFGYRKEDLRYQKTRQVGLSAWLKPKGT

SEQ ID NO: 475 - protein, 774 aa, synthetic construct
MILDTDYITEDGKPVIRIFKKENGEFKIEYDRTFEPYFYALLKDDSAIEEVKKITAERHGTVVTVKRVEKVQKKFLGRPVEVWKLYFTHPQDVPAIRDKIREHPAVIDIYEYDIPFAKRYLIDKGLVPMEGDEELKMLAFDIETLYHEGEEFAEGPILMISYADEEGARVITWKNVDLPYVDVVSTEREMIKRFLRVVKEKDPDVLITYNGDNNDFAYLKKRCEKLGINFALGRDGSEPKIQRMGDRFAVEVKGRIHFDLYPVIRRTINLPTYTLEAVYEAVFGQPKEKVYAEEITTAWETGENLERVARYSMEDAKVTYELGKEFLPMEAQLSRLIGQSLWDVSRSSTGNLVEWFLLRKAYERNELAPNKPDEKELARRRQSYEGGYVKEPERGLWENIVYLDFRSLYPSIIITHNVSPDTLNREGCKEYDVAPQVGHRFCKDFPGFIPSLLGDLLEERQKIKKKMKATIDPIERKLLDYRQRAIKILANSYYGYYGYARARWYCKECAESVTAWGREYITMTIKEIEEKYGFKVIYSDTDGFFATIPGADAETVKKKAMEFLKYINAKLPGALELEYEGFYKRGFFVTKKKYAVIDEEGKITTRGLEIVRRDWSEIAKETQARVLEALLKDGDVEKAVRIVKEVTEKLSKYEVPPEKLVIHEQITRDLKDYKATGPHVAVAKRLAARGVKIRPGTVISYIVLKGSGRIGDRAIPFDEFDPTKHKYDAEYYIENQVLPAVERILRAFGYRKEDLRYQKTRQVGLSAWLKPKGT

SEQ ID NO: 476 - protein, 774 aa, synthetic construct
MILDTDYITEDGKPVIRIFKKENGEFKIEYDRTFEPYFYALLKDDSAIEEVKKITAERHGTVVTVKRVEKVQKKFLGRPVEVWKLYFTHPQDVPAIRDKIREHPAVIDIYEYDIPFAKRYLIDKGLVPMEGDEELKMLAFDIETLYHEGEEFAEGPILMISYADEEGARVITWKNVDLPYVDVVSTEREMIKRFLRVVKEKDPDVLITYNGDNPDFAYLKKRCEKLGINFALGRDGSEPKIQRMGDRFAVEVKGRIHFDLYPVIRRTINLPTYTLEAVYEAVFGQPKEKVYAEEITTAWETGENLERVARYSMEDAKVTYELGKEFLPMEAQLSRLIGQSLWDVSRSSTGNLVEWFLLRKAYERNELAPNKPDEKELARRRQSYEGGYVKEPERGLWENIVYLDFRSLYPSIIITHNVSPDTLNREGCKEYDVAPQVGHRFCKDFPGFIPSLLGDLLEERQKIKKKMKATIDPIERKLLDYRQRAIKILANSYYGYYGYARARWYCKECAESVTAWGREYITMTIKEIEEKYGFKVIYSDTDGFFATIPGADAETVKKKAMEFLKYINAKLPGALELEYEGFYKRGFFVTKKKYAVIDEEGKITTRGLEIVRRDWSEIAKETQARVLEALLKDGDVEKAVRIVKEVTEKLSKYEVPPEKLVIHEQITRDLKDYKATGPHVAVAKRLAARGVKIRPGTVISYIVLKGSGRIGDRAIPFDEFDPTKHKYDAEYYIENQVLPAVERILRAFGYRKEDLRYQKTRQVGLSAWLKPKGT

SEQ ID NO: 477 - protein, 774 aa, synthetic construct
MILDTDYITEDGKPVIRIFKKENGEFKIEYDRTFEPYFYALLKDDSAIEEVKKITAERHGTVVTVKRVEKVQKKFLGRPVEVWKLYFTHPQDVPAIRDKIREHPAVIDIYEYDIPFAKRYLIDKGLVPMEGDEELKMLAFDIETLYHEGEEFAEGPILMISYADEEGARVITWKNVDLPYVDVVSTEREMIKRFLRVVKEKDPDVLITYNGDNQDFAYLKKRCEKLGINFALGRDGSEPKIQRMGDRFAVEVKGRIHFDLYPVIRRTINLPTYTLEAVYEAVFGQPKEKVYAEEITTAWETGENLERVARYSMEDAKVTYELGKEFLPMEAQLSRLIGQSLWDVSRSSTGNLVEWFLLRKAYERNELAPNKPDEKELARRRQSYEGGYVKEPERGLWENIVYLDFRSLYPSIIITHNVSPDTLNREGCKEYDVAPQVGHRFCKDFPGFIPSLLGDLLEERQKIKKKMKATIDPIERKLLDYRQRAIKILANSYYGYYGYARARWYCKECAESVTAWGREYITMTIKEIEEKYGFKVIYSDTDGFFATIPGADAETVKKKAMEFLKYINAKLPGALELEYEGFYKRGFFVTKKKYAVIDEEGKITTRGLEIVRRDWSEIAKETQARVLEALLKDGDVEKAVRIVKEVTEKLSKYEVPPEKLVIHEQITRDLKDYKATGPHVAVAKRLAARGVKIRPGTVISYIVLKGSGRIGDRAIPFDEFDPTKHKYDAEYYIENQVLPAVERILRAFGYRKEDLRYQKTRQVGLSAWLKPKGT

SEQ ID NO: 478 - protein, 774 aa, synthetic construct
MILDTDYITEDGKPVIRIFKKENGEFKIEYDRTFEPYFYALLKDDSAIEEVKKITAERHGTVVTVKRVEKVQKKFLGRPVEVWKLYFTHPQDVPAIRDKIREHPAVIDIYEYDIPFAKRYLIDKGLVPMEGDEELKMLAFDIETLYHEGEEFAEGPILMISYADEEGARVITWKNVDLPYVDVVSTEREMIKRFLRVVKEKDPDVLITYNGDNRDFAYLKKRCEKLGINFALGRDGSEPKIQRMGDRFAVEVKGRIHFDLYPVIRRTINLPTYTLEAVYEAVFGQPKEKVYAEEITTAWETGENLERVARYSMEDAKVTYELGKEFLPMEAQLSRLIGQSLWDVSRSSTGNLVEWFLLRKAYERNELAPNKPDEKELARRRQSYEGGYVKEPERGLWENIVYLDFRSLYPSIIITHNVSPDTLNREGCKEYDVAPQVGHRFCKDFPGFIPSLLGDLLEERQKIKKKMKATIDPIERKLLDYRQRAIKILANSYYGYYGYARARWYCKECAESVTAWGREYITMTIKEIEEKYGFKVIYSDTDGFFATIPGADAETVKKKAMEFLKYINAKLPGALELEYEGFYKRGFFVTKKKYAVIDEEGKITTRGLEIVRRDWSEIAKETQARVLEALLKDGDVEKAVRIVKEVTEKLSKYEVPPEKLVIHEQITRDLKDYKATGPHVAVAKRLAARGVKIRPGTVISYIVLKGSGRIGDRAIPFDEFDPTKHKYDAEYYIENQVLPAVERILRAFGYRKEDLRYQKTRQVGLSAWLKPKGT

SEQ ID NO: 479 - protein, 774 aa, synthetic construct
MILDTDYITEDGKPVIRIFKKENGEFKIEYDRTFEPYFYALLKDDSAIEEVKKITAERHGTVVTVKRVEKVQKKFLGRPVEVWKLYFTHPQDVPAIRDKIREHPAVIDIYEYDIPFAKRYLIDKGLVPMEGDEELKMLAFDIETLYHEGEEFAEGPILMISYADEEGARVITWKNVDLPYVDVVSTEREMIKRFLRVVKEKDPDVLITYNGDNSDFAYLKKRCEKLGINFALGRDGSEPKIQRMGDRFAVEVKGRIHFDLYPVIRRTINLPTYTLEAVYEAVFGQPKEKVYAEEITTAWETGENLERVARYSMEDAKVTYELGKEFLPMEAQLSRLIGQSLWDVSRSSTGNLVEWFLLRKAYERNELAPNKPDEKELARRRQSYEGGYVKEPERGLWENIVYLDFRSLYPSIIITHNVSPDTLNREGCKEYDVAPQVGHRFCKDFPGFIPSLLGDLLEERQKIKKKMKATIDPIERKLLDYRQRAIKILANSYYGYYGYARARWYCKECAESVTAWGREYITMTIKEIEEKYGFKVIYSDTDGFFATIPGADAETVKKKAMEFLKYINAKLPGALELEYEGFYKRGFFVTKKKYAVIDEEGKITTRGLEIVRRDWSEIAKETQARVLEALLKDGDVEKAVRIVKEVTEKLSKYEVPPEKLVIHEQITRDLKDYKATGPHVAVAKRLAARGVKIRPGTVISYIVLKGSGRIGDRAIPFDEFDPTKHKYDAEYYIENQVLPAVERILRAFGYRKEDLRYQKTRQVGLSAWLKPKGT

SEQ ID NO: 480 - protein, 774 aa, synthetic construct
MILDTDYITEDGKPVIRIFKKENGEFKIEYDRTFEPYFYALLKDDSAIEEVKKITAERHGTVVTVKRVEKVQKKFLGRPVEVWKLYFTHPQDVPAIRDKIREHPAVIDIYEYDIPFAKRYLIDKGLVPMEGDEELKMLAFDIETLYHEGEEFAEGPILMISYADEEGARVITWKNVDLPYVDVVSTEREMIKRFLRVVKEKDPDVLITYNGDNTDFAYLKKRCEKLGINFALGRDGSEPKIQRMGDRFAVEVKGRIHFDLYPVIRRTINLPTYTLEAVYEAVFGQPKEKVYAEEITTAWETGENLERVARYSMEDAKVTYELGKEFLPMEAQLSRLIGQSLWDVSRSSTGNLVEWFLLRKAYERNELAPNKPDEKELARRRQSYEGGYVKEPERGLWENIVYLDFRSLYPSIIITHNVSPDTLNREGCKEYDVAPQVGHRFCKDFPGFIPSLLGDLLEERQKIKKKMKATIDPIERKLLDYRQRAIKILANSYYGYYGYARARWYCKECAESVTAWGREYITMTIKEIEEKYGFKVIYSDTDGFFATIPGADAETVKKKAMEFLKYINAKLPGALELEYEGFYKRGFFVTKKKYAVIDEEGKITTRGLEIVRRDWSEIAKETQARVLEALLKDGDVEKAVRIVKEVTEKLSKYEVPPEKLVIHEQITRDLKDYKATGPHVAVAKRLAARGVKIRPGTVISYIVLKGSGRIGDRAIPFDEFDPTKHKYDAEYYIENQVLPAVERILRAFGYRKEDLRYQKTRQVGLSAWLKPKGT

SEQ ID NO: 481 - protein, 774 aa, synthetic construct
MILDTDYITEDGKPVIRIFKKENGEFKIEYDRTFEPYFYALLKDDSAIEEVKKITAERHGTVVTVKRVEKVQKKFLGRPVEVWKLYFTHPQDVPAIRDKIREHPAVIDIYEYDIPFAKRYLIDKGLVPMEGDEELKMLAFDIETLYHEGEEFAEGPILMISYADEEGARVITWKNVDLPYVDVVSTEREMIKRFLRVVKEKDPDVLITYNGDNVDFAYLKKRCEKLGINFALGRDGSEPKIQRMGDRFAVEVKGRIHFDLYPVIRRTINLPTYTLEAVYEAVFGQPKEKVYAEEITTAWETGENLERVARYSMEDAKVTYELGKEFLPMEAQLSRLIGQSLWDVSRSSTGNLVEWFLLRKAYERNELAPNKPDEKELARRRQSYEGGYVKEPERGLWENIVYLDFRSLYPSIIITHNVSPDTLNREGCKEYDVAPQVGHRFCKDFPGFIPSLLGDLLEERQKIKKKMKATIDPIERKLLDYRQRAIKILANSYYGYYGYARARWYCKECAESVTAWGREYITMTIKEIEEKYGFKVIYSDTDGFFATIPGADAETVKKKAMEFLKYINAKLPGALELEYEGFYKRGFFVTKKKYAVIDEEGKITTRGLEIVRRDWSEIAKETQARVLEALLKDGDVEKAVRIVKEVTEKLSKYEVPPEKLVIHEQITRDLKDYKATGPHVAVAKRLAARGVKIRPGTVISYIVLKGSGRIGDRAIPFDEFDPTKHKYDAEYYIENQVLPAVERILRAFGYRKEDLRYQKTRQVGLSAWLKPKGT

SEQ ID NO: 482 - protein, 774 aa, synthetic construct
MILDTDYITEDGKPVIRIFKKENGEFKIEYDRTFEPYFYALLKDDSAIEEVKKITAERHGTVVTVKRVEKVQKKFLGRPVEVWKLYFTHPQDVPAIRDKIREHPAVIDIYEYDIPFAKRYLIDKGLVPMEGDEELKMLAFDIETLYHEGEEFAEGPILMISYADEEGARVITWKNVDLPYVDVVSTEREMIKRFLRVVKEKDPDVLITYNGDNWDFAYLKKRCEKLGINFALGRDGSEPKIQRMGDRFAVEVKGRIHFDLYPVIRRTINLPTYTLEAVYEAVFGQPKEKVYAEEITTAWETGENLERVARYSMEDAKVTYELGKEFLPMEAQLSRLIGQSLWDVSRSSTGNLVEWFLLRKAYERNELAPNKPDEKELARRRQSYEGGYVKEPERGLWENIVYLDFRSLYPSIIITHNVSPDTLNREGCKEYDVAPQVGHRFCKDFPGFIPSLLGDLLEERQKIKKKMKATIDPIERKLLDYRQRAIKILANSYYGYYGYARARWYCKECAESVTAWGREYITMTIKEIEEKYGFKVIYSDTDGFFATIPGADAETVKKKAMEFLKYINAKLPGALELEYEGFYKRGFFVTKKKYAVIDEEGKITTRGLEIVRRDWSEIAKETQARVLEALLKDGDVEKAVRIVKEVTEKLSKYEVPPEKLVIHEQITRDLKDYKATGPHVAVAKRLAARGVKIRPGTVISYIVLKGSGRIGDRAIPFDEFDPTKHKYDAEYYIENQVLPAVERILRAFGYRKEDLRYQKTRQVGLSAWLKPKGT

SEQ ID NO: 483 - protein, 774 aa, synthetic construct
MILDTDYITEDGKPVIRIFKKENGEFKIEYDRTFEPYFYALLKDDSAIEEVKKITAERHGTVVTVKRVEKVQKKFLGRPVEVWKLYFTHPQDVPAIRDKIREHPAVIDIYEYDIPFAKRYLIDKGLVPMEGDEELKMLAFDIETLYHEGEEFAEGPILMISYADEEGARVITWKNVDLPYVDVVSTEREMIKRFLRVVKEKDPDVLITYNGDNFAFAYLKKRCEKLGINFALGRDGSEPKIQRMGDRFAVEVKGRIHFDLYPVIRRTINLPTYTLEAVYEAVFGQPKEKVYAEEITTAWETGENLERVARYSMEDAKVTYELGKEFLPMEAQLSRLIGQSLWDVSRSSTGNLVEWFLLRKAYERNELAPNKPDEKELARRRQSYEGGYVKEPERGLWENIVYLDFRSLYPSIIITHNVSPDTLNREGCKEYDVAPQVGHRFCKDFPGFIPSLLGDLLEERQKIKKKMKATIDPIERKLLDYRQRAIKILANSYYGYYGYARARWYCKECAESVTAWGREYITMTIKEIEEKYGFKVIYSDTDGFFATIPGADAETVKKKAMEFLKYINAKLPGALELEYEGFYKRGFFVTKKKYAVIDEEGKITTRGLEIVRRDWSEIAKETQARVLEALLKDGDVEKAVRIVKEVTEKLSKYEVPPEKLVIHEQITRDLKDYKATGPHVAVAKRLAARGVKIRPGTVISYIVLKGSGRIGDRAIPFDEFDPTKHKYDAEYYIENQVLPAVERILRAFGYRKEDLRYQKTRQVGLSAWLKPKGT

SEQ ID NO: 484 - protein, 774 aa, synthetic construct
MILDTDYITEDGKPVIRIFKKENGEFKIEYDRTFEPYFYALLKDDSAIEEVKKITAERHGTVVTVKRVEKVQKKFLGRPVEVWKLYFTHPQDVPAIRDKIREHPAVIDIYEYDIPFAKRYLIDKGLVPMEGDEELKMLAFDIETLYHEGEEFAEGPILMISYADEEGARVITWKNVDLPYVDVVSTEREMIKRFLRVVKEKDPDVLITYNGDNFCFAYLKKRCEKLGINFALGRDGSEPKIQRMGDRFAVEVKGRIHFDLYPVIRRTINLPTYTLEAVYEAVFGQPKEKVYAEEITTAWETGENLERVARYSMEDAKVTYELGKEFLPMEAQLSRLIGQSLWDVSRSSTGNLVEWFLLRKAYERNELAPNKPDEKELARRRQSYEGGYVKEPERGLWENIVYLDFRSLYPSIIITHNVSPDTLNREGCKEYDVAPQVGHRFCKDFPGFIPSLLGDLLEERQKIKKKMKATIDPIERKLLDYRQRAIKILANSYYGYYGYARARWYCKECAESVTAWGREYITMTIKEIEEKYGFKVIYSDTDGFFATIPGADAETVKKKAMEFLKYINAKLPGALELEYEGFYKRGFFVTKKKYAVIDEEGKITTRGLEIVRRDWSEIAKETQARVLEALLKDGDVEKAVRIVKEVTEKLSKYEVPPEKLVIHEQITRDLKDYKATGPHVAVAKRLAARGVKIRPGTVISYIVLKGSGRIGDRAIPFDEFDPTKHKYDAEYYIENQVLPAVERILRAFGYRKEDLRYQKTRQVGLSAWLKPKGT

SEQ ID NO: 485 - protein, 774 aa, synthetic construct
MILDTDYITEDGKPVIRIFKKENGEFKIEYDRTFEPYFYALLKDDSAIEEVKKITAERHGTVVTVKRVEKVQKKFLGRPVEVWKLYFTHPQDVPAIRDKIREHPAVIDIYEYDIPFAKRYLIDKGLVPMEGDEELKMLAFDIETLYHEGEEFAEGPILMISYADEEGARVITWKNVDLPYVDVVSTEREMIKRFLRVVKEKDPDVLITYNGDNFFFAYLKKRCEKLGINFALGRDGSEPKIQRMGDRFAVEVKGRIHFDLYPVIRRTINLPTYTLEAVYEAVFGQPKEKVYAEEITTAWETGENLERVARYSMEDAKVTYELGKEFLPMEAQLSRLIGQSLWDVSRSSTGNLVEWFLLRKAYERNELAPNKPDEKELARRRQSYEGGYVKEPERGLWENIVYLDFRSLYPSIIITHNVSPDTLNREGCKEYDVAPQVGHRFCKDFPGFIPSLLGDLLEERQKIKKKMKATIDPIERKLLDYRQRAIKILANSYYGYYGYARARWYCKECAESVTAWGREYITMTIKEIEEKYGFKVIYSDTDGFFATIPGADAETVKKKAMEFLKYINAKLPGALELEYEGFYKRGFFVTKKKYAVIDEEGKITTRGLEIVRRDWSEIAKETQARVLEALLKDGDVEKAVRIVKEVTEKLSKYEVPPEKLVIHEQITRDLKDYKATGPHVAVAKRLAARGVKIRPGTVISYIVLKGSGRIGDRAIPFDEFDPTKHKYDAEYYIENQVLPAVERILRAFGYRKEDLRYQKTRQVGLSAWLKPKGT

SEQ ID NO: 486 - protein, 774 aa, synthetic construct
MILDTDYITEDGKPVIRIFKKENGEFKIEYDRTFEPYFYALLKDDSAIEEVKKITAERHGTVVTVKRVEKVQKKFLGRPVEVWKLYFTHPQDVPAIRDKIREHPAVIDIYEYDIPFAKRYLIDKGLVPMEGDEELKMLAFDIETLYHEGEEFAEGPILMISYADEEGARVITWKNVDLPYVDVVSTEREMIKRFLRVVKEKDPDVLITYNGDNFGFAYLKKRCEKLGINFALGRDGSEPKIQRMGDRFAVEVKGRIHFDLYPVIRRTINLPTYTLEAVYEAVFGQPKEKVYAEEITTAWETGENLERVARYSMEDAKVTYELGKEFLPMEAQLSRLIGQSLWDVSRSSTGNLVEWFLLRKAYERNELAPNKPDEKELARRRQSYEGGYVKEPERGLWENIVYLDFRSLYPSIIITHNVSPDTLNREGCKEYDVAPQVGHRFCKDFPGFIPSLLGDLLEERQKIKKKMKATIDPIERKLLDYRQRAIKILANSYYGYYGYARARWYCKECAESVTAWGREYITMTIKEIEEKYGFKVIYSDTDGFFATIPGADAETVKKKAMEFLKYINAKLPGALELEYEGFYKRGFFVTKKKYAVIDEEGKITTRGLEIVRRDWSEIAKETQARVLEALLKDGDVEKAVRIVKEVTEKLSKYEVPPEKLVIHEQITRDLKDYKATGPHVAVAKRLAARGVKIRPGTVISYIVLKGSGRIGDRAIPFDEFDPTKHKYDAEYYIENQVLPAVERILRAFGYRKEDLRYQKTRQVGLSAWLKPKGT

SEQ ID NO: 487 - protein, 774 aa, synthetic construct
MILDTDYITEDGKPVIRIFKKENGEFKIEYDRTFEPYFYALLKDDSAIEEVKKITAERHGTVVTVKRVEKVQKKFLGRPVEVWKLYFTHPQDVPAIRDKIREHPAVIDIYEYDIPFAKRYLIDKGLVPMEGDEELKMLAFDIETLYHEGEEFAEGPILMISYADEEGARVITWKNVDLPYVDVVSTEREMIKRFLRVVKEKDPDVLITYNGDNFHFAYLKKRCEKLGINFALGRDGSEPKIQRMGDRFAVEVKGRIHFDLYPVIRRTINLPTYTLEAVYEAVFGQPKEKVYAEEITTAWETGENLERVARYSMEDAKVTYELGKEFLPMEAQLSRLIGQSLWDVSRSSTGNLVEWFLLRKAYERNELAPNKPDEKELARRRQSYEGGYVKEPERGLWENIVYLDFRSLYPSIIITHNVSPDTLNREGCKEYDVAPQVGHRFCKDFPGFIPSLLGDLLEERQKIKKKMKATIDPIERKLLDYRQRAIKILANSYYGYYGYARARWYCKECAESVTAWGREYITMTIKEIEEKYGFKVIYSDTDGFFATIPGADAETVKKKAMEFLKYINAKLPGALELEYEGFYKRGFFVTKKKYAVIDEEGKITTRGLEIVRRDWSEIAKETQARVLEALLKDGDVEKAVRIVKEVTEKLSKYEVPPEKLVIHEQITRDLKDYKATGPHVAVAKRLAARGVKIRPGTVISYIVLKGSGRIGDRAIPFDEFDPTKHKYDAEYYIENQVLPAVERILRAFGYRKEDLRYQKTRQVGLSAWLKPKGT

SEQ ID NO: 488 - protein, 774 aa, synthetic construct
MILDTDYITEDGKPVIRIFKKENGEFKIEYDRTFEPYFYALLKDDSAIEEVKKITAERHGTVVTVKRVEKVQKKFLGRPVEVWKLYFTHPQDVPAIRDKIREHPAVIDIYEYDIPFAKRYLIDKGLVPMEGDEELKMLAFDIETLYHEGEEFAEGPILMISYADEEGARVITWKNVDLPYVDVVSTEREMIKRFLRVVKEKDPDVLITYNGDNFIFAYLKKRCEKLGINFALGRDGSEPKIQRMGDRFAVEVKGRIHFDLYPVIRRTINLPTYTLEAVYEAVFGQPKEKVYAEEITTAWETGENLERVARYSMEDAKVTYELGKEFLPMEAQLSRLIGQSLWDVSRSSTGNLVEWFLLRKAYERNELAPNKPDEKELARRRQSYEGGYVKEPERGLWENIVYLDFRSLYPSIIITHNVSPDTLNREGCKEYDVAPQVGHRFCKDFPGFIPSLLGDLLEERQKIKKKMKATIDPIERKLLDYRQRAIKILANSYYGYYGYARARWYCKECAESVTAWGREYITMTIKEIEEKYGFKVIYSDTDGFFATIPGADAETVKKKAMEFLKYINAKLPGALELEYEGFYKRGFFVTKKKYAVIDEEGKITTRGLEIVRRDWSEIAKETQARVLEALLKDGDVEKAVRIVKEVTEKLSKYEVPPEKLVIHEQITRDLKDYKATGPHVAVAKRLAARGVKIRPGTVISYIVLKGSGRIGDRAIPFDEFDPTKHKYDAEYYIENQVLPAVERILRAFGYRKEDLRYQKTRQVGLSAWLKPKGT

SEQ ID NO: 489 - protein, 774 aa, synthetic construct
MILDTDYITEDGKPVIRIFKKENGEFKIEYDRTFEPYFYALLKDDSAIEEVKKITAERHGTVVTVKRVEKVQKKFLGRPVEVWKLYFTHPQDVPAIRDKIREHPAVIDIYEYDIPFAKRYLIDKGLVPMEGDEELKMLAFDIETLYHEGEEFAEGPILMISYADEEGARVITWKNVDLPYVDVVSTEREMIKRFLRVVKEKDPDVLITYNGDNFKFAYLKKRCEKLGINFALGRDGSEPKIQRMGDRFAVEVKGRIHFDLYPVIRRTINLPTYTLEAVYEAVFGQPKEKVYAEEITTAWETGENLERVARYSMEDAKVTYELGKEFLPMEAQLSRLIGQSLWDVSRSSTGNLVEWFLLRKAYERNELAPNKPDEKELARRRQSYEGGYVKEPERGLWENIVYLDFRSLYPSIIITHNVSPDTLNREGCKEYDVAPQVGHRFCKDFPGFIPSLLGDLLEERQKIKKKMKATIDPIERKLLDYRQRAIKILANSYYGYYGYARARWYCKECAESVTAWGREYITMTIKEIEEKYGFKVIYSDTDGFFATIPGADAETVKKKAMEFLKYINAKLPGALELEYEGFYKRGFFVTKKKYAVIDEEGKITTRGLEIVRRDWSEIAKETQARVLEALLKDGDVEKAVRIVKEVTEKLSKYEVPPEKLVIHEQITRDLKDYKATGPHVAVAKRLAARGVKIRPGTVISYIVLKGSGRIGDRAIPFDEFDPTKHKYDAEYYIENQVLPAVERILRAFGYRKEDLRYQKTRQVGLSAWLKPKGT

SEQ ID NO: 490 - protein, 774 aa, synthetic construct
MILDTDYITEDGKPVIRIFKKENGEFKIEYDRTFEPYFYALLKDDSAIEEVKKITAERHGTVVTVKRVEKVQKKFLGRPVEVWKLYFTHPQDVPAIRDKIREHPAVIDIYEYDIPFAKRYLIDKGLVPMEGDEELKMLAFDIETLYHEGEEFAEGPILMISYADEEGARVITWKNVDLPYVDVVSTEREMIKRFLRVVKEKDPDVLITYNGDNFLFAYLKKRCEKLGINFALGRDGSEPKIQRMGDRFAVEVKGRIHFDLYPVIRRTINLPTYTLEAVYEAVFGQPKEKVYAEEITTAWETGENLERVARYSMEDAKVTYELGKEFLPMEAQLSRLIGQSLWDVSRSSTGNLVEWFLLRKAYERNELAPNKPDEKELARRRQSYEGGYVKEPERGLWENIVYLDFRSLYPSIIITHNVSPDTLNREGCKEYDVAPQVGHRFCKDFPGFIPSLLGDLLEERQKIKKKMKATIDPIERKLLDYRQRAIKILANSYYGYYGYARARWYCKECAESVTAWGREYITMTIKEIEEKYGFKVIYSDTDGFFATIPGADAETVKKKAMEFLKYINAKLPGALELEYEGFYKRGFFVTKKKYAVIDEEGKITTRGLEIVRRDWSEIAKETQARVLEALLKDGDVEKAVRIVKEVTEKLSKYEVPPEKLVIHEQITRDLKDYKATGPHVAVAKRLAARGVKIRPGTVISYIVLKGSGRIGDRAIPFDEFDPTKHKYDAEYYIENQVLPAVERILRAFGYRKEDLRYQKTRQVGLSAWLKPKGT

SEQ ID NO: 491 - protein, 774 aa, synthetic construct
MILDTDYITEDGKPVIRIFKKENGEFKIEYDRTFEPYFYALLKDDSAIEEVKKITAERHGTVVTVKRVEKVQKKFLGRPVEVWKLYFTHPQDVPAIRDKIREHPAVIDIYEYDIPFAKRYLIDKGLVPMEGDEELKMLAFDIETLYHEGEEFAEGPILMISYADEEGARVITWKNVDLPYVDVVSTEREMIKRFLRVVKEKDPDVLITYNGDNFMFAYLKKRCEKLGINFALGRDGSEPKIQRMGDRFAVEVKGRIHFDLYPVIRRTINLPTYTLEAVYEAVFGQPKEKVYAEEITTAWETGENLERVARYSMEDAKVTYELGKEFLPMEAQLSRLIGQSLWDVSRSSTGNLVEWFLLRKAYERNELAPNKPDEKELARRRQSYEGGYVKEPERGLWENIVYLDFRSLYPSIIITHNVSPDTLNREGCKEYDVAPQVGHRFCKDFPGFIPSLLGDLLEERQKIKKKMKATIDPIERKLLDYRQRAIKILANSYYGYYGYARARWYCKECAESVTAWGREYITMTIKEIEEKYGFKVIYSDTDGFFATIPGADAETVKKKAMEFLKYINAKLPGALELEYEGFYKRGFFVTKKKYAVIDEEGKITTRGLEIVRRDWSEIAKETQARVLEALLKDGDVEKAVRIVKEVTEKLSKYEVPPEKLVIHEQITRDLKDYKATGPHVAVAKRLAARGVKIRPGTVISYIVLKGSGRIGDRAIPFDEFDPTKHKYDAEYYIENQVLPAVERILRAFGYRKEDLRYQKTRQVGLSAWLKPKGT

SEQ ID NO: 492 - protein, 774 aa, synthetic construct
MILDTDYITEDGKPVIRIFKKENGEFKIEYDRTFEPYFYALLKDDSAIEEVKKITAERHGTVVTVKRVEKVQKKFLGRPVEVWKLYFTHPQDVPAIRDKIREHPAVIDIYEYDIPFAKRYLIDKGLVPMEGDEELKMLAFDIETLYHEGEEFAEGPILMISYADEEGARVITWKNVDLPYVDVVSTEREMIKRFLRVVKEKDPDVLITYNGDNFNFAYLKKRCEKLGINFALGRDGSEPKIQRMGDRFAVEVKGRIHFDLYPVIRRTINLPTYTLEAVYEAVFGQPKEKVYAEEITTAWETGENLERVARYSMEDAKVTYELGKEFLPMEAQLSRLIGQSLWDVSRSSTGNLVEWFLLRKAYERNELAPNKPDEKELARRRQSYEGGYVKEPERGLWENIVYLDFRSLYPSIIITHNVSPDTLNREGCKEYDVAPQVGHRFCKDFPGFIPSLLGDLLEERQKIKKKMKATIDPIERKLLDYRQRAIKILANSYYGYYGYARARWYCKECAESVTAWGREYITMTIKEIEEKYGFKVIYSDTDGFFATIPGADAETVKKKAMEFLKYINAKLPGALELEYEGFYKRGFFVTKKKYAVIDEEGKITTRGLEIVRRDWSEIAKETQARVLEALLKDGDVEKAVRIVKEVTEKLSKYEVPPEKLVIHEQITRDLKDYKATGPHVAVAKRLAARGVKIRPGTVISYIVLKGSGRIGDRAIPFDEFDPTKHKYDAEYYIENQVLPAVERILRAFGYRKEDLRYQKTRQVGLSAWLKPKGT

SEQ ID NO: 493 - protein, 774 aa, synthetic construct
MILDTDYITEDGKPVIRIFKKENGEFKIEYDRTFEPYFYALLKDDSAIEEVKKITAERHGTVVTVKRVEKVQKKFLGRPVEVWKLYFTHPQDVPAIRDKIREHPAVIDIYEYDIPFAKRYLIDKGLVPMEGDEELKMLAFDIETLYHEGEEFAEGPILMISYADEEGARVITWKNVDLPYVDVVSTEREMIKRFLRVVKEKDPDVLITYNGDNFPFAYLKKRCEKLGINFALGRDGSEPKIQRMGDRFAVEVKGRIHFDLYPVIRRTINLPTYTLEAVYEAVFGQPKEKVYAEEITTAWETGENLERVARYSMEDAKVTYELGKEFLPMEAQLSRLIGQSLWDVSRSSTGNLVEWFLLRKAYERNELAPNKPDEKELARRRQSYEGGYVKEPERGLWENIVYLDFRSLYPSIIITHNVSPDTLNREGCKEYDVAPQVGHRFCKDFPGFIPSLLGDLLEERQKIKKKMKATIDPIERKLLDYRQRAIKILANSYYGYYGYARARWYCKECAESVTAWGREYITMTIKEIEEKYGFKVIYSDTDGFFATIPGADAETVKKKAMEFLKYINAKLPGALELEYEGFYKRGFFVTKKKYAVIDEEGKITTRGLEIVRRDWSEIAKETQARVLEALLKDGDVEKAVRIVKEVTEKLSKYEVPPEKLVIHEQITRDLKDYKATGPHVAVAKRLAARGVKIRPGTVISYIVLKGSGRIGDRAIPFDEFDPTKHKYDAEYYIENQVLPAVERILRAFGYRKEDLRYQKTRQVGLSAWLKPKGT

SEQ ID NO: 494 - protein, 774 aa, synthetic construct
MILDTDYITEDGKPVIRIFKKENGEFKIEYDRTFEPYFYALLKDDSAIEEVKKITAERHGTVVTVKRVEKVQKKFLGRPVEVWKLYFTHPQDVPAIRDKIREHPAVIDIYEYDIPFAKRYLIDKGLVPMEGDEELKMLAFDIETLYHEGEEFAEGPILMISYADEEGARVITWKNVDLPYVDVVSTEREMIKRFLRVVKEKDPDVLITYNGDNFQFAYLKKRCEKLGINFALGRDGSEPKIQRMGDRFAVEVKGRIHFDLYPVIRRTINLPTYTLEAVYEAVFGQPKEKVYAEEITTAWETGENLERVARYSMEDAKVTYELGKEFLPMEAQLSRLIGQSLWDVSRSSTGNLVEWFLLRKAYERNELAPNKPDEKELARRRQSYEGGYVKEPERGLWENIVYLDFRSLYPSIIITHNVSPDTLNREGCKEYDVAPQVGHRFCKDFPGFIPSLLGDLLEERQKIKKKMKATIDPIERKLLDYRQRAIKILANSYYGYYGYARARWYCKECAESVTAWGREYITMTIKEIEEKYGFKVIYSDTDGFFATIPGADAETVKKKAMEFLKYINAKLPGALELEYEGFYKRGFFVTKKKYAVIDEEGKITTRGLEIVRRDWSEIAKETQARVLEALLKDGDVEKAVRIVKEVTEKLSKYEVPPEKLVIHEQITRDLKDYKATGPHVAVAKRLAARGVKIRPGTVISYIVLKGSGRIGDRAIPFDEFDPTKHKYDAEYYIENQVLPAVERILRAFGYRKEDLRYQKTRQVGLSAWLKPKGT

SEQ ID NO: 495 - protein, 774 aa, synthetic construct
MILDTDYITEDGKPVIRIFKKENGEFKIEYDRTFEPYFYALLKDDSAIEEVKKITAERHGTVVTVKRVEKVQKKFLGRPVEVWKLYFTHPQDVPAIRDKIREHPAVIDIYEYDIPFAKRYLIDKGLVPMEGDEELKMLAFDIETLYHEGEEFAEGPILMISYADEEGARVITWKNVDLPYVDVVSTEREMIKRFLRVVKEKDPDVLITYNGDNFRFAYLKKRCEKLGINFALGRDGSEPKIQRMGDRFAVEVKGRIHFDLYPVIRRTINLPTYTLEAVYEAVFGQPKEKVYAEEITTAWETGENLERVARYSMEDAKVTYELGKEFLPMEAQLSRLIGQSLWDVSRSSTGNLVEWFLLRKAYERNELAPNKPDEKELARRRQSYEGGYVKEPERGLWENIVYLDFRSLYPSIIITHNVSPDTLNREGCKEYDVAPQVGHRFCKDFPGFIPSLLGDLLEERQKIKKKMKATIDPIERKLLDYRQRAIKILANSYYGYYGYARARWYCKECAESVTAWGREYITMTIKEIEEKYGFKVIYSDTDGFFATIPGADAETVKKKAMEFLKYINAKLPGALELEYEGFYKRGFFVTKKKYAVIDEEGKITTRGLEIVRRDWSEIAKETQARVLEALLKDGDVEKAVRIVKEVTEKLSKYEVPPEKLVIHEQITRDLKDYKATGPHVAVAKRLAARGVKIRPGTVISYIVLKGSGRIGDRAIPFDEFDPTKHKYDAEYYIENQVLPAVERILRAFGYRKEDLRYQKTRQVGLSAWLKPKGT

SEQ ID NO: 496 - protein, 774 aa, synthetic construct
MILDTDYITEDGKPVIRIFKKENGEFKIEYDRTFEPYFYALLKDDSAIEEVKKITAERHGTVVTVKRVEKVQKKFLGRPVEVWKLYFTHPQDVPAIRDKIREHPAVIDIYEYDIPFAKRYLIDKGLVPMEGDEELKMLAFDIETLYHEGEEFAEGPILMISYADEEGARVITWKNVDLPYVDVVSTEREMIKRFLRVVKEKDPDVLITYNGDNFSFAYLKKRCEKLGINFALGRDGSEPKIQRMGDRFAVEVKGRIHFDLYPVIRRTINLPTYTLEAVYEAVFGQPKEKVYAEEITTAWETGENLERVARYSMEDAKVTYELGKEFLPMEAQLSRLIGQSLWDVSRSSTGNLVEWFLLRKAYERNELAPNKPDEKELARRRQSYEGGYVKEPERGLWENIVYLDFRSLYPSIIITHNVSPDTLNREGCKEYDVAPQVGHRFCKDFPGFIPSLLGDLLEERQKIKKKMKATIDPIERKLLDYRQRAIKILANSYYGYYGYARARWYCKECAESVTAWGREYITMTIKEIEEKYGFKVIYSDTDGFFATIPGADAETVKKKAMEFLKYINAKLPGALELEYEGFYKRGFFVTKKKYAVIDEEGKITTRGLEIVRRDWSEIAKETQARVLEALLKDGDVEKAVRIVKEVTEKLSKYEVPPEKLVIHEQITRDLKDYKATGPHVAVAKRLAARGVKIRPGTVISYIVLKGSGRIGDRAIPFDEFDPTKHKYDAEYYIENQVLPAVERILRAFGYRKEDLRYQKTRQVGLSAWLKPKGT

SEQ ID NO: 497 - protein, 774 aa, synthetic construct
MILDTDYITEDGKPVIRIFKKENGEFKIEYDRTFEPYFYALLKDDSAIEEVKKITAERHGTVVTVKRVEKVQKKFLGRPVEVWKLYFTHPQDVPAIRDKIREHPAVIDIYEYDIPFAKRYLIDKGLVPMEGDEELKMLAFDIETLYHEGEEFAEGPILMISYADEEGARVITWKNVDLPYVDVVSTEREMIKRFLRVVKEKDPDVLITYNGDNFTFAYLKKRCEKLGINFALGRDGSEPKIQRMGDRFAVEVKGRIHFDLYPVIRRTINLPTYTLEAVYEAVFGQPKEKVYAEEITTAWETGENLERVARYSMEDAKVTYELGKEFLPMEAQLSRLIGQSLWDVSRSSTGNLVEWFLLRKAYERNELAPNKPDEKELARRRQSYEGGYVKEPERGLWENIVYLDFRSLYPSIIITHNVSPDTLNREGCKEYDVAPQVGHRFCKDFPGFIPSLLGDLLEERQKIKKKMKATIDPIERKLLDYRQRAIKILANSYYGYYGYARARWYCKECAESVTAWGREYITMTIKEIEEKYGFKVIYSDTDGFFATIPGADAETVKKKAMEFLKYINAKLPGALELEYEGFYKRGFFVTKKKYAVIDEEGKITTRGLEIVRRDWSEIAKETQARVLEALLKDGDVEKAVRIVKEVTEKLSKYEVPPEKLVIHEQITRDLKDYKATGPHVAVAKRLAARGVKIRPGTVISYIVLKGSGRIGDRAIPFDEFDPTKHKYDAEYYIENQVLPAVERILRAFGYRKEDLRYQKTRQVGLSAWLKPKGT

SEQ ID NO: 498 - protein, 774 aa, synthetic construct
MILDTDYITEDGKPVIRIFKKENGEFKIEYDRTFEPYFYALLKDDSAIEEVKKITAERHGTVVTVKRVEKVQKKFLGRPVEVWKLYFTHPQDVPAIRDKIREHPAVIDIYEYDIPFAKRYLIDKGLVPMEGDEELKMLAFDIETLYHEGEEFAEGPILMISYADEEGARVITWKNVDLPYVDVVSTEREMIKRFLRVVKEKDPDVLITYNGDNFVFAYLKKRCEKLGINFALGRDGSEPKIQRMGDRFAVEVKGRIHFDLYPVIRRTINLPTYTLEAVYEAVFGQPKEKVYAEEITTAWETGENLERVARYSMEDAKVTYELGKEFLPMEAQLSRLIGQSLWDVSRSSTGNLVEWFLLRKAYERNELAPNKPDEKELARRRQSYEGGYVKEPERGLWENIVYLDFRSLYPSIIITHNVSPDTLNREGCKEYDVAPQVGHRFCKDFPGFIPSLLGDLLEERQKIKKKMKATIDPIERKLLDYRQRAIKILANSYYGYYGYARARWYCKECAESVTAWGREYITMTIKEIEEKYGFKVIYSDTDGFFATIPGADAETVKKKAMEFLKYINAKLPGALELEYEGFYKRGFFVTKKKYAVIDEEGKITTRGLEIVRRDWSEIAKETQARVLEALLKDGDVEKAVRIVKEVTEKLSKYEVPPEKLVIHEQITRDLKDYKATGPHVAVAKRLAARGVKIRPGTVISYIVLKGSGRIGDRAIPFDEFDPTKHKYDAEYYIENQVLPAVERILRAFGYRKEDLRYQKTRQVGLSAWLKPKGT

SEQ ID NO: 499 - protein, 774 aa, synthetic construct
MILDTDYITEDGKPVIRIFKKENGEFKIEYDRTFEPYFYALLKDDSAIEEVKKITAERHGTVVTVKRVEKVQKKFLGRPVEVWKLYFTHPQDVPAIRDKIREHPAVIDIYEYDIPFAKRYLIDKGLVPMEGDEELKMLAFDIETLYHEGEEFAEGPILMISYADEEGARVITWKNVDLPYVDVVSTEREMIKRFLRVVKEKDPDVLITYNGDNFWFAYLKKRCEKLGINFALGRDGSEPKIQRMGDRFAVEVKGRIHFDLYPVIRRTINLPTYTLEAVYEAVFGQPKEKVYAEEITTAWETGENLERVARYSMEDAKVTYELGKEFLPMEAQLSRLIGQSLWDVSRSSTGNLVEWFLLRKAYERNELAPNKPDEKELARRRQSYEGGYVKEPERGLWENIVYLDFRSLYPSIIITHNVSPDTLNREGCKEYDVAPQVGHRFCKDFPGFIPSLLGDLLEERQKIKKKMKATIDPIERKLLDYRQRAIKILANSYYGYYGYARARWYCKECAESVTAWGREYITMTIKEIEEKYGFKVIYSDTDGFFATIPGADAETVKKKAMEFLKYINAKLPGALELEYEGFYKRGFFVTKKKYAVIDEEGKITTRGLEIVRRDWSEIAKETQARVLEALLKDGDVEKAVRIVKEVTEKLSKYEVPPEKLVIHEQITRDLKDYKATGPHVAVAKRLAARGVKIRPGTVISYIVLKGSGRIGDRAIPFDEFDPTKHKYDAEYYIENQVLPAVERILRAFGYRKEDLRYQKTRQVGLSAWLKPKGT

SEQ ID NO: 500 - protein, 774 aa, synthetic construct
MILDTDYITEDGKPVIRIFKKENGEFKIEYDRTFEPYFYALLKDDSAIEEVKKITAERHGTVVTVKRVEKVQKKFLGRPVEVWKLYFTHPQDVPAIRDKIREHPAVIDIYEYDIPFAKRYLIDKGLVPMEGDEELKMLAFDIETLYHEGEEFAEGPILMISYADEEGARVITWKNVDLPYVDVVSTEREMIKRFLRVVKEKDPDVLITYNGDNFYFAYLKKRCEKLGINFALGRDGSEPKIQRMGDRFAVEVKGRIHFDLYPVIRRTINLPTYTLEAVYEAVFGQPKEKVYAEEITTAWETGENLERVARYSMEDAKVTYELGKEFLPMEAQLSRLIGQSLWDVSRSSTGNLVEWFLLRKAYERNELAPNKPDEKELARRRQSYEGGYVKEPERGLWENIVYLDFRSLYPSIIITHNVSPDTLNREGCKEYDVAPQVGHRFCKDFPGFIPSLLGDLLEERQKIKKKMKATIDPIERKLLDYRQRAIKILANSYYGYYGYARARWYCKECAESVTAWGREYITMTIKEIEEKYGFKVIYSDTDGFFATIPGADAETVKKKAMEFLKYINAKLPGALELEYEGFYKRGFFVTKKKYAVIDEEGKITTRGLEIVRRDWSEIAKETQARVLEALLKDGDVEKAVRIVKEVTEKLSKYEVPPEKLVIHEQITRDLKDYKATGPHVAVAKRLAARGVKIRPGTVISYIVLKGSGRIGDRAIPFDEFDPTKHKYDAEYYIENQVLPAVERILRAFGYRKEDLRYQKTRQVGLSAWLKPKGT

SEQ ID NO: 501 - protein, 774 aa, synthetic construct
MILDTDYITEDGKPVIRIFKKENGEFKIEYDRTFEPYFYALLKDDSAIEEVKKITAERHGTVVTVKRVEKVQKKFLGRPVEVWKLYFTHPQDVPAIRDKIREHPAVIDIYEYDIPFAKRYLIDKGLVPMEGDEELKMLAFDIETLYHEGEEFAEGPILMISYADEEGARVITWKNVDLPYVDVVSTEREMIKRFLRVVKEKDPDVLITYNGDNFDAAYLKKRCEKLGINFALGRDGSEPKIQRMGDRFAVEVKGRIHFDLYPVIRRTINLPTYTLEAVYEAVFGQPKEKVYAEEITTAWETGENLERVARYSMEDAKVTYELGKEFLPMEAQLSRLIGQSLWDVSRSSTGNLVEWFLLRKAYERNELAPNKPDEKELARRRQSYEGGYVKEPERGLWENIVYLDFRSLYPSIIITHNVSPDTLNREGCKEYDVAPQVGHRFCKDFPGFIPSLLGDLLEERQKIKKKMKATIDPIERKLLDYRQRAIKILANSYYGYYGYARARWYCKECAESVTAWGREYITMTIKEIEEKYGFKVIYSDTDGFFATIPGADAETVKKKAMEFLKYINAKLPGALELEYEGFYKRGFFVTKKKYAVIDEEGKITTRGLEIVRRDWSEIAKETQARVLEALLKDGDVEKAVRIVKEVTEKLSKYEVPPEKLVIHEQITRDLKDYKATGPHVAVAKRLAARGVKIRPGTVISYIVLKGSGRIGDRAIPFDEFDPTKHKYDAEYYIENQVLPAVERILRAFGYRKEDLRYQKTRQVGLSAWLKPKGT

SEQ ID NO: 502 - protein, 774 aa, synthetic construct
MILDTDYITEDGKPVIRIFKKENGEFKIEYDRTFEPYFYALLKDDSAIEEVKKITAERHGTVVTVKRVEKVQKKFLGRPVEVWKLYFTHPQDVPAIRDKIREHPAVIDIYEYDIPFAKRYLIDKGLVPMEGDEELKMLAFDIETLYHEGEEFAEGPILMISYADEEGARVITWKNVDLPYVDVVSTEREMIKRFLRVVKEKDPDVLITYNGDNFDDAYLKKRCEKLGINFALGRDGSEPKIQRMGDRFAVEVKGRIHFDLYPVIRRTINLPTYTLEAVYEAVFGQPKEKVYAEEITTAWETGENLERVARYSMEDAKVTYELGKEFLPMEAQLSRLIGQSLWDVSRSSTGNLVEWFLLRKAYERNELAPNKPDEKELARRRQSYEGGYVKEPERGLWENIVYLDFRSLYPSIIITHNVSPDTLNREGCKEYDVAPQVGHRFCKDFPGFIPSLLGDLLEERQKIKKKMKATIDPIERKLLDYRQRAIKILANSYYGYYGYARARWYCKECAESVTAWGREYITMTIKEIEEKYGFKVIYSDTDGFFATIPGADAETVKKKAMEFLKYINAKLPGALELEYEGFYKRGFFVTKKKYAVIDEEGKITTRGLEIVRRDWSEIAKETQARVLEALLKDGDVEKAVRIVKEVTEKLSKYEVPPEKLVIHEQITRDLKDYKATGPHVAVAKRLAARGVKIRPGTVISYIVLKGSGRIGDRAIPFDEFDPTKHKYDAEYYIENQVLPAVERILRAFGYRKEDLRYQKTRQVGLSAWLKPKGT

SEQ ID NO: 503 - protein, 774 aa, synthetic construct
MILDTDYITEDGKPVIRIFKKENGEFKIEYDRTFEPYFYALLKDDSAIEEVKKITAERHGTVVTVKRVEKVQKKFLGRPVEVWKLYFTHPQDVPAIRDKIREHPAVIDIYEYDIPFAKRYLIDKGLVPMEGDEELKMLAFDIETLYHEGEEFAEGPILMISYADEEGARVITWKNVDLPYVDVVSTEREMIKRFLRVVKEKDPDVLITYNGDNFDFAALKKRCEKLGINFALGRDGSEPKIQRMGDRFAVEVKGRIHFDLYPVIRRTINLPTYTLEAVYEAVFGQPKEKVYAEEITTAWETGENLERVARYSMEDAKVTYELGKEFLPMEAQLSRLIGQSLWDVSRSSTGNLVEWFLLRKAYERNELAPNKPDEKELARRRQSYEGGYVKEPERGLWENIVYLDFRSLYPSIIITHNVSPDTLNREGCKEYDVAPQVGHRFCKDFPGFIPSLLGDLLEERQKIKKKMKATIDPIERKLLDYRQRAIKILANSYYGYYGYARARWYCKECAESVTAWGREYITMTIKEIEEKYGFKVIYSDTDGFFATIPGADAETVKKKAMEFLKYINAKLPGALELEYEGFYKRGFFVTKKKYAVIDEEGKITTRGLEIVRRDWSEIAKETQARVLEALLKDGDVEKAVRIVKEVTEKLSKYEVPPEKLVIHEQITRDLKDYKATGPHVAVAKRLAARGVKIRPGTVISYIVLKGSGRIGDRAIPFDEFDPTKHKYDAEYYIENQVLPAVERILRAFGYRKEDLRYQKTRQVGLSAWLKPKGT

SEQ ID NO: 504 - protein, 774 aa, synthetic construct
MILDTDYITEDGKPVIRIFKKENGEFKIEYDRTFEPYFYALLKDDSAIEEVKKITAERHGTVVTVKRVEKVQKKFLGRPVEVWKLYFTHPQDVPAIRDKIREHPAVIDIYEYDIPFAKRYLIDKGLVPMEGDEELKMLAFDIETLYHEGEEFAEGPILMISYADEEGARVITWKNVDLPYVDVVSTEREMIKRFLRVVKEKDPDVLITYNGDNFDFADLKKRCEKLGINFALGRDGSEPKIQRMGDRFAVEVKGRIHFDLYPVIRRTINLPTYTLEAVYEAVFGQPKEKVYAEEITTAWETGENLERVARYSMEDAKVTYELGKEFLPMEAQLSRLIGQSLWDVSRSSTGNLVEWFLLRKAYERNELAPNKPDEKELARRRQSYEGGYVKEPERGLWENIVYLDFRSLYPSIIITHNVSPDTLNREGCKEYDVAPQVGHRFCKDFPGFIPSLLGDLLEERQKIKKKMKATIDPIERKLLDYRQRAIKILANSYYGYYGYARARWYCKECAESVTAWGREYITMTIKEIEEKYGFKVIYSDTDGFFATIPGADAETVKKKAMEFLKYINAKLPGALELEYEGFYKRGFFVTKKKYAVIDEEGKITTRGLEIVRRDWSEIAKETQARVLEALLKDGDVEKAVRIVKEVTEKLSKYEVPPEKLVIHEQITRDLKDYKATGPHVAVAKRLAARGVKIRPGTVISYIVLKGSGRIGDRAIPFDEFDPTKHKYDAEYYIENQVLPAVERILRAFGYRKEDLRYQKTRQVGLSAWLKPKGT

SEQ ID NO: 505 - protein, 774 aa, synthetic construct
MILDTDYITEDGKPVIRIFKKENGEFKIEYDRTFEPYFYALLKDDSAIEEVKKITAERHGTVVTVKRVEKVQKKFLGRPVEVWKLYFTHPQDVPAIRDKIREHPAVIDIYEYDIPFAKRYLIDKGLVPMEGDEELKMLAFDIETLYHEGEEFAEGPILMISYADEEGARVITWKNVDLPYVDVVSTEREMIKRFLRVVKEKDPDVLITYNGDNFDFAELKKRCEKLGINFALGRDGSEPKIQRMGDRFAVEVKGRIHFDLYPVIRRTINLPTYTLEAVYEAVFGQPKEKVYAEEITTAWETGENLERVARYSMEDAKVTYELGKEFLPMEAQLSRLIGQSLWDVSRSSTGNLVEWFLLRKAYERNELAPNKPDEKELARRRQSYEGGYVKEPERGLWENIVYLDFRSLYPSIIITHNVSPDTLNREGCKEYDVAPQVGHRFCKDFPGFIPSLLGDLLEERQKIKKKMKATIDPIERKLLDYRQRAIKILANSYYGYYGYARARWYCKECAESVTAWGREYITMTIKEIEEKYGFKVIYSDTDGFFATIPGADAETVKKKAMEFLKYINAKLPGALELEYEGFYKRGFFVTKKKYAVIDEEGKITTRGLEIVRRDWSEIAKETQARVLEALLKDGDVEKAVRIVKEVTEKLSKYEVPPEKLVIHEQITRDLKDYKATGPHVAVAKRLAARGVKIRPGTVISYIVLKGSGRIGDRAIPFDEFDPTKHKYDAEYYIENQVLPAVERILRAFGYRKEDLRYQKTRQVGLSAWLKPKGT

SEQ ID NO: 506 - protein, 774 aa, synthetic construct
MILDTDYITEDGKPVIRIFKKENGEFKIEYDRTFEPYFYALLKDDSAIEEVKKITAERHGTVVTVKRVEKVQKKFLGRPVEVWKLYFTHPQDVPAIRDKIREHPAVIDIYEYDIPFAKRYLIDKGLVPMEGDEELKMLAFDIETLYHEGEEFAEGPILMISYADEEGARVITWKNVDLPYVDVVSTEREMIKRFLRVVKEKDPDVLITYNGDNFDFAGLKKRCEKLGINFALGRDGSEPKIQRMGDRFAVEVKGRIHFDLYPVIRRTINLPTYTLEAVYEAVFGQPKEKVYAEEITTAWETGENLERVARYSMEDAKVTYELGKEFLPMEAQLSRLIGQSLWDVSRSSTGNLVEWFLLRKAYERNELAPNKPDEKELARRRQSYEGGYVKEPERGLWENIVYLDFRSLYPSIIITHNVSPDTLNREGCKEYDVAPQVGHRFCKDFPGFIPSLLGDLLEERQKIKKKMKATIDPIERKLLDYRQRAIKILANSYYGYYGYARARWYCKECAESVTAWGREYITMTIKEIEEKYGFKVIYSDTDGFFATIPGADAETVKKKAMEFLKYINAKLPGALELEYEGFYKRGFFVTKKKYAVIDEEGKITTRGLEIVRRDWSEIAKETQARVLEALLKDGDVEKAVRIVKEVTEKLSKYEVPPEKLVIHEQITRDLKDYKATGPHVAVAKRLAARGVKIRPGTVISYIVLKGSGRIGDRAIPFDEFDPTKHKYDAEYYIENQVLPAVERILRAFGYRKEDLRYQKTRQVGLSAWLKPKGT

SEQ ID NO: 507 - protein, 774 aa, synthetic construct
MILDTDYITEDGKPVIRIFKKENGEFKIEYDRTFEPYFYALLKDDSAIEEVKKITAERHGTVVTVKRVEKVQKKFLGRPVEVWKLYFTHPQDVPAIRDKIREHPAVIDIYEYDIPFAKRYLIDKGLVPMEGDEELKMLAFDIETLYHEGEEFAEGPILMISYADEEGARVITWKNVDLPYVDVVSTEREMIKRFLRVVKEKDPDVLITYNGDNFDFALLKKRCEKLGINFALGRDGSEPKIQRMGDRFAVEVKGRIHFDLYPVIRRTINLPTYTLEAVYEAVFGQPKEKVYAEEITTAWETGENLERVARYSMEDAKVTYELGKEFLPMEAQLSRLIGQSLWDVSRSSTGNLVEWFLLRKAYERNELAPNKPDEKELARRRQSYEGGYVKEPERGLWENIVYLDFRSLYPSIIITHNVSPDTLNREGCKEYDVAPQVGHRFCKDFPGFIPSLLGDLLEERQKIKKKMKATIDPIERKLLDYRQRAIKILANSYYGYYGYARARWYCKECAESVTAWGREYITMTIKEIEEKYGFKVIYSDTDGFFATIPGADAETVKKKAMEFLKYINAKLPGALELEYEGFYKRGFFVTKKKYAVIDEEGKITTRGLEIVRRDWSEIAKETQARVLEALLKDGDVEKAVRIVKEVTEKLSKYEVPPEKLVIHEQITRDLKDYKATGPHVAVAKRLAARGVKIRPGTVISYIVLKGSGRIGDRAIPFDEFDPTKHKYDAEYYIENQVLPAVERILRAFGYRKEDLRYQKTRQVGLSAWLKPKGT

SEQ ID NO: 508 - protein, 774 aa, synthetic construct
MILDTDYITEDGKPVIRIFKKENGEFKIEYDRTFEPYFYALLKDDSAIEEVKKITAERHGTVVTVKRVEKVQKKFLGRPVEVWKLYFTHPQDVPAIRDKIREHPAVIDIYEYDIPFAKRYLIDKGLVPMEGDEELKMLAFDIETLYHEGEEFAEGPILMISYADEEGARVITWKNVDLPYVDVVSTEREMIKRFLRVVKEKDPDVLITYNGDNFDFAPLKKRCEKLGINFALGRDGSEPKIQRMGDRFAVEVKGRIHFDLYPVIRRTINLPTYTLEAVYEAVFGQPKEKVYAEEITTAWETGENLERVARYSMEDAKVTYELGKEFLPMEAQLSRLIGQSLWDVSRSSTGNLVEWFLLRKAYERNELAPNKPDEKELARRRQSYEGGYVKEPERGLWENIVYLDFRSLYPSIIITHNVSPDTLNREGCKEYDVAPQVGHRFCKDFPGFIPSLLGDLLEERQKIKKKMKATIDPIERKLLDYRQRAIKILANSYYGYYGYARARWYCKECAESVTAWGREYITMTIKEIEEKYGFKVIYSDTDGFFATIPGADAETVKKKAMEFLKYINAKLPGALELEYEGFYKRGFFVTKKKYAVIDEEGKITTRGLEIVRRDWSEIAKETQARVLEALLKDGDVEKAVRIVKEVTEKLSKYEVPPEKLVIHEQITRDLKDYKATGPHVAVAKRLAARGVKIRPGTVISYIVLKGSGRIGDRAIPFDEFDPTKHKYDAEYYIENQVLPAVERILRAFGYRKEDLRYQKTRQVGLSAWLKPKGT

SEQ ID NO: 509 - protein, 774 aa, synthetic construct
MILDTDYITEDGKPVIRIFKKENGEFKIEYDRTFEPYFYALLKDDSAIEEVKKITAERHGTVVTVKRVEKVQKKFLGRPVEVWKLYFTHPQDVPAIRDKIREHPAVIDIYEYDIPFAKRYLIDKGLVPMEGDEELKMLAFDIETLYHEGEEFAEGPILMISYADEEGARVITWKNVDLPYVDVVSTEREMIKRFLRVVKEKDPDVLITYNGDNFDFASLKKRCEKLGINFALGRDGSEPKIQRMGDRFAVEVKGRIHFDLYPVIRRTINLPTYTLEAVYEAVFGQPKEKVYAEEITTAWETGENLERVARYSMEDAKVTYELGKEFLPMEAQLSRLIGQSLWDVSRSSTGNLVEWFLLRKAYERNELAPNKPDEKELARRRQSYEGGYVKEPERGLWENIVYLDFRSLYPSIIITHNVSPDTLNREGCKEYDVAPQVGHRFCKDFPGFIPSLLGDLLEERQKIKKKMKATIDPIERKLLDYRQRAIKILANSYYGYYGYARARWYCKECAESVTAWGREYITMTIKEIEEKYGFKVIYSDTDGFFATIPGADAETVKKKAMEFLKYINAKLPGALELEYEGFYKRGFFVTKKKYAVIDEEGKITTRGLEIVRRDWSEIAKETQARVLEALLKDGDVEKAVRIVKEVTEKLSKYEVPPEKLVIHEQITRDLKDYKATGPHVAVAKRLAARGVKIRPGTVISYIVLKGSGRIGDRAIPFDEFDPTKHKYDAEYYIENQVLPAVERILRAFGYRKEDLRYQKTRQVGLSAWLKPKGT

SEQ ID NO: 510 - protein, 774 aa, synthetic construct
MILDTDYITEDGKPVIRIFKKENGEFKIEYDRTFEPYFYALLKDDSAIEEVKKITAERHGTVVTVKRVEKVQKKFLGRPVEVWKLYFTHPQDVPAIRDKIREHPAVIDIYEYDIPFAKRYLIDKGLVPMEGDEELKMLAFDIETLYHEGEEFAEGPILMISYADEEGARVITWKNVDLPYVDVVSTEREMIKRFLRVVKEKDPDVLITYNGDNFDFATLKKRCEKLGINFALGRDGSEPKIQRMGDRFAVEVKGRIHFDLYPVIRRTINLPTYTLEAVYEAVFGQPKEKVYAEEITTAWETGENLERVARYSMEDAKVTYELGKEFLPMEAQLSRLIGQSLWDVSRSSTGNLVEWFLLRKAYERNELAPNKPDEKELARRRQSYEGGYVKEPERGLWENIVYLDFRSLYPSIIITHNVSPDTLNREGCKEYDVAPQVGHRFCKDFPGFIPSLLGDLLEERQKIKKKMKATIDPIERKLLDYRQRAIKILANSYYGYYGYARARWYCKECAESVTAWGREYITMTIKEIEEKYGFKVIYSDTDGFFATIPGADAETVKKKAMEFLKYINAKLPGALELEYEGFYKRGFFVTKKKYAVIDEEGKITTRGLEIVRRDWSEIAKETQARVLEALLKDGDVEKAVRIVKEVTEKLSKYEVPPEKLVIHEQITRDLKDYKATGPHVAVAKRLAARGVKIRPGTVISYIVLKGSGRIGDRAIPFDEFDPTKHKYDAEYYIENQVLPAVERILRAFGYRKEDLRYQKTRQVGLSAWLKPKGT

SEQ ID NO: 511 - protein, 774 aa, synthetic construct
MILDTDYITEDGKPVIRIFKKENGEFKIEYDRTFEPYFYALLKDDSAIEEVKKITAERHGTVVTVKRVEKVQKKFLGRPVEVWKLYFTHPQDVPAIRDKIREHPAVIDIYEYDIPFAKRYLIDKGLVPMEGDEELKMLAFDIETLYHEGEEFAEGPILMISYADEEGARVITWKNVDLPYVDVVSTEREMIKRFLRVVKEKDPDVLITYNGDNFDFAWLKKRCEKLGINFALGRDGSEPKIQRMGDRFAVEVKGRIHFDLYPVIRRTINLPTYTLEAVYEAVFGQPKEKVYAEEITTAWETGENLERVARYSMEDAKVTYELGKEFLPMEAQLSRLIGQSLWDVSRSSTGNLVEWFLLRKAYERNELAPNKPDEKELARRRQSYEGGYVKEPERGLWENIVYLDFRSLYPSIIITHNVSPDTLNREGCKEYDVAPQVGHRFCKDFPGFIPSLLGDLLEERQKIKKKMKATIDPIERKLLDYRQRAIKILANSYYGYYGYARARWYCKECAESVTAWGREYITMTIKEIEEKYGFKVIYSDTDGFFATIPGADAETVKKKAMEFLKYINAKLPGALELEYEGFYKRGFFVTKKKYAVIDEEGKITTRGLEIVRRDWSEIAKETQARVLEALLKDGDVEKAVRIVKEVTEKLSKYEVPPEKLVIHEQITRDLKDYKATGPHVAVAKRLAARGVKIRPGTVISYIVLKGSGRIGDRAIPFDEFDPTKHKYDAEYYIENQVLPAVERILRAFGYRKEDLRYQKTRQVGLSAWLKPKGT

SEQ ID NO: 512 - protein, 774 aa, synthetic construct
MILDTDYITEDGKPVIRIFKKENGEFKIEYDRTFEPYFYALLKDDSAIEEVKKITAERHGTVVTVKRVEKVQKKFLGRPVEVWKLYFTHPQDVPAIRDKIREHPAVIDIYEYDIPFAKRYLIDKGLVPMEGDEELKMLAFDIETLYHEGEEFAEGPILMISYADEEGARVITWKNVDLPYVDVVSTEREMIKRFLRVVKEKDPDVLITYNGDNFDFAYPKKRCEKLGINFALGRDGSEPKIQRMGDRFAVEVKGRIHFDLYPVIRRTINLPTYTLEAVYEAVFGQPKEKVYAEEITTAWETGENLERVARYSMEDAKVTYELGKEFLPMEAQLSRLIGQSLWDVSRSSTGNLVEWFLLRKAYERNELAPNKPDEKELARRRQSYEGGYVKEPERGLWENIVYLDFRSLYPSIIITHNVSPDTLNREGCKEYDVAPQVGHRFCKDFPGFIPSLLGDLLEERQKIKKKMKATIDPIERKLLDYRQRAIKILANSYYGYYGYARARWYCKECAESVTAWGREYITMTIKEIEEKYGFKVIYSDTDGFFATIPGADAETVKKKAMEFLKYINAKLPGALELEYEGFYKRGFFVTKKKYAVIDEEGKITTRGLEIVRRDWSEIAKETQARVLEALLKDGDVEKAVRIVKEVTEKLSKYEVPPEKLVIHEQITRDLKDYKATGPHVAVAKRLAARGVKIRPGTVISYIVLKGSGRIGDRAIPFDEFDPTKHKYDAEYYIENQVLPAVERILRAFGYRKEDLRYQKTRQVGLSAWLKPKGT

SEQ ID NO: 513 - protein, 774 aa, synthetic construct
MILDTDYITEDGKPVIRIFKKENGEFKIEYDRTFEPYFYALLKDDSAIEEVKKITAERHGTVVTVKRVEKVQKKFLGRPVEVWKLYFTHPQDVPAIRDKIREHPAVIDIYEYDIPFAKRYLIDKGLVPMEGDEELKMLAFDIETLYHEGEEFAEGPILMISYADEEGARVITWKNVDLPYVDVVSTEREMIKRFLRVVKEKDPDVLITYNGDNFDFAYRKKRCEKLGINFALGRDGSEPKIQRMGDRFAVEVKGRIHFDLYPVIRRTINLPTYTLEAVYEAVFGQPKEKVYAEEITTAWETGENLERVARYSMEDAKVTYELGKEFLPMEAQLSRLIGQSLWDVSRSSTGNLVEWFLLRKAYERNELAPNKPDEKELARRRQSYEGGYVKEPERGLWENIVYLDFRSLYPSIIITHNVSPDTLNREGCKEYDVAPQVGHRFCKDFPGFIPSLLGDLLEERQKIKKKMKATIDPIERKLLDYRQRAIKILANSYYGYYGYARARWYCKECAESVTAWGREYITMTIKEIEEKYGFKVIYSDTDGFFATIPGADAETVKKKAMEFLKYINAKLPGALELEYEGFYKRGFFVTKKKYAVIDEEGKITTRGLEIVRRDWSEIAKETQARVLEALLKDGDVEKAVRIVKEVTEKLSKYEVPPEKLVIHEQITRDLKDYKATGPHVAVAKRLAARGVKIRPGTVISYIVLKGSGRIGDRAIPFDEFDPTKHKYDAEYYIENQVLPAVERILRAFGYRKEDLRYQKTRQVGLSAWLKPKGT

SEQ ID NO: 514 - protein, 774 aa, synthetic construct
MILDTDYITEDGKPVIRIFKKENGEFKIEYDRTFEPYFYALLKDDSAIEEVKKITAERHGTVVTVKRVEKVQKKFLGRPVEVWKLYFTHPQDVPAIRDKIREHPAVIDIYEYDIPFAKRYLIDKGLVPMEGDEELKMLAFDIETLYHEGEEFAEGPILMISYADEEGARVITWKNVDLPYVDVVSTEREMIKRFLRVVKEKDPDVLITYNGDNFDFAYVKKRCEKLGINFALGRDGSEPKIQRMGDRFAVEVKGRIHFDLYPVIRRTINLPTYTLEAVYEAVFGQPKEKVYAEEITTAWETGENLERVARYSMEDAKVTYELGKEFLPMEAQLSRLIGQSLWDVSRSSTGNLVEWFLLRKAYERNELAPNKPDEKELARRRQSYEGGYVKEPERGLWENIVYLDFRSLYPSIIITHNVSPDTLNREGCKEYDVAPQVGHRFCKDFPGFIPSLLGDLLEERQKIKKKMKATIDPIERKLLDYRQRAIKILANSYYGYYGYARARWYCKECAESVTAWGREYITMTIKEIEEKYGFKVIYSDTDGFFATIPGADAETVKKKAMEFLKYINAKLPGALELEYEGFYKRGFFVTKKKYAVIDEEGKITTRGLEIVRRDWSEIAKETQARVLEALLKDGDVEKAVRIVKEVTEKLSKYEVPPEKLVIHEQITRDLKDYKATGPHVAVAKRLAARGVKIRPGTVISYIVLKGSGRIGDRAIPFDEFDPTKHKYDAEYYIENQVLPAVERILRAFGYRKEDLRYQKTRQVGLSAWLKPKGT

SEQ ID NO: 515 - protein, 774 aa, synthetic construct
MILDTDYITEDGKPVIRIFKKENGEFKIEYDRTFEPYFYALLKDDSAIEEVKKITAERHGTVVTVKRVEKVQKKFLGRPVEVWKLYFTHPQDVPAIRDKIREHPAVIDIYEYDIPFAKRYLIDKGLVPMEGDEELKMLAFDIETLYHEGEEFAEGPILMISYADEEGARVITWKNVDLPYVDVVSTEREMIKRFLRVVKEKDPDVLITYNGDNFDFAYLIKRCEKLGINFALGRDGSEPKIQRMGDRFAVEVKGRIHFDLYPVIRRTINLPTYTLEAVYEAVFGQPKEKVYAEEITTAWETGENLERVARYSMEDAKVTYELGKEFLPMEAQLSRLIGQSLWDVSRSSTGNLVEWFLLRKAYERNELAPNKPDEKELARRRQSYEGGYVKEPERGLWENIVYLDFRSLYPSIIITHNVSPDTLNREGCKEYDVAPQVGHRFCKDFPGFIPSLLGDLLEERQKIKKKMKATIDPIERKLLDYRQRAIKILANSYYGYYGYARARWYCKECAESVTAWGREYITMTIKEIEEKYGFKVIYSDTDGFFATIPGADAETVKKKAMEFLKYINAKLPGALELEYEGFYKRGFFVTKKKYAVIDEEGKITTRGLEIVRRDWSEIAKETQARVLEALLKDGDVEKAVRIVKEVTEKLSKYEVPPEKLVIHEQITRDLKDYKATGPHVAVAKRLAARGVKIRPGTVISYIVLKGSGRIGDRAIPFDEFDPTKHKYDAEYYIENQVLPAVERILRAFGYRKEDLRYQKTRQVGLSAWLKPKGT

SEQ ID NO: 516 - protein, 774 aa, synthetic construct
MILDTDYITEDGKPVIRIFKKENGEFKIEYDRTFEPYFYALLKDDSAIEEVKKITAERHGTVVTVKRVEKVQKKFLGRPVEVWKLYFTHPQDVPAIRDKIREHPAVIDIYEYDIPFAKRYLIDKGLVPMEGDEELKMLAFDIETLYHEGEEFAEGPILMISYADEEGARVITWKNVDLPYVDVVSTEREMIKRFLRVVKEKDPDVLITYNGDNFDFAYLVKRCEKLGINFALGRDGSEPKIQRMGDRFAVEVKGRIHFDLYPVIRRTINLPTYTLEAVYEAVFGQPKEKVYAEEITTAWETGENLERVARYSMEDAKVTYELGKEFLPMEAQLSRLIGQSLWDVSRSSTGNLVEWFLLRKAYERNELAPNKPDEKELARRRQSYEGGYVKEPERGLWENIVYLDFRSLYPSIIITHNVSPDTLNREGCKEYDVAPQVGHRFCKDFPGFIPSLLGDLLEERQKIKKKMKATIDPIERKLLDYRQRAIKILANSYYGYYGYARARWYCKECAESVTAWGREYITMTIKEIEEKYGFKVIYSDTDGFFATIPGADAETVKKKAMEFLKYINAKLPGALELEYEGFYKRGFFVTKKKYAVIDEEGKITTRGLEIVRRDWSEIAKETQARVLEALLKDGDVEKAVRIVKEVTEKLSKYEVPPEKLVIHEQITRDLKDYKATGPHVAVAKRLAARGVKIRPGTVISYIVLKGSGRIGDRAIPFDEFDPTKHKYDAEYYIENQVLPAVERILRAFGYRKEDLRYQKTRQVGLSAWLKPKGT

SEQ ID NO: 517 - protein, 774 aa, synthetic construct
MILDTDYITEDGKPVIRIFKKENGEFKIEYDRTFEPYFYALLKDDSAIEEVKKITAERHGTVVTVKRVEKVQKKFLGRPVEVWKLYFTHPQDVPAIRDKIREHPAVIDIYEYDIPFAKRYLIDKGLVPMEGDEELKMLAFDIETLYHEGEEFAEGPILMISYADEEGARVITWKNVDLPYVDVVSTEREMIKRFLRVVKEKDPDVLITYNGDNFDFAYLKKRAEKLGINFALGRDGSEPKIQRMGDRFAVEVKGRIHFDLYPVIRRTINLPTYTLEAVYEAVFGQPKEKVYAEEITTAWETGENLERVARYSMEDAKVTYELGKEFLPMEAQLSRLIGQSLWDVSRSSTGNLVEWFLLRKAYERNELAPNKPDEKELARRRQSYEGGYVKEPERGLWENIVYLDFRSLYPSIIITHNVSPDTLNREGCKEYDVAPQVGHRFCKDFPGFIPSLLGDLLEERQKIKKKMKATIDPIERKLLDYRQRAIKILANSYYGYYGYARARWYCKECAESVTAWGREYITMTIKEIEEKYGFKVIYSDTDGFFATIPGADAETVKKKAMEFLKYINAKLPGALELEYEGFYKRGFFVTKKKYAVIDEEGKITTRGLEIVRRDWSEIAKETQARVLEALLKDGDVEKAVRIVKEVTEKLSKYEVPPEKLVIHEQITRDLKDYKATGPHVAVAKRLAARGVKIRPGTVISYIVLKGSGRIGDRAIPFDEFDPTKHKYDAEYYIENQVLPAVERILRAFGYRKEDLRYQKTRQVGLSAWLKPKGT

SEQ ID NO: 518 - protein, 774 aa, synthetic construct
MILDTDYITEDGKPVIRIFKKENGEFKIEYDRTFEPYFYALLKDDSAIEEVKKITAERHGTVVTVKRVEKVQKKFLGRPVEVWKLYFTHPQDVPAIRDKIREHPAVIDIYEYDIPFAKRYLIDKGLVPMEGDEELKMLAFDIETLYHEGEEFAEGPILMISYADEEGARVITWKNVDLPYVDVVSTEREMIKRFLRVVKEKDPDVLITYNGDNFDFAYLKKREEKLGINFALGRDGSEPKIQRMGDRFAVEVKGRIHFDLYPVIRRTINLPTYTLEAVYEAVFGQPKEKVYAEEITTAWETGENLERVARYSMEDAKVTYELGKEFLPMEAQLSRLIGQSLWDVSRSSTGNLVEWFLLRKAYERNELAPNKPDEKELARRRQSYEGGYVKEPERGLWENIVYLDFRSLYPSIIITHNVSPDTLNREGCKEYDVAPQVGHRFCKDFPGFIPSLLGDLLEERQKIKKKMKATIDPIERKLLDYRQRAIKILANSYYGYYGYARARWYCKECAESVTAWGREYITMTIKEIEEKYGFKVIYSDTDGFFATIPGADAETVKKKAMEFLKYINAKLPGALELEYEGFYKRGFFVTKKKYAVIDEEGKITTRGLEIVRRDWSEIAKETQARVLEALLKDGDVEKAVRIVKEVTEKLSKYEVPPEKLVIHEQITRDLKDYKATGPHVAVAKRLAARGVKIRPGTVISYIVLKGSGRIGDRAIPFDEFDPTKHKYDAEYYIENQVLPAVERILRAFGYRKEDLRYQKTRQVGLSAWLKPKGT

SEQ ID NO: 519 - protein, 774 aa, synthetic construct
MILDTDYITEDGKPVIRIFKKENGEFKIEYDRTFEPYFYALLKDDSAIEEVKKITAERHGTVVTVKRVEKVQKKFLGRPVEVWKLYFTHPQDVPAIRDKIREHPAVIDIYEYDIPFAKRYLIDKGLVPMEGDEELKMLAFDIETLYHEGEEFAEGPILMISYADEEGARVITWKNVDLPYVDVVSTEREMIKRFLRVVKEKDPDVLITYNGDNFDFAYLKKRPEKLGINFALGRDGSEPKIQRMGDRFAVEVKGRIHFDLYPVIRRTINLPTYTLEAVYEAVFGQPKEKVYAEEITTAWETGENLERVARYSMEDAKVTYELGKEFLPMEAQLSRLIGQSLWDVSRSSTGNLVEWFLLRKAYERNELAPNKPDEKELARRRQSYEGGYVKEPERGLWENIVYLDFRSLYPSIIITHNVSPDTLNREGCKEYDVAPQVGHRFCKDFPGFIPSLLGDLLEERQKIKKKMKATIDPIERKLLDYRQRAIKILANSYYGYYGYARARWYCKECAESVTAWGREYITMTIKEIEEKYGFKVIYSDTDGFFATIPGADAETVKKKAMEFLKYINAKLPGALELEYEGFYKRGFFVTKKKYAVIDEEGKITTRGLEIVRRDWSEIAKETQARVLEALLKDGDVEKAVRIVKEVTEKLSKYEVPPEKLVIHEQITRDLKDYKATGPHVAVAKRLAARGVKIRPGTVISYIVLKGSGRIGDRAIPFDEFDPTKHKYDAEYYIENQVLPAVERILRAFGYRKEDLRYQKTRQVGLSAWLKPKGT

SEQ ID NO: 520 - protein, 774 aa, synthetic construct
MILDTDYITEDGKPVIRIFKKENGEFKIEYDRTFEPYFYALLKDDSAIEEVKKITAERHGTVVTVKRVEKVQKKFLGRPVEVWKLYFTHPQDVPAIRDKIREHPAVIDIYEYDIPFAKRYLIDKGLVPMEGDEELKMLAFDIETLYHEGEEFAEGPILMISYADEEGARVITWKNVDLPYVDVVSTEREMIKRFLRVVKEKDPDVLITYNGDNFDFAYLKKRCEKLGINFALGRDGSEPWIQRMGDRFAVEVKGRIHFDLYPVIRRTINLPTYTLEAVYEAVFGQPKEKVYAEEITTAWETGENLERVARYSMEDAKVTYELGKEFLPMEAQLSRLIGQSLWDVSRSSTGNLVEWFLLRKAYERNELAPNKPDEKELARRRQSYEGGYVKEPERGLWENIVYLDFRSLYPSIIITHNVSPDTLNREGCKEYDVAPQVGHRFCKDFPGFIPSLLGDLLEERQKIKKKMKATIDPIERKLLDYRQRAIKILANSYYGYYGYARARWYCKECAESVTAWGREYITMTIKEIEEKYGFKVIYSDTDGFFATIPGADAETVKKKAMEFLKYINAKLPGALELEYEGFYKRGFFVTKKKYAVIDEEGKITTRGLEIVRRDWSEIAKETQARVLEALLKDGDVEKAVRIVKEVTEKLSKYEVPPEKLVIHEQITRDLKDYKATGPHVAVAKRLAARGVKIRPGTVISYIVLKGSGRIGDRAIPFDEFDPTKHKYDAEYYIENQVLPAVERILRAFGYRKEDLRYQKTRQVGLSAWLKPKGT

SEQ ID NO: 521 - protein, 774 aa, synthetic construct
MILDTDYITEDGKPVIRIFKKENGEFKIEYDRTFEPYFYALLKDDSAIEEVKKITAERHGTVVTVKRVEKVQKKFLGRPVEVWKLYFTHPQDVPAIRDKIREHPAVIDIYEYDIPFAKRYLIDKGLVPMEGDEELKMLAFDIETLYHEGEEFAEGPILMISYADEEGARVITWKNVDLPYVDVVSTEREMIKRFLRVVKEKDPDVLITYNGDNFDFAYLKKRCEKLGINFALGRDGSEPYIQRMGDRFAVEVKGRIHFDLYPVIRRTINLPTYTLEAVYEAVFGQPKEKVYAEEITTAWETGENLERVARYSMEDAKVTYELGKEFLPMEAQLSRLIGQSLWDVSRSSTGNLVEWFLLRKAYERNELAPNKPDEKELARRRQSYEGGYVKEPERGLWENIVYLDFRSLYPSIIITHNVSPDTLNREGCKEYDVAPQVGHRFCKDFPGFIPSLLGDLLEERQKIKKKMKATIDPIERKLLDYRQRAIKILANSYYGYYGYARARWYCKECAESVTAWGREYITMTIKEIEEKYGFKVIYSDTDGFFATIPGADAETVKKKAMEFLKYINAKLPGALELEYEGFYKRGFFVTKKKYAVIDEEGKITTRGLEIVRRDWSEIAKETQARVLEALLKDGDVEKAVRIVKEVTEKLSKYEVPPEKLVIHEQITRDLKDYKATGPHVAVAKRLAARGVKIRPGTVISYIVLKGSGRIGDRAIPFDEFDPTKHKYDAEYYIENQVLPAVERILRAFGYRKEDLRYQKTRQVGLSAWLKPKGT

SEQ ID NO: 522 - protein, 774 aa, synthetic construct
MILDTDYITEDGKPVIRIFKKENGEFKIEYDRTFEPYFYALLKDDSAIEEVKKITAERHGTVVTVKRVEKVQKKFLGRPVEVWKLYFTHPQDVPAIRDKIREHPAVIDIYEYDIPFAKRYLIDKGLVPMEGDEELKMLAFDIETLYHEGEEFAEGPILMISYADEEGARVITWKNVDLPYVDVVSTEREMIKRFLRVVKEKDPDVLITYNGDNFDFAYLKKRCEKLGINFALGRDGSEPKIQRMGDRFDVEVKGRIHFDLYPVIRRTINLPTYTLEAVYEAVFGQPKEKVYAEEITTAWETGENLERVARYSMEDAKVTYELGKEFLPMEAQLSRLIGQSLWDVSRSSTGNLVEWFLLRKAYERNELAPNKPDEKELARRRQSYEGGYVKEPERGLWENIVYLDFRSLYPSIIITHNVSPDTLNREGCKEYDVAPQVGHRFCKDFPGFIPSLLGDLLEERQKIKKKMKATIDPIERKLLDYRQRAIKILANSYYGYYGYARARWYCKECAESVTAWGREYITMTIKEIEEKYGFKVIYSDTDGFFATIPGADAETVKKKAMEFLKYINAKLPGALELEYEGFYKRGFFVTKKKYAVIDEEGKITTRGLEIVRRDWSEIAKETQARVLEALLKDGDVEKAVRIVKEVTEKLSKYEVPPEKLVIHEQITRDLKDYKATGPHVAVAKRLAARGVKIRPGTVISYIVLKGSGRIGDRAIPFDEFDPTKHKYDAEYYIENQVLPAVERILRAFGYRKEDLRYQKTRQVGLSAWLKPKGT

SEQ ID NO: 523 - protein, 774 aa, synthetic construct
MILDTDYITEDGKPVIRIFKKENGEFKIEYDRTFEPYFYALLKDDSAIEEVKKITAERHGTVVTVKRVEKVQKKFLGRPVEVWKLYFTHPQDVPAIRDKIREHPAVIDIYEYDIPFAKRYLIDKGLVPMEGDEELKMLAFDIETLYHEGEEFAEGPILMISYADEEGARVITWKNVDLPYVDVVSTEREMIKRFLRVVKEKDPDVLITYNGDNFDFAYLKKRCEKLGINFALGRDGSEPKIQRMGDRFALEVKGRIHFDLYPVIRRTINLPTYTLEAVYEAVFGQPKEKVYAEEITTAWETGENLERVARYSMEDAKVTYELGKEFLPMEAQLSRLIGQSLWDVSRSSTGNLVEWFLLRKAYERNELAPNKPDEKELARRRQSYEGGYVKEPERGLWENIVYLDFRSLYPSIIITHNVSPDTLNREGCKEYDVAPQVGHRFCKDFPGFIPSLLGDLLEERQKIKKKMKATIDPIERKLLDYRQRAIKILANSYYGYYGYARARWYCKECAESVTAWGREYITMTIKEIEEKYGFKVIYSDTDGFFATIPGADAETVKKKAMEFLKYINAKLPGALELEYEGFYKRGFFVTKKKYAVIDEEGKITTRGLEIVRRDWSEIAKETQARVLEALLKDGDVEKAVRIVKEVTEKLSKYEVPPEKLVIHEQITRDLKDYKATGPHVAVAKRLAARGVKIRPGTVISYIVLKGSGRIGDRAIPFDEFDPTKHKYDAEYYIENQVLPAVERILRAFGYRKEDLRYQKTRQVGLSAWLKPKGT

SEQ ID NO: 524 - protein, 774 aa, synthetic construct
MILDTDYITEDGKPVIRIFKKENGEFKIEYDRTFEPYFYALLKDDSAIEEVKKITAERHGTVVTVKRVEKVQKKFLGRPVEVWKLYFTHPQDVPAIRDKIREHPAVIDIYEYDIPFAKRYLIDKGLVPMEGDEELKMLAFDIETLYHEGEEFAEGPILMISYADEEGARVITWKNVDLPYVDVVSTEREMIKRFLRVVKEKDPDVLITYNGDNFDFAYLKKRCEKLGINFALGRDGSEPKIQRMGDRFAVFVKGRIHFDLYPVIRRTINLPTYTLEAVYEAVFGQPKEKVYAEEITTAWETGENLERVARYSMEDAKVTYELGKEFLPMEAQLSRLIGQSLWDVSRSSTGNLVEWFLLRKAYERNELAPNKPDEKELARRRQSYEGGYVKEPERGLWENIVYLDFRSLYPSIIITHNVSPDTLNREGCKEYDVAPQVGHRFCKDFPGFIPSLLGDLLEERQKIKKKMKATIDPIERKLLDYRQRAIKILANSYYGYYGYARARWYCKECAESVTAWGREYITMTIKEIEEKYGFKVIYSDTDGFFATIPGADAETVKKKAMEFLKYINAKLPGALELEYEGFYKRGFFVTKKKYAVIDEEGKITTRGLEIVRRDWSEIAKETQARVLEALLKDGDVEKAVRIVKEVTEKLSKYEVPPEKLVIHEQITRDLKDYKATGPHVAVAKRLAARGVKIRPGTVISYIVLKGSGRIGDRAIPFDEFDPTKHKYDAEYYIENQVLPAVERILRAFGYRKEDLRYQKTRQVGLSAWLKPKGT

SEQ ID NO: 525 - protein, 774 aa, synthetic construct
MILDTDYITEDGKPVIRIFKKENGEFKIEYDRTFEPYFYALLKDDSAIEEVKKITAERHGTVVTVKRVEKVQKKFLGRPVEVWKLYFTHPQDVPAIRDKIREHPAVIDIYEYDIPFAKRYLIDKGLVPMEGDEELKMLAFDIETLYHEGEEFAEGPILMISYADEEGARVITWKNVDLPYVDVVSTEREMIKRFLRVVKEKDPDVLITYNGDNFDFAYLKKRCEKLGINFALGRDGSEPKIQRMGDRFAVGVKGRIHFDLYPVIRRTINLPTYTLEAVYEAVFGQPKEKVYAEEITTAWETGENLERVARYSMEDAKVTYELGKEFLPMEAQLSRLIGQSLWDVSRSSTGNLVEWFLLRKAYERNELAPNKPDEKELARRRQSYEGGYVKEPERGLWENIVYLDFRSLYPSIIITHNVSPDTLNREGCKEYDVAPQVGHRFCKDFPGFIPSLLGDLLEERQKIKKKMKATIDPIERKLLDYRQRAIKILANSYYGYYGYARARWYCKECAESVTAWGREYITMTIKEIEEKYGFKVIYSDTDGFFATIPGADAETVKKKAMEFLKYINAKLPGALELEYEGFYKRGFFVTKKKYAVIDEEGKITTRGLEIVRRDWSEIAKETQARVLEALLKDGDVEKAVRIVKEVTEKLSKYEVPPEKLVIHEQITRDLKDYKATGPHVAVAKRLAARGVKIRPGTVISYIVLKGSGRIGDRAIPFDEFDPTKHKYDAEYYIENQVLPAVERILRAFGYRKEDLRYQKTRQVGLSAWLKPKGT

SEQ ID NO: 526 - protein, 774 aa, synthetic construct
MILDTDYITEDGKPVIRIFKKENGEFKIEYDRTFEPYFYALLKDDSAIEEVKKITAERHGTVVTVKRVEKVQKKFLGRPVEVWKLYFTHPQDVPAIRDKIREHPAVIDIYEYDIPFAKRYLIDKGLVPMEGDEELKMLAFDIETLYHEGEEFAEGPILMISYADEEGARVITWKNVDLPYVDVVSTEREMIKRFLRVVKEKDPDVLITYNGDNFDFAYLKKRCEKLGINFALGRDGSEPKIQRMGDRFAVNVKGRIHFDLYPVIRRTINLPTYTLEAVYEAVFGQPKEKVYAEEITTAWETGENLERVARYSMEDAKVTYELGKEFLPMEAQLSRLIGQSLWDVSRSSTGNLVEWFLLRKAYERNELAPNKPDEKELARRRQSYEGGYVKEPERGLWENIVYLDFRSLYPSIIITHNVSPDTLNREGCKEYDVAPQVGHRFCKDFPGFIPSLLGDLLEERQKIKKKMKATIDPIERKLLDYRQRAIKILANSYYGYYGYARARWYCKECAESVTAWGREYITMTIKEIEEKYGFKVIYSDTDGFFATIPGADAETVKKKAMEFLKYINAKLPGALELEYEGFYKRGFFVTKKKYAVIDEEGKITTRGLEIVRRDWSEIAKETQARVLEALLKDGDVEKAVRIVKEVTEKLSKYEVPPEKLVIHEQITRDLKDYKATGPHVAVAKRLAARGVKIRPGTVISYIVLKGSGRIGDRAIPFDEFDPTKHKYDAEYYIENQVLPAVERILRAFGYRKEDLRYQKTRQVGLSAWLKPKGT

SEQ ID NO: 527 - protein, 774 aa, synthetic construct
MILDTDYITEDGKPVIRIFKKENGEFKIEYDRTFEPYFYALLKDDSAIEEVKKITAERHGTVVTVKRVEKVQKKFLGRPVEVWKLYFTHPQDVPAIRDKIREHPAVIDIYEYDIPFAKRYLIDKGLVPMEGDEELKMLAFDIETLYHEGEEFAEGPILMISYADEEGARVITWKNVDLPYVDVVSTEREMIKRFLRVVKEKDPDVLITYNGDNFDFAYLKKRCEKLGINFALGRDGSEPKIQRMGDRFAVRVKGRIHFDLYPVIRRTINLPTYTLEAVYEAVFGQPKEKVYAEEITTAWETGENLERVARYSMEDAKVTYELGKEFLPMEAQLSRLIGQSLWDVSRSSTGNLVEWFLLRKAYERNELAPNKPDEKELARRRQSYEGGYVKEPERGLWENIVYLDFRSLYPSIIITHNVSPDTLNREGCKEYDVAPQVGHRFCKDFPGFIPSLLGDLLEERQKIKKKMKATIDPIERKLLDYRQRAIKILANSYYGYYGYARARWYCKECAESVTAWGREYITMTIKEIEEKYGFKVIYSDTDGFFATIPGADAETVKKKAMEFLKYINAKLPGALELEYEGFYKRGFFVTKKKYAVIDEEGKITTRGLEIVRRDWSEIAKETQARVLEALLKDGDVEKAVRIVKEVTEKLSKYEVPPEKLVIHEQITRDLKDYKATGPHVAVAKRLAARGVKIRPGTVISYIVLKGSGRIGDRAIPFDEFDPTKHKYDAEYYIENQVLPAVERILRAFGYRKEDLRYQKTRQVGLSAWLKPKGT

SEQ ID NO: 528 - protein, 774 aa, synthetic construct
MILDTDYITEDGKPVIRIFKKENGEFKIEYDRTFEPYFYALLKDDSAIEEVKKITAERHGTVVTVKRVEKVQKKFLGRPVEVWKLYFTHPQDVPAIRDKIREHPAVIDIYEYDIPFAKRYLIDKGLVPMEGDEELKMLAFDIETLYHEGEEFAEGPILMISYADEEGARVITWKNVDLPYVDVVSTEREMIKRFLRVVKEKDPDVLITYNGDNFDFAYLKKRCEKLGINFALGRDGSEPKIQRMGDRFAVECKGRIHFDLYPVIRRTINLPTYTLEAVYEAVFGQPKEKVYAEEITTAWETGENLERVARYSMEDAKVTYELGKEFLPMEAQLSRLIGQSLWDVSRSSTGNLVEWFLLRKAYERNELAPNKPDEKELARRRQSYEGGYVKEPERGLWENIVYLDFRSLYPSIIITHNVSPDTLNREGCKEYDVAPQVGHRFCKDFPGFIPSLLGDLLEERQKIKKKMKATIDPIERKLLDYRQRAIKILANSYYGYYGYARARWYCKECAESVTAWGREYITMTIKEIEEKYGFKVIYSDTDGFFATIPGADAETVKKKAMEFLKYINAKLPGALELEYEGFYKRGFFVTKKKYAVIDEEGKITTRGLEIVRRDWSEIAKETQARVLEALLKDGDVEKAVRIVKEVTEKLSKYEVPPEKLVIHEQITRDLKDYKATGPHVAVAKRLAARGVKIRPGTVISYIVLKGSGRIGDRAIPFDEFDPTKHKYDAEYYIENQVLPAVERILRAFGYRKEDLRYQKTRQVGLSAWLKPKGT

SEQ ID NO: 529 - protein, 774 aa, synthetic construct
MILDTDYITEDGKPVIRIFKKENGEFKIEYDRTFEPYFYALLKDDSAIEEVKKITAERHGTVVTVKRVEKVQKKFLGRPVEVWKLYFTHPQDVPAIRDKIREHPAVIDIYEYDIPFAKRYLIDKGLVPMEGDEELKMLAFDIETLYHEGEEFAEGPILMISYADEEGARVITWKNVDLPYVDVVSTEREMIKRFLRVVKEKDPDVLITYNGDNFDFAYLKKRCEKLGINFALGRDGSEPKIQRMGDRFAVEEKGRIHFDLYPVIRRTINLPTYTLEAVYEAVFGQPKEKVYAEEITTAWETGENLERVARYSMEDAKVTYELGKEFLPMEAQLSRLIGQSLWDVSRSSTGNLVEWFLLRKAYERNELAPNKPDEKELARRRQSYEGGYVKEPERGLWENIVYLDFRSLYPSIIITHNVSPDTLNREGCKEYDVAPQVGHRFCKDFPGFIPSLLGDLLEERQKIKKKMKATIDPIERKLLDYRQRAIKILANSYYGYYGYARARWYCKECAESVTAWGREYITMTIKEIEEKYGFKVIYSDTDGFFATIPGADAETVKKKAMEFLKYINAKLPGALELEYEGFYKRGFFVTKKKYAVIDEEGKITTRGLEIVRRDWSEIAKETQARVLEALLKDGDVEKAVRIVKEVTEKLSKYEVPPEKLVIHEQITRDLKDYKATGPHVAVAKRLAARGVKIRPGTVISYIVLKGSGRIGDRAIPFDEFDPTKHKYDAEYYIENQVLPAVERILRAFGYRKEDLRYQKTRQVGLSAWLKPKGT

SEQ ID NO: 530 - protein, 774 aa, synthetic construct
MILDTDYITEDGKPVIRIFKKENGEFKIEYDRTFEPYFYALLKDDSAIEEVKKITAERHGTVVTVKRVEKVQKKFLGRPVEVWKLYFTHPQDVPAIRDKIREHPAVIDIYEYDIPFAKRYLIDKGLVPMEGDEELKMLAFDIETLYHEGEEFAEGPILMISYADEEGARVITWKNVDLPYVDVVSTEREMIKRFLRVVKEKDPDVLITYNGDNFDFAYLKKRCEKLGINFALGRDGSEPKIQRMGDRFAVEMKGRIHFDLYPVIRRTINLPTYTLEAVYEAVFGQPKEKVYAEEITTAWETGENLERVARYSMEDAKVTYELGKEFLPMEAQLSRLIGQSLWDVSRSSTGNLVEWFLLRKAYERNELAPNKPDEKELARRRQSYEGGYVKEPERGLWENIVYLDFRSLYPSIIITHNVSPDTLNREGCKEYDVAPQVGHRFCKDFPGFIPSLLGDLLEERQKIKKKMKATIDPIERKLLDYRQRAIKILANSYYGYYGYARARWYCKECAESVTAWGREYITMTIKEIEEKYGFKVIYSDTDGFFATIPGADAETVKKKAMEFLKYINAKLPGALELEYEGFYKRGFFVTKKKYAVIDEEGKITTRGLEIVRRDWSEIAKETQARVLEALLKDGDVEKAVRIVKEVTEKLSKYEVPPEKLVIHEQITRDLKDYKATGPHVAVAKRLAARGVKIRPGTVISYIVLKGSGRIGDRAIPFDEFDPTKHKYDAEYYIENQVLPAVERILRAFGYRKEDLRYQKTRQVGLSAWLKPKGT

SEQ ID NO: 531 - protein, 774 aa, synthetic construct
MILDTDYITEDGKPVIRIFKKENGEFKIEYDRTFEPYFYALLKDDSAIEEVKKITAERHGTVVTVKRVEKVQKKFLGRPVEVWKLYFTHPQDVPAIRDKIREHPAVIDIYEYDIPFAKRYLIDKGLVPMEGDEELKMLAFDIETLYHEGEEFAEGPILMISYADEEGARVITWKNVDLPYVDVVSTEREMIKRFLRVVKEKDPDVLITYNGDNFDFAYLKKRCEKLGINFALGRDGSEPKIQRMGDRFAVETKGRIHFDLYPVIRRTINLPTYTLEAVYEAVFGQPKEKVYAEEITTAWETGENLERVARYSMEDAKVTYELGKEFLPMEAQLSRLIGQSLWDVSRSSTGNLVEWFLLRKAYERNELAPNKPDEKELARRRQSYEGGYVKEPERGLWENIVYLDFRSLYPSIIITHNVSPDTLNREGCKEYDVAPQVGHRFCKDFPGFIPSLLGDLLEERQKIKKKMKATIDPIERKLLDYRQRAIKILANSYYGYYGYARARWYCKECAESVTAWGREYITMTIKEIEEKYGFKVIYSDTDGFFATIPGADAETVKKKAMEFLKYINAKLPGALELEYEGFYKRGFFVTKKKYAVIDEEGKITTRGLEIVRRDWSEIAKETQARVLEALLKDGDVEKAVRIVKEVTEKLSKYEVPPEKLVIHEQITRDLKDYKATGPHVAVAKRLAARGVKIRPGTVISYIVLKGSGRIGDRAIPFDEFDPTKHKYDAEYYIENQVLPAVERILRAFGYRKEDLRYQKTRQVGLSAWLKPKGT

SEQ ID NO: 532 - protein, 774 aa, synthetic construct
MILDTDYITEDGKPVIRIFKKENGEFKIEYDRTFEPYFYALLKDDSAIEEVKKITAERHGTVVTVKRVEKVQKKFLGRPVEVWKLYFTHPQDVPAIRDKIREHPAVIDIYEYDIPFAKRYLIDKGLVPMEGDEELKMLAFDIETLYHEGEEFAEGPILMISYADEEGARVITWKNVDLPYVDVVSTEREMIKRFLRVVKEKDPDVLITYNGDNFDFAYLKKRCEKLGINFALGRDGSEPKIQRMGDRFAVEWKGRIHFDLYPVIRRTINLPTYTLEAVYEAVFGQPKEKVYAEEITTAWETGENLERVARYSMEDAKVTYELGKEFLPMEAQLSRLIGQSLWDVSRSSTGNLVEWFLLRKAYERNELAPNKPDEKELARRRQSYEGGYVKEPERGLWENIVYLDFRSLYPSIIITHNVSPDTLNREGCKEYDVAPQVGHRFCKDFPGFIPSLLGDLLEERQKIKKKMKATIDPIERKLLDYRQRAIKILANSYYGYYGYARARWYCKECAESVTAWGREYITMTIKEIEEKYGFKVIYSDTDGFFATIPGADAETVKKKAMEFLKYINAKLPGALELEYEGFYKRGFFVTKKKYAVIDEEGKITTRGLEIVRRDWSEIAKETQARVLEALLKDGDVEKAVRIVKEVTEKLSKYEVPPEKLVIHEQITRDLKDYKATGPHVAVAKRLAARGVKIRPGTVISYIVLKGSGRIGDRAIPFDEFDPTKHKYDAEYYIENQVLPAVERILRAFGYRKEDLRYQKTRQVGLSAWLKPKGT

SEQ ID NO: 533 - protein, 774 aa, synthetic construct
MILDTDYITEDGKPVIRIFKKENGEFKIEYDRTFEPYFYALLKDDSAIEEVKKITAERHGTVVTVKRVEKVQKKFLGRPVEVWKLYFTHPQDVPAIRDKIREHPAVIDIYEYDIPFAKRYLIDKGLVPMEGDEELKMLAFDIETLYHEGEEFAEGPILMISYADEEGARVITWKNVDLPYVDVVSTEREMIKRFLRVVKEKDPDVLITYNGDNFDFAYLKKRCEKLGINFALGRDGSEPKIQRMGDRFAVEVKHRIHFDLYPVIRRTINLPTYTLEAVYEAVFGQPKEKVYAEEITTAWETGENLERVARYSMEDAKVTYELGKEFLPMEAQLSRLIGQSLWDVSRSSTGNLVEWFLLRKAYERNELAPNKPDEKELARRRQSYEGGYVKEPERGLWENIVYLDFRSLYPSIIITHNVSPDTLNREGCKEYDVAPQVGHRFCKDFPGFIPSLLGDLLEERQKIKKKMKATIDPIERKLLDYRQRAIKILANSYYGYYGYARARWYCKECAESVTAWGREYITMTIKEIEEKYGFKVIYSDTDGFFATIPGADAETVKKKAMEFLKYINAKLPGALELEYEGFYKRGFFVTKKKYAVIDEEGKITTRGLEIVRRDWSEIAKETQARVLEALLKDGDVEKAVRIVKEVTEKLSKYEVPPEKLVIHEQITRDLKDYKATGPHVAVAKRLAARGVKIRPGTVISYIVLKGSGRIGDRAIPFDEFDPTKHKYDAEYYIENQVLPAVERILRAFGYRKEDLRYQKTRQVGLSAWLKPKGT

SEQ ID NO: 534 - protein, 774 aa, synthetic construct
MILDTDYITEDGKPVIRIFKKENGEFKIEYDRTFEPYFYALLKDDSAIEEVKKITAERHGTVVTVKRVEKVQKKFLGRPVEVWKLYFTHPQDVPAIRDKIREHPAVIDIYEYDIPFAKRYLIDKGLVPMEGDEELKMLAFDIETLYHEGEEFAEGPILMISYADEEGARVITWKNVDLPYVDVVSTEREMIKRFLRVVKEKDPDVLITYNGDNFDFAYLKKRCEKLGINFALGRDGSEPKIQRMGDRFAVEVKNRIHFDLYPVIRRTINLPTYTLEAVYEAVFGQPKEKVYAEEITTAWETGENLERVARYSMEDAKVTYELGKEFLPMEAQLSRLIGQSLWDVSRSSTGNLVEWFLLRKAYERNELAPNKPDEKELARRRQSYEGGYVKEPERGLWENIVYLDFRSLYPSIIITHNVSPDTLNREGCKEYDVAPQVGHRFCKDFPGFIPSLLGDLLEERQKIKKKMKATIDPIERKLLDYRQRAIKILANSYYGYYGYARARWYCKECAESVTAWGREYITMTIKEIEEKYGFKVIYSDTDGFFATIPGADAETVKKKAMEFLKYINAKLPGALELEYEGFYKRGFFVTKKKYAVIDEEGKITTRGLEIVRRDWSEIAKETQARVLEALLKDGDVEKAVRIVKEVTEKLSKYEVPPEKLVIHEQITRDLKDYKATGPHVAVAKRLAARGVKIRPGTVISYIVLKGSGRIGDRAIPFDEFDPTKHKYDAEYYIENQVLPAVERILRAFGYRKEDLRYQKTRQVGLSAWLKPKGT

SEQ ID NO: 535 - protein, 774 aa, synthetic construct
MILDTDYITEDGKPVIRIFKKENGEFKIEYDRTFEPYFYALLKDDSAIEEVKKITAERHGTVVTVKRVEKVQKKFLGRPVEVWKLYFTHPQDVPAIRDKIREHPAVIDIYEYDIPFAKRYLIDKGLVPMEGDEELKMLAFDIETLYHEGEEFAEGPILMISYADEEGARVITWKNVDLPYVDVVSTEREMIKRFLRVVKEKDPDVLITYNGDNFDFAYLKKRCEKLGINFALGRDGSEPKIQRMGDRFAVEVKRRIHFDLYPVIRRTINLPTYTLEAVYEAVFGQPKEKVYAEEITTAWETGENLERVARYSMEDAKVTYELGKEFLPMEAQLSRLIGQSLWDVSRSSTGNLVEWFLLRKAYERNELAPNKPDEKELARRRQSYEGGYVKEPERGLWENIVYLDFRSLYPSIIITHNVSPDTLNREGCKEYDVAPQVGHRFCKDFPGFIPSLLGDLLEERQKIKKKMKATIDPIERKLLDYRQRAIKILANSYYGYYGYARARWYCKECAESVTAWGREYITMTIKEIEEKYGFKVIYSDTDGFFATIPGADAETVKKKAMEFLKYINAKLPGALELEYEGFYKRGFFVTKKKYAVIDEEGKITTRGLEIVRRDWSEIAKETQARVLEALLKDGDVEKAVRIVKEVTEKLSKYEVPPEKLVIHEQITRDLKDYKATGPHVAVAKRLAARGVKIRPGTVISYIVLKGSGRIGDRAIPFDEFDPTKHKYDAEYYIENQVLPAVERILRAFGYRKEDLRYQKTRQVGLSAWLKPKGT

SEQ ID NO: 536 - protein, 774 aa, synthetic construct
MILDTDYITEDGKPVIRIFKKENGEFKIEYDRTFEPYFYALLKDDSAIEEVKKITAERHGTVVTVKRVEKVQKKFLGRPVEVWKLYFTHPQDVPAIRDKIREHPAVIDIYEYDIPFAKRYLIDKGLVPMEGDEELKMLAFDIETLYHEGEEFAEGPILMISYADEEGARVITWKNVDLPYVDVVSTEREMIKRFLRVVKEKDPDVLITYNGDNFDFAYLKKRCEKLGINFALGRDGSEPKIQRMGDRFAVEVKGRIFFDLYPVIRRTINLPTYTLEAVYEAVFGQPKEKVYAEEITTAWETGENLERVARYSMEDAKVTYELGKEFLPMEAQLSRLIGQSLWDVSRSSTGNLVEWFLLRKAYERNELAPNKPDEKELARRRQSYEGGYVKEPERGLWENIVYLDFRSLYPSIIITHNVSPDTLNREGCKEYDVAPQVGHRFCKDFPGFIPSLLGDLLEERQKIKKKMKATIDPIERKLLDYRQRAIKILANSYYGYYGYARARWYCKECAESVTAWGREYITMTIKEIEEKYGFKVIYSDTDGFFATIPGADAETVKKKAMEFLKYINAKLPGALELEYEGFYKRGFFVTKKKYAVIDEEGKITTRGLEIVRRDWSEIAKETQARVLEALLKDGDVEKAVRIVKEVTEKLSKYEVPPEKLVIHEQITRDLKDYKATGPHVAVAKRLAARGVKIRPGTVISYIVLKGSGRIGDRAIPFDEFDPTKHKYDAEYYIENQVLPAVERILRAFGYRKEDLRYQKTRQVGLSAWLKPKGT

SEQ ID NO: 537 - protein, 774 aa, synthetic construct
MILDTDYITEDGKPVIRIFKKENGEFKIEYDRTFEPYFYALLKDDSAIEEVKKITAERHGTVVTVKRVEKVQKKFLGRPVEVWKLYFTHPQDVPAIRDKIREHPAVIDIYEYDIPFAKRYLIDKGLVPMEGDEELKMLAFDIETLYHEGEEFAEGPILMISYADEEGARVITWKNVDLPYVDVVSTEREMIKRFLRVVKEKDPDVLITYNGDNFDFAYLKKRCEKLGINFALGRDGSEPKIQRMGDRFAVEVKGRIWFDLYPVIRRTINLPTYTLEAVYEAVFGQPKEKVYAEEITTAWETGENLERVARYSMEDAKVTYELGKEFLPMEAQLSRLIGQSLWDVSRSSTGNLVEWFLLRKAYERNELAPNKPDEKELARRRQSYEGGYVKEPERGLWENIVYLDFRSLYPSIIITHNVSPDTLNREGCKEYDVAPQVGHRFCKDFPGFIPSLLGDLLEERQKIKKKMKATIDPIERKLLDYRQRAIKILANSYYGYYGYARARWYCKECAESVTAWGREYITMTIKEIEEKYGFKVIYSDTDGFFATIPGADAETVKKKAMEFLKYINAKLPGALELEYEGFYKRGFFVTKKKYAVIDEEGKITTRGLEIVRRDWSEIAKETQARVLEALLKDGDVEKAVRIVKEVTEKLSKYEVPPEKLVIHEQITRDLKDYKATGPHVAVAKRLAARGVKIRPGTVISYIVLKGSGRIGDRAIPFDEFDPTKHKYDAEYYIENQVLPAVERILRAFGYRKEDLRYQKTRQVGLSAWLKPKGT

SEQ ID NO: 538 - protein, 774 aa, synthetic construct
MILDTDYITEDGKPVIRIFKKENGEFKIEYDRTFEPYFYALLKDDSAIEEVKKITAERHGTVVTVKRVEKVQKKFLGRPVEVWKLYFTHPQDVPAIRDKIREHPAVIDIYEYDIPFAKRYLIDKGLVPMEGDEELKMLAFDIETLYHEGEEFAEGPILMISYADEEGARVITWKNVDLPYVDVVSTEREMIKRFLRVVKEKDPDVLITYNGDNFDFAYLKKRCEKLGINFALGRDGSEPKIQRMGDRFAVEVKGRIYFDLYPVIRRTINLPTYTLEAVYEAVFGQPKEKVYAEEITTAWETGENLERVARYSMEDAKVTYELGKEFLPMEAQLSRLIGQSLWDVSRSSTGNLVEWFLLRKAYERNELAPNKPDEKELARRRQSYEGGYVKEPERGLWENIVYLDFRSLYPSIIITHNVSPDTLNREGCKEYDVAPQVGHRFCKDFPGFIPSLLGDLLEERQKIKKKMKATIDPIERKLLDYRQRAIKILANSYYGYYGYARARWYCKECAESVTAWGREYITMTIKEIEEKYGFKVIYSDTDGFFATIPGADAETVKKKAMEFLKYINAKLPGALELEYEGFYKRGFFVTKKKYAVIDEEGKITTRGLEIVRRDWSEIAKETQARVLEALLKDGDVEKAVRIVKEVTEKLSKYEVPPEKLVIHEQITRDLKDYKATGPHVAVAKRLAARGVKIRPGTVISYIVLKGSGRIGDRAIPFDEFDPTKHKYDAEYYIENQVLPAVERILRAFGYRKEDLRYQKTRQVGLSAWLKPKGT

SEQ ID NO: 539 - protein, 774 aa, synthetic construct
MILDTDYITEDGKPVIRIFKKENGEFKIEYDRTFEPYFYALLKDDSAIEEVKKITAERHGTVVTVKRVEKVQKKFLGRPVEVWKLYFTHPQDVPAIRDKIREHPAVIDIYEYDIPFAKRYLIDKGLVPMEGDEELKMLAFDIETLYHEGEEFAEGPILMISYADEEGARVITWKNVDLPYVDVVSTEREMIKRFLRVVKEKDPDVLITYNGDNFDFAYLKKRCEKLGINFALGRDGSEPKIQRMGDRFAVEVKGRIHFALYPVIRRTINLPTYTLEAVYEAVFGQPKEKVYAEEITTAWETGENLERVARYSMEDAKVTYELGKEFLPMEAQLSRLIGQSLWDVSRSSTGNLVEWFLLRKAYERNELAPNKPDEKELARRRQSYEGGYVKEPERGLWENIVYLDFRSLYPSIIITHNVSPDTLNREGCKEYDVAPQVGHRFCKDFPGFIPSLLGDLLEERQKIKKKMKATIDPIERKLLDYRQRAIKILANSYYGYYGYARARWYCKECAESVTAWGREYITMTIKEIEEKYGFKVIYSDTDGFFATIPGADAETVKKKAMEFLKYINAKLPGALELEYEGFYKRGFFVTKKKYAVIDEEGKITTRGLEIVRRDWSEIAKETQARVLEALLKDGDVEKAVRIVKEVTEKLSKYEVPPEKLVIHEQITRDLKDYKATGPHVAVAKRLAARGVKIRPGTVISYIVLKGSGRIGDRAIPFDEFDPTKHKYDAEYYIENQVLPAVERILRAFGYRKEDLRYQKTRQVGLSAWLKPKGT

SEQ ID NO: 540 - protein, 774 aa, synthetic construct
MILDTDYITEDGKPVIRIFKKENGEFKIEYDRTFEPYFYALLKDDSAIEEVKKITAERHGTVVTVKRVEKVQKKFLGRPVEVWKLYFTHPQDVPAIRDKIREHPAVIDIYEYDIPFAKRYLIDKGLVPMEGDEELKMLAFDIETLYHEGEEFAEGPILMISYADEEGARVITWKNVDLPYVDVVSTEREMIKRFLRVVKEKDPDVLITYNGDNFDFAYLKKRCEKLGINFALGRDGSEPKIQRMGDRFAVEVKGRIHFCLYPVIRRTINLPTYTLEAVYEAVFGQPKEKVYAEEITTAWETGENLERVARYSMEDAKVTYELGKEFLPMEAQLSRLIGQSLWDVSRSSTGNLVEWFLLRKAYERNELAPNKPDEKELARRRQSYEGGYVKEPERGLWENIVYLDFRSLYPSIIITHNVSPDTLNREGCKEYDVAPQVGHRFCKDFPGFIPSLLGDLLEERQKIKKKMKATIDPIERKLLDYRQRAIKILANSYYGYYGYARARWYCKECAESVTAWGREYITMTIKEIEEKYGFKVIYSDTDGFFATIPGADAETVKKKAMEFLKYINAKLPGALELEYEGFYKRGFFVTKKKYAVIDEEGKITTRGLEIVRRDWSEIAKETQARVLEALLKDGDVEKAVRIVKEVTEKLSKYEVPPEKLVIHEQITRDLKDYKATGPHVAVAKRLAARGVKIRPGTVISYIVLKGSGRIGDRAIPFDEFDPTKHKYDAEYYIENQVLPAVERILRAFGYRKEDLRYQKTRQVGLSAWLKPKGT

SEQ ID NO: 541 - protein, 774 aa, synthetic construct
MILDTDYITEDGKPVIRIFKKENGEFKIEYDRTFEPYFYALLKDDSAIEEVKKITAERHGTVVTVKRVEKVQKKFLGRPVEVWKLYFTHPQDVPAIRDKIREHPAVIDIYEYDIPFAKRYLIDKGLVPMEGDEELKMLAFDIETLYHEGEEFAEGPILMISYADEEGARVITWKNVDLPYVDVVSTEREMIKRFLRVVKEKDPDVLITYNGDNFDFAYLKKRCEKLGINFALGRDGSEPKIQRMGDRFAVEVKGRIHFFLYPVIRRTINLPTYTLEAVYEAVFGQPKEKVYAEEITTAWETGENLERVARYSMEDAKVTYELGKEFLPMEAQLSRLIGQSLWDVSRSSTGNLVEWFLLRKAYERNELAPNKPDEKELARRRQSYEGGYVKEPERGLWENIVYLDFRSLYPSIIITHNVSPDTLNREGCKEYDVAPQVGHRFCKDFPGFIPSLLGDLLEERQKIKKKMKATIDPIERKLLDYRQRAIKILANSYYGYYGYARARWYCKECAESVTAWGREYITMTIKEIEEKYGFKVIYSDTDGFFATIPGADAETVKKKAMEFLKYINAKLPGALELEYEGFYKRGFFVTKKKYAVIDEEGKITTRGLEIVRRDWSEIAKETQARVLEALLKDGDVEKAVRIVKEVTEKLSKYEVPPEKLVIHEQITRDLKDYKATGPHVAVAKRLAARGVKIRPGTVISYIVLKGSGRIGDRAIPFDEFDPTKHKYDAEYYIENQVLPAVERILRAFGYRKEDLRYQKTRQVGLSAWLKPKGT

SEQ ID NO: 542 - protein, 774 aa, synthetic construct
MILDTDYITEDGKPVIRIFKKENGEFKIEYDRTFEPYFYALLKDDSAIEEVKKITAERHGTVVTVKRVEKVQKKFLGRPVEVWKLYFTHPQDVPAIRDKIREHPAVIDIYEYDIPFAKRYLIDKGLVPMEGDEELKMLAFDIETLYHEGEEFAEGPILMISYADEEGARVITWKNVDLPYVDVVSTEREMIKRFLRVVKEKDPDVLITYNGDNFDFAYLKKRCEKLGINFALGRDGSEPKIQRMGDRFAVEVKGRIHFGLYPVIRRTINLPTYTLEAVYEAVFGQPKEKVYAEEITTAWETGENLERVARYSMEDAKVTYELGKEFLPMEAQLSRLIGQSLWDVSRSSTGNLVEWFLLRKAYERNELAPNKPDEKELARRRQSYEGGYVKEPERGLWENIVYLDFRSLYPSIIITHNVSPDTLNREGCKEYDVAPQVGHRFCKDFPGFIPSLLGDLLEERQKIKKKMKATIDPIERKLLDYRQRAIKILANSYYGYYGYARARWYCKECAESVTAWGREYITMTIKEIEEKYGFKVIYSDTDGFFATIPGADAETVKKKAMEFLKYINAKLPGALELEYEGFYKRGFFVTKKKYAVIDEEGKITTRGLEIVRRDWSEIAKETQARVLEALLKDGDVEKAVRIVKEVTEKLSKYEVPPEKLVIHEQITRDLKDYKATGPHVAVAKRLAARGVKIRPGTVISYIVLKGSGRIGDRAIPFDEFDPTKHKYDAEYYIENQVLPAVERILRAFGYRKEDLRYQKTRQVGLSAWLKPKGT

SEQ ID NO: 543 - protein, 774 aa, synthetic construct
MILDTDYITEDGKPVIRIFKKENGEFKIEYDRTFEPYFYALLKDDSAIEEVKKITAERHGTVVTVKRVEKVQKKFLGRPVEVWKLYFTHPQDVPAIRDKIREHPAVIDIYEYDIPFAKRYLIDKGLVPMEGDEELKMLAFDIETLYHEGEEFAEGPILMISYADEEGARVITWKNVDLPYVDVVSTEREMIKRFLRVVKEKDPDVLITYNGDNFDFAYLKKRCEKLGINFALGRDGSEPKIQRMGDRFAVEVKGRIHFHLYPVIRRTINLPTYTLEAVYEAVFGQPKEKVYAEEITTAWETGENLERVARYSMEDAKVTYELGKEFLPMEAQLSRLIGQSLWDVSRSSTGNLVEWFLLRKAYERNELAPNKPDEKELARRRQSYEGGYVKEPERGLWENIVYLDFRSLYPSIIITHNVSPDTLNREGCKEYDVAPQVGHRFCKDFPGFIPSLLGDLLEERQKIKKKMKATIDPIERKLLDYRQRAIKILANSYYGYYGYARARWYCKECAESVTAWGREYITMTIKEIEEKYGFKVIYSDTDGFFATIPGADAETVKKKAMEFLKYINAKLPGALELEYEGFYKRGFFVTKKKYAVIDEEGKITTRGLEIVRRDWSEIAKETQARVLEALLKDGDVEKAVRIVKEVTEKLSKYEVPPEKLVIHEQITRDLKDYKATGPHVAVAKRLAARGVKIRPGTVISYIVLKGSGRIGDRAIPFDEFDPTKHKYDAEYYIENQVLPAVERILRAFGYRKEDLRYQKTRQVGLSAWLKPKGT

SEQ ID NO: 544 - protein, 774 aa, synthetic construct
MILDTDYITEDGKPVIRIFKKENGEFKIEYDRTFEPYFYALLKDDSAIEEVKKITAERHGTVVTVKRVEKVQKKFLGRPVEVWKLYFTHPQDVPAIRDKIREHPAVIDIYEYDIPFAKRYLIDKGLVPMEGDEELKMLAFDIETLYHEGEEFAEGPILMISYADEEGARVITWKNVDLPYVDVVSTEREMIKRFLRVVKEKDPDVLITYNGDNFDFAYLKKRCEKLGINFALGRDGSEPKIQRMGDRFAVEVKGRIHFILYPVIRRTINLPTYTLEAVYEAVFGQPKEKVYAEEITTAWETGENLERVARYSMEDAKVTYELGKEFLPMEAQLSRLIGQSLWDVSRSSTGNLVEWFLLRKAYERNELAPNKPDEKELARRRQSYEGGYVKEPERGLWENIVYLDFRSLYPSIIITHNVSPDTLNREGCKEYDVAPQVGHRFCKDFPGFIPSLLGDLLEERQKIKKKMKATIDPIERKLLDYRQRAIKILANSYYGYYGYARARWYCKECAESVTAWGREYITMTIKEIEEKYGFKVIYSDTDGFFATIPGADAETVKKKAMEFLKYINAKLPGALELEYEGFYKRGFFVTKKKYAVIDEEGKITTRGLEIVRRDWSEIAKETQARVLEALLKDGDVEKAVRIVKEVTEKLSKYEVPPEKLVIHEQITRDLKDYKATGPHVAVAKRLAARGVKIRPGTVISYIVLKGSGRIGDRAIPFDEFDPTKHKYDAEYYIENQVLPAVERILRAFGYRKEDLRYQKTRQVGLSAWLKPKGT

SEQ ID NO: 545 - protein, 774 aa, synthetic construct
MILDTDYITEDGKPVIRIFKKENGEFKIEYDRTFEPYFYALLKDDSAIEEVKKITAERHGTVVTVKRVEKVQKKFLGRPVEVWKLYFTHPQDVPAIRDKIREHPAVIDIYEYDIPFAKRYLIDKGLVPMEGDEELKMLAFDIETLYHEGEEFAEGPILMISYADEEGARVITWKNVDLPYVDVVSTEREMIKRFLRVVKEKDPDVLITYNGDNFDFAYLKKRCEKLGINFALGRDGSEPKIQRMGDRFAVEVKGRIHFKLYPVIRRTINLPTYTLEAVYEAVFGQPKEKVYAEEITTAWETGENLERVARYSMEDAKVTYELGKEFLPMEAQLSRLIGQSLWDVSRSSTGNLVEWFLLRKAYERNELAPNKPDEKELARRRQSYEGGYVKEPERGLWENIVYLDFRSLYPSIIITHNVSPDTLNREGCKEYDVAPQVGHRFCKDFPGFIPSLLGDLLEERQKIKKKMKATIDPIERKLLDYRQRAIKILANSYYGYYGYARARWYCKECAESVTAWGREYITMTIKEIEEKYGFKVIYSDTDGFFATIPGADAETVKKKAMEFLKYINAKLPGALELEYEGFYKRGFFVTKKKYAVIDEEGKITTRGLEIVRRDWSEIAKETQARVLEALLKDGDVEKAVRIVKEVTEKLSKYEVPPEKLVIHEQITRDLKDYKATGPHVAVAKRLAARGVKIRPGTVISYIVLKGSGRIGDRAIPFDEFDPTKHKYDAEYYIENQVLPAVERILRAFGYRKEDLRYQKTRQVGLSAWLKPKGT

SEQ ID NO: 546 - protein, 774 aa, synthetic construct
MILDTDYITEDGKPVIRIFKKENGEFKIEYDRTFEPYFYALLKDDSAIEEVKKITAERHGTVVTVKRVEKVQKKFLGRPVEVWKLYFTHPQDVPAIRDKIREHPAVIDIYEYDIPFAKRYLIDKGLVPMEGDEELKMLAFDIETLYHEGEEFAEGPILMISYADEEGARVITWKNVDLPYVDVVSTEREMIKRFLRVVKEKDPDVLITYNGDNFDFAYLKKRCEKLGINFALGRDGSEPKIQRMGDRFAVEVKGRIHFLLYPVIRRTINLPTYTLEAVYEAVFGQPKEKVYAEEITTAWETGENLERVARYSMEDAKVTYELGKEFLPMEAQLSRLIGQSLWDVSRSSTGNLVEWFLLRKAYERNELAPNKPDEKELARRRQSYEGGYVKEPERGLWENIVYLDFRSLYPSIIITHNVSPDTLNREGCKEYDVAPQVGHRFCKDFPGFIPSLLGDLLEERQKIKKKMKATIDPIERKLLDYRQRAIKILANSYYGYYGYARARWYCKECAESVTAWGREYITMTIKEIEEKYGFKVIYSDTDGFFATIPGADAETVKKKAMEFLKYINAKLPGALELEYEGFYKRGFFVTKKKYAVIDEEGKITTRGLEIVRRDWSEIAKETQARVLEALLKDGDVEKAVRIVKEVTEKLSKYEVPPEKLVIHEQITRDLKDYKATGPHVAVAKRLAARGVKIRPGTVISYIVLKGSGRIGDRAIPFDEFDPTKHKYDAEYYIENQVLPAVERILRAFGYRKEDLRYQKTRQVGLSAWLKPKGT

SEQ ID NO: 547 - protein, 774 aa, synthetic construct
MILDTDYITEDGKPVIRIFKKENGEFKIEYDRTFEPYFYALLKDDSAIEEVKKITAERHGTVVTVKRVEKVQKKFLGRPVEVWKLYFTHPQDVPAIRDKIREHPAVIDIYEYDIPFAKRYLIDKGLVPMEGDEELKMLAFDIETLYHEGEEFAEGPILMISYADEEGARVITWKNVDLPYVDVVSTEREMIKRFLRVVKEKDPDVLITYNGDNFDFAYLKKRCEKLGINFALGRDGSEPKIQRMGDRFAVEVKGRIHFMLYPVIRRTINLPTYTLEAVYEAVFGQPKEKVYAEEITTAWETGENLERVARYSMEDAKVTYELGKEFLPMEAQLSRLIGQSLWDVSRSSTGNLVEWFLLRKAYERNELAPNKPDEKELARRRQSYEGGYVKEPERGLWENIVYLDFRSLYPSIIITHNVSPDTLNREGCKEYDVAPQVGHRFCKDFPGFIPSLLGDLLEERQKIKKKMKATIDPIERKLLDYRQRAIKILANSYYGYYGYARARWYCKECAESVTAWGREYITMTIKEIEEKYGFKVIYSDTDGFFATIPGADAETVKKKAMEFLKYINAKLPGALELEYEGFYKRGFFVTKKKYAVIDEEGKITTRGLEIVRRDWSEIAKETQARVLEALLKDGDVEKAVRIVKEVTEKLSKYEVPPEKLVIHEQITRDLKDYKATGPHVAVAKRLAARGVKIRPGTVISYIVLKGSGRIGDRAIPFDEFDPTKHKYDAEYYIENQVLPAVERILRAFGYRKEDLRYQKTRQVGLSAWLKPKGT

SEQ ID NO: 548 - protein, 774 aa, synthetic construct
MILDTDYITEDGKPVIRIFKKENGEFKIEYDRTFEPYFYALLKDDSAIEEVKKITAERHGTVVTVKRVEKVQKKFLGRPVEVWKLYFTHPQDVPAIRDKIREHPAVIDIYEYDIPFAKRYLIDKGLVPMEGDEELKMLAFDIETLYHEGEEFAEGPILMISYADEEGARVITWKNVDLPYVDVVSTEREMIKRFLRVVKEKDPDVLITYNGDNFDFAYLKKRCEKLGINFALGRDGSEPKIQRMGDRFAVEVKGRIHFNLYPVIRRTINLPTYTLEAVYEAVFGQPKEKVYAEEITTAWETGENLERVARYSMEDAKVTYELGKEFLPMEAQLSRLIGQSLWDVSRSSTGNLVEWFLLRKAYERNELAPNKPDEKELARRRQSYEGGYVKEPERGLWENIVYLDFRSLYPSIIITHNVSPDTLNREGCKEYDVAPQVGHRFCKDFPGFIPSLLGDLLEERQKIKKKMKATIDPIERKLLDYRQRAIKILANSYYGYYGYARARWYCKECAESVTAWGREYITMTIKEIEEKYGFKVIYSDTDGFFATIPGADAETVKKKAMEFLKYINAKLPGALELEYEGFYKRGFFVTKKKYAVIDEEGKITTRGLEIVRRDWSEIAKETQARVLEALLKDGDVEKAVRIVKEVTEKLSKYEVPPEKLVIHEQITRDLKDYKATGPHVAVAKRLAARGVKIRPGTVISYIVLKGSGRIGDRAIPFDEFDPTKHKYDAEYYIENQVLPAVERILRAFGYRKEDLRYQKTRQVGLSAWLKPKGT

SEQ ID NO: 549 - protein, 774 aa, synthetic construct
MILDTDYITEDGKPVIRIFKKENGEFKIEYDRTFEPYFYALLKDDSAIEEVKKITAERHGTVVTVKRVEKVQKKFLGRPVEVWKLYFTHPQDVPAIRDKIREHPAVIDIYEYDIPFAKRYLIDKGLVPMEGDEELKMLAFDIETLYHEGEEFAEGPILMISYADEEGARVITWKNVDLPYVDVVSTEREMIKRFLRVVKEKDPDVLITYNGDNFDFAYLKKRCEKLGINFALGRDGSEPKIQRMGDRFAVEVKGRIHFPLYPVIRRTINLPTYTLEAVYEAVFGQPKEKVYAEEITTAWETGENLERVARYSMEDAKVTYELGKEFLPMEAQLSRLIGQSLWDVSRSSTGNLVEWFLLRKAYERNELAPNKPDEKELARRRQSYEGGYVKEPERGLWENIVYLDFRSLYPSIIITHNVSPDTLNREGCKEYDVAPQVGHRFCKDFPGFIPSLLGDLLEERQKIKKKMKATIDPIERKLLDYRQRAIKILANSYYGYYGYARARWYCKECAESVTAWGREYITMTIKEIEEKYGFKVIYSDTDGFFATIPGADAETVKKKAMEFLKYINAKLPGALELEYEGFYKRGFFVTKKKYAVIDEEGKITTRGLEIVRRDWSEIAKETQARVLEALLKDGDVEKAVRIVKEVTEKLSKYEVPPEKLVIHEQITRDLKDYKATGPHVAVAKRLAARGVKIRPGTVISYIVLKGSGRIGDRAIPFDEFDPTKHKYDAEYYIENQVLPAVERILRAFGYRKEDLRYQKTRQVGLSAWLKPKGT

SEQ ID NO: 550 - protein, 774 aa, synthetic construct
MILDTDYITEDGKPVIRIFKKENGEFKIEYDRTFEPYFYALLKDDSAIEEVKKITAERHGTVVTVKRVEKVQKKFLGRPVEVWKLYFTHPQDVPAIRDKIREHPAVIDIYEYDIPFAKRYLIDKGLVPMEGDEELKMLAFDIETLYHEGEEFAEGPILMISYADEEGARVITWKNVDLPYVDVVSTEREMIKRFLRVVKEKDPDVLITYNGDNFDFAYLKKRCEKLGINFALGRDGSEPKIQRMGDRFAVEVKGRIHFQLYPVIRRTINLPTYTLEAVYEAVFGQPKEKVYAEEITTAWETGENLERVARYSMEDAKVTYELGKEFLPMEAQLSRLIGQSLWDVSRSSTGNLVEWFLLRKAYERNELAPNKPDEKELARRRQSYEGGYVKEPERGLWENIVYLDFRSLYPSIIITHNVSPDTLNREGCKEYDVAPQVGHRFCKDFPGFIPSLLGDLLEERQKIKKKMKATIDPIERKLLDYRQRAIKILANSYYGYYGYARARWYCKECAESVTAWGREYITMTIKEIEEKYGFKVIYSDTDGFFATIPGADAETVKKKAMEFLKYINAKLPGALELEYEGFYKRGFFVTKKKYAVIDEEGKITTRGLEIVRRDWSEIAKETQARVLEALLKDGDVEKAVRIVKEVTEKLSKYEVPPEKLVIHEQITRDLKDYKATGPHVAVAKRLAARGVKIRPGTVISYIVLKGSGRIGDRAIPFDEFDPTKHKYDAEYYIENQVLPAVERILRAFGYRKEDLRYQKTRQVGLSAWLKPKGT

SEQ ID NO: 551 - protein, 774 aa, synthetic construct
MILDTDYITEDGKPVIRIFKKENGEFKIEYDRTFEPYFYALLKDDSAIEEVKKITAERHGTVVTVKRVEKVQKKFLGRPVEVWKLYFTHPQDVPAIRDKIREHPAVIDIYEYDIPFAKRYLIDKGLVPMEGDEELKMLAFDIETLYHEGEEFAEGPILMISYADEEGARVITWKNVDLPYVDVVSTEREMIKRFLRVVKEKDPDVLITYNGDNFDFAYLKKRCEKLGINFALGRDGSEPKIQRMGDRFAVEVKGRIHFRLYPVIRRTINLPTYTLEAVYEAVFGQPKEKVYAEEITTAWETGENLERVARYSMEDAKVTYELGKEFLPMEAQLSRLIGQSLWDVSRSSTGNLVEWFLLRKAYERNELAPNKPDEKELARRRQSYEGGYVKEPERGLWENIVYLDFRSLYPSIIITHNVSPDTLNREGCKEYDVAPQVGHRFCKDFPGFIPSLLGDLLEERQKIKKKMKATIDPIERKLLDYRQRAIKILANSYYGYYGYARARWYCKECAESVTAWGREYITMTIKEIEEKYGFKVIYSDTDGFFATIPGADAETVKKKAMEFLKYINAKLPGALELEYEGFYKRGFFVTKKKYAVIDEEGKITTRGLEIVRRDWSEIAKETQARVLEALLKDGDVEKAVRIVKEVTEKLSKYEVPPEKLVIHEQITRDLKDYKATGPHVAVAKRLAARGVKIRPGTVISYIVLKGSGRIGDRAIPFDEFDPTKHKYDAEYYIENQVLPAVERILRAFGYRKEDLRYQKTRQVGLSAWLKPKGT

SEQ ID NO: 552 - protein, 774 aa, synthetic construct
MILDTDYITEDGKPVIRIFKKENGEFKIEYDRTFEPYFYALLKDDSAIEEVKKITAERHGTVVTVKRVEKVQKKFLGRPVEVWKLYFTHPQDVPAIRDKIREHPAVIDIYEYDIPFAKRYLIDKGLVPMEGDEELKMLAFDIETLYHEGEEFAEGPILMISYADEEGARVITWKNVDLPYVDVVSTEREMIKRFLRVVKEKDPDVLITYNGDNFDFAYLKKRCEKLGINFALGRDGSEPKIQRMGDRFAVEVKGRIHFSLYPVIRRTINLPTYTLEAVYEAVFGQPKEKVYAEEITTAWETGENLERVARYSMEDAKVTYELGKEFLPMEAQLSRLIGQSLWDVSRSSTGNLVEWFLLRKAYERNELAPNKPDEKELARRRQSYEGGYVKEPERGLWENIVYLDFRSLYPSIIITHNVSPDTLNREGCKEYDVAPQVGHRFCKDFPGFIPSLLGDLLEERQKIKKKMKATIDPIERKLLDYRQRAIKILANSYYGYYGYARARWYCKECAESVTAWGREYITMTIKEIEEKYGFKVIYSDTDGFFATIPGADAETVKKKAMEFLKYINAKLPGALELEYEGFYKRGFFVTKKKYAVIDEEGKITTRGLEIVRRDWSEIAKETQARVLEALLKDGDVEKAVRIVKEVTEKLSKYEVPPEKLVIHEQITRDLKDYKATGPHVAVAKRLAARGVKIRPGTVISYIVLKGSGRIGDRAIPFDEFDPTKHKYDAEYYIENQVLPAVERILRAFGYRKEDLRYQKTRQVGLSAWLKPKGT

SEQ ID NO: 553 - protein, 774 aa, synthetic construct
MILDTDYITEDGKPVIRIFKKENGEFKIEYDRTFEPYFYALLKDDSAIEEVKKITAERHGTVVTVKRVEKVQKKFLGRPVEVWKLYFTHPQDVPAIRDKIREHPAVIDIYEYDIPFAKRYLIDKGLVPMEGDEELKMLAFDIETLYHEGEEFAEGPILMISYADEEGARVITWKNVDLPYVDVVSTEREMIKRFLRVVKEKDPDVLITYNGDNFDFAYLKKRCEKLGINFALGRDGSEPKIQRMGDRFAVEVKGRIHFTLYPVIRRTINLPTYTLEAVYEAVFGQPKEKVYAEEITTAWETGENLERVARYSMEDAKVTYELGKEFLPMEAQLSRLIGQSLWDVSRSSTGNLVEWFLLRKAYERNELAPNKPDEKELARRRQSYEGGYVKEPERGLWENIVYLDFRSLYPSIIITHNVSPDTLNREGCKEYDVAPQVGHRFCKDFPGFIPSLLGDLLEERQKIKKKMKATIDPIERKLLDYRQRAIKILANSYYGYYGYARARWYCKECAESVTAWGREYITMTIKEIEEKYGFKVIYSDTDGFFATIPGADAETVKKKAMEFLKYINAKLPGALELEYEGFYKRGFFVTKKKYAVIDEEGKITTRGLEIVRRDWSEIAKETQARVLEALLKDGDVEKAVRIVKEVTEKLSKYEVPPEKLVIHEQITRDLKDYKATGPHVAVAKRLAARGVKIRPGTVISYIVLKGSGRIGDRAIPFDEFDPTKHKYDAEYYIENQVLPAVERILRAFGYRKEDLRYQKTRQVGLSAWLKPKGT

SEQ ID NO: 554 - protein, 774 aa, synthetic construct
MILDTDYITEDGKPVIRIFKKENGEFKIEYDRTFEPYFYALLKDDSAIEEVKKITAERHGTVVTVKRVEKVQKKFLGRPVEVWKLYFTHPQDVPAIRDKIREHPAVIDIYEYDIPFAKRYLIDKGLVPMEGDEELKMLAFDIETLYHEGEEFAEGPILMISYADEEGARVITWKNVDLPYVDVVSTEREMIKRFLRVVKEKDPDVLITYNGDNFDFAYLKKRCEKLGINFALGRDGSEPKIQRMGDRFAVEVKGRIHFVLYPVIRRTINLPTYTLEAVYEAVFGQPKEKVYAEEITTAWETGENLERVARYSMEDAKVTYELGKEFLPMEAQLSRLIGQSLWDVSRSSTGNLVEWFLLRKAYERNELAPNKPDEKELARRRQSYEGGYVKEPERGLWENIVYLDFRSLYPSIIITHNVSPDTLNREGCKEYDVAPQVGHRFCKDFPGFIPSLLGDLLEERQKIKKKMKATIDPIERKLLDYRQRAIKILANSYYGYYGYARARWYCKECAESVTAWGREYITMTIKEIEEKYGFKVIYSDTDGFFATIPGADAETVKKKAMEFLKYINAKLPGALELEYEGFYKRGFFVTKKKYAVIDEEGKITTRGLEIVRRDWSEIAKETQARVLEALLKDGDVEKAVRIVKEVTEKLSKYEVPPEKLVIHEQITRDLKDYKATGPHVAVAKRLAARGVKIRPGTVISYIVLKGSGRIGDRAIPFDEFDPTKHKYDAEYYIENQVLPAVERILRAFGYRKEDLRYQKTRQVGLSAWLKPKGT

SEQ ID NO: 555 - protein, 774 aa, synthetic construct
MILDTDYITEDGKPVIRIFKKENGEFKIEYDRTFEPYFYALLKDDSAIEEVKKITAERHGTVVTVKRVEKVQKKFLGRPVEVWKLYFTHPQDVPAIRDKIREHPAVIDIYEYDIPFAKRYLIDKGLVPMEGDEELKMLAFDIETLYHEGEEFAEGPILMISYADEEGARVITWKNVDLPYVDVVSTEREMIKRFLRVVKEKDPDVLITYNGDNFDFAYLKKRCEKLGINFALGRDGSEPKIQRMGDRFAVEVKGRIHFWLYPVIRRTINLPTYTLEAVYEAVFGQPKEKVYAEEITTAWETGENLERVARYSMEDAKVTYELGKEFLPMEAQLSRLIGQSLWDVSRSSTGNLVEWFLLRKAYERNELAPNKPDEKELARRRQSYEGGYVKEPERGLWENIVYLDFRSLYPSIIITHNVSPDTLNREGCKEYDVAPQVGHRFCKDFPGFIPSLLGDLLEERQKIKKKMKATIDPIERKLLDYRQRAIKILANSYYGYYGYARARWYCKECAESVTAWGREYITMTIKEIEEKYGFKVIYSDTDGFFATIPGADAETVKKKAMEFLKYINAKLPGALELEYEGFYKRGFFVTKKKYAVIDEEGKITTRGLEIVRRDWSEIAKETQARVLEALLKDGDVEKAVRIVKEVTEKLSKYEVPPEKLVIHEQITRDLKDYKATGPHVAVAKRLAARGVKIRPGTVISYIVLKGSGRIGDRAIPFDEFDPTKHKYDAEYYIENQVLPAVERILRAFGYRKEDLRYQKTRQVGLSAWLKPKGT

SEQ ID NO: 556 - protein, 774 aa, synthetic construct
MILDTDYITEDGKPVIRIFKKENGEFKIEYDRTFEPYFYALLKDDSAIEEVKKITAERHGTVVTVKRVEKVQKKFLGRPVEVWKLYFTHPQDVPAIRDKIREHPAVIDIYEYDIPFAKRYLIDKGLVPMEGDEELKMLAFDIETLYHEGEEFAEGPILMISYADEEGARVITWKNVDLPYVDVVSTEREMIKRFLRVVKEKDPDVLITYNGDNFDFAYLKKRCEKLGINFALGRDGSEPKIQRMGDRFAVEVKGRIHFYLYPVIRRTINLPTYTLEAVYEAVFGQPKEKVYAEEITTAWETGENLERVARYSMEDAKVTYELGKEFLPMEAQLSRLIGQSLWDVSRSSTGNLVEWFLLRKAYERNELAPNKPDEKELARRRQSYEGGYVKEPERGLWENIVYLDFRSLYPSIIITHNVSPDTLNREGCKEYDVAPQVGHRFCKDFPGFIPSLLGDLLEERQKIKKKMKATIDPIERKLLDYRQRAIKILANSYYGYYGYARARWYCKECAESVTAWGREYITMTIKEIEEKYGFKVIYSDTDGFFATIPGADAETVKKKAMEFLKYINAKLPGALELEYEGFYKRGFFVTKKKYAVIDEEGKITTRGLEIVRRDWSEIAKETQARVLEALLKDGDVEKAVRIVKEVTEKLSKYEVPPEKLVIHEQITRDLKDYKATGPHVAVAKRLAARGVKIRPGTVISYIVLKGSGRIGDRAIPFDEFDPTKHKYDAEYYIENQVLPAVERILRAFGYRKEDLRYQKTRQVGLSAWLKPKGT

SEQ ID NO: 557 - protein, 774 aa, synthetic construct
MILDTDYITEDGKPVIRIFKKENGEFKIEYDRTFEPYFYALLKDDSAIEEVKKITAERHGTVVTVKRVEKVQKKFLGRPVEVWKLYFTHPQDVPAIRDKIREHPAVIDIYEYDIPFAKRYLIDKGLVPMEGDEELKMLAFDIETLYHEGEEFAEGPILMISYADEEGARVITWKNVDLPYVDVVSTEREMIKRFLRVVKEKDPDVLITYNGDNFDFAYLKKRCEKLGINFALGRDGSEPKIQRMGDRFAVEVKGRIHFDWYPVIRRTINLPTYTLEAVYEAVFGQPKEKVYAEEITTAWETGENLERVARYSMEDAKVTYELGKEFLPMEAQLSRLIGQSLWDVSRSSTGNLVEWFLLRKAYERNELAPNKPDEKELARRRQSYEGGYVKEPERGLWENIVYLDFRSLYPSIIITHNVSPDTLNREGCKEYDVAPQVGHRFCKDFPGFIPSLLGDLLEERQKIKKKMKATIDPIERKLLDYRQRAIKILANSYYGYYGYARARWYCKECAESVTAWGREYITMTIKEIEEKYGFKVIYSDTDGFFATIPGADAETVKKKAMEFLKYINAKLPGALELEYEGFYKRGFFVTKKKYAVIDEEGKITTRGLEIVRRDWSEIAKETQARVLEALLKDGDVEKAVRIVKEVTEKLSKYEVPPEKLVIHEQITRDLKDYKATGPHVAVAKRLAARGVKIRPGTVISYIVLKGSGRIGDRAIPFDEFDPTKHKYDAEYYIENQVLPAVERILRAFGYRKEDLRYQKTRQVGLSAWLKPKGT

SEQ ID NO: 558 - protein, 774 aa, synthetic construct
MILDTDYITEDGKPVIRIFKKENGEFKIEYDRTFEPYFYALLKDDSAIEEVKKITAERHGTVVTVKRVEKVQKKFLGRPVEVWKLYFTHPQDVPAIRDKIREHPAVIDIYEYDIPFAKRYLIDKGLVPMEGDEELKMLAFDIETLYHEGEEFAEGPILMISYADEEGARVITWKNVDLPYVDVVSTEREMIKRFLRVVKEKDPDVLITYNGDNFDFAYLKKRCEKLGINFALGRDGSEPKIQRMGDRFAVEVKGRIHFDLDPVIRRTINLPTYTLEAVYEAVFGQPKEKVYAEEITTAWETGENLERVARYSMEDAKVTYELGKEFLPMEAQLSRLIGQSLWDVSRSSTGNLVEWFLLRKAYERNELAPNKPDEKELARRRQSYEGGYVKEPERGLWENIVYLDFRSLYPSIIITHNVSPDTLNREGCKEYDVAPQVGHRFCKDFPGFIPSLLGDLLEERQKIKKKMKATIDPIERKLLDYRQRAIKILANSYYGYYGYARARWYCKECAESVTAWGREYITMTIKEIEEKYGFKVIYSDTDGFFATIPGADAETVKKKAMEFLKYINAKLPGALELEYEGFYKRGFFVTKKKYAVIDEEGKITTRGLEIVRRDWSEIAKETQARVLEALLKDGDVEKAVRIVKEVTEKLSKYEVPPEKLVIHEQITRDLKDYKATGPHVAVAKRLAARGVKIRPGTVISYIVLKGSGRIGDRAIPFDEFDPTKHKYDAEYYIENQVLPAVERILRAFGYRKEDLRYQKTRQVGLSAWLKPKGT

SEQ ID NO: 559 - protein, 774 aa, synthetic construct
MILDTDYITEDGKPVIRIFKKENGEFKIEYDRTFEPYFYALLKDDSAIEEVKKITAERHGTVVTVKRVEKVQKKFLGRPVEVWKLYFTHPQDVPAIRDKIREHPAVIDIYEYDIPFAKRYLIDKGLVPMEGDEELKMLAFDIETLYHEGEEFAEGPILMISYADEEGARVITWKNVDLPYVDVVSTEREMIKRFLRVVKEKDPDVLITYNGDNFDFAYLKKRCEKLGINFALGRDGSEPKIQRMGDRFAVEVKGRIHFDLEPVIRRTINLPTYTLEAVYEAVFGQPKEKVYAEEITTAWETGENLERVARYSMEDAKVTYELGKEFLPMEAQLSRLIGQSLWDVSRSSTGNLVEWFLLRKAYERNELAPNKPDEKELARRRQSYEGGYVKEPERGLWENIVYLDFRSLYPSIIITHNVSPDTLNREGCKEYDVAPQVGHRFCKDFPGFIPSLLGDLLEERQKIKKKMKATIDPIERKLLDYRQRAIKILANSYYGYYGYARARWYCKECAESVTAWGREYITMTIKEIEEKYGFKVIYSDTDGFFATIPGADAETVKKKAMEFLKYINAKLPGALELEYEGFYKRGFFVTKKKYAVIDEEGKITTRGLEIVRRDWSEIAKETQARVLEALLKDGDVEKAVRIVKEVTEKLSKYEVPPEKLVIHEQITRDLKDYKATGPHVAVAKRLAARGVKIRPGTVISYIVLKGSGRIGDRAIPFDEFDPTKHKYDAEYYIENQVLPAVERILRAFGYRKEDLRYQKTRQVGLSAWLKPKGT

SEQ ID NO: 560 - protein, 774 aa, synthetic construct
MILDTDYITEDGKPVIRIFKKENGEFKIEYDRTFEPYFYALLKDDSAIEEVKKITAERHGTVVTVKRVEKVQKKFLGRPVEVWKLYFTHPQDVPAIRDKIREHPAVIDIYEYDIPFAKRYLIDKGLVPMEGDEELKMLAFDIETLYHEGEEFAEGPILMISYADEEGARVITWKNVDLPYVDVVSTEREMIKRFLRVVKEKDPDVLITYNGDNFDFAYLKKRCEKLGINFALGRDGSEPKIQRMGDRFAVEVKGRIHFDLFPVIRRTINLPTYTLEAVYEAVFGQPKEKVYAEEITTAWETGENLERVARYSMEDAKVTYELGKEFLPMEAQLSRLIGQSLWDVSRSSTGNLVEWFLLRKAYERNELAPNKPDEKELARRRQSYEGGYVKEPERGLWENIVYLDFRSLYPSIIITHNVSPDTLNREGCKEYDVAPQVGHRFCKDFPGFIPSLLGDLLEERQKIKKKMKATIDPIERKLLDYRQRAIKILANSYYGYYGYARARWYCKECAESVTAWGREYITMTIKEIEEKYGFKVIYSDTDGFFATIPGADAETVKKKAMEFLKYINAKLPGALELEYEGFYKRGFFVTKKKYAVIDEEGKITTRGLEIVRRDWSEIAKETQARVLEALLKDGDVEKAVRIVKEVTEKLSKYEVPPEKLVIHEQITRDLKDYKATGPHVAVAKRLAARGVKIRPGTVISYIVLKGSGRIGDRAIPFDEFDPTKHKYDAEYYIENQVLPAVERILRAFGYRKEDLRYQKTRQVGLSAWLKPKGT

SEQ ID NO: 561 - protein, 774 aa, synthetic construct
MILDTDYITEDGKPVIRIFKKENGEFKIEYDRTFEPYFYALLKDDSAIEEVKKITAERHGTVVTVKRVEKVQKKFLGRPVEVWKLYFTHPQDVPAIRDKIREHPAVIDIYEYDIPFAKRYLIDKGLVPMEGDEELKMLAFDIETLYHEGEEFAEGPILMISYADEEGARVITWKNVDLPYVDVVSTEREMIKRFLRVVKEKDPDVLITYNGDNFDFAYLKKRCEKLGINFALGRDGSEPKIQRMGDRFAVEVKGRIHFDLYPVIRRTINLPTDTLEAVYEAVFGQPKEKVYAEEITTAWETGENLERVARYSMEDAKVTYELGKEFLPMEAQLSRLIGQSLWDVSRSSTGNLVEWFLLRKAYERNELAPNKPDEKELARRRQSYEGGYVKEPERGLWENIVYLDFRSLYPSIIITHNVSPDTLNREGCKEYDVAPQVGHRFCKDFPGFIPSLLGDLLEERQKIKKKMKATIDPIERKLLDYRQRAIKILANSYYGYYGYARARWYCKECAESVTAWGREYITMTIKEIEEKYGFKVIYSDTDGFFATIPGADAETVKKKAMEFLKYINAKLPGALELEYEGFYKRGFFVTKKKYAVIDEEGKITTRGLEIVRRDWSEIAKETQARVLEALLKDGDVEKAVRIVKEVTEKLSKYEVPPEKLVIHEQITRDLKDYKATGPHVAVAKRLAARGVKIRPGTVISYIVLKGSGRIGDRAIPFDEFDPTKHKYDAEYYIENQVLPAVERILRAFGYRKEDLRYQKTRQVGLSAWLKPKGT

SEQ ID NO: 562 - protein, 774 aa, synthetic construct
MILDTDYITEDGKPVIRIFKKENGEFKIEYDRTFEPYFYALLKDDSAIEEVKKITAERHGTVVTVKRVEKVQKKFLGRPVEVWKLYFTHPQDVPAIRDKIREHPAVIDIYEYDIPFAKRYLIDKGLVPMEGDEELKMLAFDIETLYHEGEEFAEGPILMISYADEEGARVITWKNVDLPYVDVVSTEREMIKRFLRVVKEKDPDVLITYNGDNFDFAYLKKRCEKLGINFALGRDGSEPKIQRMGDRFAVEVKGRIHFDLYPVIRRTINLPTPTLEAVYEAVFGQPKEKVYAEEITTAWETGENLERVARYSMEDAKVTYELGKEFLPMEAQLSRLIGQSLWDVSRSSTGNLVEWFLLRKAYERNELAPNKPDEKELARRRQSYEGGYVKEPERGLWENIVYLDFRSLYPSIIITHNVSPDTLNREGCKEYDVAPQVGHRFCKDFPGFIPSLLGDLLEERQKIKKKMKATIDPIERKLLDYRQRAIKILANSYYGYYGYARARWYCKECAESVTAWGREYITMTIKEIEEKYGFKVIYSDTDGFFATIPGADAETVKKKAMEFLKYINAKLPGALELEYEGFYKRGFFVTKKKYAVIDEEGKITTRGLEIVRRDWSEIAKETQARVLEALLKDGDVEKAVRIVKEVTEKLSKYEVPPEKLVIHEQITRDLKDYKATGPHVAVAKRLAARGVKIRPGTVISYIVLKGSGRIGDRAIPFDEFDPTKHKYDAEYYIENQVLPAVERILRAFGYRKEDLRYQKTRQVGLSAWLKPKGT

SEQ ID NO: 563 - protein, 774 aa, synthetic construct
MILDTDYITEDGKPVIRIFKKENGEFKIEYDRTFEPYFYALLKDDSAIEEVKKITAERHGTVVTVKRVEKVQKKFLGRPVEVWKLYFTHPQDVPAIRDKIREHPAVIDIYEYDIPFAKRYLIDKGLVPMEGDEELKMLAFDIETLYHEGEEFAEGPILMISYADEEGARVITWKNVDLPYVDVVSTEREMIKRFLRVVKEKDPDVLITYNGDNFDFAYLKKRCEKLGINFALGRDGSEPKIQRMGDRFAVEVKGRIHFDLYPVIRRTINLPTYDLEAVYEAVFGQPKEKVYAEEITTAWETGENLERVARYSMEDAKVTYELGKEFLPMEAQLSRLIGQSLWDVSRSSTGNLVEWFLLRKAYERNELAPNKPDEKELARRRQSYEGGYVKEPERGLWENIVYLDFRSLYPSIIITHNVSPDTLNREGCKEYDVAPQVGHRFCKDFPGFIPSLLGDLLEERQKIKKKMKATIDPIERKLLDYRQRAIKILANSYYGYYGYARARWYCKECAESVTAWGREYITMTIKEIEEKYGFKVIYSDTDGFFATIPGADAETVKKKAMEFLKYINAKLPGALELEYEGFYKRGFFVTKKKYAVIDEEGKITTRGLEIVRRDWSEIAKETQARVLEALLKDGDVEKAVRIVKEVTEKLSKYEVPPEKLVIHEQITRDLKDYKATGPHVAVAKRLAARGVKIRPGTVISYIVLKGSGRIGDRAIPFDEFDPTKHKYDAEYYIENQVLPAVERILRAFGYRKEDLRYQKTRQVGLSAWLKPKGT

SEQ ID NO: 564 - protein, 774 aa, synthetic construct
MILDTDYITEDGKPVIRIFKKENGEFKIEYDRTFEPYFYALLKDDSAIEEVKKITAERHGTVVTVKRVEKVQKKFLGRPVEVWKLYFTHPQDVPAIRDKIREHPAVIDIYEYDIPFAKRYLIDKGLVPMEGDEELKMLAFDIETLYHEGEEFAEGPILMISYADEEGARVITWKNVDLPYVDVVSTEREMIKRFLRVVKEKDPDVLITYNGDNFDFAYLKKRCEKLGINFALGRDGSEPKIQRMGDRFAVEVKGRIHFDLYPVIRRTINLPTYTHEAVYEAVFGQPKEKVYAEEITTAWETGENLERVARYSMEDAKVTYELGKEFLPMEAQLSRLIGQSLWDVSRSSTGNLVEWFLLRKAYERNELAPNKPDEKELARRRQSYEGGYVKEPERGLWENIVYLDFRSLYPSIIITHNVSPDTLNREGCKEYDVAPQVGHRFCKDFPGFIPSLLGDLLEERQKIKKKMKATIDPIERKLLDYRQRAIKILANSYYGYYGYARARWYCKECAESVTAWGREYITMTIKEIEEKYGFKVIYSDTDGFFATIPGADAETVKKKAMEFLKYINAKLPGALELEYEGFYKRGFFVTKKKYAVIDEEGKITTRGLEIVRRDWSEIAKETQARVLEALLKDGDVEKAVRIVKEVTEKLSKYEVPPEKLVIHEQITRDLKDYKATGPHVAVAKRLAARGVKIRPGTVISYIVLKGSGRIGDRAIPFDEFDPTKHKYDAEYYIENQVLPAVERILRAFGYRKEDLRYQKTRQVGLSAWLKPKGT

SEQ ID NO: 565 - protein, 774 aa, synthetic construct
MILDTDYITEDGKPVIRIFKKENGEFKIEYDRTFEPYFYALLKDDSAIEEVKKITAERHGTVVTVKRVEKVQKKFLGRPVEVWKLYFTHPQDVPAIRDKIREHPAVIDIYEYDIPFAKRYLIDKGLVPMEGDEELKMLAFDIETLYHEGEEFAEGPILMISYADEEGARVITWKNVDLPYVDVVSTEREMIKRFLRVVKEKDPDVLITYNGDNFDFAYLKKRCEKLGINFALGRDGSEPKIQRMGDRFAVEVKGRIHFDLYPVIRRTINLPTYTPEAVYEAVFGQPKEKVYAEEITTAWETGENLERVARYSMEDAKVTYELGKEFLPMEAQLSRLIGQSLWDVSRSSTGNLVEWFLLRKAYERNELAPNKPDEKELARRRQSYEGGYVKEPERGLWENIVYLDFRSLYPSIIITHNVSPDTLNREGCKEYDVAPQVGHRFCKDFPGFIPSLLGDLLEERQKIKKKMKATIDPIERKLLDYRQRAIKILANSYYGYYGYARARWYCKECAESVTAWGREYITMTIKEIEEKYGFKVIYSDTDGFFATIPGADAETVKKKAMEFLKYINAKLPGALELEYEGFYKRGFFVTKKKYAVIDEEGKITTRGLEIVRRDWSEIAKETQARVLEALLKDGDVEKAVRIVKEVTEKLSKYEVPPEKLVIHEQITRDLKDYKATGPHVAVAKRLAARGVKIRPGTVISYIVLKGSGRIGDRAIPFDEFDPTKHKYDAEYYIENQVLPAVERILRAFGYRKEDLRYQKTRQVGLSAWLKPKGT

SEQ ID NO: 566 - protein, 774 aa, synthetic construct
MILDTDYITEDGKPVIRIFKKENGEFKIEYDRTFEPYFYALLKDDSAIEEVKKITAERHGTVVTVKRVEKVQKKFLGRPVEVWKLYFTHPQDVPAIRDKIREHPAVIDIYEYDIPFAKRYLIDKGLVPMEGDEELKMLAFDIETLYHEGEEFAEGPILMISYADEEGARVITWKNVDLPYVDVVSTEREMIKRFLRVVKEKDPDVLITYNGDNFDFAYLKKRCEKLGINFALGRDGSEPKIQRMGDRFAVEVKGRIHFDLYPVIRRTINLPTYTREAVYEAVFGQPKEKVYAEEITTAWETGENLERVARYSMEDAKVTYELGKEFLPMEAQLSRLIGQSLWDVSRSSTGNLVEWFLLRKAYERNELAPNKPDEKELARRRQSYEGGYVKEPERGLWENIVYLDFRSLYPSIIITHNVSPDTLNREGCKEYDVAPQVGHRFCKDFPGFIPSLLGDLLEERQKIKKKMKATIDPIERKLLDYRQRAIKILANSYYGYYGYARARWYCKECAESVTAWGREYITMTIKEIEEKYGFKVIYSDTDGFFATIPGADAETVKKKAMEFLKYINAKLPGALELEYEGFYKRGFFVTKKKYAVIDEEGKITTRGLEIVRRDWSEIAKETQARVLEALLKDGDVEKAVRIVKEVTEKLSKYEVPPEKLVIHEQITRDLKDYKATGPHVAVAKRLAARGVKIRPGTVISYIVLKGSGRIGDRAIPFDEFDPTKHKYDAEYYIENQVLPAVERILRAFGYRKEDLRYQKTRQVGLSAWLKPKGT

SEQ ID NO: 567 - protein, 774 aa, synthetic construct
MILDTDYITEDGKPVIRIFKKENGEFKIEYDRTFEPYFYALLKDDSAIEEVKKITAERHGTVVTVKRVEKVQKKFLGRPVEVWKLYFTHPQDVPAIRDKIREHPAVIDIYEYDIPFAKRYLIDKGLVPMEGDEELKMLAFDIETLYHEGEEFAEGPILMISYADEEGARVITWKNVDLPYVDVVSTEREMIKRFLRVVKEKDPDVLITYNGDNFDFAYLKKRCEKLGINFALGRDGSEPKIQRMGDRFAVEVKGRIHFDLYPVIRRTINLPTYTSEAVYEAVFGQPKEKVYAEEITTAWETGENLERVARYSMEDAKVTYELGKEFLPMEAQLSRLIGQSLWDVSRSSTGNLVEWFLLRKAYERNELAPNKPDEKELARRRQSYEGGYVKEPERGLWENIVYLDFRSLYPSIIITHNVSPDTLNREGCKEYDVAPQVGHRFCKDFPGFIPSLLGDLLEERQKIKKKMKATIDPIERKLLDYRQRAIKILANSYYGYYGYARARWYCKECAESVTAWGREYITMTIKEIEEKYGFKVIYSDTDGFFATIPGADAETVKKKAMEFLKYINAKLPGALELEYEGFYKRGFFVTKKKYAVIDEEGKITTRGLEIVRRDWSEIAKETQARVLEALLKDGDVEKAVRIVKEVTEKLSKYEVPPEKLVIHEQITRDLKDYKATGPHVAVAKRLAARGVKIRPGTVISYIVLKGSGRIGDRAIPFDEFDPTKHKYDAEYYIENQVLPAVERILRAFGYRKEDLRYQKTRQVGLSAWLKPKGT

SEQ ID NO: 568 - protein, 774 aa, synthetic construct
MILDTDYITEDGKPVIRIFKKENGEFKIEYDRTFEPYFYALLKDDSAIEEVKKITAERHGTVVTVKRVEKVQKKFLGRPVEVWKLYFTHPQDVPAIRDKIREHPAVIDIYEYDIPFAKRYLIDKGLVPMEGDEELKMLAFDIETLYHEGEEFAEGPILMISYADEEGARVITWKNVDLPYVDVVSTEREMIKRFLRVVKEKDPDVLITYNGDNFDFAYLKKRCEKLGINFALGRDGSEPKIQRMGDRFAVEVKGRIHFDLYPVIRRTINLPTYTLEEVYEAVFGQPKEKVYAEEITTAWETGENLERVARYSMEDAKVTYELGKEFLPMEAQLSRLIGQSLWDVSRSSTGNLVEWFLLRKAYERNELAPNKPDEKELARRRQSYEGGYVKEPERGLWENIVYLDFRSLYPSIIITHNVSPDTLNREGCKEYDVAPQVGHRFCKDFPGFIPSLLGDLLEERQKIKKKMKATIDPIERKLLDYRQRAIKILANSYYGYYGYARARWYCKECAESVTAWGREYITMTIKEIEEKYGFKVIYSDTDGFFATIPGADAETVKKKAMEFLKYINAKLPGALELEYEGFYKRGFFVTKKKYAVIDEEGKITTRGLEIVRRDWSEIAKETQARVLEALLKDGDVEKAVRIVKEVTEKLSKYEVPPEKLVIHEQITRDLKDYKATGPHVAVAKRLAARGVKIRPGTVISYIVLKGSGRIGDRAIPFDEFDPTKHKYDAEYYIENQVLPAVERILRAFGYRKEDLRYQKTRQVGLSAWLKPKGT

SEQ ID NO: 569 - protein, 774 aa, synthetic construct
MILDTDYITEDGKPVIRIFKKENGEFKIEYDRTFEPYFYALLKDDSAIEEVKKITAERHGTVVTVKRVEKVQKKFLGRPVEVWKLYFTHPQDVPAIRDKIREHPAVIDIYEYDIPFAKRYLIDKGLVPMEGDEELKMLAFDIETLYHEGEEFAEGPILMISYADEEGARVITWKNVDLPYVDVVSTEREMIKRFLRVVKEKDPDVLITYNGDNFDFAYLKKRCEKLGINFALGRDGSEPKIQRMGDRFAVEVKGRIHFDLYPVIRRTINLPTYTLEPVYEAVFGQPKEKVYAEEITTAWETGENLERVARYSMEDAKVTYELGKEFLPMEAQLSRLIGQSLWDVSRSSTGNLVEWFLLRKAYERNELAPNKPDEKELARRRQSYEGGYVKEPERGLWENIVYLDFRSLYPSIIITHNVSPDTLNREGCKEYDVAPQVGHRFCKDFPGFIPSLLGDLLEERQKIKKKMKATIDPIERKLLDYRQRAIKILANSYYGYYGYARARWYCKECAESVTAWGREYITMTIKEIEEKYGFKVIYSDTDGFFATIPGADAETVKKKAMEFLKYINAKLPGALELEYEGFYKRGFFVTKKKYAVIDEEGKITTRGLEIVRRDWSEIAKETQARVLEALLKDGDVEKAVRIVKEVTEKLSKYEVPPEKLVIHEQITRDLKDYKATGPHVAVAKRLAARGVKIRPGTVISYIVLKGSGRIGDRAIPFDEFDPTKHKYDAEYYIENQVLPAVERILRAFGYRKEDLRYQKTRQVGLSAWLKPKGT

SEQ ID NO: 570 - protein, 774 aa, synthetic construct
MILDTDYITEDGKPVIRIFKKENGEFKIEYDRTFEPYFYALLKDDSAIEEVKKITAERHGTVVTVKRVEKVQKKFLGRPVEVWKLYFTHPQDVPAIRDKIREHPAVIDIYEYDIPFAKRYLIDKGLVPMEGDEELKMLAFDIETLYHEGEEFAEGPILMISYADEEGARVITWKNVDLPYVDVVSTEREMIKRFLRVVKEKDPDVLITYNGDNFDFAYLKKRCEKLGINFALGRDGSEPKIQRMGDRFAVEVKGRIHFDLYPVIRRTINLPTYTLEAFYEAVFGQPKEKVYAEEITTAWETGENLERVARYSMEDAKVTYELGKEFLPMEAQLSRLIGQSLWDVSRSSTGNLVEWFLLRKAYERNELAPNKPDEKELARRRQSYEGGYVKEPERGLWENIVYLDFRSLYPSIIITHNVSPDTLNREGCKEYDVAPQVGHRFCKDFPGFIPSLLGDLLEERQKIKKKMKATIDPIERKLLDYRQRAIKILANSYYGYYGYARARWYCKECAESVTAWGREYITMTIKEIEEKYGFKVIYSDTDGFFATIPGADAETVKKKAMEFLKYINAKLPGALELEYEGFYKRGFFVTKKKYAVIDEEGKITTRGLEIVRRDWSEIAKETQARVLEALLKDGDVEKAVRIVKEVTEKLSKYEVPPEKLVIHEQITRDLKDYKATGPHVAVAKRLAARGVKIRPGTVISYIVLKGSGRIGDRAIPFDEFDPTKHKYDAEYYIENQVLPAVERILRAFGYRKEDLRYQKTRQVGLSAWLKPKGT

SEQ ID NO: 571 - protein, 774 aa, synthetic construct
MILDTDYITEDGKPVIRIFKKENGEFKIEYDRTFEPYFYALLKDDSAIEEVKKITAERHGTVVTVKRVEKVQKKFLGRPVEVWKLYFTHPQDVPAIRDKIREHPAVIDIYEYDIPFAKRYLIDKGLVPMEGDEELKMLAFDIETLYHEGEEFAEGPILMISYADEEGARVITWKNVDLPYVDVVSTEREMIKRFLRVVKEKDPDVLITYNGDNFDFAYLKKRCEKLGINFALGRDGSEPKIQRMGDRFAVEVKGRIHFDLYPVIRRTINLPTYTLEAVYMAVFGQPKEKVYAEEITTAWETGENLERVARYSMEDAKVTYELGKEFLPMEAQLSRLIGQSLWDVSRSSTGNLVEWFLLRKAYERNELAPNKPDEKELARRRQSYEGGYVKEPERGLWENIVYLDFRSLYPSIIITHNVSPDTLNREGCKEYDVAPQVGHRFCKDFPGFIPSLLGDLLEERQKIKKKMKATIDPIERKLLDYRQRAIKILANSYYGYYGYARARWYCKECAESVTAWGREYITMTIKEIEEKYGFKVIYSDTDGFFATIPGADAETVKKKAMEFLKYINAKLPGALELEYEGFYKRGFFVTKKKYAVIDEEGKITTRGLEIVRRDWSEIAKETQARVLEALLKDGDVEKAVRIVKEVTEKLSKYEVPPEKLVIHEQITRDLKDYKATGPHVAVAKRLAARGVKIRPGTVISYIVLKGSGRIGDRAIPFDEFDPTKHKYDAEYYIENQVLPAVERILRAFGYRKEDLRYQKTRQVGLSAWLKPKGT

SEQ ID NO: 572 - protein, 774 aa, synthetic construct
MILDTDYITEDGKPVIRIFKKENGEFKIEYDRTFEPYFYALLKDDSAIEEVKKITAERHGTVVTVKRVEKVQKKFLGRPVEVWKLYFTHPQDVPAIRDKIREHPAVIDIYEYDIPFAKRYLIDKGLVPMEGDEELKMLAFDIETLYHEGEEFAEGPILMISYADEEGARVITWKNVDLPYVDVVSTEREMIKRFLRVVKEKDPDVLITYNGDNFDFAYLKKRCEKLGINFALGRDGSEPKIQRMGDRFAVEVKGRIHFDLYPVIRRTINLPTYTLEAVYEWVFGQPKEKVYAEEITTAWETGENLERVARYSMEDAKVTYELGKEFLPMEAQLSRLIGQSLWDVSRSSTGNLVEWFLLRKAYERNELAPNKPDEKELARRRQSYEGGYVKEPERGLWENIVYLDFRSLYPSIIITHNVSPDTLNREGCKEYDVAPQVGHRFCKDFPGFIPSLLGDLLEERQKIKKKMKATIDPIERKLLDYRQRAIKILANSYYGYYGYARARWYCKECAESVTAWGREYITMTIKEIEEKYGFKVIYSDTDGFFATIPGADAETVKKKAMEFLKYINAKLPGALELEYEGFYKRGFFVTKKKYAVIDEEGKITTRGLEIVRRDWSEIAKETQARVLEALLKDGDVEKAVRIVKEVTEKLSKYEVPPEKLVIHEQITRDLKDYKATGPHVAVAKRLAARGVKIRPGTVISYIVLKGSGRIGDRAIPFDEFDPTKHKYDAEYYIENQVLPAVERILRAFGYRKEDLRYQKTRQVGLSAWLKPKGT

SEQ ID NO: 573 - protein, 774 aa, synthetic construct
MILDTDYITEDGKPVIRIFKKENGEFKIEYDRTFEPYFYALLKDDSAIEEVKKITAERHGTVVTVKRVEKVQKKFLGRPVEVWKLYFTHPQDVPAIRDKIREHPAVIDIYEYDIPFAKRYLIDKGLVPMEGDEELKMLAFDIETLYHEGEEFAEGPILMISYADEEGARVITWKNVDLPYVDVVSTEREMIKRFLRVVKEKDPDVLITYNGDNFDFAYLKKRCEKLGINFALGRDGSEPKIQRMGDRFAVEVKGRIHFDLYPVIRRTINLPTYTLEAVYEAVFGQPDEKVYAEEITTAWETGENLERVARYSMEDAKVTYELGKEFLPMEAQLSRLIGQSLWDVSRSSTGNLVEWFLLRKAYERNELAPNKPDEKELARRRQSYEGGYVKEPERGLWENIVYLDFRSLYPSIIITHNVSPDTLNREGCKEYDVAPQVGHRFCKDFPGFIPSLLGDLLEERQKIKKKMKATIDPIERKLLDYRQRAIKILANSYYGYYGYARARWYCKECAESVTAWGREYITMTIKEIEEKYGFKVIYSDTDGFFATIPGADAETVKKKAMEFLKYINAKLPGALELEYEGFYKRGFFVTKKKYAVIDEEGKITTRGLEIVRRDWSEIAKETQARVLEALLKDGDVEKAVRIVKEVTEKLSKYEVPPEKLVIHEQITRDLKDYKATGPHVAVAKRLAARGVKIRPGTVISYIVLKGSGRIGDRAIPFDEFDPTKHKYDAEYYIENQVLPAVERILRAFGYRKEDLRYQKTRQVGLSAWLKPKGT

SEQ ID NO: 574 - protein, 774 aa, synthetic construct
MILDTDYITEDGKPVIRIFKKENGEFKIEYDRTFEPYFYALLKDDSAIEEVKKITAERHGTVVTVKRVEKVQKKFLGRPVEVWKLYFTHPQDVPAIRDKIREHPAVIDIYEYDIPFAKRYLIDKGLVPMEGDEELKMLAFDIETLYHEGEEFAEGPILMISYADEEGARVITWKNVDLPYVDVVSTEREMIKRFLRVVKEKDPDVLITYNGDNFDFAYLKKRCEKLGINFALGRDGSEPKIQRMGDRFAVEVKGRIHFDLYPVIRRTINLPTYTLEAVYEAVFGQPEEKVYAEEITTAWETGENLERVARYSMEDAKVTYELGKEFLPMEAQLSRLIGQSLWDVSRSSTGNLVEWFLLRKAYERNELAPNKPDEKELARRRQSYEGGYVKEPERGLWENIVYLDFRSLYPSIIITHNVSPDTLNREGCKEYDVAPQVGHRFCKDFPGFIPSLLGDLLEERQKIKKKMKATIDPIERKLLDYRQRAIKILANSYYGYYGYARARWYCKECAESVTAWGREYITMTIKEIEEKYGFKVIYSDTDGFFATIPGADAETVKKKAMEFLKYINAKLPGALELEYEGFYKRGFFVTKKKYAVIDEEGKITTRGLEIVRRDWSEIAKETQARVLEALLKDGDVEKAVRIVKEVTEKLSKYEVPPEKLVIHEQITRDLKDYKATGPHVAVAKRLAARGVKIRPGTVISYIVLKGSGRIGDRAIPFDEFDPTKHKYDAEYYIENQVLPAVERILRAFGYRKEDLRYQKTRQVGLSAWLKPKGT

SEQ ID NO: 575 - protein, 774 aa, synthetic construct
MILDTDYITEDGKPVIRIFKKENGEFKIEYDRTFEPYFYALLKDDSAIEEVKKITAERHGTVVTVKRVEKVQKKFLGRPVEVWKLYFTHPQDVPAIRDKIREHPAVIDIYEYDIPFAKRYLIDKGLVPMEGDEELKMLAFDIETLYHEGEEFAEGPILMISYADEEGARVITWKNVDLPYVDVVSTEREMIKRFLRVVKEKDPDVLITYNGDNFDFAYLKKRCEKLGINFALGRDGSEPKIQRMGDRFAVEVKGRIHFDLYPVIRRTINLPTYTLEAVYEAVFGQPFEKVYAEEITTAWETGENLERVARYSMEDAKVTYELGKEFLPMEAQLSRLIGQSLWDVSRSSTGNLVEWFLLRKAYERNELAPNKPDEKELARRRQSYEGGYVKEPERGLWENIVYLDFRSLYPSIIITHNVSPDTLNREGCKEYDVAPQVGHRFCKDFPGFIPSLLGDLLEERQKIKKKMKATIDPIERKLLDYRQRAIKILANSYYGYYGYARARWYCKECAESVTAWGREYITMTIKEIEEKYGFKVIYSDTDGFFATIPGADAETVKKKAMEFLKYINAKLPGALELEYEGFYKRGFFVTKKKYAVIDEEGKITTRGLEIVRRDWSEIAKETQARVLEALLKDGDVEKAVRIVKEVTEKLSKYEVPPEKLVIHEQITRDLKDYKATGPHVAVAKRLAARGVKIRPGTVISYIVLKGSGRIGDRAIPFDEFDPTKHKYDAEYYIENQVLPAVERILRAFGYRKEDLRYQKTRQVGLSAWLKPKGT

SEQ ID NO: 576 - protein, 774 aa, synthetic construct
MILDTDYITEDGKPVIRIFKKENGEFKIEYDRTFEPYFYALLKDDSAIEEVKKITAERHGTVVTVKRVEKVQKKFLGRPVEVWKLYFTHPQDVPAIRDKIREHPAVIDIYEYDIPFAKRYLIDKGLVPMEGDEELKMLAFDIETLYHEGEEFAEGPILMISYADEEGARVITWKNVDLPYVDVVSTEREMIKRFLRVVKEKDPDVLITYNGDNFDFAYLKKRCEKLGINFALGRDGSEPKIQRMGDRFAVEVKGRIHFDLYPVIRRTINLPTYTLEAVYEAVFGQPIEKVYAEEITTAWETGENLERVARYSMEDAKVTYELGKEFLPMEAQLSRLIGQSLWDVSRSSTGNLVEWFLLRKAYERNELAPNKPDEKELARRRQSYEGGYVKEPERGLWENIVYLDFRSLYPSIIITHNVSPDTLNREGCKEYDVAPQVGHRFCKDFPGFIPSLLGDLLEERQKIKKKMKATIDPIERKLLDYRQRAIKILANSYYGYYGYARARWYCKECAESVTAWGREYITMTIKEIEEKYGFKVIYSDTDGFFATIPGADAETVKKKAMEFLKYINAKLPGALELEYEGFYKRGFFVTKKKYAVIDEEGKITTRGLEIVRRDWSEIAKETQARVLEALLKDGDVEKAVRIVKEVTEKLSKYEVPPEKLVIHEQITRDLKDYKATGPHVAVAKRLAARGVKIRPGTVISYIVLKGSGRIGDRAIPFDEFDPTKHKYDAEYYIENQVLPAVERILRAFGYRKEDLRYQKTRQVGLSAWLKPKGT

SEQ ID NO: 577 - protein, 774 aa, synthetic construct
MILDTDYITEDGKPVIRIFKKENGEFKIEYDRTFEPYFYALLKDDSAIEEVKKITAERHGTVVTVKRVEKVQKKFLGRPVEVWKLYFTHPQDVPAIRDKIREHPAVIDIYEYDIPFAKRYLIDKGLVPMEGDEELKMLAFDIETLYHEGEEFAEGPILMISYADEEGARVITWKNVDLPYVDVVSTEREMIKRFLRVVKEKDPDVLITYNGDNFDFAYLKKRCEKLGINFALGRDGSEPKIQRMGDRFAVEVKGRIHFDLYPVIRRTINLPTYTLEAVYEAVFGQPMEKVYAEEITTAWETGENLERVARYSMEDAKVTYELGKEFLPMEAQLSRLIGQSLWDVSRSSTGNLVEWFLLRKAYERNELAPNKPDEKELARRRQSYEGGYVKEPERGLWENIVYLDFRSLYPSIIITHNVSPDTLNREGCKEYDVAPQVGHRFCKDFPGFIPSLLGDLLEERQKIKKKMKATIDPIERKLLDYRQRAIKILANSYYGYYGYARARWYCKECAESVTAWGREYITMTIKEIEEKYGFKVIYSDTDGFFATIPGADAETVKKKAMEFLKYINAKLPGALELEYEGFYKRGFFVTKKKYAVIDEEGKITTRGLEIVRRDWSEIAKETQARVLEALLKDGDVEKAVRIVKEVTEKLSKYEVPPEKLVIHEQITRDLKDYKATGPHVAVAKRLAARGVKIRPGTVISYIVLKGSGRIGDRAIPFDEFDPTKHKYDAEYYIENQVLPAVERILRAFGYRKEDLRYQKTRQVGLSAWLKPKGT

SEQ ID NO: 578 - protein, 774 aa, synthetic construct
MILDTDYITEDGKPVIRIFKKENGEFKIEYDRTFEPYFYALLKDDSAIEEVKKITAERHGTVVTVKRVEKVQKKFLGRPVEVWKLYFTHPQDVPAIRDKIREHPAVIDIYEYDIPFAKRYLIDKGLVPMEGDEELKMLAFDIETLYHEGEEFAEGPILMISYADEEGARVITWKNVDLPYVDVVSTEREMIKRFLRVVKEKDPDVLITYNGDNFDFAYLKKRCEKLGINFALGRDGSEPKIQRMGDRFAVEVKGRIHFDLYPVIRRTINLPTYTLEAVYEAVFGQPPEKVYAEEITTAWETGENLERVARYSMEDAKVTYELGKEFLPMEAQLSRLIGQSLWDVSRSSTGNLVEWFLLRKAYERNELAPNKPDEKELARRRQSYEGGYVKEPERGLWENIVYLDFRSLYPSIIITHNVSPDTLNREGCKEYDVAPQVGHRFCKDFPGFIPSLLGDLLEERQKIKKKMKATIDPIERKLLDYRQRAIKILANSYYGYYGYARARWYCKECAESVTAWGREYITMTIKEIEEKYGFKVIYSDTDGFFATIPGADAETVKKKAMEFLKYINAKLPGALELEYEGFYKRGFFVTKKKYAVIDEEGKITTRGLEIVRRDWSEIAKETQARVLEALLKDGDVEKAVRIVKEVTEKLSKYEVPPEKLVIHEQITRDLKDYKATGPHVAVAKRLAARGVKIRPGTVISYIVLKGSGRIGDRAIPFDEFDPTKHKYDAEYYIENQVLPAVERILRAFGYRKEDLRYQKTRQVGLSAWLKPKGT

SEQ ID NO: 579 - protein, 774 aa, synthetic construct
MILDTDYITEDGKPVIRIFKKENGEFKIEYDRTFEPYFYALLKDDSAIEEVKKITAERHGTVVTVKRVEKVQKKFLGRPVEVWKLYFTHPQDVPAIRDKIREHPAVIDIYEYDIPFAKRYLIDKGLVPMEGDEELKMLAFDIETLYHEGEEFAEGPILMISYADEEGARVITWKNVDLPYVDVVSTEREMIKRFLRVVKEKDPDVLITYNGDNFDFAYLKKRCEKLGINFALGRDGSEPKIQRMGDRFAVEVKGRIHFDLYPVIRRTINLPTYTLEAVYEAVFGQPTEKVYAEEITTAWETGENLERVARYSMEDAKVTYELGKEFLPMEAQLSRLIGQSLWDVSRSSTGNLVEWFLLRKAYERNELAPNKPDEKELARRRQSYEGGYVKEPERGLWENIVYLDFRSLYPSIIITHNVSPDTLNREGCKEYDVAPQVGHRFCKDFPGFIPSLLGDLLEERQKIKKKMKATIDPIERKLLDYRQRAIKILANSYYGYYGYARARWYCKECAESVTAWGREYITMTIKEIEEKYGFKVIYSDTDGFFATIPGADAETVKKKAMEFLKYINAKLPGALELEYEGFYKRGFFVTKKKYAVIDEEGKITTRGLEIVRRDWSEIAKETQARVLEALLKDGDVEKAVRIVKEVTEKLSKYEVPPEKLVIHEQITRDLKDYKATGPHVAVAKRLAARGVKIRPGTVISYIVLKGSGRIGDRAIPFDEFDPTKHKYDAEYYIENQVLPAVERILRAFGYRKEDLRYQKTRQVGLSAWLKPKGT

SEQ ID NO: 580 - protein, 774 aa, synthetic construct
MILDTDYITEDGKPVIRIFKKENGEFKIEYDRTFEPYFYALLKDDSAIEEVKKITAERHGTVVTVKRVEKVQKKFLGRPVEVWKLYFTHPQDVPAIRDKIREHPAVIDIYEYDIPFAKRYLIDKGLVPMEGDEELKMLAFDIETLYHEGEEFAEGPILMISYADEEGARVITWKNVDLPYVDVVSTEREMIKRFLRVVKEKDPDVLITYNGDNFDFAYLKKRCEKLGINFALGRDGSEPKIQRMGDRFAVEVKGRIHFDLYPVIRRTINLPTYTLEAVYEAVFGQPVEKVYAEEITTAWETGENLERVARYSMEDAKVTYELGKEFLPMEAQLSRLIGQSLWDVSRSSTGNLVEWFLLRKAYERNELAPNKPDEKELARRRQSYEGGYVKEPERGLWENIVYLDFRSLYPSIIITHNVSPDTLNREGCKEYDVAPQVGHRFCKDFPGFIPSLLGDLLEERQKIKKKMKATIDPIERKLLDYRQRAIKILANSYYGYYGYARARWYCKECAESVTAWGREYITMTIKEIEEKYGFKVIYSDTDGFFATIPGADAETVKKKAMEFLKYINAKLPGALELEYEGFYKRGFFVTKKKYAVIDEEGKITTRGLEIVRRDWSEIAKETQARVLEALLKDGDVEKAVRIVKEVTEKLSKYEVPPEKLVIHEQITRDLKDYKATGPHVAVAKRLAARGVKIRPGTVISYIVLKGSGRIGDRAIPFDEFDPTKHKYDAEYYIENQVLPAVERILRAFGYRKEDLRYQKTRQVGLSAWLKPKGT

SEQ ID NO: 581 - protein, 774 aa, synthetic construct
MILDTDYITEDGKPVIRIFKKENGEFKIEYDRTFEPYFYALLKDDSAIEEVKKITAERHGTVVTVKRVEKVQKKFLGRPVEVWKLYFTHPQDVPAIRDKIREHPAVIDIYEYDIPFAKRYLIDKGLVPMEGDEELKMLAFDIETLYHEGEEFAEGPILMISYADEEGARVITWKNVDLPYVDVVSTEREMIKRFLRVVKEKDPDVLITYNGDNFDFAYLKKRCEKLGINFALGRDGSEPKIQRMGDRFAVEVKGRIHFDLYPVIRRTINLPTYTLEAVYEAVFGQPKEAVYAEEITTAWETGENLERVARYSMEDAKVTYELGKEFLPMEAQLSRLIGQSLWDVSRSSTGNLVEWFLLRKAYERNELAPNKPDEKELARRRQSYEGGYVKEPERGLWENIVYLDFRSLYPSIIITHNVSPDTLNREGCKEYDVAPQVGHRFCKDFPGFIPSLLGDLLEERQKIKKKMKATIDPIERKLLDYRQRAIKILANSYYGYYGYARARWYCKECAESVTAWGREYITMTIKEIEEKYGFKVIYSDTDGFFATIPGADAETVKKKAMEFLKYINAKLPGALELEYEGFYKRGFFVTKKKYAVIDEEGKITTRGLEIVRRDWSEIAKETQARVLEALLKDGDVEKAVRIVKEVTEKLSKYEVPPEKLVIHEQITRDLKDYKATGPHVAVAKRLAARGVKIRPGTVISYIVLKGSGRIGDRAIPFDEFDPTKHKYDAEYYIENQVLPAVERILRAFGYRKEDLRYQKTRQVGLSAWLKPKGT

SEQ ID NO: 582 - protein, 774 aa, synthetic construct
MILDTDYITEDGKPVIRIFKKENGEFKIEYDRTFEPYFYALLKDDSAIEEVKKITAERHGTVVTVKRVEKVQKKFLGRPVEVWKLYFTHPQDVPAIRDKIREHPAVIDIYEYDIPFAKRYLIDKGLVPMEGDEELKMLAFDIETLYHEGEEFAEGPILMISYADEEGARVITWKNVDLPYVDVVSTEREMIKRFLRVVKEKDPDVLITYNGDNFDFAYLKKRCEKLGINFALGRDGSEPKIQRMGDRFAVEVKGRIHFDLYPVIRRTINLPTYTLEAVYEAVFGQPKEDVYAEEITTAWETGENLERVARYSMEDAKVTYELGKEFLPMEAQLSRLIGQSLWDVSRSSTGNLVEWFLLRKAYERNELAPNKPDEKELARRRQSYEGGYVKEPERGLWENIVYLDFRSLYPSIIITHNVSPDTLNREGCKEYDVAPQVGHRFCKDFPGFIPSLLGDLLEERQKIKKKMKATIDPIERKLLDYRQRAIKILANSYYGYYGYARARWYCKECAESVTAWGREYITMTIKEIEEKYGFKVIYSDTDGFFATIPGADAETVKKKAMEFLKYINAKLPGALELEYEGFYKRGFFVTKKKYAVIDEEGKITTRGLEIVRRDWSEIAKETQARVLEALLKDGDVEKAVRIVKEVTEKLSKYEVPPEKLVIHEQITRDLKDYKATGPHVAVAKRLAARGVKIRPGTVISYIVLKGSGRIGDRAIPFDEFDPTKHKYDAEYYIENQVLPAVERILRAFGYRKEDLRYQKTRQVGLSAWLKPKGT

SEQ ID NO: 583 - protein, 774 aa, synthetic construct
MILDTDYITEDGKPVIRIFKKENGEFKIEYDRTFEPYFYALLKDDSAIEEVKKITAERHGTVVTVKRVEKVQKKFLGRPVEVWKLYFTHPQDVPAIRDKIREHPAVIDIYEYDIPFAKRYLIDKGLVPMEGDEELKMLAFDIETLYHEGEEFAEGPILMISYADEEGARVITWKNVDLPYVDVVSTEREMIKRFLRVVKEKDPDVLITYNGDNFDFAYLKKRCEKLGINFALGRDGSEPKIQRMGDRFAVEVKGRIHFDLYPVIRRTINLPTYTLEAVYEAVFGQPKEEVYAEEITTAWETGENLERVARYSMEDAKVTYELGKEFLPMEAQLSRLIGQSLWDVSRSSTGNLVEWFLLRKAYERNELAPNKPDEKELARRRQSYEGGYVKEPERGLWENIVYLDFRSLYPSIIITHNVSPDTLNREGCKEYDVAPQVGHRFCKDFPGFIPSLLGDLLEERQKIKKKMKATIDPIERKLLDYRQRAIKILANSYYGYYGYARARWYCKECAESVTAWGREYITMTIKEIEEKYGFKVIYSDTDGFFATIPGADAETVKKKAMEFLKYINAKLPGALELEYEGFYKRGFFVTKKKYAVIDEEGKITTRGLEIVRRDWSEIAKETQARVLEALLKDGDVEKAVRIVKEVTEKLSKYEVPPEKLVIHEQITRDLKDYKATGPHVAVAKRLAARGVKIRPGTVISYIVLKGSGRIGDRAIPFDEFDPTKHKYDAEYYIENQVLPAVERILRAFGYRKEDLRYQKTRQVGLSAWLKPKGT

SEQ ID NO: 584 - protein, 774 aa, synthetic construct
MILDTDYITEDGKPVIRIFKKENGEFKIEYDRTFEPYFYALLKDDSAIEEVKKITAERHGTVVTVKRVEKVQKKFLGRPVEVWKLYFTHPQDVPAIRDKIREHPAVIDIYEYDIPFAKRYLIDKGLVPMEGDEELKMLAFDIETLYHEGEEFAEGPILMISYADEEGARVITWKNVDLPYVDVVSTEREMIKRFLRVVKEKDPDVLITYNGDNFDFAYLKKRCEKLGINFALGRDGSEPKIQRMGDRFAVEVKGRIHFDLYPVIRRTINLPTYTLEAVYEAVFGQPKEFVYAEEITTAWETGENLERVARYSMEDAKVTYELGKEFLPMEAQLSRLIGQSLWDVSRSSTGNLVEWFLLRKAYERNELAPNKPDEKELARRRQSYEGGYVKEPERGLWENIVYLDFRSLYPSIIITHNVSPDTLNREGCKEYDVAPQVGHRFCKDFPGFIPSLLGDLLEERQKIKKKMKATIDPIERKLLDYRQRAIKILANSYYGYYGYARARWYCKECAESVTAWGREYITMTIKEIEEKYGFKVIYSDTDGFFATIPGADAETVKKKAMEFLKYINAKLPGALELEYEGFYKRGFFVTKKKYAVIDEEGKITTRGLEIVRRDWSEIAKETQARVLEALLKDGDVEKAVRIVKEVTEKLSKYEVPPEKLVIHEQITRDLKDYKATGPHVAVAKRLAARGVKIRPGTVISYIVLKGSGRIGDRAIPFDEFDPTKHKYDAEYYIENQVLPAVERILRAFGYRKEDLRYQKTRQVGLSAWLKPKGT

SEQ ID NO: 585 - protein, 774 aa, synthetic construct
MILDTDYITEDGKPVIRIFKKENGEFKIEYDRTFEPYFYALLKDDSAIEEVKKITAERHGTVVTVKRVEKVQKKFLGRPVEVWKLYFTHPQDVPAIRDKIREHPAVIDIYEYDIPFAKRYLIDKGLVPMEGDEELKMLAFDIETLYHEGEEFAEGPILMISYADEEGARVITWKNVDLPYVDVVSTEREMIKRFLRVVKEKDPDVLITYNGDNFDFAYLKKRCEKLGINFALGRDGSEPKIQRMGDRFAVEVKGRIHFDLYPVIRRTINLPTYTLEAVYEAVFGQPKEGVYAEEITTAWETGENLERVARYSMEDAKVTYELGKEFLPMEAQLSRLIGQSLWDVSRSSTGNLVEWFLLRKAYERNELAPNKPDEKELARRRQSYEGGYVKEPERGLWENIVYLDFRSLYPSIIITHNVSPDTLNREGCKEYDVAPQVGHRFCKDFPGFIPSLLGDLLEERQKIKKKMKATIDPIERKLLDYRQRAIKILANSYYGYYGYARARWYCKECAESVTAWGREYITMTIKEIEEKYGFKVIYSDTDGFFATIPGADAETVKKKAMEFLKYINAKLPGALELEYEGFYKRGFFVTKKKYAVIDEEGKITTRGLEIVRRDWSEIAKETQARVLEALLKDGDVEKAVRIVKEVTEKLSKYEVPPEKLVIHEQITRDLKDYKATGPHVAVAKRLAARGVKIRPGTVISYIVLKGSGRIGDRAIPFDEFDPTKHKYDAEYYIENQVLPAVERILRAFGYRKEDLRYQKTRQVGLSAWLKPKGT

SEQ ID NO: 586 - protein, 774 aa, synthetic construct
MILDTDYITEDGKPVIRIFKKENGEFKIEYDRTFEPYFYALLKDDSAIEEVKKITAERHGTVVTVKRVEKVQKKFLGRPVEVWKLYFTHPQDVPAIRDKIREHPAVIDIYEYDIPFAKRYLIDKGLVPMEGDEELKMLAFDIETLYHEGEEFAEGPILMISYADEEGARVITWKNVDLPYVDVVSTEREMIKRFLRVVKEKDPDVLITYNGDNFDFAYLKKRCEKLGINFALGRDGSEPKIQRMGDRFAVEVKGRIHFDLYPVIRRTINLPTYTLEAVYEAVFGQPKEHVYAEEITTAWETGENLERVARYSMEDAKVTYELGKEFLPMEAQLSRLIGQSLWDVSRSSTGNLVEWFLLRKAYERNELAPNKPDEKELARRRQSYEGGYVKEPERGLWENIVYLDFRSLYPSIIITHNVSPDTLNREGCKEYDVAPQVGHRFCKDFPGFIPSLLGDLLEERQKIKKKMKATIDPIERKLLDYRQRAIKILANSYYGYYGYARARWYCKECAESVTAWGREYITMTIKEIEEKYGFKVIYSDTDGFFATIPGADAETVKKKAMEFLKYINAKLPGALELEYEGFYKRGFFVTKKKYAVIDEEGKITTRGLEIVRRDWSEIAKETQARVLEALLKDGDVEKAVRIVKEVTEKLSKYEVPPEKLVIHEQITRDLKDYKATGPHVAVAKRLAARGVKIRPGTVISYIVLKGSGRIGDRAIPFDEFDPTKHKYDAEYYIENQVLPAVERILRAFGYRKEDLRYQKTRQVGLSAWLKPKGT

SEQ ID NO: 587 - protein, 774 aa, synthetic construct
MILDTDYITEDGKPVIRIFKKENGEFKIEYDRTFEPYFYALLKDDSAIEEVKKITAERHGTVVTVKRVEKVQKKFLGRPVEVWKLYFTHPQDVPAIRDKIREHPAVIDIYEYDIPFAKRYLIDKGLVPMEGDEELKMLAFDIETLYHEGEEFAEGPILMISYADEEGARVITWKNVDLPYVDVVSTEREMIKRFLRVVKEKDPDVLITYNGDNFDFAYLKKRCEKLGINFALGRDGSEPKIQRMGDRFAVEVKGRIHFDLYPVIRRTINLPTYTLEAVYEAVFGQPKEIVYAEEITTAWETGENLERVARYSMEDAKVTYELGKEFLPMEAQLSRLIGQSLWDVSRSSTGNLVEWFLLRKAYERNELAPNKPDEKELARRRQSYEGGYVKEPERGLWENIVYLDFRSLYPSIIITHNVSPDTLNREGCKEYDVAPQVGHRFCKDFPGFIPSLLGDLLEERQKIKKKMKATIDPIERKLLDYRQRAIKILANSYYGYYGYARARWYCKECAESVTAWGREYITMTIKEIEEKYGFKVIYSDTDGFFATIPGADAETVKKKAMEFLKYINAKLPGALELEYEGFYKRGFFVTKKKYAVIDEEGKITTRGLEIVRRDWSEIAKETQARVLEALLKDGDVEKAVRIVKEVTEKLSKYEVPPEKLVIHEQITRDLKDYKATGPHVAVAKRLAARGVKIRPGTVISYIVLKGSGRIGDRAIPFDEFDPTKHKYDAEYYIENQVLPAVERILRAFGYRKEDLRYQKTRQVGLSAWLKPKGT

SEQ ID NO: 588 - protein, 774 aa, synthetic construct
MILDTDYITEDGKPVIRIFKKENGEFKIEYDRTFEPYFYALLKDDSAIEEVKKITAERHGTVVTVKRVEKVQKKFLGRPVEVWKLYFTHPQDVPAIRDKIREHPAVIDIYEYDIPFAKRYLIDKGLVPMEGDEELKMLAFDIETLYHEGEEFAEGPILMISYADEEGARVITWKNVDLPYVDVVSTEREMIKRFLRVVKEKDPDVLITYNGDNFDFAYLKKRCEKLGINFALGRDGSEPKIQRMGDRFAVEVKGRIHFDLYPVIRRTINLPTYTLEAVYEAVFGQPKELVYAEEITTAWETGENLERVARYSMEDAKVTYELGKEFLPMEAQLSRLIGQSLWDVSRSSTGNLVEWFLLRKAYERNELAPNKPDEKELARRRQSYEGGYVKEPERGLWENIVYLDFRSLYPSIIITHNVSPDTLNREGCKEYDVAPQVGHRFCKDFPGFIPSLLGDLLEERQKIKKKMKATIDPIERKLLDYRQRAIKILANSYYGYYGYARARWYCKECAESVTAWGREYITMTIKEIEEKYGFKVIYSDTDGFFATIPGADAETVKKKAMEFLKYINAKLPGALELEYEGFYKRGFFVTKKKYAVIDEEGKITTRGLEIVRRDWSEIAKETQARVLEALLKDGDVEKAVRIVKEVTEKLSKYEVPPEKLVIHEQITRDLKDYKATGPHVAVAKRLAARGVKIRPGTVISYIVLKGSGRIGDRAIPFDEFDPTKHKYDAEYYIENQVLPAVERILRAFGYRKEDLRYQKTRQVGLSAWLKPKGT

SEQ ID NO: 589 - protein, 774 aa, synthetic construct
MILDTDYITEDGKPVIRIFKKENGEFKIEYDRTFEPYFYALLKDDSAIEEVKKITAERHGTVVTVKRVEKVQKKFLGRPVEVWKLYFTHPQDVPAIRDKIREHPAVIDIYEYDIPFAKRYLIDKGLVPMEGDEELKMLAFDIETLYHEGEEFAEGPILMISYADEEGARVITWKNVDLPYVDVVSTEREMIKRFLRVVKEKDPDVLITYNGDNFDFAYLKKRCEKLGINFALGRDGSEPKIQRMGDRFAVEVKGRIHFDLYPVIRRTINLPTYTLEAVYEAVFGQPKEMVYAEEITTAWETGENLERVARYSMEDAKVTYELGKEFLPMEAQLSRLIGQSLWDVSRSSTGNLVEWFLLRKAYERNELAPNKPDEKELARRRQSYEGGYVKEPERGLWENIVYLDFRSLYPSIIITHNVSPDTLNREGCKEYDVAPQVGHRFCKDFPGFIPSLLGDLLEERQKIKKKMKATIDPIERKLLDYRQRAIKILANSYYGYYGYARARWYCKECAESVTAWGREYITMTIKEIEEKYGFKVIYSDTDGFFATIPGADAETVKKKAMEFLKYINAKLPGALELEYEGFYKRGFFVTKKKYAVIDEEGKITTRGLEIVRRDWSEIAKETQARVLEALLKDGDVEKAVRIVKEVTEKLSKYEVPPEKLVIHEQITRDLKDYKATGPHVAVAKRLAARGVKIRPGTVISYIVLKGSGRIGDRAIPFDEFDPTKHKYDAEYYIENQVLPAVERILRAFGYRKEDLRYQKTRQVGLSAWLKPKGT

SEQ ID NO: 590 - protein, 774 aa, synthetic construct
MILDTDYITEDGKPVIRIFKKENGEFKIEYDRTFEPYFYALLKDDSAIEEVKKITAERHGTVVTVKRVEKVQKKFLGRPVEVWKLYFTHPQDVPAIRDKIREHPAVIDIYEYDIPFAKRYLIDKGLVPMEGDEELKMLAFDIETLYHEGEEFAEGPILMISYADEEGARVITWKNVDLPYVDVVSTEREMIKRFLRVVKEKDPDVLITYNGDNFDFAYLKKRCEKLGINFALGRDGSEPKIQRMGDRFAVEVKGRIHFDLYPVIRRTINLPTYTLEAVYEAVFGQPKEPVYAEEITTAWETGENLERVARYSMEDAKVTYELGKEFLPMEAQLSRLIGQSLWDVSRSSTGNLVEWFLLRKAYERNELAPNKPDEKELARRRQSYEGGYVKEPERGLWENIVYLDFRSLYPSIIITHNVSPDTLNREGCKEYDVAPQVGHRFCKDFPGFIPSLLGDLLEERQKIKKKMKATIDPIERKLLDYRQRAIKILANSYYGYYGYARARWYCKECAESVTAWGREYITMTIKEIEEKYGFKVIYSDTDGFFATIPGADAETVKKKAMEFLKYINAKLPGALELEYEGFYKRGFFVTKKKYAVIDEEGKITTRGLEIVRRDWSEIAKETQARVLEALLKDGDVEKAVRIVKEVTEKLSKYEVPPEKLVIHEQITRDLKDYKATGPHVAVAKRLAARGVKIRPGTVISYIVLKGSGRIGDRAIPFDEFDPTKHKYDAEYYIENQVLPAVERILRAFGYRKEDLRYQKTRQVGLSAWLKPKGT

SEQ ID NO: 591 - protein, 774 aa, synthetic construct
MILDTDYITEDGKPVIRIFKKENGEFKIEYDRTFEPYFYALLKDDSAIEEVKKITAERHGTVVTVKRVEKVQKKFLGRPVEVWKLYFTHPQDVPAIRDKIREHPAVIDIYEYDIPFAKRYLIDKGLVPMEGDEELKMLAFDIETLYHEGEEFAEGPILMISYADEEGARVITWKNVDLPYVDVVSTEREMIKRFLRVVKEKDPDVLITYNGDNFDFAYLKKRCEKLGINFALGRDGSEPKIQRMGDRFAVEVKGRIHFDLYPVIRRTINLPTYTLEAVYEAVFGQPKEQVYAEEITTAWETGENLERVARYSMEDAKVTYELGKEFLPMEAQLSRLIGQSLWDVSRSSTGNLVEWFLLRKAYERNELAPNKPDEKELARRRQSYEGGYVKEPERGLWENIVYLDFRSLYPSIIITHNVSPDTLNREGCKEYDVAPQVGHRFCKDFPGFIPSLLGDLLEERQKIKKKMKATIDPIERKLLDYRQRAIKILANSYYGYYGYARARWYCKECAESVTAWGREYITMTIKEIEEKYGFKVIYSDTDGFFATIPGADAETVKKKAMEFLKYINAKLPGALELEYEGFYKRGFFVTKKKYAVIDEEGKITTRGLEIVRRDWSEIAKETQARVLEALLKDGDVEKAVRIVKEVTEKLSKYEVPPEKLVIHEQITRDLKDYKATGPHVAVAKRLAARGVKIRPGTVISYIVLKGSGRIGDRAIPFDEFDPTKHKYDAEYYIENQVLPAVERILRAFGYRKEDLRYQKTRQVGLSAWLKPKGT

SEQ ID NO: 592 - protein, 774 aa, synthetic construct
MILDTDYITEDGKPVIRIFKKENGEFKIEYDRTFEPYFYALLKDDSAIEEVKKITAERHGTVVTVKRVEKVQKKFLGRPVEVWKLYFTHPQDVPAIRDKIREHPAVIDIYEYDIPFAKRYLIDKGLVPMEGDEELKMLAFDIETLYHEGEEFAEGPILMISYADEEGARVITWKNVDLPYVDVVSTEREMIKRFLRVVKEKDPDVLITYNGDNFDFAYLKKRCEKLGINFALGRDGSEPKIQRMGDRFAVEVKGRIHFDLYPVIRRTINLPTYTLEAVYEAVFGQPKERVYAEEITTAWETGENLERVARYSMEDAKVTYELGKEFLPMEAQLSRLIGQSLWDVSRSSTGNLVEWFLLRKAYERNELAPNKPDEKELARRRQSYEGGYVKEPERGLWENIVYLDFRSLYPSIIITHNVSPDTLNREGCKEYDVAPQVGHRFCKDFPGFIPSLLGDLLEERQKIKKKMKATIDPIERKLLDYRQRAIKILANSYYGYYGYARARWYCKECAESVTAWGREYITMTIKEIEEKYGFKVIYSDTDGFFATIPGADAETVKKKAMEFLKYINAKLPGALELEYEGFYKRGFFVTKKKYAVIDEEGKITTRGLEIVRRDWSEIAKETQARVLEALLKDGDVEKAVRIVKEVTEKLSKYEVPPEKLVIHEQITRDLKDYKATGPHVAVAKRLAARGVKIRPGTVISYIVLKGSGRIGDRAIPFDEFDPTKHKYDAEYYIENQVLPAVERILRAFGYRKEDLRYQKTRQVGLSAWLKPKGT

SEQ ID NO: 593 - protein, 774 aa, synthetic construct
MILDTDYITEDGKPVIRIFKKENGEFKIEYDRTFEPYFYALLKDDSAIEEVKKITAERHGTVVTVKRVEKVQKKFLGRPVEVWKLYFTHPQDVPAIRDKIREHPAVIDIYEYDIPFAKRYLIDKGLVPMEGDEELKMLAFDIETLYHEGEEFAEGPILMISYADEEGARVITWKNVDLPYVDVVSTEREMIKRFLRVVKEKDPDVLITYNGDNFDFAYLKKRCEKLGINFALGRDGSEPKIQRMGDRFAVEVKGRIHFDLYPVIRRTINLPTYTLEAVYEAVFGQPKESVYAEEITTAWETGENLERVARYSMEDAKVTYELGKEFLPMEAQLSRLIGQSLWDVSRSSTGNLVEWFLLRKAYERNELAPNKPDEKELARRRQSYEGGYVKEPERGLWENIVYLDFRSLYPSIIITHNVSPDTLNREGCKEYDVAPQVGHRFCKDFPGFIPSLLGDLLEERQKIKKKMKATIDPIERKLLDYRQRAIKILANSYYGYYGYARARWYCKECAESVTAWGREYITMTIKEIEEKYGFKVIYSDTDGFFATIPGADAETVKKKAMEFLKYINAKLPGALELEYEGFYKRGFFVTKKKYAVIDEEGKITTRGLEIVRRDWSEIAKETQARVLEALLKDGDVEKAVRIVKEVTEKLSKYEVPPEKLVIHEQITRDLKDYKATGPHVAVAKRLAARGVKIRPGTVISYIVLKGSGRIGDRAIPFDEFDPTKHKYDAEYYIENQVLPAVERILRAFGYRKEDLRYQKTRQVGLSAWLKPKGT

SEQ ID NO: 594 - protein, 774 aa, synthetic construct
MILDTDYITEDGKPVIRIFKKENGEFKIEYDRTFEPYFYALLKDDSAIEEVKKITAERHGTVVTVKRVEKVQKKFLGRPVEVWKLYFTHPQDVPAIRDKIREHPAVIDIYEYDIPFAKRYLIDKGLVPMEGDEELKMLAFDIETLYHEGEEFAEGPILMISYADEEGARVITWKNVDLPYVDVVSTEREMIKRFLRVVKEKDPDVLITYNGDNFDFAYLKKRCEKLGINFALGRDGSEPKIQRMGDRFAVEVKGRIHFDLYPVIRRTINLPTYTLEAVYEAVFGQPKETVYAEEITTAWETGENLERVARYSMEDAKVTYELGKEFLPMEAQLSRLIGQSLWDVSRSSTGNLVEWFLLRKAYERNELAPNKPDEKELARRRQSYEGGYVKEPERGLWENIVYLDFRSLYPSIIITHNVSPDTLNREGCKEYDVAPQVGHRFCKDFPGFIPSLLGDLLEERQKIKKKMKATIDPIERKLLDYRQRAIKILANSYYGYYGYARARWYCKECAESVTAWGREYITMTIKEIEEKYGFKVIYSDTDGFFATIPGADAETVKKKAMEFLKYINAKLPGALELEYEGFYKRGFFVTKKKYAVIDEEGKITTRGLEIVRRDWSEIAKETQARVLEALLKDGDVEKAVRIVKEVTEKLSKYEVPPEKLVIHEQITRDLKDYKATGPHVAVAKRLAARGVKIRPGTVISYIVLKGSGRIGDRAIPFDEFDPTKHKYDAEYYIENQVLPAVERILRAFGYRKEDLRYQKTRQVGLSAWLKPKGT

SEQ ID NO: 595 - protein, 774 aa, synthetic construct
MILDTDYITEDGKPVIRIFKKENGEFKIEYDRTFEPYFYALLKDDSAIEEVKKITAERHGTVVTVKRVEKVQKKFLGRPVEVWKLYFTHPQDVPAIRDKIREHPAVIDIYEYDIPFAKRYLIDKGLVPMEGDEELKMLAFDIETLYHEGEEFAEGPILMISYADEEGARVITWKNVDLPYVDVVSTEREMIKRFLRVVKEKDPDVLITYNGDNFDFAYLKKRCEKLGINFALGRDGSEPKIQRMGDRFAVEVKGRIHFDLYPVIRRTINLPTYTLEAVYEAVFGQPKEVVYAEEITTAWETGENLERVARYSMEDAKVTYELGKEFLPMEAQLSRLIGQSLWDVSRSSTGNLVEWFLLRKAYERNELAPNKPDEKELARRRQSYEGGYVKEPERGLWENIVYLDFRSLYPSIIITHNVSPDTLNREGCKEYDVAPQVGHRFCKDFPGFIPSLLGDLLEERQKIKKKMKATIDPIERKLLDYRQRAIKILANSYYGYYGYARARWYCKECAESVTAWGREYITMTIKEIEEKYGFKVIYSDTDGFFATIPGADAETVKKKAMEFLKYINAKLPGALELEYEGFYKRGFFVTKKKYAVIDEEGKITTRGLEIVRRDWSEIAKETQARVLEALLKDGDVEKAVRIVKEVTEKLSKYEVPPEKLVIHEQITRDLKDYKATGPHVAVAKRLAARGVKIRPGTVISYIVLKGSGRIGDRAIPFDEFDPTKHKYDAEYYIENQVLPAVERILRAFGYRKEDLRYQKTRQVGLSAWLKPKGT

SEQ ID NO: 596 - protein, 774 aa, synthetic construct
MILDTDYITEDGKPVIRIFKKENGEFKIEYDRTFEPYFYALLKDDSAIEEVKKITAERHGTVVTVKRVEKVQKKFLGRPVEVWKLYFTHPQDVPAIRDKIREHPAVIDIYEYDIPFAKRYLIDKGLVPMEGDEELKMLAFDIETLYHEGEEFAEGPILMISYADEEGARVITWKNVDLPYVDVVSTEREMIKRFLRVVKEKDPDVLITYNGDNFDFAYLKKRCEKLGINFALGRDGSEPKIQRMGDRFAVEVKGRIHFDLYPVIRRTINLPTYTLEAVYEAVFGQPKEWVYAEEITTAWETGENLERVARYSMEDAKVTYELGKEFLPMEAQLSRLIGQSLWDVSRSSTGNLVEWFLLRKAYERNELAPNKPDEKELARRRQSYEGGYVKEPERGLWENIVYLDFRSLYPSIIITHNVSPDTLNREGCKEYDVAPQVGHRFCKDFPGFIPSLLGDLLEERQKIKKKMKATIDPIERKLLDYRQRAIKILANSYYGYYGYARARWYCKECAESVTAWGREYITMTIKEIEEKYGFKVIYSDTDGFFATIPGADAETVKKKAMEFLKYINAKLPGALELEYEGFYKRGFFVTKKKYAVIDEEGKITTRGLEIVRRDWSEIAKETQARVLEALLKDGDVEKAVRIVKEVTEKLSKYEVPPEKLVIHEQITRDLKDYKATGPHVAVAKRLAARGVKIRPGTVISYIVLKGSGRIGDRAIPFDEFDPTKHKYDAEYYIENQVLPAVERILRAFGYRKEDLRYQKTRQVGLSAWLKPKGT

SEQ ID NO: 597 - protein, 774 aa, synthetic construct
MILDTDYITEDGKPVIRIFKKENGEFKIEYDRTFEPYFYALLKDDSAIEEVKKITAERHGTVVTVKRVEKVQKKFLGRPVEVWKLYFTHPQDVPAIRDKIREHPAVIDIYEYDIPFAKRYLIDKGLVPMEGDEELKMLAFDIETLYHEGEEFAEGPILMISYADEEGARVITWKNVDLPYVDVVSTEREMIKRFLRVVKEKDPDVLITYNGDNFDFAYLKKRCEKLGINFALGRDGSEPKIQRMGDRFAVEVKGRIHFDLYPVIRRTINLPTYTLEAVYEAVFGQPKEYVYAEEITTAWETGENLERVARYSMEDAKVTYELGKEFLPMEAQLSRLIGQSLWDVSRSSTGNLVEWFLLRKAYERNELAPNKPDEKELARRRQSYEGGYVKEPERGLWENIVYLDFRSLYPSIIITHNVSPDTLNREGCKEYDVAPQVGHRFCKDFPGFIPSLLGDLLEERQKIKKKMKATIDPIERKLLDYRQRAIKILANSYYGYYGYARARWYCKECAESVTAWGREYITMTIKEIEEKYGFKVIYSDTDGFFATIPGADAETVKKKAMEFLKYINAKLPGALELEYEGFYKRGFFVTKKKYAVIDEEGKITTRGLEIVRRDWSEIAKETQARVLEALLKDGDVEKAVRIVKEVTEKLSKYEVPPEKLVIHEQITRDLKDYKATGPHVAVAKRLAARGVKIRPGTVISYIVLKGSGRIGDRAIPFDEFDPTKHKYDAEYYIENQVLPAVERILRAFGYRKEDLRYQKTRQVGLSAWLKPKGT

SEQ ID NO: 598 - protein, 774 aa, synthetic construct
MILDTDYITEDGKPVIRIFKKENGEFKIEYDRTFEPYFYALLKDDSAIEEVKKITAERHGTVVTVKRVEKVQKKFLGRPVEVWKLYFTHPQDVPAIRDKIREHPAVIDIYEYDIPFAKRYLIDKGLVPMEGDEELKMLAFDIETLYHEGEEFAEGPILMISYADEEGARVITWKNVDLPYVDVVSTEREMIKRFLRVVKEKDPDVLITYNGDNFDFAYLKKRCEKLGINFALGRDGSEPKIQRMGDRFAVEVKGRIHFDLYPVIRRTINLPTYTLEAVYEAVFGQPKEKAYAEEITTAWETGENLERVARYSMEDAKVTYELGKEFLPMEAQLSRLIGQSLWDVSRSSTGNLVEWFLLRKAYERNELAPNKPDEKELARRRQSYEGGYVKEPERGLWENIVYLDFRSLYPSIIITHNVSPDTLNREGCKEYDVAPQVGHRFCKDFPGFIPSLLGDLLEERQKIKKKMKATIDPIERKLLDYRQRAIKILANSYYGYYGYARARWYCKECAESVTAWGREYITMTIKEIEEKYGFKVIYSDTDGFFATIPGADAETVKKKAMEFLKYINAKLPGALELEYEGFYKRGFFVTKKKYAVIDEEGKITTRGLEIVRRDWSEIAKETQARVLEALLKDGDVEKAVRIVKEVTEKLSKYEVPPEKLVIHEQITRDLKDYKATGPHVAVAKRLAARGVKIRPGTVISYIVLKGSGRIGDRAIPFDEFDPTKHKYDAEYYIENQVLPAVERILRAFGYRKEDLRYQKTRQVGLSAWLKPKGT

SEQ ID NO: 599 - protein, 774 aa, synthetic construct
MILDTDYITEDGKPVIRIFKKENGEFKIEYDRTFEPYFYALLKDDSAIEEVKKITAERHGTVVTVKRVEKVQKKFLGRPVEVWKLYFTHPQDVPAIRDKIREHPAVIDIYEYDIPFAKRYLIDKGLVPMEGDEELKMLAFDIETLYHEGEEFAEGPILMISYADEEGARVITWKNVDLPYVDVVSTEREMIKRFLRVVKEKDPDVLITYNGDNFDFAYLKKRCEKLGINFALGRDGSEPKIQRMGDRFAVEVKGRIHFDLYPVIRRTINLPTYTLEAVYEAVFGQPKEKDYAEEITTAWETGENLERVARYSMEDAKVTYELGKEFLPMEAQLSRLIGQSLWDVSRSSTGNLVEWFLLRKAYERNELAPNKPDEKELARRRQSYEGGYVKEPERGLWENIVYLDFRSLYPSIIITHNVSPDTLNREGCKEYDVAPQVGHRFCKDFPGFIPSLLGDLLEERQKIKKKMKATIDPIERKLLDYRQRAIKILANSYYGYYGYARARWYCKECAESVTAWGREYITMTIKEIEEKYGFKVIYSDTDGFFATIPGADAETVKKKAMEFLKYINAKLPGALELEYEGFYKRGFFVTKKKYAVIDEEGKITTRGLEIVRRDWSEIAKETQARVLEALLKDGDVEKAVRIVKEVTEKLSKYEVPPEKLVIHEQITRDLKDYKATGPHVAVAKRLAARGVKIRPGTVISYIVLKGSGRIGDRAIPFDEFDPTKHKYDAEYYIENQVLPAVERILRAFGYRKEDLRYQKTRQVGLSAWLKPKGT

SEQ ID NO: 600 - protein, 774 aa, synthetic construct
MILDTDYITEDGKPVIRIFKKENGEFKIEYDRTFEPYFYALLKDDSAIEEVKKITAERHGTVVTVKRVEKVQKKFLGRPVEVWKLYFTHPQDVPAIRDKIREHPAVIDIYEYDIPFAKRYLIDKGLVPMEGDEELKMLAFDIETLYHEGEEFAEGPILMISYADEEGARVITWKNVDLPYVDVVSTEREMIKRFLRVVKEKDPDVLITYNGDNFDFAYLKKRCEKLGINFALGRDGSEPKIQRMGDRFAVEVKGRIHFDLYPVIRRTINLPTYTLEAVYEAVFGQPKEKEYAEEITTAWETGENLERVARYSMEDAKVTYELGKEFLPMEAQLSRLIGQSLWDVSRSSTGNLVEWFLLRKAYERNELAPNKPDEKELARRRQSYEGGYVKEPERGLWENIVYLDFRSLYPSIIITHNVSPDTLNREGCKEYDVAPQVGHRFCKDFPGFIPSLLGDLLEERQKIKKKMKATIDPIERKLLDYRQRAIKILANSYYGYYGYARARWYCKECAESVTAWGREYITMTIKEIEEKYGFKVIYSDTDGFFATIPGADAETVKKKAMEFLKYINAKLPGALELEYEGFYKRGFFVTKKKYAVIDEEGKITTRGLEIVRRDWSEIAKETQARVLEALLKDGDVEKAVRIVKEVTEKLSKYEVPPEKLVIHEQITRDLKDYKATGPHVAVAKRLAARGVKIRPGTVISYIVLKGSGRIGDRAIPFDEFDPTKHKYDAEYYIENQVLPAVERILRAFGYRKEDLRYQKTRQVGLSAWLKPKGT

SEQ ID NO: 601 - protein, 774 aa, synthetic construct
MILDTDYITEDGKPVIRIFKKENGEFKIEYDRTFEPYFYALLKDDSAIEEVKKITAERHGTVVTVKRVEKVQKKFLGRPVEVWKLYFTHPQDVPAIRDKIREHPAVIDIYEYDIPFAKRYLIDKGLVPMEGDEELKMLAFDIETLYHEGEEFAEGPILMISYADEEGARVITWKNVDLPYVDVVSTEREMIKRFLRVVKEKDPDVLITYNGDNFDFAYLKKRCEKLGINFALGRDGSEPKIQRMGDRFAVEVKGRIHFDLYPVIRRTINLPTYTLEAVYEAVFGQPKEKGYAEEITTAWETGENLERVARYSMEDAKVTYELGKEFLPMEAQLSRLIGQSLWDVSRSSTGNLVEWFLLRKAYERNELAPNKPDEKELARRRQSYEGGYVKEPERGLWENIVYLDFRSLYPSIIITHNVSPDTLNREGCKEYDVAPQVGHRFCKDFPGFIPSLLGDLLEERQKIKKKMKATIDPIERKLLDYRQRAIKILANSYYGYYGYARARWYCKECAESVTAWGREYITMTIKEIEEKYGFKVIYSDTDGFFATIPGADAETVKKKAMEFLKYINAKLPGALELEYEGFYKRGFFVTKKKYAVIDEEGKITTRGLEIVRRDWSEIAKETQARVLEALLKDGDVEKAVRIVKEVTEKLSKYEVPPEKLVIHEQITRDLKDYKATGPHVAVAKRLAARGVKIRPGTVISYIVLKGSGRIGDRAIPFDEFDPTKHKYDAEYYIENQVLPAVERILRAFGYRKEDLRYQKTRQVGLSAWLKPKGT

SEQ ID NO: 602 - protein, 774 aa, synthetic construct
MILDTDYITEDGKPVIRIFKKENGEFKIEYDRTFEPYFYALLKDDSAIEEVKKITAERHGTVVTVKRVEKVQKKFLGRPVEVWKLYFTHPQDVPAIRDKIREHPAVIDIYEYDIPFAKRYLIDKGLVPMEGDEELKMLAFDIETLYHEGEEFAEGPILMISYADEEGARVITWKNVDLPYVDVVSTEREMIKRFLRVVKEKDPDVLITYNGDNFDFAYLKKRCEKLGINFALGRDGSEPKIQRMGDRFAVEVKGRIHFDLYPVIRRTINLPTYTLEAVYEAVFGQPKEKHYAEEITTAWETGENLERVARYSMEDAKVTYELGKEFLPMEAQLSRLIGQSLWDVSRSSTGNLVEWFLLRKAYERNELAPNKPDEKELARRRQSYEGGYVKEPERGLWENIVYLDFRSLYPSIIITHNVSPDTLNREGCKEYDVAPQVGHRFCKDFPGFIPSLLGDLLEERQKIKKKMKATIDPIERKLLDYRQRAIKILANSYYGYYGYARARWYCKECAESVTAWGREYITMTIKEIEEKYGFKVIYSDTDGFFATIPGADAETVKKKAMEFLKYINAKLPGALELEYEGFYKRGFFVTKKKYAVIDEEGKITTRGLEIVRRDWSEIAKETQARVLEALLKDGDVEKAVRIVKEVTEKLSKYEVPPEKLVIHEQITRDLKDYKATGPHVAVAKRLAARGVKIRPGTVISYIVLKGSGRIGDRAIPFDEFDPTKHKYDAEYYIENQVLPAVERILRAFGYRKEDLRYQKTRQVGLSAWLKPKGT

SEQ ID NO: 603 - protein, 774 aa, synthetic construct
MILDTDYITEDGKPVIRIFKKENGEFKIEYDRTFEPYFYALLKDDSAIEEVKKITAERHGTVVTVKRVEKVQKKFLGRPVEVWKLYFTHPQDVPAIRDKIREHPAVIDIYEYDIPFAKRYLIDKGLVPMEGDEELKMLAFDIETLYHEGEEFAEGPILMISYADEEGARVITWKNVDLPYVDVVSTEREMIKRFLRVVKEKDPDVLITYNGDNFDFAYLKKRCEKLGINFALGRDGSEPKIQRMGDRFAVEVKGRIHFDLYPVIRRTINLPTYTLEAVYEAVFGQPKEKKYAEEITTAWETGENLERVARYSMEDAKVTYELGKEFLPMEAQLSRLIGQSLWDVSRSSTGNLVEWFLLRKAYERNELAPNKPDEKELARRRQSYEGGYVKEPERGLWENIVYLDFRSLYPSIIITHNVSPDTLNREGCKEYDVAPQVGHRFCKDFPGFIPSLLGDLLEERQKIKKKMKATIDPIERKLLDYRQRAIKILANSYYGYYGYARARWYCKECAESVTAWGREYITMTIKEIEEKYGFKVIYSDTDGFFATIPGADAETVKKKAMEFLKYINAKLPGALELEYEGFYKRGFFVTKKKYAVIDEEGKITTRGLEIVRRDWSEIAKETQARVLEALLKDGDVEKAVRIVKEVTEKLSKYEVPPEKLVIHEQITRDLKDYKATGPHVAVAKRLAARGVKIRPGTVISYIVLKGSGRIGDRAIPFDEFDPTKHKYDAEYYIENQVLPAVERILRAFGYRKEDLRYQKTRQVGLSAWLKPKGT

SEQ ID NO: 604 - protein, 774 aa, synthetic construct
MILDTDYITEDGKPVIRIFKKENGEFKIEYDRTFEPYFYALLKDDSAIEEVKKITAERHGTVVTVKRVEKVQKKFLGRPVEVWKLYFTHPQDVPAIRDKIREHPAVIDIYEYDIPFAKRYLIDKGLVPMEGDEELKMLAFDIETLYHEGEEFAEGPILMISYADEEGARVITWKNVDLPYVDVVSTEREMIKRFLRVVKEKDPDVLITYNGDNFDFAYLKKRCEKLGINFALGRDGSEPKIQRMGDRFAVEVKGRIHFDLYPVIRRTINLPTYTLEAVYEAVFGQPKEKNYAEEITTAWETGENLERVARYSMEDAKVTYELGKEFLPMEAQLSRLIGQSLWDVSRSSTGNLVEWFLLRKAYERNELAPNKPDEKELARRRQSYEGGYVKEPERGLWENIVYLDFRSLYPSIIITHNVSPDTLNREGCKEYDVAPQVGHRFCKDFPGFIPSLLGDLLEERQKIKKKMKATIDPIERKLLDYRQRAIKILANSYYGYYGYARARWYCKECAESVTAWGREYITMTIKEIEEKYGFKVIYSDTDGFFATIPGADAETVKKKAMEFLKYINAKLPGALELEYEGFYKRGFFVTKKKYAVIDEEGKITTRGLEIVRRDWSEIAKETQARVLEALLKDGDVEKAVRIVKEVTEKLSKYEVPPEKLVIHEQITRDLKDYKATGPHVAVAKRLAARGVKIRPGTVISYIVLKGSGRIGDRAIPFDEFDPTKHKYDAEYYIENQVLPAVERILRAFGYRKEDLRYQKTRQVGLSAWLKPKGT

SEQ ID NO: 605 - protein, 774 aa, synthetic construct
MILDTDYITEDGKPVIRIFKKENGEFKIEYDRTFEPYFYALLKDDSAIEEVKKITAERHGTVVTVKRVEKVQKKFLGRPVEVWKLYFTHPQDVPAIRDKIREHPAVIDIYEYDIPFAKRYLIDKGLVPMEGDEELKMLAFDIETLYHEGEEFAEGPILMISYADEEGARVITWKNVDLPYVDVVSTEREMIKRFLRVVKEKDPDVLITYNGDNFDFAYLKKRCEKLGINFALGRDGSEPKIQRMGDRFAVEVKGRIHFDLYPVIRRTINLPTYTLEAVYEAVFGQPKEKPYAEEITTAWETGENLERVARYSMEDAKVTYELGKEFLPMEAQLSRLIGQSLWDVSRSSTGNLVEWFLLRKAYERNELAPNKPDEKELARRRQSYEGGYVKEPERGLWENIVYLDFRSLYPSIIITHNVSPDTLNREGCKEYDVAPQVGHRFCKDFPGFIPSLLGDLLEERQKIKKKMKATIDPIERKLLDYRQRAIKILANSYYGYYGYARARWYCKECAESVTAWGREYITMTIKEIEEKYGFKVIYSDTDGFFATIPGADAETVKKKAMEFLKYINAKLPGALELEYEGFYKRGFFVTKKKYAVIDEEGKITTRGLEIVRRDWSEIAKETQARVLEALLKDGDVEKAVRIVKEVTEKLSKYEVPPEKLVIHEQITRDLKDYKATGPHVAVAKRLAARGVKIRPGTVISYIVLKGSGRIGDRAIPFDEFDPTKHKYDAEYYIENQVLPAVERILRAFGYRKEDLRYQKTRQVGLSAWLKPKGT

SEQ ID NO: 606 - protein, 774 aa, synthetic construct
MILDTDYITEDGKPVIRIFKKENGEFKIEYDRTFEPYFYALLKDDSAIEEVKKITAERHGTVVTVKRVEKVQKKFLGRPVEVWKLYFTHPQDVPAIRDKIREHPAVIDIYEYDIPFAKRYLIDKGLVPMEGDEELKMLAFDIETLYHEGEEFAEGPILMISYADEEGARVITWKNVDLPYVDVVSTEREMIKRFLRVVKEKDPDVLITYNGDNFDFAYLKKRCEKLGINFALGRDGSEPKIQRMGDRFAVEVKGRIHFDLYPVIRRTINLPTYTLEAVYEAVFGQPKEKQYAEEITTAWETGENLERVARYSMEDAKVTYELGKEFLPMEAQLSRLIGQSLWDVSRSSTGNLVEWFLLRKAYERNELAPNKPDEKELARRRQSYEGGYVKEPERGLWENIVYLDFRSLYPSIIITHNVSPDTLNREGCKEYDVAPQVGHRFCKDFPGFIPSLLGDLLEERQKIKKKMKATIDPIERKLLDYRQRAIKILANSYYGYYGYARARWYCKECAESVTAWGREYITMTIKEIEEKYGFKVIYSDTDGFFATIPGADAETVKKKAMEFLKYINAKLPGALELEYEGFYKRGFFVTKKKYAVIDEEGKITTRGLEIVRRDWSEIAKETQARVLEALLKDGDVEKAVRIVKEVTEKLSKYEVPPEKLVIHEQITRDLKDYKATGPHVAVAKRLAARGVKIRPGTVISYIVLKGSGRIGDRAIPFDEFDPTKHKYDAEYYIENQVLPAVERILRAFGYRKEDLRYQKTRQVGLSAWLKPKGT

SEQ ID NO: 607 - protein, 774 aa, synthetic construct
MILDTDYITEDGKPVIRIFKKENGEFKIEYDRTFEPYFYALLKDDSAIEEVKKITAERHGTVVTVKRVEKVQKKFLGRPVEVWKLYFTHPQDVPAIRDKIREHPAVIDIYEYDIPFAKRYLIDKGLVPMEGDEELKMLAFDIETLYHEGEEFAEGPILMISYADEEGARVITWKNVDLPYVDVVSTEREMIKRFLRVVKEKDPDVLITYNGDNFDFAYLKKRCEKLGINFALGRDGSEPKIQRMGDRFAVEVKGRIHFDLYPVIRRTINLPTYTLEAVYEAVFGQPKEKRYAEEITTAWETGENLERVARYSMEDAKVTYELGKEFLPMEAQLSRLIGQSLWDVSRSSTGNLVEWFLLRKAYERNELAPNKPDEKELARRRQSYEGGYVKEPERGLWENIVYLDFRSLYPSIIITHNVSPDTLNREGCKEYDVAPQVGHRFCKDFPGFIPSLLGDLLEERQKIKKKMKATIDPIERKLLDYRQRAIKILANSYYGYYGYARARWYCKECAESVTAWGREYITMTIKEIEEKYGFKVIYSDTDGFFATIPGADAETVKKKAMEFLKYINAKLPGALELEYEGFYKRGFFVTKKKYAVIDEEGKITTRGLEIVRRDWSEIAKETQARVLEALLKDGDVEKAVRIVKEVTEKLSKYEVPPEKLVIHEQITRDLKDYKATGPHVAVAKRLAARGVKIRPGTVISYIVLKGSGRIGDRAIPFDEFDPTKHKYDAEYYIENQVLPAVERILRAFGYRKEDLRYQKTRQVGLSAWLKPKGT

SEQ ID NO: 608 - protein, 774 aa, synthetic construct
MILDTDYITEDGKPVIRIFKKENGEFKIEYDRTFEPYFYALLKDDSAIEEVKKITAERHGTVVTVKRVEKVQKKFLGRPVEVWKLYFTHPQDVPAIRDKIREHPAVIDIYEYDIPFAKRYLIDKGLVPMEGDEELKMLAFDIETLYHEGEEFAEGPILMISYADEEGARVITWKNVDLPYVDVVSTEREMIKRFLRVVKEKDPDVLITYNGDNFDFAYLKKRCEKLGINFALGRDGSEPKIQRMGDRFAVEVKGRIHFDLYPVIRRTINLPTYTLEAVYEAVFGQPKEKSYAEEITTAWETGENLERVARYSMEDAKVTYELGKEFLPMEAQLSRLIGQSLWDVSRSSTGNLVEWFLLRKAYERNELAPNKPDEKELARRRQSYEGGYVKEPERGLWENIVYLDFRSLYPSIIITHNVSPDTLNREGCKEYDVAPQVGHRFCKDFPGFIPSLLGDLLEERQKIKKKMKATIDPIERKLLDYRQRAIKILANSYYGYYGYARARWYCKECAESVTAWGREYITMTIKEIEEKYGFKVIYSDTDGFFATIPGADAETVKKKAMEFLKYINAKLPGALELEYEGFYKRGFFVTKKKYAVIDEEGKITTRGLEIVRRDWSEIAKETQARVLEALLKDGDVEKAVRIVKEVTEKLSKYEVPPEKLVIHEQITRDLKDYKATGPHVAVAKRLAARGVKIRPGTVISYIVLKGSGRIGDRAIPFDEFDPTKHKYDAEYYIENQVLPAVERILRAFGYRKEDLRYQKTRQVGLSAWLKPKGT

SEQ ID NO: 609 - protein, 774 aa, synthetic construct
MILDTDYITEDGKPVIRIFKKENGEFKIEYDRTFEPYFYALLKDDSAIEEVKKITAERHGTVVTVKRVEKVQKKFLGRPVEVWKLYFTHPQDVPAIRDKIREHPAVIDIYEYDIPFAKRYLIDKGLVPMEGDEELKMLAFDIETLYHEGEEFAEGPILMISYADEEGARVITWKNVDLPYVDVVSTEREMIKRFLRVVKEKDPDVLITYNGDNFDFAYLKKRCEKLGINFALGRDGSEPKIQRMGDRFAVEVKGRIHFDLYPVIRRTINLPTYTLEAVYEAVFGQPKEKTYAEEITTAWETGENLERVARYSMEDAKVTYELGKEFLPMEAQLSRLIGQSLWDVSRSSTGNLVEWFLLRKAYERNELAPNKPDEKELARRRQSYEGGYVKEPERGLWENIVYLDFRSLYPSIIITHNVSPDTLNREGCKEYDVAPQVGHRFCKDFPGFIPSLLGDLLEERQKIKKKMKATIDPIERKLLDYRQRAIKILANSYYGYYGYARARWYCKECAESVTAWGREYITMTIKEIEEKYGFKVIYSDTDGFFATIPGADAETVKKKAMEFLKYINAKLPGALELEYEGFYKRGFFVTKKKYAVIDEEGKITTRGLEIVRRDWSEIAKETQARVLEALLKDGDVEKAVRIVKEVTEKLSKYEVPPEKLVIHEQITRDLKDYKATGPHVAVAKRLAARGVKIRPGTVISYIVLKGSGRIGDRAIPFDEFDPTKHKYDAEYYIENQVLPAVERILRAFGYRKEDLRYQKTRQVGLSAWLKPKGT

SEQ ID NO: 610 - protein, 774 aa, synthetic construct
MILDTDYITEDGKPVIRIFKKENGEFKIEYDRTFEPYFYALLKDDSAIEEVKKITAERHGTVVTVKRVEKVQKKFLGRPVEVWKLYFTHPQDVPAIRDKIREHPAVIDIYEYDIPFAKRYLIDKGLVPMEGDEELKMLAFDIETLYHEGEEFAEGPILMISYADEEGARVITWKNVDLPYVDVVSTEREMIKRFLRVVKEKDPDVLITYNGDNFDFAYLKKRCEKLGINFALGRDGSEPKIQRMGDRFAVEVKGRIHFDLYPVIRRTINLPTYTLEAVYEAVFGQPKEKVYDEEITTAWETGENLERVARYSMEDAKVTYELGKEFLPMEAQLSRLIGQSLWDVSRSSTGNLVEWFLLRKAYERNELAPNKPDEKELARRRQSYEGGYVKEPERGLWENIVYLDFRSLYPSIIITHNVSPDTLNREGCKEYDVAPQVGHRFCKDFPGFIPSLLGDLLEERQKIKKKMKATIDPIERKLLDYRQRAIKILANSYYGYYGYARARWYCKECAESVTAWGREYITMTIKEIEEKYGFKVIYSDTDGFFATIPGADAETVKKKAMEFLKYINAKLPGALELEYEGFYKRGFFVTKKKYAVIDEEGKITTRGLEIVRRDWSEIAKETQARVLEALLKDGDVEKAVRIVKEVTEKLSKYEVPPEKLVIHEQITRDLKDYKATGPHVAVAKRLAARGVKIRPGTVISYIVLKGSGRIGDRAIPFDEFDPTKHKYDAEYYIENQVLPAVERILRAFGYRKEDLRYQKTRQVGLSAWLKPKGT

SEQ ID NO: 611 - protein, 774 aa, synthetic construct
MILDTDYITEDGKPVIRIFKKENGEFKIEYDRTFEPYFYALLKDDSAIEEVKKITAERHGTVVTVKRVEKVQKKFLGRPVEVWKLYFTHPQDVPAIRDKIREHPAVIDIYEYDIPFAKRYLIDKGLVPMEGDEELKMLAFDIETLYHEGEEFAEGPILMISYADEEGARVITWKNVDLPYVDVVSTEREMIKRFLRVVKEKDPDVLITYNGDNFDFAYLKKRCEKLGINFALGRDGSEPKIQRMGDRFAVEVKGRIHFDLYPVIRRTINLPTYTLEAVYEAVFGQPKEKVYEEEITTAWETGENLERVARYSMEDAKVTYELGKEFLPMEAQLSRLIGQSLWDVSRSSTGNLVEWFLLRKAYERNELAPNKPDEKELARRRQSYEGGYVKEPERGLWENIVYLDFRSLYPSIIITHNVSPDTLNREGCKEYDVAPQVGHRFCKDFPGFIPSLLGDLLEERQKIKKKMKATIDPIERKLLDYRQRAIKILANSYYGYYGYARARWYCKECAESVTAWGREYITMTIKEIEEKYGFKVIYSDTDGFFATIPGADAETVKKKAMEFLKYINAKLPGALELEYEGFYKRGFFVTKKKYAVIDEEGKITTRGLEIVRRDWSEIAKETQARVLEALLKDGDVEKAVRIVKEVTEKLSKYEVPPEKLVIHEQITRDLKDYKATGPHVAVAKRLAARGVKIRPGTVISYIVLKGSGRIGDRAIPFDEFDPTKHKYDAEYYIENQVLPAVERILRAFGYRKEDLRYQKTRQVGLSAWLKPKGT

SEQ ID NO: 612 - protein, 774 aa, synthetic construct
MILDTDYITEDGKPVIRIFKKENGEFKIEYDRTFEPYFYALLKDDSAIEEVKKITAERHGTVVTVKRVEKVQKKFLGRPVEVWKLYFTHPQDVPAIRDKIREHPAVIDIYEYDIPFAKRYLIDKGLVPMEGDEELKMLAFDIETLYHEGEEFAEGPILMISYADEEGARVITWKNVDLPYVDVVSTEREMIKRFLRVVKEKDPDVLITYNGDNFDFAYLKKRCEKLGINFALGRDGSEPKIQRMGDRFAVEVKGRIHFDLYPVIRRTINLPTYTLEAVYEAVFGQPKEKVYNEEITTAWETGENLERVARYSMEDAKVTYELGKEFLPMEAQLSRLIGQSLWDVSRSSTGNLVEWFLLRKAYERNELAPNKPDEKELARRRQSYEGGYVKEPERGLWENIVYLDFRSLYPSIIITHNVSPDTLNREGCKEYDVAPQVGHRFCKDFPGFIPSLLGDLLEERQKIKKKMKATIDPIERKLLDYRQRAIKILANSYYGYYGYARARWYCKECAESVTAWGREYITMTIKEIEEKYGFKVIYSDTDGFFATIPGADAETVKKKAMEFLKYINAKLPGALELEYEGFYKRGFFVTKKKYAVIDEEGKITTRGLEIVRRDWSEIAKETQARVLEALLKDGDVEKAVRIVKEVTEKLSKYEVPPEKLVIHEQITRDLKDYKATGPHVAVAKRLAARGVKIRPGTVISYIVLKGSGRIGDRAIPFDEFDPTKHKYDAEYYIENQVLPAVERILRAFGYRKEDLRYQKTRQVGLSAWLKPKGT

SEQ ID NO: 613 - protein, 774 aa, synthetic construct
MILDTDYITEDGKPVIRIFKKENGEFKIEYDRTFEPYFYALLKDDSAIEEVKKITAERHGTVVTVKRVEKVQKKFLGRPVEVWKLYFTHPQDVPAIRDKIREHPAVIDIYEYDIPFAKRYLIDKGLVPMEGDEELKMLAFDIETLYHEGEEFAEGPILMISYADEEGARVITWKNVDLPYVDVVSTEREMIKRFLRVVKEKDPDVLITYNGDNFDFAYLKKRCEKLGINFALGRDGSEPKIQRMGDRFAVEVKGRIHFDLYPVIRRTINLPTYTLEAVYEAVFGQPKEKVYQEEITTAWETGENLERVARYSMEDAKVTYELGKEFLPMEAQLSRLIGQSLWDVSRSSTGNLVEWFLLRKAYERNELAPNKPDEKELARRRQSYEGGYVKEPERGLWENIVYLDFRSLYPSIIITHNVSPDTLNREGCKEYDVAPQVGHRFCKDFPGFIPSLLGDLLEERQKIKKKMKATIDPIERKLLDYRQRAIKILANSYYGYYGYARARWYCKECAESVTAWGREYITMTIKEIEEKYGFKVIYSDTDGFFATIPGADAETVKKKAMEFLKYINAKLPGALELEYEGFYKRGFFVTKKKYAVIDEEGKITTRGLEIVRRDWSEIAKETQARVLEALLKDGDVEKAVRIVKEVTEKLSKYEVPPEKLVIHEQITRDLKDYKATGPHVAVAKRLAARGVKIRPGTVISYIVLKGSGRIGDRAIPFDEFDPTKHKYDAEYYIENQVLPAVERILRAFGYRKEDLRYQKTRQVGLSAWLKPKGT

SEQ ID NO: 614 - protein, 774 aa, synthetic construct
MILDTDYITEDGKPVIRIFKKENGEFKIEYDRTFEPYFYALLKDDSAIEEVKKITAERHGTVVTVKRVEKVQKKFLGRPVEVWKLYFTHPQDVPAIRDKIREHPAVIDIYEYDIPFAKRYLIDKGLVPMEGDEELKMLAFDIETLYHEGEEFAEGPILMISYADEEGARVITWKNVDLPYVDVVSTEREMIKRFLRVVKEKDPDVLITYNGDNFDFAYLKKRCEKLGINFALGRDGSEPKIQRMGDRFAVEVKGRIHFDLYPVIRRTINLPTYTLEAVYEAVFGQPKEKVYTEEITTAWETGENLERVARYSMEDAKVTYELGKEFLPMEAQLSRLIGQSLWDVSRSSTGNLVEWFLLRKAYERNELAPNKPDEKELARRRQSYEGGYVKEPERGLWENIVYLDFRSLYPSIIITHNVSPDTLNREGCKEYDVAPQVGHRFCKDFPGFIPSLLGDLLEERQKIKKKMKATIDPIERKLLDYRQRAIKILANSYYGYYGYARARWYCKECAESVTAWGREYITMTIKEIEEKYGFKVIYSDTDGFFATIPGADAETVKKKAMEFLKYINAKLPGALELEYEGFYKRGFFVTKKKYAVIDEEGKITTRGLEIVRRDWSEIAKETQARVLEALLKDGDVEKAVRIVKEVTEKLSKYEVPPEKLVIHEQITRDLKDYKATGPHVAVAKRLAARGVKIRPGTVISYIVLKGSGRIGDRAIPFDEFDPTKHKYDAEYYIENQVLPAVERILRAFGYRKEDLRYQKTRQVGLSAWLKPKGT

SEQ ID NO: 615 - protein, 774 aa, synthetic construct
MILDTDYITEDGKPVIRIFKKENGEFKIEYDRTFEPYFYALLKDDSAIEEVKKITAERHGTVVTVKRVEKVQKKFLGRPVEVWKLYFTHPQDVPAIRDKIREHPAVIDIYEYDIPFAKRYLIDKGLVPMEGDEELKMLAFDIETLYHEGEEFAEGPILMISYADEEGARVITWKNVDLPYVDVVSTEREMIKRFLRVVKEKDPDVLITYNGDNFDFAYLKKRCEKLGINFALGRDGSEPKIQRMGDRFAVEVKGRIHFDLYPVIRRTINLPTYTLEAVYEAVFGQPKEKVYAEKITTAWETGENLERVARYSMEDAKVTYELGKEFLPMEAQLSRLIGQSLWDVSRSSTGNLVEWFLLRKAYERNELAPNKPDEKELARRRQSYEGGYVKEPERGLWENIVYLDFRSLYPSIIITHNVSPDTLNREGCKEYDVAPQVGHRFCKDFPGFIPSLLGDLLEERQKIKKKMKATIDPIERKLLDYRQRAIKILANSYYGYYGYARARWYCKECAESVTAWGREYITMTIKEIEEKYGFKVIYSDTDGFFATIPGADAETVKKKAMEFLKYINAKLPGALELEYEGFYKRGFFVTKKKYAVIDEEGKITTRGLEIVRRDWSEIAKETQARVLEALLKDGDVEKAVRIVKEVTEKLSKYEVPPEKLVIHEQITRDLKDYKATGPHVAVAKRLAARGVKIRPGTVISYIVLKGSGRIGDRAIPFDEFDPTKHKYDAEYYIENQVLPAVERILRAFGYRKEDLRYQKTRQVGLSAWLKPKGT

SEQ ID NO: 616 - protein, 774 aa, synthetic construct
MILDTDYITEDGKPVIRIFKKENGEFKIEYDRTFEPYFYALLKDDSAIEEVKKITAERHGTVVTVKRVEKVQKKFLGRPVEVWKLYFTHPQDVPAIRDKIREHPAVIDIYEYDIPFAKRYLIDKGLVPMEGDEELKMLAFDIETLYHEGEEFAEGPILMISYADEEGARVITWKNVDLPYVDVVSTEREMIKRFLRVVKEKDPDVLITYNGDNFDFAYLKKRCEKLGINFALGRDGSEPKIQRMGDRFAVEVKGRIHFDLYPVIRRTINLPTYTLEAVYEAVFGQPKEKVYAEPITTAWETGENLERVARYSMEDAKVTYELGKEFLPMEAQLSRLIGQSLWDVSRSSTGNLVEWFLLRKAYERNELAPNKPDEKELARRRQSYEGGYVKEPERGLWENIVYLDFRSLYPSIIITHNVSPDTLNREGCKEYDVAPQVGHRFCKDFPGFIPSLLGDLLEERQKIKKKMKATIDPIERKLLDYRQRAIKILANSYYGYYGYARARWYCKECAESVTAWGREYITMTIKEIEEKYGFKVIYSDTDGFFATIPGADAETVKKKAMEFLKYINAKLPGALELEYEGFYKRGFFVTKKKYAVIDEEGKITTRGLEIVRRDWSEIAKETQARVLEALLKDGDVEKAVRIVKEVTEKLSKYEVPPEKLVIHEQITRDLKDYKATGPHVAVAKRLAARGVKIRPGTVISYIVLKGSGRIGDRAIPFDEFDPTKHKYDAEYYIENQVLPAVERILRAFGYRKEDLRYQKTRQVGLSAWLKPKGT

SEQ ID NO: 617 - protein, 774 aa, synthetic construct
MILDTDYITEDGKPVIRIFKKENGEFKIEYDRTFEPYFYALLKDDSAIEEVKKITAERHGTVVTVKRVEKVQKKFLGRPVEVWKLYFTHPQDVPAIRDKIREHPAVIDIYEYDIPFAKRYLIDKGLVPMEGDEELKMLAFDIETLYHEGEEFAEGPILMISYADEEGARVITWKNVDLPYVDVVSTEREMIKRFLRVVKEKDPDVLITYNGDNFDFAYLKKRCEKLGINFALGRDGSEPKIQRMGDRFAVEVKGRIHFDLYPVIRRTINLPTYTLEAVYEAVFGQPKEKVYAERITTAWETGENLERVARYSMEDAKVTYELGKEFLPMEAQLSRLIGQSLWDVSRSSTGNLVEWFLLRKAYERNELAPNKPDEKELARRRQSYEGGYVKEPERGLWENIVYLDFRSLYPSIIITHNVSPDTLNREGCKEYDVAPQVGHRFCKDFPGFIPSLLGDLLEERQKIKKKMKATIDPIERKLLDYRQRAIKILANSYYGYYGYARARWYCKECAESVTAWGREYITMTIKEIEEKYGFKVIYSDTDGFFATIPGADAETVKKKAMEFLKYINAKLPGALELEYEGFYKRGFFVTKKKYAVIDEEGKITTRGLEIVRRDWSEIAKETQARVLEALLKDGDVEKAVRIVKEVTEKLSKYEVPPEKLVIHEQITRDLKDYKATGPHVAVAKRLAARGVKIRPGTVISYIVLKGSGRIGDRAIPFDEFDPTKHKYDAEYYIENQVLPAVERILRAFGYRKEDLRYQKTRQVGLSAWLKPKGT

SEQ ID NO: 618 - protein, 774 aa, synthetic construct
MILDTDYITEDGKPVIRIFKKENGEFKIEYDRTFEPYFYALLKDDSAIEEVKKITAERHGTVVTVKRVEKVQKKFLGRPVEVWKLYFTHPQDVPAIRDKIREHPAVIDIYEYDIPFAKRYLIDKGLVPMEGDEELKMLAFDIETLYHEGEEFAEGPILMISYADEEGARVITWKNVDLPYVDVVSTEREMIKRFLRVVKEKDPDVLITYNGDNFDFAYLKKRCEKLGINFALGRDGSEPKIQRMGDRFAVEVKGRIHFDLYPVIRRTINLPTYTLEAVYEAVFGQPKEKVYAEEATTAWETGENLERVARYSMEDAKVTYELGKEFLPMEAQLSRLIGQSLWDVSRSSTGNLVEWFLLRKAYERNELAPNKPDEKELARRRQSYEGGYVKEPERGLWENIVYLDFRSLYPSIIITHNVSPDTLNREGCKEYDVAPQVGHRFCKDFPGFIPSLLGDLLEERQKIKKKMKATIDPIERKLLDYRQRAIKILANSYYGYYGYARARWYCKECAESVTAWGREYITMTIKEIEEKYGFKVIYSDTDGFFATIPGADAETVKKKAMEFLKYINAKLPGALELEYEGFYKRGFFVTKKKYAVIDEEGKITTRGLEIVRRDWSEIAKETQARVLEALLKDGDVEKAVRIVKEVTEKLSKYEVPPEKLVIHEQITRDLKDYKATGPHVAVAKRLAARGVKIRPGTVISYIVLKGSGRIGDRAIPFDEFDPTKHKYDAEYYIENQVLPAVERILRAFGYRKEDLRYQKTRQVGLSAWLKPKGT

SEQ ID NO: 619 - protein, 774 aa, synthetic construct
MILDTDYITEDGKPVIRIFKKENGEFKIEYDRTFEPYFYALLKDDSAIEEVKKITAERHGTVVTVKRVEKVQKKFLGRPVEVWKLYFTHPQDVPAIRDKIREHPAVIDIYEYDIPFAKRYLIDKGLVPMEGDEELKMLAFDIETLYHEGEEFAEGPILMISYADEEGARVITWKNVDLPYVDVVSTEREMIKRFLRVVKEKDPDVLITYNGDNFDFAYLKKRCEKLGINFALGRDGSEPKIQRMGDRFAVEVKGRIHFDLYPVIRRTINLPTYTLEAVYEAVFGQPKEKVYAEECTTAWETGENLERVARYSMEDAKVTYELGKEFLPMEAQLSRLIGQSLWDVSRSSTGNLVEWFLLRKAYERNELAPNKPDEKELARRRQSYEGGYVKEPERGLWENIVYLDFRSLYPSIIITHNVSPDTLNREGCKEYDVAPQVGHRFCKDFPGFIPSLLGDLLEERQKIKKKMKATIDPIERKLLDYRQRAIKILANSYYGYYGYARARWYCKECAESVTAWGREYITMTIKEIEEKYGFKVIYSDTDGFFATIPGADAETVKKKAMEFLKYINAKLPGALELEYEGFYKRGFFVTKKKYAVIDEEGKITTRGLEIVRRDWSEIAKETQARVLEALLKDGDVEKAVRIVKEVTEKLSKYEVPPEKLVIHEQITRDLKDYKATGPHVAVAKRLAARGVKIRPGTVISYIVLKGSGRIGDRAIPFDEFDPTKHKYDAEYYIENQVLPAVERILRAFGYRKEDLRYQKTRQVGLSAWLKPKGT

SEQ ID NO: 620 - protein, 774 aa, synthetic construct
MILDTDYITEDGKPVIRIFKKENGEFKIEYDRTFEPYFYALLKDDSAIEEVKKITAERHGTVVTVKRVEKVQKKFLGRPVEVWKLYFTHPQDVPAIRDKIREHPAVIDIYEYDIPFAKRYLIDKGLVPMEGDEELKMLAFDIETLYHEGEEFAEGPILMISYADEEGARVITWKNVDLPYVDVVSTEREMIKRFLRVVKEKDPDVLITYNGDNFDFAYLKKRCEKLGINFALGRDGSEPKIQRMGDRFAVEVKGRIHFDLYPVIRRTINLPTYTLEAVYEAVFGQPKEKVYAEEDTTAWETGENLERVARYSMEDAKVTYELGKEFLPMEAQLSRLIGQSLWDVSRSSTGNLVEWFLLRKAYERNELAPNKPDEKELARRRQSYEGGYVKEPERGLWENIVYLDFRSLYPSIIITHNVSPDTLNREGCKEYDVAPQVGHRFCKDFPGFIPSLLGDLLEERQKIKKKMKATIDPIERKLLDYRQRAIKILANSYYGYYGYARARWYCKECAESVTAWGREYITMTIKEIEEKYGFKVIYSDTDGFFATIPGADAETVKKKAMEFLKYINAKLPGALELEYEGFYKRGFFVTKKKYAVIDEEGKITTRGLEIVRRDWSEIAKETQARVLEALLKDGDVEKAVRIVKEVTEKLSKYEVPPEKLVIHEQITRDLKDYKATGPHVAVAKRLAARGVKIRPGTVISYIVLKGSGRIGDRAIPFDEFDPTKHKYDAEYYIENQVLPAVERILRAFGYRKEDLRYQKTRQVGLSAWLKPKGT

SEQ ID NO: 621 - protein, 774 aa, synthetic construct
MILDTDYITEDGKPVIRIFKKENGEFKIEYDRTFEPYFYALLKDDSAIEEVKKITAERHGTVVTVKRVEKVQKKFLGRPVEVWKLYFTHPQDVPAIRDKIREHPAVIDIYEYDIPFAKRYLIDKGLVPMEGDEELKMLAFDIETLYHEGEEFAEGPILMISYADEEGARVITWKNVDLPYVDVVSTEREMIKRFLRVVKEKDPDVLITYNGDNFDFAYLKKRCEKLGINFALGRDGSEPKIQRMGDRFAVEVKGRIHFDLYPVIRRTINLPTYTLEAVYEAVFGQPKEKVYAEEETTAWETGENLERVARYSMEDAKVTYELGKEFLPMEAQLSRLIGQSLWDVSRSSTGNLVEWFLLRKAYERNELAPNKPDEKELARRRQSYEGGYVKEPERGLWENIVYLDFRSLYPSIIITHNVSPDTLNREGCKEYDVAPQVGHRFCKDFPGFIPSLLGDLLEERQKIKKKMKATIDPIERKLLDYRQRAIKILANSYYGYYGYARARWYCKECAESVTAWGREYITMTIKEIEEKYGFKVIYSDTDGFFATIPGADAETVKKKAMEFLKYINAKLPGALELEYEGFYKRGFFVTKKKYAVIDEEGKITTRGLEIVRRDWSEIAKETQARVLEALLKDGDVEKAVRIVKEVTEKLSKYEVPPEKLVIHEQITRDLKDYKATGPHVAVAKRLAARGVKIRPGTVISYIVLKGSGRIGDRAIPFDEFDPTKHKYDAEYYIENQVLPAVERILRAFGYRKEDLRYQKTRQVGLSAWLKPKGT

SEQ ID NO: 622 - protein, 774 aa, synthetic construct
MILDTDYITEDGKPVIRIFKKENGEFKIEYDRTFEPYFYALLKDDSAIEEVKKITAERHGTVVTVKRVEKVQKKFLGRPVEVWKLYFTHPQDVPAIRDKIREHPAVIDIYEYDIPFAKRYLIDKGLVPMEGDEELKMLAFDIETLYHEGEEFAEGPILMISYADEEGARVITWKNVDLPYVDVVSTEREMIKRFLRVVKEKDPDVLITYNGDNFDFAYLKKRCEKLGINFALGRDGSEPKIQRMGDRFAVEVKGRIHFDLYPVIRRTINLPTYTLEAVYEAVFGQPKEKVYAEEGTTAWETGENLERVARYSMEDAKVTYELGKEFLPMEAQLSRLIGQSLWDVSRSSTGNLVEWFLLRKAYERNELAPNKPDEKELARRRQSYEGGYVKEPERGLWENIVYLDFRSLYPSIIITHNVSPDTLNREGCKEYDVAPQVGHRFCKDFPGFIPSLLGDLLEERQKIKKKMKATIDPIERKLLDYRQRAIKILANSYYGYYGYARARWYCKECAESVTAWGREYITMTIKEIEEKYGFKVIYSDTDGFFATIPGADAETVKKKAMEFLKYINAKLPGALELEYEGFYKRGFFVTKKKYAVIDEEGKITTRGLEIVRRDWSEIAKETQARVLEALLKDGDVEKAVRIVKEVTEKLSKYEVPPEKLVIHEQITRDLKDYKATGPHVAVAKRLAARGVKIRPGTVISYIVLKGSGRIGDRAIPFDEFDPTKHKYDAEYYIENQVLPAVERILRAFGYRKEDLRYQKTRQVGLSAWLKPKGT

SEQ ID NO: 623 - protein, 774 aa, synthetic construct
MILDTDYITEDGKPVIRIFKKENGEFKIEYDRTFEPYFYALLKDDSAIEEVKKITAERHGTVVTVKRVEKVQKKFLGRPVEVWKLYFTHPQDVPAIRDKIREHPAVIDIYEYDIPFAKRYLIDKGLVPMEGDEELKMLAFDIETLYHEGEEFAEGPILMISYADEEGARVITWKNVDLPYVDVVSTEREMIKRFLRVVKEKDPDVLITYNGDNFDFAYLKKRCEKLGINFALGRDGSEPKIQRMGDRFAVEVKGRIHFDLYPVIRRTINLPTYTLEAVYEAVFGQPKEKVYAEEHTTAWETGENLERVARYSMEDAKVTYELGKEFLPMEAQLSRLIGQSLWDVSRSSTGNLVEWFLLRKAYERNELAPNKPDEKELARRRQSYEGGYVKEPERGLWENIVYLDFRSLYPSIIITHNVSPDTLNREGCKEYDVAPQVGHRFCKDFPGFIPSLLGDLLEERQKIKKKMKATIDPIERKLLDYRQRAIKILANSYYGYYGYARARWYCKECAESVTAWGREYITMTIKEIEEKYGFKVIYSDTDGFFATIPGADAETVKKKAMEFLKYINAKLPGALELEYEGFYKRGFFVTKKKYAVIDEEGKITTRGLEIVRRDWSEIAKETQARVLEALLKDGDVEKAVRIVKEVTEKLSKYEVPPEKLVIHEQITRDLKDYKATGPHVAVAKRLAARGVKIRPGTVISYIVLKGSGRIGDRAIPFDEFDPTKHKYDAEYYIENQVLPAVERILRAFGYRKEDLRYQKTRQVGLSAWLKPKGT

SEQ ID NO: 624 - protein, 774 aa, synthetic construct
MILDTDYITEDGKPVIRIFKKENGEFKIEYDRTFEPYFYALLKDDSAIEEVKKITAERHGTVVTVKRVEKVQKKFLGRPVEVWKLYFTHPQDVPAIRDKIREHPAVIDIYEYDIPFAKRYLIDKGLVPMEGDEELKMLAFDIETLYHEGEEFAEGPILMISYADEEGARVITWKNVDLPYVDVVSTEREMIKRFLRVVKEKDPDVLITYNGDNFDFAYLKKRCEKLGINFALGRDGSEPKIQRMGDRFAVEVKGRIHFDLYPVIRRTINLPTYTLEAVYEAVFGQPKEKVYAEEKTTAWETGENLERVARYSMEDAKVTYELGKEFLPMEAQLSRLIGQSLWDVSRSSTGNLVEWFLLRKAYERNELAPNKPDEKELARRRQSYEGGYVKEPERGLWENIVYLDFRSLYPSIIITHNVSPDTLNREGCKEYDVAPQVGHRFCKDFPGFIPSLLGDLLEERQKIKKKMKATIDPIERKLLDYRQRAIKILANSYYGYYGYARARWYCKECAESVTAWGREYITMTIKEIEEKYGFKVIYSDTDGFFATIPGADAETVKKKAMEFLKYINAKLPGALELEYEGFYKRGFFVTKKKYAVIDEEGKITTRGLEIVRRDWSEIAKETQARVLEALLKDGDVEKAVRIVKEVTEKLSKYEVPPEKLVIHEQITRDLKDYKATGPHVAVAKRLAARGVKIRPGTVISYIVLKGSGRIGDRAIPFDEFDPTKHKYDAEYYIENQVLPAVERILRAFGYRKEDLRYQKTRQVGLSAWLKPKGT

SEQ ID NO: 625 - protein, 774 aa, synthetic construct
MILDTDYITEDGKPVIRIFKKENGEFKIEYDRTFEPYFYALLKDDSAIEEVKKITAERHGTVVTVKRVEKVQKKFLGRPVEVWKLYFTHPQDVPAIRDKIREHPAVIDIYEYDIPFAKRYLIDKGLVPMEGDEELKMLAFDIETLYHEGEEFAEGPILMISYADEEGARVITWKNVDLPYVDVVSTEREMIKRFLRVVKEKDPDVLITYNGDNFDFAYLKKRCEKLGINFALGRDGSEPKIQRMGDRFAVEVKGRIHFDLYPVIRRTINLPTYTLEAVYEAVFGQPKEKVYAEENTTAWETGENLERVARYSMEDAKVTYELGKEFLPMEAQLSRLIGQSLWDVSRSSTGNLVEWFLLRKAYERNELAPNKPDEKELARRRQSYEGGYVKEPERGLWENIVYLDFRSLYPSIIITHNVSPDTLNREGCKEYDVAPQVGHRFCKDFPGFIPSLLGDLLEERQKIKKKMKATIDPIERKLLDYRQRAIKILANSYYGYYGYARARWYCKECAESVTAWGREYITMTIKEIEEKYGFKVIYSDTDGFFATIPGADAETVKKKAMEFLKYINAKLPGALELEYEGFYKRGFFVTKKKYAVIDEEGKITTRGLEIVRRDWSEIAKETQARVLEALLKDGDVEKAVRIVKEVTEKLSKYEVPPEKLVIHEQITRDLKDYKATGPHVAVAKRLAARGVKIRPGTVISYIVLKGSGRIGDRAIPFDEFDPTKHKYDAEYYIENQVLPAVERILRAFGYRKEDLRYQKTRQVGLSAWLKPKGT

SEQ ID NO: 626 - protein, 774 aa, synthetic construct
MILDTDYITEDGKPVIRIFKKENGEFKIEYDRTFEPYFYALLKDDSAIEEVKKITAERHGTVVTVKRVEKVQKKFLGRPVEVWKLYFTHPQDVPAIRDKIREHPAVIDIYEYDIPFAKRYLIDKGLVPMEGDEELKMLAFDIETLYHEGEEFAEGPILMISYADEEGARVITWKNVDLPYVDVVSTEREMIKRFLRVVKEKDPDVLITYNGDNFDFAYLKKRCEKLGINFALGRDGSEPKIQRMGDRFAVEVKGRIHFDLYPVIRRTINLPTYTLEAVYEAVFGQPKEKVYAEEPTTAWETGENLERVARYSMEDAKVTYELGKEFLPMEAQLSRLIGQSLWDVSRSSTGNLVEWFLLRKAYERNELAPNKPDEKELARRRQSYEGGYVKEPERGLWENIVYLDFRSLYPSIIITHNVSPDTLNREGCKEYDVAPQVGHRFCKDFPGFIPSLLGDLLEERQKIKKKMKATIDPIERKLLDYRQRAIKILANSYYGYYGYARARWYCKECAESVTAWGREYITMTIKEIEEKYGFKVIYSDTDGFFATIPGADAETVKKKAMEFLKYINAKLPGALELEYEGFYKRGFFVTKKKYAVIDEEGKITTRGLEIVRRDWSEIAKETQARVLEALLKDGDVEKAVRIVKEVTEKLSKYEVPPEKLVIHEQITRDLKDYKATGPHVAVAKRLAARGVKIRPGTVISYIVLKGSGRIGDRAIPFDEFDPTKHKYDAEYYIENQVLPAVERILRAFGYRKEDLRYQKTRQVGLSAWLKPKGT

SEQ ID NO: 627 - protein, 774 aa, synthetic construct
MILDTDYITEDGKPVIRIFKKENGEFKIEYDRTFEPYFYALLKDDSAIEEVKKITAERHGTVVTVKRVEKVQKKFLGRPVEVWKLYFTHPQDVPAIRDKIREHPAVIDIYEYDIPFAKRYLIDKGLVPMEGDEELKMLAFDIETLYHEGEEFAEGPILMISYADEEGARVITWKNVDLPYVDVVSTEREMIKRFLRVVKEKDPDVLITYNGDNFDFAYLKKRCEKLGINFALGRDGSEPKIQRMGDRFAVEVKGRIHFDLYPVIRRTINLPTYTLEAVYEAVFGQPKEKVYAEEQTTAWETGENLERVARYSMEDAKVTYELGKEFLPMEAQLSRLIGQSLWDVSRSSTGNLVEWFLLRKAYERNELAPNKPDEKELARRRQSYEGGYVKEPERGLWENIVYLDFRSLYPSIIITHNVSPDTLNREGCKEYDVAPQVGHRFCKDFPGFIPSLLGDLLEERQKIKKKMKATIDPIERKLLDYRQRAIKILANSYYGYYGYARARWYCKECAESVTAWGREYITMTIKEIEEKYGFKVIYSDTDGFFATIPGADAETVKKKAMEFLKYINAKLPGALELEYEGFYKRGFFVTKKKYAVIDEEGKITTRGLEIVRRDWSEIAKETQARVLEALLKDGDVEKAVRIVKEVTEKLSKYEVPPEKLVIHEQITRDLKDYKATGPHVAVAKRLAARGVKIRPGTVISYIVLKGSGRIGDRAIPFDEFDPTKHKYDAEYYIENQVLPAVERILRAFGYRKEDLRYQKTRQVGLSAWLKPKGT

SEQ ID NO: 628 - protein, 774 aa, synthetic construct
MILDTDYITEDGKPVIRIFKKENGEFKIEYDRTFEPYFYALLKDDSAIEEVKKITAERHGTVVTVKRVEKVQKKFLGRPVEVWKLYFTHPQDVPAIRDKIREHPAVIDIYEYDIPFAKRYLIDKGLVPMEGDEELKMLAFDIETLYHEGEEFAEGPILMISYADEEGARVITWKNVDLPYVDVVSTEREMIKRFLRVVKEKDPDVLITYNGDNFDFAYLKKRCEKLGINFALGRDGSEPKIQRMGDRFAVEVKGRIHFDLYPVIRRTINLPTYTLEAVYEAVFGQPKEKVYAEERTTAWETGENLERVARYSMEDAKVTYELGKEFLPMEAQLSRLIGQSLWDVSRSSTGNLVEWFLLRKAYERNELAPNKPDEKELARRRQSYEGGYVKEPERGLWENIVYLDFRSLYPSIIITHNVSPDTLNREGCKEYDVAPQVGHRFCKDFPGFIPSLLGDLLEERQKIKKKMKATIDPIERKLLDYRQRAIKILANSYYGYYGYARARWYCKECAESVTAWGREYITMTIKEIEEKYGFKVIYSDTDGFFATIPGADAETVKKKAMEFLKYINAKLPGALELEYEGFYKRGFFVTKKKYAVIDEEGKITTRGLEIVRRDWSEIAKETQARVLEALLKDGDVEKAVRIVKEVTEKLSKYEVPPEKLVIHEQITRDLKDYKATGPHVAVAKRLAARGVKIRPGTVISYIVLKGSGRIGDRAIPFDEFDPTKHKYDAEYYIENQVLPAVERILRAFGYRKEDLRYQKTRQVGLSAWLKPKGT

SEQ ID NO: 629 - protein, 774 aa, synthetic construct
MILDTDYITEDGKPVIRIFKKENGEFKIEYDRTFEPYFYALLKDDSAIEEVKKITAERHGTVVTVKRVEKVQKKFLGRPVEVWKLYFTHPQDVPAIRDKIREHPAVIDIYEYDIPFAKRYLIDKGLVPMEGDEELKMLAFDIETLYHEGEEFAEGPILMISYADEEGARVITWKNVDLPYVDVVSTEREMIKRFLRVVKEKDPDVLITYNGDNFDFAYLKKRCEKLGINFALGRDGSEPKIQRMGDRFAVEVKGRIHFDLYPVIRRTINLPTYTLEAVYEAVFGQPKEKVYAEESTTAWETGENLERVARYSMEDAKVTYELGKEFLPMEAQLSRLIGQSLWDVSRSSTGNLVEWFLLRKAYERNELAPNKPDEKELARRRQSYEGGYVKEPERGLWENIVYLDFRSLYPSIIITHNVSPDTLNREGCKEYDVAPQVGHRFCKDFPGFIPSLLGDLLEERQKIKKKMKATIDPIERKLLDYRQRAIKILANSYYGYYGYARARWYCKECAESVTAWGREYITMTIKEIEEKYGFKVIYSDTDGFFATIPGADAETVKKKAMEFLKYINAKLPGALELEYEGFYKRGFFVTKKKYAVIDEEGKITTRGLEIVRRDWSEIAKETQARVLEALLKDGDVEKAVRIVKEVTEKLSKYEVPPEKLVIHEQITRDLKDYKATGPHVAVAKRLAARGVKIRPGTVISYIVLKGSGRIGDRAIPFDEFDPTKHKYDAEYYIENQVLPAVERILRAFGYRKEDLRYQKTRQVGLSAWLKPKGT

SEQ ID NO: 630 - protein, 774 aa, synthetic construct
MILDTDYITEDGKPVIRIFKKENGEFKIEYDRTFEPYFYALLKDDSAIEEVKKITAERHGTVVTVKRVEKVQKKFLGRPVEVWKLYFTHPQDVPAIRDKIREHPAVIDIYEYDIPFAKRYLIDKGLVPMEGDEELKMLAFDIETLYHEGEEFAEGPILMISYADEEGARVITWKNVDLPYVDVVSTEREMIKRFLRVVKEKDPDVLITYNGDNFDFAYLKKRCEKLGINFALGRDGSEPKIQRMGDRFAVEVKGRIHFDLYPVIRRTINLPTYTLEAVYEAVFGQPKEKVYAEETTTAWETGENLERVARYSMEDAKVTYELGKEFLPMEAQLSRLIGQSLWDVSRSSTGNLVEWFLLRKAYERNELAPNKPDEKELARRRQSYEGGYVKEPERGLWENIVYLDFRSLYPSIIITHNVSPDTLNREGCKEYDVAPQVGHRFCKDFPGFIPSLLGDLLEERQKIKKKMKATIDPIERKLLDYRQRAIKILANSYYGYYGYARARWYCKECAESVTAWGREYITMTIKEIEEKYGFKVIYSDTDGFFATIPGADAETVKKKAMEFLKYINAKLPGALELEYEGFYKRGFFVTKKKYAVIDEEGKITTRGLEIVRRDWSEIAKETQARVLEALLKDGDVEKAVRIVKEVTEKLSKYEVPPEKLVIHEQITRDLKDYKATGPHVAVAKRLAARGVKIRPGTVISYIVLKGSGRIGDRAIPFDEFDPTKHKYDAEYYIENQVLPAVERILRAFGYRKEDLRYQKTRQVGLSAWLKPKGT

SEQ ID NO: 631 - protein, 774 aa, synthetic construct
MILDTDYITEDGKPVIRIFKKENGEFKIEYDRTFEPYFYALLKDDSAIEEVKKITAERHGTVVTVKRVEKVQKKFLGRPVEVWKLYFTHPQDVPAIRDKIREHPAVIDIYEYDIPFAKRYLIDKGLVPMEGDEELKMLAFDIETLYHEGEEFAEGPILMISYADEEGARVITWKNVDLPYVDVVSTEREMIKRFLRVVKEKDPDVLITYNGDNFDFAYLKKRCEKLGINFALGRDGSEPKIQRMGDRFAVEVKGRIHFDLYPVIRRTINLPTYTLEAVYEAVFGQPKEKVYAEEWTTAWETGENLERVARYSMEDAKVTYELGKEFLPMEAQLSRLIGQSLWDVSRSSTGNLVEWFLLRKAYERNELAPNKPDEKELARRRQSYEGGYVKEPERGLWENIVYLDFRSLYPSIIITHNVSPDTLNREGCKEYDVAPQVGHRFCKDFPGFIPSLLGDLLEERQKIKKKMKATIDPIERKLLDYRQRAIKILANSYYGYYGYARARWYCKECAESVTAWGREYITMTIKEIEEKYGFKVIYSDTDGFFATIPGADAETVKKKAMEFLKYINAKLPGALELEYEGFYKRGFFVTKKKYAVIDEEGKITTRGLEIVRRDWSEIAKETQARVLEALLKDGDVEKAVRIVKEVTEKLSKYEVPPEKLVIHEQITRDLKDYKATGPHVAVAKRLAARGVKIRPGTVISYIVLKGSGRIGDRAIPFDEFDPTKHKYDAEYYIENQVLPAVERILRAFGYRKEDLRYQKTRQVGLSAWLKPKGT

SEQ ID NO: 632 - protein, 774 aa, synthetic construct
MILDTDYITEDGKPVIRIFKKENGEFKIEYDRTFEPYFYALLKDDSAIEEVKKITAERHGTVVTVKRVEKVQKKFLGRPVEVWKLYFTHPQDVPAIRDKIREHPAVIDIYEYDIPFAKRYLIDKGLVPMEGDEELKMLAFDIETLYHEGEEFAEGPILMISYADEEGARVITWKNVDLPYVDVVSTEREMIKRFLRVVKEKDPDVLITYNGDNFDFAYLKKRCEKLGINFALGRDGSEPKIQRMGDRFAVEVKGRIHFDLYPVIRRTINLPTYTLEAVYEAVFGQPKEKVYAEEYTTAWETGENLERVARYSMEDAKVTYELGKEFLPMEAQLSRLIGQSLWDVSRSSTGNLVEWFLLRKAYERNELAPNKPDEKELARRRQSYEGGYVKEPERGLWENIVYLDFRSLYPSIIITHNVSPDTLNREGCKEYDVAPQVGHRFCKDFPGFIPSLLGDLLEERQKIKKKMKATIDPIERKLLDYRQRAIKILANSYYGYYGYARARWYCKECAESVTAWGREYITMTIKEIEEKYGFKVIYSDTDGFFATIPGADAETVKKKAMEFLKYINAKLPGALELEYEGFYKRGFFVTKKKYAVIDEEGKITTRGLEIVRRDWSEIAKETQARVLEALLKDGDVEKAVRIVKEVTEKLSKYEVPPEKLVIHEQITRDLKDYKATGPHVAVAKRLAARGVKIRPGTVISYIVLKGSGRIGDRAIPFDEFDPTKHKYDAEYYIENQVLPAVERILRAFGYRKEDLRYQKTRQVGLSAWLKPKGT

SEQ ID NO: 633 - protein, 774 aa, synthetic construct
MILDTDYITEDGKPVIRIFKKENGEFKIEYDRTFEPYFYALLKDDSAIEEVKKITAERHGTVVTVKRVEKVQKKFLGRPVEVWKLYFTHPQDVPAIRDKIREHPAVIDIYEYDIPFAKRYLIDKGLVPMEGDEELKMLAFDIETLYHEGEEFAEGPILMISYADEEGARVITWKNVDLPYVDVVSTEREMIKRFLRVVKEKDPDVLITYNGDNFDFAYLKKRCEKLGINFALGRDGSEPKIQRMGDRFAVEVKGRIHFDLYPVIRRTINLPTYTLEAVYEAVFGQPKEKVYAEEITTDWETGENLERVARYSMEDAKVTYELGKEFLPMEAQLSRLIGQSLWDVSRSSTGNLVEWFLLRKAYERNELAPNKPDEKELARRRQSYEGGYVKEPERGLWENIVYLDFRSLYPSIIITHNVSPDTLNREGCKEYDVAPQVGHRFCKDFPGFIPSLLGDLLEERQKIKKKMKATIDPIERKLLDYRQRAIKILANSYYGYYGYARARWYCKECAESVTAWGREYITMTIKEIEEKYGFKVIYSDTDGFFATIPGADAETVKKKAMEFLKYINAKLPGALELEYEGFYKRGFFVTKKKYAVIDEEGKITTRGLEIVRRDWSEIAKETQARVLEALLKDGDVEKAVRIVKEVTEKLSKYEVPPEKLVIHEQITRDLKDYKATGPHVAVAKRLAARGVKIRPGTVISYIVLKGSGRIGDRAIPFDEFDPTKHKYDAEYYIENQVLPAVERILRAFGYRKEDLRYQKTRQVGLSAWLKPKGT

SEQ ID NO: 634 - protein, 774 aa, synthetic construct
MILDTDYITEDGKPVIRIFKKENGEFKIEYDRTFEPYFYALLKDDSAIEEVKKITAERHGTVVTVKRVEKVQKKFLGRPVEVWKLYFTHPQDVPAIRDKIREHPAVIDIYEYDIPFAKRYLIDKGLVPMEGDEELKMLAFDIETLYHEGEEFAEGPILMISYADEEGARVITWKNVDLPYVDVVSTEREMIKRFLRVVKEKDPDVLITYNGDNFDFAYLKKRCEKLGINFALGRDGSEPKIQRMGDRFAVEVKGRIHFDLYPVIRRTINLPTYTLEAVYEAVFGQPKEKVYAEEITTPWETGENLERVARYSMEDAKVTYELGKEFLPMEAQLSRLIGQSLWDVSRSSTGNLVEWFLLRKAYERNELAPNKPDEKELARRRQSYEGGYVKEPERGLWENIVYLDFRSLYPSIIITHNVSPDTLNREGCKEYDVAPQVGHRFCKDFPGFIPSLLGDLLEERQKIKKKMKATIDPIERKLLDYRQRAIKILANSYYGYYGYARARWYCKECAESVTAWGREYITMTIKEIEEKYGFKVIYSDTDGFFATIPGADAETVKKKAMEFLKYINAKLPGALELEYEGFYKRGFFVTKKKYAVIDEEGKITTRGLEIVRRDWSEIAKETQARVLEALLKDGDVEKAVRIVKEVTEKLSKYEVPPEKLVIHEQITRDLKDYKATGPHVAVAKRLAARGVKIRPGTVISYIVLKGSGRIGDRAIPFDEFDPTKHKYDAEYYIENQVLPAVERILRAFGYRKEDLRYQKTRQVGLSAWLKPKGT

SEQ ID NO: 635 - protein, 774 aa, synthetic construct
MILDTDYITEDGKPVIRIFKKENGEFKIEYDRTFEPYFYALLKDDSAIEEVKKITAERHGTVVTVKRVEKVQKKFLGRPVEVWKLYFTHPQDVPAIRDKIREHPAVIDIYEYDIPFAKRYLIDKGLVPMEGDEELKMLAFDIETLYHEGEEFAEGPILMISYADEEGARVITWKNVDLPYVDVVSTEREMIKRFLRVVKEKDPDVLITYNGDNFDFAYLKKRCEKLGINFALGRDGSEPKIQRMGDRFAVEVKGRIHFDLYPVIRRTINLPTYTLEAVYEAVFGQPKEKVYAEEITTADETGENLERVARYSMEDAKVTYELGKEFLPMEAQLSRLIGQSLWDVSRSSTGNLVEWFLLRKAYERNELAPNKPDEKELARRRQSYEGGYVKEPERGLWENIVYLDFRSLYPSIIITHNVSPDTLNREGCKEYDVAPQVGHRFCKDFPGFIPSLLGDLLEERQKIKKKMKATIDPIERKLLDYRQRAIKILANSYYGYYGYARARWYCKECAESVTAWGREYITMTIKEIEEKYGFKVIYSDTDGFFATIPGADAETVKKKAMEFLKYINAKLPGALELEYEGFYKRGFFVTKKKYAVIDEEGKITTRGLEIVRRDWSEIAKETQARVLEALLKDGDVEKAVRIVKEVTEKLSKYEVPPEKLVIHEQITRDLKDYKATGPHVAVAKRLAARGVKIRPGTVISYIVLKGSGRIGDRAIPFDEFDPTKHKYDAEYYIENQVLPAVERILRAFGYRKEDLRYQKTRQVGLSAWLKPKGT

SEQ ID NO: 636 - protein, 774 aa, synthetic construct
MILDTDYITEDGKPVIRIFKKENGEFKIEYDRTFEPYFYALLKDDSAIEEVKKITAERHGTVVTVKRVEKVQKKFLGRPVEVWKLYFTHPQDVPAIRDKIREHPAVIDIYEYDIPFAKRYLIDKGLVPMEGDEELKMLAFDIETLYHEGEEFAEGPILMISYADEEGARVITWKNVDLPYVDVVSTEREMIKRFLRVVKEKDPDVLITYNGDNFDFAYLKKRCEKLGINFALGRDGSEPKIQRMGDRFAVEVKGRIHFDLYPVIRRTINLPTYTLEAVYEAVFGQPKEKVYAEEITTAEETGENLERVARYSMEDAKVTYELGKEFLPMEAQLSRLIGQSLWDVSRSSTGNLVEWFLLRKAYERNELAPNKPDEKELARRRQSYEGGYVKEPERGLWENIVYLDFRSLYPSIIITHNVSPDTLNREGCKEYDVAPQVGHRFCKDFPGFIPSLLGDLLEERQKIKKKMKATIDPIERKLLDYRQRAIKILANSYYGYYGYARARWYCKECAESVTAWGREYITMTIKEIEEKYGFKVIYSDTDGFFATIPGADAETVKKKAMEFLKYINAKLPGALELEYEGFYKRGFFVTKKKYAVIDEEGKITTRGLEIVRRDWSEIAKETQARVLEALLKDGDVEKAVRIVKEVTEKLSKYEVPPEKLVIHEQITRDLKDYKATGPHVAVAKRLAARGVKIRPGTVISYIVLKGSGRIGDRAIPFDEFDPTKHKYDAEYYIENQVLPAVERILRAFGYRKEDLRYQKTRQVGLSAWLKPKGT

SEQ ID NO: 637 - protein, 774 aa, synthetic construct
MILDTDYITEDGKPVIRIFKKENGEFKIEYDRTFEPYFYALLKDDSAIEEVKKITAERHGTVVTVKRVEKVQKKFLGRPVEVWKLYFTHPQDVPAIRDKIREHPAVIDIYEYDIPFAKRYLIDKGLVPMEGDEELKMLAFDIETLYHEGEEFAEGPILMISYADEEGARVITWKNVDLPYVDVVSTEREMIKRFLRVVKEKDPDVLITYNGDNFDFAYLKKRCEKLGINFALGRDGSEPKIQRMGDRFAVEVKGRIHFDLYPVIRRTINLPTYTLEAVYEAVFGQPKEKVYAEEITTAGETGENLERVARYSMEDAKVTYELGKEFLPMEAQLSRLIGQSLWDVSRSSTGNLVEWFLLRKAYERNELAPNKPDEKELARRRQSYEGGYVKEPERGLWENIVYLDFRSLYPSIIITHNVSPDTLNREGCKEYDVAPQVGHRFCKDFPGFIPSLLGDLLEERQKIKKKMKATIDPIERKLLDYRQRAIKILANSYYGYYGYARARWYCKECAESVTAWGREYITMTIKEIEEKYGFKVIYSDTDGFFATIPGADAETVKKKAMEFLKYINAKLPGALELEYEGFYKRGFFVTKKKYAVIDEEGKITTRGLEIVRRDWSEIAKETQARVLEALLKDGDVEKAVRIVKEVTEKLSKYEVPPEKLVIHEQITRDLKDYKATGPHVAVAKRLAARGVKIRPGTVISYIVLKGSGRIGDRAIPFDEFDPTKHKYDAEYYIENQVLPAVERILRAFGYRKEDLRYQKTRQVGLSAWLKPKGT

SEQ ID NO: 638 - protein, 774 aa, synthetic construct
MILDTDYITEDGKPVIRIFKKENGEFKIEYDRTFEPYFYALLKDDSAIEEVKKITAERHGTVVTVKRVEKVQKKFLGRPVEVWKLYFTHPQDVPAIRDKIREHPAVIDIYEYDIPFAKRYLIDKGLVPMEGDEELKMLAFDIETLYHEGEEFAEGPILMISYADEEGARVITWKNVDLPYVDVVSTEREMIKRFLRVVKEKDPDVLITYNGDNFDFAYLKKRCEKLGINFALGRDGSEPKIQRMGDRFAVEVKGRIHFDLYPVIRRTINLPTYTLEAVYEAVFGQPKEKVYAEEITTAHETGENLERVARYSMEDAKVTYELGKEFLPMEAQLSRLIGQSLWDVSRSSTGNLVEWFLLRKAYERNELAPNKPDEKELARRRQSYEGGYVKEPERGLWENIVYLDFRSLYPSIIITHNVSPDTLNREGCKEYDVAPQVGHRFCKDFPGFIPSLLGDLLEERQKIKKKMKATIDPIERKLLDYRQRAIKILANSYYGYYGYARARWYCKECAESVTAWGREYITMTIKEIEEKYGFKVIYSDTDGFFATIPGADAETVKKKAMEFLKYINAKLPGALELEYEGFYKRGFFVTKKKYAVIDEEGKITTRGLEIVRRDWSEIAKETQARVLEALLKDGDVEKAVRIVKEVTEKLSKYEVPPEKLVIHEQITRDLKDYKATGPHVAVAKRLAARGVKIRPGTVISYIVLKGSGRIGDRAIPFDEFDPTKHKYDAEYYIENQVLPAVERILRAFGYRKEDLRYQKTRQVGLSAWLKPKGT

SEQ ID NO: 639 - protein, 774 aa, synthetic construct
MILDTDYITEDGKPVIRIFKKENGEFKIEYDRTFEPYFYALLKDDSAIEEVKKITAERHGTVVTVKRVEKVQKKFLGRPVEVWKLYFTHPQDVPAIRDKIREHPAVIDIYEYDIPFAKRYLIDKGLVPMEGDEELKMLAFDIETLYHEGEEFAEGPILMISYADEEGARVITWKNVDLPYVDVVSTEREMIKRFLRVVKEKDPDVLITYNGDNFDFAYLKKRCEKLGINFALGRDGSEPKIQRMGDRFAVEVKGRIHFDLYPVIRRTINLPTYTLEAVYEAVFGQPKEKVYAEEITTAIETGENLERVARYSMEDAKVTYELGKEFLPMEAQLSRLIGQSLWDVSRSSTGNLVEWFLLRKAYERNELAPNKPDEKELARRRQSYEGGYVKEPERGLWENIVYLDFRSLYPSIIITHNVSPDTLNREGCKEYDVAPQVGHRFCKDFPGFIPSLLGDLLEERQKIKKKMKATIDPIERKLLDYRQRAIKILANSYYGYYGYARARWYCKECAESVTAWGREYITMTIKEIEEKYGFKVIYSDTDGFFATIPGADAETVKKKAMEFLKYINAKLPGALELEYEGFYKRGFFVTKKKYAVIDEEGKITTRGLEIVRRDWSEIAKETQARVLEALLKDGDVEKAVRIVKEVTEKLSKYEVPPEKLVIHEQITRDLKDYKATGPHVAVAKRLAARGVKIRPGTVISYIVLKGSGRIGDRAIPFDEFDPTKHKYDAEYYIENQVLPAVERILRAFGYRKEDLRYQKTRQVGLSAWLKPKGT

SEQ ID NO: 640 - protein, 774 aa, synthetic construct
MILDTDYITEDGKPVIRIFKKENGEFKIEYDRTFEPYFYALLKDDSAIEEVKKITAERHGTVVTVKRVEKVQKKFLGRPVEVWKLYFTHPQDVPAIRDKIREHPAVIDIYEYDIPFAKRYLIDKGLVPMEGDEELKMLAFDIETLYHEGEEFAEGPILMISYADEEGARVITWKNVDLPYVDVVSTEREMIKRFLRVVKEKDPDVLITYNGDNFDFAYLKKRCEKLGINFALGRDGSEPKIQRMGDRFAVEVKGRIHFDLYPVIRRTINLPTYTLEAVYEAVFGQPKEKVYAEEITTAKETGENLERVARYSMEDAKVTYELGKEFLPMEAQLSRLIGQSLWDVSRSSTGNLVEWFLLRKAYERNELAPNKPDEKELARRRQSYEGGYVKEPERGLWENIVYLDFRSLYPSIIITHNVSPDTLNREGCKEYDVAPQVGHRFCKDFPGFIPSLLGDLLEERQKIKKKMKATIDPIERKLLDYRQRAIKILANSYYGYYGYARARWYCKECAESVTAWGREYITMTIKEIEEKYGFKVIYSDTDGFFATIPGADAETVKKKAMEFLKYINAKLPGALELEYEGFYKRGFFVTKKKYAVIDEEGKITTRGLEIVRRDWSEIAKETQARVLEALLKDGDVEKAVRIVKEVTEKLSKYEVPPEKLVIHEQITRDLKDYKATGPHVAVAKRLAARGVKIRPGTVISYIVLKGSGRIGDRAIPFDEFDPTKHKYDAEYYIENQVLPAVERILRAFGYRKEDLRYQKTRQVGLSAWLKPKGT

SEQ ID NO: 641 - protein, 774 aa, synthetic construct
MILDTDYITEDGKPVIRIFKKENGEFKIEYDRTFEPYFYALLKDDSAIEEVKKITAERHGTVVTVKRVEKVQKKFLGRPVEVWKLYFTHPQDVPAIRDKIREHPAVIDIYEYDIPFAKRYLIDKGLVPMEGDEELKMLAFDIETLYHEGEEFAEGPILMISYADEEGARVITWKNVDLPYVDVVSTEREMIKRFLRVVKEKDPDVLITYNGDNFDFAYLKKRCEKLGINFALGRDGSEPKIQRMGDRFAVEVKGRIHFDLYPVIRRTINLPTYTLEAVYEAVFGQPKEKVYAEEITTALETGENLERVARYSMEDAKVTYELGKEFLPMEAQLSRLIGQSLWDVSRSSTGNLVEWFLLRKAYERNELAPNKPDEKELARRRQSYEGGYVKEPERGLWENIVYLDFRSLYPSIIITHNVSPDTLNREGCKEYDVAPQVGHRFCKDFPGFIPSLLGDLLEERQKIKKKMKATIDPIERKLLDYRQRAIKILANSYYGYYGYARARWYCKECAESVTAWGREYITMTIKEIEEKYGFKVIYSDTDGFFATIPGADAETVKKKAMEFLKYINAKLPGALELEYEGFYKRGFFVTKKKYAVIDEEGKITTRGLEIVRRDWSEIAKETQARVLEALLKDGDVEKAVRIVKEVTEKLSKYEVPPEKLVIHEQITRDLKDYKATGPHVAVAKRLAARGVKIRPGTVISYIVLKGSGRIGDRAIPFDEFDPTKHKYDAEYYIENQVLPAVERILRAFGYRKEDLRYQKTRQVGLSAWLKPKGT

SEQ ID NO: 642 - protein, 774 aa, synthetic construct
MILDTDYITEDGKPVIRIFKKENGEFKIEYDRTFEPYFYALLKDDSAIEEVKKITAERHGTVVTVKRVEKVQKKFLGRPVEVWKLYFTHPQDVPAIRDKIREHPAVIDIYEYDIPFAKRYLIDKGLVPMEGDEELKMLAFDIETLYHEGEEFAEGPILMISYADEEGARVITWKNVDLPYVDVVSTEREMIKRFLRVVKEKDPDVLITYNGDNFDFAYLKKRCEKLGINFALGRDGSEPKIQRMGDRFAVEVKGRIHFDLYPVIRRTINLPTYTLEAVYEAVFGQPKEKVYAEEITTAMETGENLERVARYSMEDAKVTYELGKEFLPMEAQLSRLIGQSLWDVSRSSTGNLVEWFLLRKAYERNELAPNKPDEKELARRRQSYEGGYVKEPERGLWENIVYLDFRSLYPSIIITHNVSPDTLNREGCKEYDVAPQVGHRFCKDFPGFIPSLLGDLLEERQKIKKKMKATIDPIERKLLDYRQRAIKILANSYYGYYGYARARWYCKECAESVTAWGREYITMTIKEIEEKYGFKVIYSDTDGFFATIPGADAETVKKKAMEFLKYINAKLPGALELEYEGFYKRGFFVTKKKYAVIDEEGKITTRGLEIVRRDWSEIAKETQARVLEALLKDGDVEKAVRIVKEVTEKLSKYEVPPEKLVIHEQITRDLKDYKATGPHVAVAKRLAARGVKIRPGTVISYIVLKGSGRIGDRAIPFDEFDPTKHKYDAEYYIENQVLPAVERILRAFGYRKEDLRYQKTRQVGLSAWLKPKGT

SEQ ID NO: 643 - protein, 774 aa, synthetic construct
MILDTDYITEDGKPVIRIFKKENGEFKIEYDRTFEPYFYALLKDDSAIEEVKKITAERHGTVVTVKRVEKVQKKFLGRPVEVWKLYFTHPQDVPAIRDKIREHPAVIDIYEYDIPFAKRYLIDKGLVPMEGDEELKMLAFDIETLYHEGEEFAEGPILMISYADEEGARVITWKNVDLPYVDVVSTEREMIKRFLRVVKEKDPDVLITYNGDNFDFAYLKKRCEKLGINFALGRDGSEPKIQRMGDRFAVEVKGRIHFDLYPVIRRTINLPTYTLEAVYEAVFGQPKEKVYAEEITTANETGENLERVARYSMEDAKVTYELGKEFLPMEAQLSRLIGQSLWDVSRSSTGNLVEWFLLRKAYERNELAPNKPDEKELARRRQSYEGGYVKEPERGLWENIVYLDFRSLYPSIIITHNVSPDTLNREGCKEYDVAPQVGHRFCKDFPGFIPSLLGDLLEERQKIKKKMKATIDPIERKLLDYRQRAIKILANSYYGYYGYARARWYCKECAESVTAWGREYITMTIKEIEEKYGFKVIYSDTDGFFATIPGADAETVKKKAMEFLKYINAKLPGALELEYEGFYKRGFFVTKKKYAVIDEEGKITTRGLEIVRRDWSEIAKETQARVLEALLKDGDVEKAVRIVKEVTEKLSKYEVPPEKLVIHEQITRDLKDYKATGPHVAVAKRLAARGVKIRPGTVISYIVLKGSGRIGDRAIPFDEFDPTKHKYDAEYYIENQVLPAVERILRAFGYRKEDLRYQKTRQVGLSAWLKPKGT

SEQ ID NO: 644 - protein, 774 aa, synthetic construct
MILDTDYITEDGKPVIRIFKKENGEFKIEYDRTFEPYFYALLKDDSAIEEVKKITAERHGTVVTVKRVEKVQKKFLGRPVEVWKLYFTHPQDVPAIRDKIREHPAVIDIYEYDIPFAKRYLIDKGLVPMEGDEELKMLAFDIETLYHEGEEFAEGPILMISYADEEGARVITWKNVDLPYVDVVSTEREMIKRFLRVVKEKDPDVLITYNGDNFDFAYLKKRCEKLGINFALGRDGSEPKIQRMGDRFAVEVKGRIHFDLYPVIRRTINLPTYTLEAVYEAVFGQPKEKVYAEEITTAPETGENLERVARYSMEDAKVTYELGKEFLPMEAQLSRLIGQSLWDVSRSSTGNLVEWFLLRKAYERNELAPNKPDEKELARRRQSYEGGYVKEPERGLWENIVYLDFRSLYPSIIITHNVSPDTLNREGCKEYDVAPQVGHRFCKDFPGFIPSLLGDLLEERQKIKKKMKATIDPIERKLLDYRQRAIKILANSYYGYYGYARARWYCKECAESVTAWGREYITMTIKEIEEKYGFKVIYSDTDGFFATIPGADAETVKKKAMEFLKYINAKLPGALELEYEGFYKRGFFVTKKKYAVIDEEGKITTRGLEIVRRDWSEIAKETQARVLEALLKDGDVEKAVRIVKEVTEKLSKYEVPPEKLVIHEQITRDLKDYKATGPHVAVAKRLAARGVKIRPGTVISYIVLKGSGRIGDRAIPFDEFDPTKHKYDAEYYIENQVLPAVERILRAFGYRKEDLRYQKTRQVGLSAWLKPKGT

SEQ ID NO: 645 - protein, 774 aa, synthetic construct
MILDTDYITEDGKPVIRIFKKENGEFKIEYDRTFEPYFYALLKDDSAIEEVKKITAERHGTVVTVKRVEKVQKKFLGRPVEVWKLYFTHPQDVPAIRDKIREHPAVIDIYEYDIPFAKRYLIDKGLVPMEGDEELKMLAFDIETLYHEGEEFAEGPILMISYADEEGARVITWKNVDLPYVDVVSTEREMIKRFLRVVKEKDPDVLITYNGDNFDFAYLKKRCEKLGINFALGRDGSEPKIQRMGDRFAVEVKGRIHFDLYPVIRRTINLPTYTLEAVYEAVFGQPKEKVYAEEITTAQETGENLERVARYSMEDAKVTYELGKEFLPMEAQLSRLIGQSLWDVSRSSTGNLVEWFLLRKAYERNELAPNKPDEKELARRRQSYEGGYVKEPERGLWENIVYLDFRSLYPSIIITHNVSPDTLNREGCKEYDVAPQVGHRFCKDFPGFIPSLLGDLLEERQKIKKKMKATIDPIERKLLDYRQRAIKILANSYYGYYGYARARWYCKECAESVTAWGREYITMTIKEIEEKYGFKVIYSDTDGFFATIPGADAETVKKKAMEFLKYINAKLPGALELEYEGFYKRGFFVTKKKYAVIDEEGKITTRGLEIVRRDWSEIAKETQARVLEALLKDGDVEKAVRIVKEVTEKLSKYEVPPEKLVIHEQITRDLKDYKATGPHVAVAKRLAARGVKIRPGTVISYIVLKGSGRIGDRAIPFDEFDPTKHKYDAEYYIENQVLPAVERILRAFGYRKEDLRYQKTRQVGLSAWLKPKGT

SEQ ID NO: 646 - protein, 774 aa, synthetic construct
MILDTDYITEDGKPVIRIFKKENGEFKIEYDRTFEPYFYALLKDDSAIEEVKKITAERHGTVVTVKRVEKVQKKFLGRPVEVWKLYFTHPQDVPAIRDKIREHPAVIDIYEYDIPFAKRYLIDKGLVPMEGDEELKMLAFDIETLYHEGEEFAEGPILMISYADEEGARVITWKNVDLPYVDVVSTEREMIKRFLRVVKEKDPDVLITYNGDNFDFAYLKKRCEKLGINFALGRDGSEPKIQRMGDRFAVEVKGRIHFDLYPVIRRTINLPTYTLEAVYEAVFGQPKEKVYAEEITTARETGENLERVARYSMEDAKVTYELGKEFLPMEAQLSRLIGQSLWDVSRSSTGNLVEWFLLRKAYERNELAPNKPDEKELARRRQSYEGGYVKEPERGLWENIVYLDFRSLYPSIIITHNVSPDTLNREGCKEYDVAPQVGHRFCKDFPGFIPSLLGDLLEERQKIKKKMKATIDPIERKLLDYRQRAIKILANSYYGYYGYARARWYCKECAESVTAWGREYITMTIKEIEEKYGFKVIYSDTDGFFATIPGADAETVKKKAMEFLKYINAKLPGALELEYEGFYKRGFFVTKKKYAVIDEEGKITTRGLEIVRRDWSEIAKETQARVLEALLKDGDVEKAVRIVKEVTEKLSKYEVPPEKLVIHEQITRDLKDYKATGPHVAVAKRLAARGVKIRPGTVISYIVLKGSGRIGDRAIPFDEFDPTKHKYDAEYYIENQVLPAVERILRAFGYRKEDLRYQKTRQVGLSAWLKPKGT

SEQ ID NO: 647 - protein, 774 aa, synthetic construct
MILDTDYITEDGKPVIRIFKKENGEFKIEYDRTFEPYFYALLKDDSAIEEVKKITAERHGTVVTVKRVEKVQKKFLGRPVEVWKLYFTHPQDVPAIRDKIREHPAVIDIYEYDIPFAKRYLIDKGLVPMEGDEELKMLAFDIETLYHEGEEFAEGPILMISYADEEGARVITWKNVDLPYVDVVSTEREMIKRFLRVVKEKDPDVLITYNGDNFDFAYLKKRCEKLGINFALGRDGSEPKIQRMGDRFAVEVKGRIHFDLYPVIRRTINLPTYTLEAVYEAVFGQPKEKVYAEEITTATETGENLERVARYSMEDAKVTYELGKEFLPMEAQLSRLIGQSLWDVSRSSTGNLVEWFLLRKAYERNELAPNKPDEKELARRRQSYEGGYVKEPERGLWENIVYLDFRSLYPSIIITHNVSPDTLNREGCKEYDVAPQVGHRFCKDFPGFIPSLLGDLLEERQKIKKKMKATIDPIERKLLDYRQRAIKILANSYYGYYGYARARWYCKECAESVTAWGREYITMTIKEIEEKYGFKVIYSDTDGFFATIPGADAETVKKKAMEFLKYINAKLPGALELEYEGFYKRGFFVTKKKYAVIDEEGKITTRGLEIVRRDWSEIAKETQARVLEALLKDGDVEKAVRIVKEVTEKLSKYEVPPEKLVIHEQITRDLKDYKATGPHVAVAKRLAARGVKIRPGTVISYIVLKGSGRIGDRAIPFDEFDPTKHKYDAEYYIENQVLPAVERILRAFGYRKEDLRYQKTRQVGLSAWLKPKGT

SEQ ID NO: 648 - protein, 774 aa, synthetic construct
MILDTDYITEDGKPVIRIFKKENGEFKIEYDRTFEPYFYALLKDDSAIEEVKKITAERHGTVVTVKRVEKVQKKFLGRPVEVWKLYFTHPQDVPAIRDKIREHPAVIDIYEYDIPFAKRYLIDKGLVPMEGDEELKMLAFDIETLYHEGEEFAEGPILMISYADEEGARVITWKNVDLPYVDVVSTEREMIKRFLRVVKEKDPDVLITYNGDNFDFAYLKKRCEKLGINFALGRDGSEPKIQRMGDRFAVEVKGRIHFDLYPVIRRTINLPTYTLEAVYEAVFGQPKEKVYAEEITTAVETGENLERVARYSMEDAKVTYELGKEFLPMEAQLSRLIGQSLWDVSRSSTGNLVEWFLLRKAYERNELAPNKPDEKELARRRQSYEGGYVKEPERGLWENIVYLDFRSLYPSIIITHNVSPDTLNREGCKEYDVAPQVGHRFCKDFPGFIPSLLGDLLEERQKIKKKMKATIDPIERKLLDYRQRAIKILANSYYGYYGYARARWYCKECAESVTAWGREYITMTIKEIEEKYGFKVIYSDTDGFFATIPGADAETVKKKAMEFLKYINAKLPGALELEYEGFYKRGFFVTKKKYAVIDEEGKITTRGLEIVRRDWSEIAKETQARVLEALLKDGDVEKAVRIVKEVTEKLSKYEVPPEKLVIHEQITRDLKDYKATGPHVAVAKRLAARGVKIRPGTVISYIVLKGSGRIGDRAIPFDEFDPTKHKYDAEYYIENQVLPAVERILRAFGYRKEDLRYQKTRQVGLSAWLKPKGT

SEQ ID NO: 649 - protein, 774 aa, synthetic construct
MILDTDYITEDGKPVIRIFKKENGEFKIEYDRTFEPYFYALLKDDSAIEEVKKITAERHGTVVTVKRVEKVQKKFLGRPVEVWKLYFTHPQDVPAIRDKIREHPAVIDIYEYDIPFAKRYLIDKGLVPMEGDEELKMLAFDIETLYHEGEEFAEGPILMISYADEEGARVITWKNVDLPYVDVVSTEREMIKRFLRVVKEKDPDVLITYNGDNFDFAYLKKRCEKLGINFALGRDGSEPKIQRMGDRFAVEVKGRIHFDLYPVIRRTINLPTYTLEAVYEAVFGQPKEKVYAEEITTAWPTGENLERVARYSMEDAKVTYELGKEFLPMEAQLSRLIGQSLWDVSRSSTGNLVEWFLLRKAYERNELAPNKPDEKELARRRQSYEGGYVKEPERGLWENIVYLDFRSLYPSIIITHNVSPDTLNREGCKEYDVAPQVGHRFCKDFPGFIPSLLGDLLEERQKIKKKMKATIDPIERKLLDYRQRAIKILANSYYGYYGYARARWYCKECAESVTAWGREYITMTIKEIEEKYGFKVIYSDTDGFFATIPGADAETVKKKAMEFLKYINAKLPGALELEYEGFYKRGFFVTKKKYAVIDEEGKITTRGLEIVRRDWSEIAKETQARVLEALLKDGDVEKAVRIVKEVTEKLSKYEVPPEKLVIHEQITRDLKDYKATGPHVAVAKRLAARGVKIRPGTVISYIVLKGSGRIGDRAIPFDEFDPTKHKYDAEYYIENQVLPAVERILRAFGYRKEDLRYQKTRQVGLSAWLKPKGT

SEQ ID NO: 650 - protein, 774 aa, synthetic construct
MILDTDYITEDGKPVIRIFKKENGEFKIEYDRTFEPYFYALLKDDSAIEEVKKITAERHGTVVTVKRVEKVQKKFLGRPVEVWKLYFTHPQDVPAIRDKIREHPAVIDIYEYDIPFAKRYLIDKGLVPMEGDEELKMLAFDIETLYHEGEEFAEGPILMISYADEEGARVITWKNVDLPYVDVVSTEREMIKRFLRVVKEKDPDVLITYNGDNFDFAYLKKRCEKLGINFALGRDGSEPKIQRMGDRFAVEVKGRIHFDLYPVIRRTINLPTYTLEAVYEAVFGQPKEKVYAEEITTAWEPGENLERVARYSMEDAKVTYELGKEFLPMEAQLSRLIGQSLWDVSRSSTGNLVEWFLLRKAYERNELAPNKPDEKELARRRQSYEGGYVKEPERGLWENIVYLDFRSLYPSIIITHNVSPDTLNREGCKEYDVAPQVGHRFCKDFPGFIPSLLGDLLEERQKIKKKMKATIDPIERKLLDYRQRAIKILANSYYGYYGYARARWYCKECAESVTAWGREYITMTIKEIEEKYGFKVIYSDTDGFFATIPGADAETVKKKAMEFLKYINAKLPGALELEYEGFYKRGFFVTKKKYAVIDEEGKITTRGLEIVRRDWSEIAKETQARVLEALLKDGDVEKAVRIVKEVTEKLSKYEVPPEKLVIHEQITRDLKDYKATGPHVAVAKRLAARGVKIRPGTVISYIVLKGSGRIGDRAIPFDEFDPTKHKYDAEYYIENQVLPAVERILRAFGYRKEDLRYQKTRQVGLSAWLKPKGT

SEQ ID NO: 651 - protein, 774 aa, synthetic construct
MILDTDYITEDGKPVIRIFKKENGEFKIEYDRTFEPYFYALLKDDSAIEEVKKITAERHGTVVTVKRVEKVQKKFLGRPVEVWKLYFTHPQDVPAIRDKIREHPAVIDIYEYDIPFAKRYLIDKGLVPMEGDEELKMLAFDIETLYHEGEEFAEGPILMISYADEEGARVITWKNVDLPYVDVVSTEREMIKRFLRVVKEKDPDVLITYNGDNFDFAYLKKRCEKLGINFALGRDGSEPKIQRMGDRFAVEVKGRIHFDLYPVIRRTINLPTYTLEAVYEAVFGQPKEKVYAEEITTAWETPENLERVARYSMEDAKVTYELGKEFLPMEAQLSRLIGQSLWDVSRSSTGNLVEWFLLRKAYERNELAPNKPDEKELARRRQSYEGGYVKEPERGLWENIVYLDFRSLYPSIIITHNVSPDTLNREGCKEYDVAPQVGHRFCKDFPGFIPSLLGDLLEERQKIKKKMKATIDPIERKLLDYRQRAIKILANSYYGYYGYARARWYCKECAESVTAWGREYITMTIKEIEEKYGFKVIYSDTDGFFATIPGADAETVKKKAMEFLKYINAKLPGALELEYEGFYKRGFFVTKKKYAVIDEEGKITTRGLEIVRRDWSEIAKETQARVLEALLKDGDVEKAVRIVKEVTEKLSKYEVPPEKLVIHEQITRDLKDYKATGPHVAVAKRLAARGVKIRPGTVISYIVLKGSGRIGDRAIPFDEFDPTKHKYDAEYYIENQVLPAVERILRAFGYRKEDLRYQKTRQVGLSAWLKPKGT

SEQ ID NO: 652 - protein, 774 aa, synthetic construct
MILDTDYITEDGKPVIRIFKKENGEFKIEYDRTFEPYFYALLKDDSAIEEVKKITAERHGTVVTVKRVEKVQKKFLGRPVEVWKLYFTHPQDVPAIRDKIREHPAVIDIYEYDIPFAKRYLIDKGLVPMEGDEELKMLAFDIETLYHEGEEFAEGPILMISYADEEGARVITWKNVDLPYVDVVSTEREMIKRFLRVVKEKDPDVLITYNGDNFDFAYLKKRCEKLGINFALGRDGSEPKIQRMGDRFAVEVKGRIHFDLYPVIRRTINLPTYTLEAVYEAVFGQPKEKVYAEEITTAWETGENHERVARYSMEDAKVTYELGKEFLPMEAQLSRLIGQSLWDVSRSSTGNLVEWFLLRKAYERNELAPNKPDEKELARRRQSYEGGYVKEPERGLWENIVYLDFRSLYPSIIITHNVSPDTLNREGCKEYDVAPQVGHRFCKDFPGFIPSLLGDLLEERQKIKKKMKATIDPIERKLLDYRQRAIKILANSYYGYYGYARARWYCKECAESVTAWGREYITMTIKEIEEKYGFKVIYSDTDGFFATIPGADAETVKKKAMEFLKYINAKLPGALELEYEGFYKRGFFVTKKKYAVIDEEGKITTRGLEIVRRDWSEIAKETQARVLEALLKDGDVEKAVRIVKEVTEKLSKYEVPPEKLVIHEQITRDLKDYKATGPHVAVAKRLAARGVKIRPGTVISYIVLKGSGRIGDRAIPFDEFDPTKHKYDAEYYIENQVLPAVERILRAFGYRKEDLRYQKTRQVGLSAWLKPKGT

SEQ ID NO: 653 - protein, 774 aa, synthetic construct
MILDTDYITEDGKPVIRIFKKENGEFKIEYDRTFEPYFYALLKDDSAIEEVKKITAERHGTVVTVKRVEKVQKKFLGRPVEVWKLYFTHPQDVPAIRDKIREHPAVIDIYEYDIPFAKRYLIDKGLVPMEGDEELKMLAFDIETLYHEGEEFAEGPILMISYADEEGARVITWKNVDLPYVDVVSTEREMIKRFLRVVKEKDPDVLITYNGDNFDFAYLKKRCEKLGINFALGRDGSEPKIQRMGDRFAVEVKGRIHFDLYPVIRRTINLPTYTLEAVYEAVFGQPKEKVYAEEITTAWETGENLERDARYSMEDAKVTYELGKEFLPMEAQLSRLIGQSLWDVSRSSTGNLVEWFLLRKAYERNELAPNKPDEKELARRRQSYEGGYVKEPERGLWENIVYLDFRSLYPSIIITHNVSPDTLNREGCKEYDVAPQVGHRFCKDFPGFIPSLLGDLLEERQKIKKKMKATIDPIERKLLDYRQRAIKILANSYYGYYGYARARWYCKECAESVTAWGREYITMTIKEIEEKYGFKVIYSDTDGFFATIPGADAETVKKKAMEFLKYINAKLPGALELEYEGFYKRGFFVTKKKYAVIDEEGKITTRGLEIVRRDWSEIAKETQARVLEALLKDGDVEKAVRIVKEVTEKLSKYEVPPEKLVIHEQITRDLKDYKATGPHVAVAKRLAARGVKIRPGTVISYIVLKGSGRIGDRAIPFDEFDPTKHKYDAEYYIENQVLPAVERILRAFGYRKEDLRYQKTRQVGLSAWLKPKGT

SEQ ID NO: 654 - protein, 774 aa, synthetic construct
MILDTDYITEDGKPVIRIFKKENGEFKIEYDRTFEPYFYALLKDDSAIEEVKKITAERHGTVVTVKRVEKVQKKFLGRPVEVWKLYFTHPQDVPAIRDKIREHPAVIDIYEYDIPFAKRYLIDKGLVPMEGDEELKMLAFDIETLYHEGEEFAEGPILMISYADEEGARVITWKNVDLPYVDVVSTEREMIKRFLRVVKEKDPDVLITYNGDNFDFAYLKKRCEKLGINFALGRDGSEPKIQRMGDRFAVEVKGRIHFDLYPVIRRTINLPTYTLEAVYEAVFGQPKEKVYAEEITTAWETGENLERFARYSMEDAKVTYELGKEFLPMEAQLSRLIGQSLWDVSRSSTGNLVEWFLLRKAYERNELAPNKPDEKELARRRQSYEGGYVKEPERGLWENIVYLDFRSLYPSIIITHNVSPDTLNREGCKEYDVAPQVGHRFCKDFPGFIPSLLGDLLEERQKIKKKMKATIDPIERKLLDYRQRAIKILANSYYGYYGYARARWYCKECAESVTAWGREYITMTIKEIEEKYGFKVIYSDTDGFFATIPGADAETVKKKAMEFLKYINAKLPGALELEYEGFYKRGFFVTKKKYAVIDEEGKITTRGLEIVRRDWSEIAKETQARVLEALLKDGDVEKAVRIVKEVTEKLSKYEVPPEKLVIHEQITRDLKDYKATGPHVAVAKRLAARGVKIRPGTVISYIVLKGSGRIGDRAIPFDEFDPTKHKYDAEYYIENQVLPAVERILRAFGYRKEDLRYQKTRQVGLSAWLKPKGT

SEQ ID NO: 655 - protein, 774 aa, synthetic construct
MILDTDYITEDGKPVIRIFKKENGEFKIEYDRTFEPYFYALLKDDSAIEEVKKITAERHGTVVTVKRVEKVQKKFLGRPVEVWKLYFTHPQDVPAIRDKIREHPAVIDIYEYDIPFAKRYLIDKGLVPMEGDEELKMLAFDIETLYHEGEEFAEGPILMISYADEEGARVITWKNVDLPYVDVVSTEREMIKRFLRVVKEKDPDVLITYNGDNFDFAYLKKRCEKLGINFALGRDGSEPKIQRMGDRFAVEVKGRIHFDLYPVIRRTINLPTYTLEAVYEAVFGQPKEKVYAEEITTAWETGENLERHARYSMEDAKVTYELGKEFLPMEAQLSRLIGQSLWDVSRSSTGNLVEWFLLRKAYERNELAPNKPDEKELARRRQSYEGGYVKEPERGLWENIVYLDFRSLYPSIIITHNVSPDTLNREGCKEYDVAPQVGHRFCKDFPGFIPSLLGDLLEERQKIKKKMKATIDPIERKLLDYRQRAIKILANSYYGYYGYARARWYCKECAESVTAWGREYITMTIKEIEEKYGFKVIYSDTDGFFATIPGADAETVKKKAMEFLKYINAKLPGALELEYEGFYKRGFFVTKKKYAVIDEEGKITTRGLEIVRRDWSEIAKETQARVLEALLKDGDVEKAVRIVKEVTEKLSKYEVPPEKLVIHEQITRDLKDYKATGPHVAVAKRLAARGVKIRPGTVISYIVLKGSGRIGDRAIPFDEFDPTKHKYDAEYYIENQVLPAVERILRAFGYRKEDLRYQKTRQVGLSAWLKPKGT

SEQ ID NO: 656 - protein, 774 aa, synthetic construct
MILDTDYITEDGKPVIRIFKKENGEFKIEYDRTFEPYFYALLKDDSAIEEVKKITAERHGTVVTVKRVEKVQKKFLGRPVEVWKLYFTHPQDVPAIRDKIREHPAVIDIYEYDIPFAKRYLIDKGLVPMEGDEELKMLAFDIETLYHEGEEFAEGPILMISYADEEGARVITWKNVDLPYVDVVSTEREMIKRFLRVVKEKDPDVLITYNGDNFDFAYLKKRCEKLGINFALGRDGSEPKIQRMGDRFAVEVKGRIHFDLYPVIRRTINLPTYTLEAVYEAVFGQPKEKVYAEEITTAWETGENLERKARYSMEDAKVTYELGKEFLPMEAQLSRLIGQSLWDVSRSSTGNLVEWFLLRKAYERNELAPNKPDEKELARRRQSYEGGYVKEPERGLWENIVYLDFRSLYPSIIITHNVSPDTLNREGCKEYDVAPQVGHRFCKDFPGFIPSLLGDLLEERQKIKKKMKATIDPIERKLLDYRQRAIKILANSYYGYYGYARARWYCKECAESVTAWGREYITMTIKEIEEKYGFKVIYSDTDGFFATIPGADAETVKKKAMEFLKYINAKLPGALELEYEGFYKRGFFVTKKKYAVIDEEGKITTRGLEIVRRDWSEIAKETQARVLEALLKDGDVEKAVRIVKEVTEKLSKYEVPPEKLVIHEQITRDLKDYKATGPHVAVAKRLAARGVKIRPGTVISYIVLKGSGRIGDRAIPFDEFDPTKHKYDAEYYIENQVLPAVERILRAFGYRKEDLRYQKTRQVGLSAWLKPKGT

SEQ ID NO: 657 - protein, 774 aa, synthetic construct
MILDTDYITEDGKPVIRIFKKENGEFKIEYDRTFEPYFYALLKDDSAIEEVKKITAERHGTVVTVKRVEKVQKKFLGRPVEVWKLYFTHPQDVPAIRDKIREHPAVIDIYEYDIPFAKRYLIDKGLVPMEGDEELKMLAFDIETLYHEGEEFAEGPILMISYADEEGARVITWKNVDLPYVDVVSTEREMIKRFLRVVKEKDPDVLITYNGDNFDFAYLKKRCEKLGINFALGRDGSEPKIQRMGDRFAVEVKGRIHFDLYPVIRRTINLPTYTLEAVYEAVFGQPKEKVYAEEITTAWETGENLERLARYSMEDAKVTYELGKEFLPMEAQLSRLIGQSLWDVSRSSTGNLVEWFLLRKAYERNELAPNKPDEKELARRRQSYEGGYVKEPERGLWENIVYLDFRSLYPSIIITHNVSPDTLNREGCKEYDVAPQVGHRFCKDFPGFIPSLLGDLLEERQKIKKKMKATIDPIERKLLDYRQRAIKILANSYYGYYGYARARWYCKECAESVTAWGREYITMTIKEIEEKYGFKVIYSDTDGFFATIPGADAETVKKKAMEFLKYINAKLPGALELEYEGFYKRGFFVTKKKYAVIDEEGKITTRGLEIVRRDWSEIAKETQARVLEALLKDGDVEKAVRIVKEVTEKLSKYEVPPEKLVIHEQITRDLKDYKATGPHVAVAKRLAARGVKIRPGTVISYIVLKGSGRIGDRAIPFDEFDPTKHKYDAEYYIENQVLPAVERILRAFGYRKEDLRYQKTRQVGLSAWLKPKGT

SEQ ID NO: 658 - protein, 774 aa, synthetic construct
MILDTDYITEDGKPVIRIFKKENGEFKIEYDRTFEPYFYALLKDDSAIEEVKKITAERHGTVVTVKRVEKVQKKFLGRPVEVWKLYFTHPQDVPAIRDKIREHPAVIDIYEYDIPFAKRYLIDKGLVPMEGDEELKMLAFDIETLYHEGEEFAEGPILMISYADEEGARVITWKNVDLPYVDVVSTEREMIKRFLRVVKEKDPDVLITYNGDNFDFAYLKKRCEKLGINFALGRDGSEPKIQRMGDRFAVEVKGRIHFDLYPVIRRTINLPTYTLEAVYEAVFGQPKEKVYAEEITTAWETGENLERNARYSMEDAKVTYELGKEFLPMEAQLSRLIGQSLWDVSRSSTGNLVEWFLLRKAYERNELAPNKPDEKELARRRQSYEGGYVKEPERGLWENIVYLDFRSLYPSIIITHNVSPDTLNREGCKEYDVAPQVGHRFCKDFPGFIPSLLGDLLEERQKIKKKMKATIDPIERKLLDYRQRAIKILANSYYGYYGYARARWYCKECAESVTAWGREYITMTIKEIEEKYGFKVIYSDTDGFFATIPGADAETVKKKAMEFLKYINAKLPGALELEYEGFYKRGFFVTKKKYAVIDEEGKITTRGLEIVRRDWSEIAKETQARVLEALLKDGDVEKAVRIVKEVTEKLSKYEVPPEKLVIHEQITRDLKDYKATGPHVAVAKRLAARGVKIRPGTVISYIVLKGSGRIGDRAIPFDEFDPTKHKYDAEYYIENQVLPAVERILRAFGYRKEDLRYQKTRQVGLSAWLKPKGT

SEQ ID NO: 659 - protein, 774 aa, synthetic construct
MILDTDYITEDGKPVIRIFKKENGEFKIEYDRTFEPYFYALLKDDSAIEEVKKITAERHGTVVTVKRVEKVQKKFLGRPVEVWKLYFTHPQDVPAIRDKIREHPAVIDIYEYDIPFAKRYLIDKGLVPMEGDEELKMLAFDIETLYHEGEEFAEGPILMISYADEEGARVITWKNVDLPYVDVVSTEREMIKRFLRVVKEKDPDVLITYNGDNFDFAYLKKRCEKLGINFALGRDGSEPKIQRMGDRFAVEVKGRIHFDLYPVIRRTINLPTYTLEAVYEAVFGQPKEKVYAEEITTAWETGENLERQARYSMEDAKVTYELGKEFLPMEAQLSRLIGQSLWDVSRSSTGNLVEWFLLRKAYERNELAPNKPDEKELARRRQSYEGGYVKEPERGLWENIVYLDFRSLYPSIIITHNVSPDTLNREGCKEYDVAPQVGHRFCKDFPGFIPSLLGDLLEERQKIKKKMKATIDPIERKLLDYRQRAIKILANSYYGYYGYARARWYCKECAESVTAWGREYITMTIKEIEEKYGFKVIYSDTDGFFATIPGADAETVKKKAMEFLKYINAKLPGALELEYEGFYKRGFFVTKKKYAVIDEEGKITTRGLEIVRRDWSEIAKETQARVLEALLKDGDVEKAVRIVKEVTEKLSKYEVPPEKLVIHEQITRDLKDYKATGPHVAVAKRLAARGVKIRPGTVISYIVLKGSGRIGDRAIPFDEFDPTKHKYDAEYYIENQVLPAVERILRAFGYRKEDLRYQKTRQVGLSAWLKPKGT

SEQ ID NO: 660 - protein, 774 aa, synthetic construct
MILDTDYITEDGKPVIRIFKKENGEFKIEYDRTFEPYFYALLKDDSAIEEVKKITAERHGTVVTVKRVEKVQKKFLGRPVEVWKLYFTHPQDVPAIRDKIREHPAVIDIYEYDIPFAKRYLIDKGLVPMEGDEELKMLAFDIETLYHEGEEFAEGPILMISYADEEGARVITWKNVDLPYVDVVSTEREMIKRFLRVVKEKDPDVLITYNGDNFDFAYLKKRCEKLGINFALGRDGSEPKIQRMGDRFAVEVKGRIHFDLYPVIRRTINLPTYTLEAVYEAVFGQPKEKVYAEEITTAWETGENLERRARYSMEDAKVTYELGKEFLPMEAQLSRLIGQSLWDVSRSSTGNLVEWFLLRKAYERNELAPNKPDEKELARRRQSYEGGYVKEPERGLWENIVYLDFRSLYPSIIITHNVSPDTLNREGCKEYDVAPQVGHRFCKDFPGFIPSLLGDLLEERQKIKKKMKATIDPIERKLLDYRQRAIKILANSYYGYYGYARARWYCKECAESVTAWGREYITMTIKEIEEKYGFKVIYSDTDGFFATIPGADAETVKKKAMEFLKYINAKLPGALELEYEGFYKRGFFVTKKKYAVIDEEGKITTRGLEIVRRDWSEIAKETQARVLEALLKDGDVEKAVRIVKEVTEKLSKYEVPPEKLVIHEQITRDLKDYKATGPHVAVAKRLAARGVKIRPGTVISYIVLKGSGRIGDRAIPFDEFDPTKHKYDAEYYIENQVLPAVERILRAFGYRKEDLRYQKTRQVGLSAWLKPKGT

SEQ ID NO: 661 - protein, 774 aa, synthetic construct
MILDTDYITEDGKPVIRIFKKENGEFKIEYDRTFEPYFYALLKDDSAIEEVKKITAERHGTVVTVKRVEKVQKKFLGRPVEVWKLYFTHPQDVPAIRDKIREHPAVIDIYEYDIPFAKRYLIDKGLVPMEGDEELKMLAFDIETLYHEGEEFAEGPILMISYADEEGARVITWKNVDLPYVDVVSTEREMIKRFLRVVKEKDPDVLITYNGDNFDFAYLKKRCEKLGINFALGRDGSEPKIQRMGDRFAVEVKGRIHFDLYPVIRRTINLPTYTLEAVYEAVFGQPKEKVYAEEITTAWETGENLERWARYSMEDAKVTYELGKEFLPMEAQLSRLIGQSLWDVSRSSTGNLVEWFLLRKAYERNELAPNKPDEKELARRRQSYEGGYVKEPERGLWENIVYLDFRSLYPSIIITHNVSPDTLNREGCKEYDVAPQVGHRFCKDFPGFIPSLLGDLLEERQKIKKKMKATIDPIERKLLDYRQRAIKILANSYYGYYGYARARWYCKECAESVTAWGREYITMTIKEIEEKYGFKVIYSDTDGFFATIPGADAETVKKKAMEFLKYINAKLPGALELEYEGFYKRGFFVTKKKYAVIDEEGKITTRGLEIVRRDWSEIAKETQARVLEALLKDGDVEKAVRIVKEVTEKLSKYEVPPEKLVIHEQITRDLKDYKATGPHVAVAKRLAARGVKIRPGTVISYIVLKGSGRIGDRAIPFDEFDPTKHKYDAEYYIENQVLPAVERILRAFGYRKEDLRYQKTRQVGLSAWLKPKGT

SEQ ID NO: 662 - protein, 774 aa, synthetic construct
MILDTDYITEDGKPVIRIFKKENGEFKIEYDRTFEPYFYALLKDDSAIEEVKKITAERHGTVVTVKRVEKVQKKFLGRPVEVWKLYFTHPQDVPAIRDKIREHPAVIDIYEYDIPFAKRYLIDKGLVPMEGDEELKMLAFDIETLYHEGEEFAEGPILMISYADEEGARVITWKNVDLPYVDVVSTEREMIKRFLRVVKEKDPDVLITYNGDNFDFAYLKKRCEKLGINFALGRDGSEPKIQRMGDRFAVEVKGRIHFDLYPVIRRTINLPTYTLEAVYEAVFGQPKEKVYAEEITTAWETGENLERYARYSMEDAKVTYELGKEFLPMEAQLSRLIGQSLWDVSRSSTGNLVEWFLLRKAYERNELAPNKPDEKELARRRQSYEGGYVKEPERGLWENIVYLDFRSLYPSIIITHNVSPDTLNREGCKEYDVAPQVGHRFCKDFPGFIPSLLGDLLEERQKIKKKMKATIDPIERKLLDYRQRAIKILANSYYGYYGYARARWYCKECAESVTAWGREYITMTIKEIEEKYGFKVIYSDTDGFFATIPGADAETVKKKAMEFLKYINAKLPGALELEYEGFYKRGFFVTKKKYAVIDEEGKITTRGLEIVRRDWSEIAKETQARVLEALLKDGDVEKAVRIVKEVTEKLSKYEVPPEKLVIHEQITRDLKDYKATGPHVAVAKRLAARGVKIRPGTVISYIVLKGSGRIGDRAIPFDEFDPTKHKYDAEYYIENQVLPAVERILRAFGYRKEDLRYQKTRQVGLSAWLKPKGT

SEQ ID NO: 663 - protein, 774 aa, synthetic construct
MILDTDYITEDGKPVIRIFKKENGEFKIEYDRTFEPYFYALLKDDSAIEEVKKITAERHGTVVTVKRVEKVQKKFLGRPVEVWKLYFTHPQDVPAIRDKIREHPAVIDIYEYDIPFAKRYLIDKGLVPMEGDEELKMLAFDIETLYHEGEEFAEGPILMISYADEEGARVITWKNVDLPYVDVVSTEREMIKRFLRVVKEKDPDVLITYNGDNFDFAYLKKRCEKLGINFALGRDGSEPKIQRMGDRFAVEVKGRIHFDLYPVIRRTINLPTYTLEAVYEAVFGQPKEKVYAEEITTAWETGENLERVDRYSMEDAKVTYELGKEFLPMEAQLSRLIGQSLWDVSRSSTGNLVEWFLLRKAYERNELAPNKPDEKELARRRQSYEGGYVKEPERGLWENIVYLDFRSLYPSIIITHNVSPDTLNREGCKEYDVAPQVGHRFCKDFPGFIPSLLGDLLEERQKIKKKMKATIDPIERKLLDYRQRAIKILANSYYGYYGYARARWYCKECAESVTAWGREYITMTIKEIEEKYGFKVIYSDTDGFFATIPGADAETVKKKAMEFLKYINAKLPGALELEYEGFYKRGFFVTKKKYAVIDEEGKITTRGLEIVRRDWSEIAKETQARVLEALLKDGDVEKAVRIVKEVTEKLSKYEVPPEKLVIHEQITRDLKDYKATGPHVAVAKRLAARGVKIRPGTVISYIVLKGSGRIGDRAIPFDEFDPTKHKYDAEYYIENQVLPAVERILRAFGYRKEDLRYQKTRQVGLSAWLKPKGT

SEQ ID NO: 664 - protein, 774 aa, synthetic construct
MILDTDYITEDGKPVIRIFKKENGEFKIEYDRTFEPYFYALLKDDSAIEEVKKITAERHGTVVTVKRVEKVQKKFLGRPVEVWKLYFTHPQDVPAIRDKIREHPAVIDIYEYDIPFAKRYLIDKGLVPMEGDEELKMLAFDIETLYHEGEEFAEGPILMISYADEEGARVITWKNVDLPYVDVVSTEREMIKRFLRVVKEKDPDVLITYNGDNFDFAYLKKRCEKLGINFALGRDGSEPKIQRMGDRFAVEVKGRIHFDLYPVIRRTINLPTYTLEAVYEAVFGQPKEKVYAEEITTAWETGENLERVPRYSMEDAKVTYELGKEFLPMEAQLSRLIGQSLWDVSRSSTGNLVEWFLLRKAYERNELAPNKPDEKELARRRQSYEGGYVKEPERGLWENIVYLDFRSLYPSIIITHNVSPDTLNREGCKEYDVAPQVGHRFCKDFPGFIPSLLGDLLEERQKIKKKMKATIDPIERKLLDYRQRAIKILANSYYGYYGYARARWYCKECAESVTAWGREYITMTIKEIEEKYGFKVIYSDTDGFFATIPGADAETVKKKAMEFLKYINAKLPGALELEYEGFYKRGFFVTKKKYAVIDEEGKITTRGLEIVRRDWSEIAKETQARVLEALLKDGDVEKAVRIVKEVTEKLSKYEVPPEKLVIHEQITRDLKDYKATGPHVAVAKRLAARGVKIRPGTVISYIVLKGSGRIGDRAIPFDEFDPTKHKYDAEYYIENQVLPAVERILRAFGYRKEDLRYQKTRQVGLSAWLKPKGT

SEQ ID NO: 665 - protein, 774 aa, synthetic construct
MILDTDYITEDGKPVIRIFKKENGEFKIEYDRTFEPYFYALLKDDSAIEEVKKITAERHGTVVTVKRVEKVQKKFLGRPVEVWKLYFTHPQDVPAIRDKIREHPAVIDIYEYDIPFAKRYLIDKGLVPMEGDEELKMLAFDIETLYHEGEEFAEGPILMISYADEEGARVITWKNVDLPYVDVVSTEREMIKRFLRVVKEKDPDVLITYNGDNFDFAYLKKRCEKLGINFALGRDGSEPKIQRMGDRFAVEVKGRIHFDLYPVIRRTINLPTYTLEAVYEAVFGQPKEKVYAEEITTAWETGENLERVRRYSMEDAKVTYELGKEFLPMEAQLSRLIGQSLWDVSRSSTGNLVEWFLLRKAYERNELAPNKPDEKELARRRQSYEGGYVKEPERGLWENIVYLDFRSLYPSIIITHNVSPDTLNREGCKEYDVAPQVGHRFCKDFPGFIPSLLGDLLEERQKIKKKMKATIDPIERKLLDYRQRAIKILANSYYGYYGYARARWYCKECAESVTAWGREYITMTIKEIEEKYGFKVIYSDTDGFFATIPGADAETVKKKAMEFLKYINAKLPGALELEYEGFYKRGFFVTKKKYAVIDEEGKITTRGLEIVRRDWSEIAKETQARVLEALLKDGDVEKAVRIVKEVTEKLSKYEVPPEKLVIHEQITRDLKDYKATGPHVAVAKRLAARGVKIRPGTVISYIVLKGSGRIGDRAIPFDEFDPTKHKYDAEYYIENQVLPAVERILRAFGYRKEDLRYQKTRQVGLSAWLKPKGT

SEQ ID NO: 666 - protein, 774 aa, synthetic construct
MILDTDYITEDGKPVIRIFKKENGEFKIEYDRTFEPYFYALLKDDSAIEEVKKITAERHGTVVTVKRVEKVQKKFLGRPVEVWKLYFTHPQDVPAIRDKIREHPAVIDIYEYDIPFAKRYLIDKGLVPMEGDEELKMLAFDIETLYHEGEEFAEGPILMISYADEEGARVITWKNVDLPYVDVVSTEREMIKRFLRVVKEKDPDVLITYNGDNFDFAYLKKRCEKLGINFALGRDGSEPKIQRMGDRFAVEVKGRIHFDLYPVIRRTINLPTYTLEAVYEAVFGQPKEKVYAEEITTAWETGENLERVARASMEDAKVTYELGKEFLPMEAQLSRLIGQSLWDVSRSSTGNLVEWFLLRKAYERNELAPNKPDEKELARRRQSYEGGYVKEPERGLWENIVYLDFRSLYPSIIITHNVSPDTLNREGCKEYDVAPQVGHRFCKDFPGFIPSLLGDLLEERQKIKKKMKATIDPIERKLLDYRQRAIKILANSYYGYYGYARARWYCKECAESVTAWGREYITMTIKEIEEKYGFKVIYSDTDGFFATIPGADAETVKKKAMEFLKYINAKLPGALELEYEGFYKRGFFVTKKKYAVIDEEGKITTRGLEIVRRDWSEIAKETQARVLEALLKDGDVEKAVRIVKEVTEKLSKYEVPPEKLVIHEQITRDLKDYKATGPHVAVAKRLAARGVKIRPGTVISYIVLKGSGRIGDRAIPFDEFDPTKHKYDAEYYIENQVLPAVERILRAFGYRKEDLRYQKTRQVGLSAWLKPKGT

SEQ ID NO: 667 - protein, 774 aa, synthetic construct
MILDTDYITEDGKPVIRIFKKENGEFKIEYDRTFEPYFYALLKDDSAIEEVKKITAERHGTVVTVKRVEKVQKKFLGRPVEVWKLYFTHPQDVPAIRDKIREHPAVIDIYEYDIPFAKRYLIDKGLVPMEGDEELKMLAFDIETLYHEGEEFAEGPILMISYADEEGARVITWKNVDLPYVDVVSTEREMIKRFLRVVKEKDPDVLITYNGDNFDFAYLKKRCEKLGINFALGRDGSEPKIQRMGDRFAVEVKGRIHFDLYPVIRRTINLPTYTLEAVYEAVFGQPKEKVYAEEITTAWETGENLERVARCSMEDAKVTYELGKEFLPMEAQLSRLIGQSLWDVSRSSTGNLVEWFLLRKAYERNELAPNKPDEKELARRRQSYEGGYVKEPERGLWENIVYLDFRSLYPSIIITHNVSPDTLNREGCKEYDVAPQVGHRFCKDFPGFIPSLLGDLLEERQKIKKKMKATIDPIERKLLDYRQRAIKILANSYYGYYGYARARWYCKECAESVTAWGREYITMTIKEIEEKYGFKVIYSDTDGFFATIPGADAETVKKKAMEFLKYINAKLPGALELEYEGFYKRGFFVTKKKYAVIDEEGKITTRGLEIVRRDWSEIAKETQARVLEALLKDGDVEKAVRIVKEVTEKLSKYEVPPEKLVIHEQITRDLKDYKATGPHVAVAKRLAARGVKIRPGTVISYIVLKGSGRIGDRAIPFDEFDPTKHKYDAEYYIENQVLPAVERILRAFGYRKEDLRYQKTRQVGLSAWLKPKGT

SEQ ID NO: 668 - protein, 774 aa, synthetic construct
MILDTDYITEDGKPVIRIFKKENGEFKIEYDRTFEPYFYALLKDDSAIEEVKKITAERHGTVVTVKRVEKVQKKFLGRPVEVWKLYFTHPQDVPAIRDKIREHPAVIDIYEYDIPFAKRYLIDKGLVPMEGDEELKMLAFDIETLYHEGEEFAEGPILMISYADEEGARVITWKNVDLPYVDVVSTEREMIKRFLRVVKEKDPDVLITYNGDNFDFAYLKKRCEKLGINFALGRDGSEPKIQRMGDRFAVEVKGRIHFDLYPVIRRTINLPTYTLEAVYEAVFGQPKEKVYAEEITTAWETGENLERVARDSMEDAKVTYELGKEFLPMEAQLSRLIGQSLWDVSRSSTGNLVEWFLLRKAYERNELAPNKPDEKELARRRQSYEGGYVKEPERGLWENIVYLDFRSLYPSIIITHNVSPDTLNREGCKEYDVAPQVGHRFCKDFPGFIPSLLGDLLEERQKIKKKMKATIDPIERKLLDYRQRAIKILANSYYGYYGYARARWYCKECAESVTAWGREYITMTIKEIEEKYGFKVIYSDTDGFFATIPGADAETVKKKAMEFLKYINAKLPGALELEYEGFYKRGFFVTKKKYAVIDEEGKITTRGLEIVRRDWSEIAKETQARVLEALLKDGDVEKAVRIVKEVTEKLSKYEVPPEKLVIHEQITRDLKDYKATGPHVAVAKRLAARGVKIRPGTVISYIVLKGSGRIGDRAIPFDEFDPTKHKYDAEYYIENQVLPAVERILRAFGYRKEDLRYQKTRQVGLSAWLKPKGT

SEQ ID NO: 669 - protein, 774 aa, synthetic construct
MILDTDYITEDGKPVIRIFKKENGEFKIEYDRTFEPYFYALLKDDSAIEEVKKITAERHGTVVTVKRVEKVQKKFLGRPVEVWKLYFTHPQDVPAIRDKIREHPAVIDIYEYDIPFAKRYLIDKGLVPMEGDEELKMLAFDIETLYHEGEEFAEGPILMISYADEEGARVITWKNVDLPYVDVVSTEREMIKRFLRVVKEKDPDVLITYNGDNFDFAYLKKRCEKLGINFALGRDGSEPKIQRMGDRFAVEVKGRIHFDLYPVIRRTINLPTYTLEAVYEAVFGQPKEKVYAEEITTAWETGENLERVARESMEDAKVTYELGKEFLPMEAQLSRLIGQSLWDVSRSSTGNLVEWFLLRKAYERNELAPNKPDEKELARRRQSYEGGYVKEPERGLWENIVYLDFRSLYPSIIITHNVSPDTLNREGCKEYDVAPQVGHRFCKDFPGFIPSLLGDLLEERQKIKKKMKATIDPIERKLLDYRQRAIKILANSYYGYYGYARARWYCKECAESVTAWGREYITMTIKEIEEKYGFKVIYSDTDGFFATIPGADAETVKKKAMEFLKYINAKLPGALELEYEGFYKRGFFVTKKKYAVIDEEGKITTRGLEIVRRDWSEIAKETQARVLEALLKDGDVEKAVRIVKEVTEKLSKYEVPPEKLVIHEQITRDLKDYKATGPHVAVAKRLAARGVKIRPGTVISYIVLKGSGRIGDRAIPFDEFDPTKHKYDAEYYIENQVLPAVERILRAFGYRKEDLRYQKTRQVGLSAWLKPKGT

SEQ ID NO: 670 - protein, 774 aa, synthetic construct
MILDTDYITEDGKPVIRIFKKENGEFKIEYDRTFEPYFYALLKDDSAIEEVKKITAERHGTVVTVKRVEKVQKKFLGRPVEVWKLYFTHPQDVPAIRDKIREHPAVIDIYEYDIPFAKRYLIDKGLVPMEGDEELKMLAFDIETLYHEGEEFAEGPILMISYADEEGARVITWKNVDLPYVDVVSTEREMIKRFLRVVKEKDPDVLITYNGDNFDFAYLKKRCEKLGINFALGRDGSEPKIQRMGDRFAVEVKGRIHFDLYPVIRRTINLPTYTLEAVYEAVFGQPKEKVYAEEITTAWETGENLERVARFSMEDAKVTYELGKEFLPMEAQLSRLIGQSLWDVSRSSTGNLVEWFLLRKAYERNELAPNKPDEKELARRRQSYEGGYVKEPERGLWENIVYLDFRSLYPSIIITHNVSPDTLNREGCKEYDVAPQVGHRFCKDFPGFIPSLLGDLLEERQKIKKKMKATIDPIERKLLDYRQRAIKILANSYYGYYGYARARWYCKECAESVTAWGREYITMTIKEIEEKYGFKVIYSDTDGFFATIPGADAETVKKKAMEFLKYINAKLPGALELEYEGFYKRGFFVTKKKYAVIDEEGKITTRGLEIVRRDWSEIAKETQARVLEALLKDGDVEKAVRIVKEVTEKLSKYEVPPEKLVIHEQITRDLKDYKATGPHVAVAKRLAARGVKIRPGTVISYIVLKGSGRIGDRAIPFDEFDPTKHKYDAEYYIENQVLPAVERILRAFGYRKEDLRYQKTRQVGLSAWLKPKGT

SEQ ID NO: 671 - protein, 774 aa, synthetic construct
MILDTDYITEDGKPVIRIFKKENGEFKIEYDRTFEPYFYALLKDDSAIEEVKKITAERHGTVVTVKRVEKVQKKFLGRPVEVWKLYFTHPQDVPAIRDKIREHPAVIDIYEYDIPFAKRYLIDKGLVPMEGDEELKMLAFDIETLYHEGEEFAEGPILMISYADEEGARVITWKNVDLPYVDVVSTEREMIKRFLRVVKEKDPDVLITYNGDNFDFAYLKKRCEKLGINFALGRDGSEPKIQRMGDRFAVEVKGRIHFDLYPVIRRTINLPTYTLEAVYEAVFGQPKEKVYAEEITTAWETGENLERVARGSMEDAKVTYELGKEFLPMEAQLSRLIGQSLWDVSRSSTGNLVEWFLLRKAYERNELAPNKPDEKELARRRQSYEGGYVKEPERGLWENIVYLDFRSLYPSIIITHNVSPDTLNREGCKEYDVAPQVGHRFCKDFPGFIPSLLGDLLEERQKIKKKMKATIDPIERKLLDYRQRAIKILANSYYGYYGYARARWYCKECAESVTAWGREYITMTIKEIEEKYGFKVIYSDTDGFFATIPGADAETVKKKAMEFLKYINAKLPGALELEYEGFYKRGFFVTKKKYAVIDEEGKITTRGLEIVRRDWSEIAKETQARVLEALLKDGDVEKAVRIVKEVTEKLSKYEVPPEKLVIHEQITRDLKDYKATGPHVAVAKRLAARGVKIRPGTVISYIVLKGSGRIGDRAIPFDEFDPTKHKYDAEYYIENQVLPAVERILRAFGYRKEDLRYQKTRQVGLSAWLKPKGT

SEQ ID NO: 672 - protein, 774 aa, synthetic construct
MILDTDYITEDGKPVIRIFKKENGEFKIEYDRTFEPYFYALLKDDSAIEEVKKITAERHGTVVTVKRVEKVQKKFLGRPVEVWKLYFTHPQDVPAIRDKIREHPAVIDIYEYDIPFAKRYLIDKGLVPMEGDEELKMLAFDIETLYHEGEEFAEGPILMISYADEEGARVITWKNVDLPYVDVVSTEREMIKRFLRVVKEKDPDVLITYNGDNFDFAYLKKRCEKLGINFALGRDGSEPKIQRMGDRFAVEVKGRIHFDLYPVIRRTINLPTYTLEAVYEAVFGQPKEKVYAEEITTAWETGENLERVARHSMEDAKVTYELGKEFLPMEAQLSRLIGQSLWDVSRSSTGNLVEWFLLRKAYERNELAPNKPDEKELARRRQSYEGGYVKEPERGLWENIVYLDFRSLYPSIIITHNVSPDTLNREGCKEYDVAPQVGHRFCKDFPGFIPSLLGDLLEERQKIKKKMKATIDPIERKLLDYRQRAIKILANSYYGYYGYARARWYCKECAESVTAWGREYITMTIKEIEEKYGFKVIYSDTDGFFATIPGADAETVKKKAMEFLKYINAKLPGALELEYEGFYKRGFFVTKKKYAVIDEEGKITTRGLEIVRRDWSEIAKETQARVLEALLKDGDVEKAVRIVKEVTEKLSKYEVPPEKLVIHEQITRDLKDYKATGPHVAVAKRLAARGVKIRPGTVISYIVLKGSGRIGDRAIPFDEFDPTKHKYDAEYYIENQVLPAVERILRAFGYRKEDLRYQKTRQVGLSAWLKPKGT

SEQ ID NO: 673 - protein, 774 aa, synthetic construct
MILDTDYITEDGKPVIRIFKKENGEFKIEYDRTFEPYFYALLKDDSAIEEVKKITAERHGTVVTVKRVEKVQKKFLGRPVEVWKLYFTHPQDVPAIRDKIREHPAVIDIYEYDIPFAKRYLIDKGLVPMEGDEELKMLAFDIETLYHEGEEFAEGPILMISYADEEGARVITWKNVDLPYVDVVSTEREMIKRFLRVVKEKDPDVLITYNGDNFDFAYLKKRCEKLGINFALGRDGSEPKIQRMGDRFAVEVKGRIHFDLYPVIRRTINLPTYTLEAVYEAVFGQPKEKVYAEEITTAWETGENLERVARISMEDAKVTYELGKEFLPMEAQLSRLIGQSLWDVSRSSTGNLVEWFLLRKAYERNELAPNKPDEKELARRRQSYEGGYVKEPERGLWENIVYLDFRSLYPSIIITHNVSPDTLNREGCKEYDVAPQVGHRFCKDFPGFIPSLLGDLLEERQKIKKKMKATIDPIERKLLDYRQRAIKILANSYYGYYGYARARWYCKECAESVTAWGREYITMTIKEIEEKYGFKVIYSDTDGFFATIPGADAETVKKKAMEFLKYINAKLPGALELEYEGFYKRGFFVTKKKYAVIDEEGKITTRGLEIVRRDWSEIAKETQARVLEALLKDGDVEKAVRIVKEVTEKLSKYEVPPEKLVIHEQITRDLKDYKATGPHVAVAKRLAARGVKIRPGTVISYIVLKGSGRIGDRAIPFDEFDPTKHKYDAEYYIENQVLPAVERILRAFGYRKEDLRYQKTRQVGLSAWLKPKGT

SEQ ID NO: 674 - protein, 774 aa, synthetic construct
MILDTDYITEDGKPVIRIFKKENGEFKIEYDRTFEPYFYALLKDDSAIEEVKKITAERHGTVVTVKRVEKVQKKFLGRPVEVWKLYFTHPQDVPAIRDKIREHPAVIDIYEYDIPFAKRYLIDKGLVPMEGDEELKMLAFDIETLYHEGEEFAEGPILMISYADEEGARVITWKNVDLPYVDVVSTEREMIKRFLRVVKEKDPDVLITYNGDNFDFAYLKKRCEKLGINFALGRDGSEPKIQRMGDRFAVEVKGRIHFDLYPVIRRTINLPTYTLEAVYEAVFGQPKEKVYAEEITTAWETGENLERVARKSMEDAKVTYELGKEFLPMEAQLSRLIGQSLWDVSRSSTGNLVEWFLLRKAYERNELAPNKPDEKELARRRQSYEGGYVKEPERGLWENIVYLDFRSLYPSIIITHNVSPDTLNREGCKEYDVAPQVGHRFCKDFPGFIPSLLGDLLEERQKIKKKMKATIDPIERKLLDYRQRAIKILANSYYGYYGYARARWYCKECAESVTAWGREYITMTIKEIEEKYGFKVIYSDTDGFFATIPGADAETVKKKAMEFLKYINAKLPGALELEYEGFYKRGFFVTKKKYAVIDEEGKITTRGLEIVRRDWSEIAKETQARVLEALLKDGDVEKAVRIVKEVTEKLSKYEVPPEKLVIHEQITRDLKDYKATGPHVAVAKRLAARGVKIRPGTVISYIVLKGSGRIGDRAIPFDEFDPTKHKYDAEYYIENQVLPAVERILRAFGYRKEDLRYQKTRQVGLSAWLKPKGT

SEQ ID NO: 675 - protein, 774 aa, synthetic construct
MILDTDYITEDGKPVIRIFKKENGEFKIEYDRTFEPYFYALLKDDSAIEEVKKITAERHGTVVTVKRVEKVQKKFLGRPVEVWKLYFTHPQDVPAIRDKIREHPAVIDIYEYDIPFAKRYLIDKGLVPMEGDEELKMLAFDIETLYHEGEEFAEGPILMISYADEEGARVITWKNVDLPYVDVVSTEREMIKRFLRVVKEKDPDVLITYNGDNFDFAYLKKRCEKLGINFALGRDGSEPKIQRMGDRFAVEVKGRIHFDLYPVIRRTINLPTYTLEAVYEAVFGQPKEKVYAEEITTAWETGENLERVARLSMEDAKVTYELGKEFLPMEAQLSRLIGQSLWDVSRSSTGNLVEWFLLRKAYERNELAPNKPDEKELARRRQSYEGGYVKEPERGLWENIVYLDFRSLYPSIIITHNVSPDTLNREGCKEYDVAPQVGHRFCKDFPGFIPSLLGDLLEERQKIKKKMKATIDPIERKLLDYRQRAIKILANSYYGYYGYARARWYCKECAESVTAWGREYITMTIKEIEEKYGFKVIYSDTDGFFATIPGADAETVKKKAMEFLKYINAKLPGALELEYEGFYKRGFFVTKKKYAVIDEEGKITTRGLEIVRRDWSEIAKETQARVLEALLKDGDVEKAVRIVKEVTEKLSKYEVPPEKLVIHEQITRDLKDYKATGPHVAVAKRLAARGVKIRPGTVISYIVLKGSGRIGDRAIPFDEFDPTKHKYDAEYYIENQVLPAVERILRAFGYRKEDLRYQKTRQVGLSAWLKPKGT

SEQ ID NO: 676 - protein, 774 aa, synthetic construct
MILDTDYITEDGKPVIRIFKKENGEFKIEYDRTFEPYFYALLKDDSAIEEVKKITAERHGTVVTVKRVEKVQKKFLGRPVEVWKLYFTHPQDVPAIRDKIREHPAVIDIYEYDIPFAKRYLIDKGLVPMEGDEELKMLAFDIETLYHEGEEFAEGPILMISYADEEGARVITWKNVDLPYVDVVSTEREMIKRFLRVVKEKDPDVLITYNGDNFDFAYLKKRCEKLGINFALGRDGSEPKIQRMGDRFAVEVKGRIHFDLYPVIRRTINLPTYTLEAVYEAVFGQPKEKVYAEEITTAWETGENLERVARMSMEDAKVTYELGKEFLPMEAQLSRLIGQSLWDVSRSSTGNLVEWFLLRKAYERNELAPNKPDEKELARRRQSYEGGYVKEPERGLWENIVYLDFRSLYPSIIITHNVSPDTLNREGCKEYDVAPQVGHRFCKDFPGFIPSLLGDLLEERQKIKKKMKATIDPIERKLLDYRQRAIKILANSYYGYYGYARARWYCKECAESVTAWGREYITMTIKEIEEKYGFKVIYSDTDGFFATIPGADAETVKKKAMEFLKYINAKLPGALELEYEGFYKRGFFVTKKKYAVIDEEGKITTRGLEIVRRDWSEIAKETQARVLEALLKDGDVEKAVRIVKEVTEKLSKYEVPPEKLVIHEQITRDLKDYKATGPHVAVAKRLAARGVKIRPGTVISYIVLKGSGRIGDRAIPFDEFDPTKHKYDAEYYIENQVLPAVERILRAFGYRKEDLRYQKTRQVGLSAWLKPKGT

SEQ ID NO: 677 - protein, 774 aa, synthetic construct
MILDTDYITEDGKPVIRIFKKENGEFKIEYDRTFEPYFYALLKDDSAIEEVKKITAERHGTVVTVKRVEKVQKKFLGRPVEVWKLYFTHPQDVPAIRDKIREHPAVIDIYEYDIPFAKRYLIDKGLVPMEGDEELKMLAFDIETLYHEGEEFAEGPILMISYADEEGARVITWKNVDLPYVDVVSTEREMIKRFLRVVKEKDPDVLITYNGDNFDFAYLKKRCEKLGINFALGRDGSEPKIQRMGDRFAVEVKGRIHFDLYPVIRRTINLPTYTLEAVYEAVFGQPKEKVYAEEITTAWETGENLERVARNSMEDAKVTYELGKEFLPMEAQLSRLIGQSLWDVSRSSTGNLVEWFLLRKAYERNELAPNKPDEKELARRRQSYEGGYVKEPERGLWENIVYLDFRSLYPSIIITHNVSPDTLNREGCKEYDVAPQVGHRFCKDFPGFIPSLLGDLLEERQKIKKKMKATIDPIERKLLDYRQRAIKILANSYYGYYGYARARWYCKECAESVTAWGREYITMTIKEIEEKYGFKVIYSDTDGFFATIPGADAETVKKKAMEFLKYINAKLPGALELEYEGFYKRGFFVTKKKYAVIDEEGKITTRGLEIVRRDWSEIAKETQARVLEALLKDGDVEKAVRIVKEVTEKLSKYEVPPEKLVIHEQITRDLKDYKATGPHVAVAKRLAARGVKIRPGTVISYIVLKGSGRIGDRAIPFDEFDPTKHKYDAEYYIENQVLPAVERILRAFGYRKEDLRYQKTRQVGLSAWLKPKGT

SEQ ID NO: 678 - protein, 774 aa, synthetic construct
MILDTDYITEDGKPVIRIFKKENGEFKIEYDRTFEPYFYALLKDDSAIEEVKKITAERHGTVVTVKRVEKVQKKFLGRPVEVWKLYFTHPQDVPAIRDKIREHPAVIDIYEYDIPFAKRYLIDKGLVPMEGDEELKMLAFDIETLYHEGEEFAEGPILMISYADEEGARVITWKNVDLPYVDVVSTEREMIKRFLRVVKEKDPDVLITYNGDNFDFAYLKKRCEKLGINFALGRDGSEPKIQRMGDRFAVEVKGRIHFDLYPVIRRTINLPTYTLEAVYEAVFGQPKEKVYAEEITTAWETGENLERVARPSMEDAKVTYELGKEFLPMEAQLSRLIGQSLWDVSRSSTGNLVEWFLLRKAYERNELAPNKPDEKELARRRQSYEGGYVKEPERGLWENIVYLDFRSLYPSIIITHNVSPDTLNREGCKEYDVAPQVGHRFCKDFPGFIPSLLGDLLEERQKIKKKMKATIDPIERKLLDYRQRAIKILANSYYGYYGYARARWYCKECAESVTAWGREYITMTIKEIEEKYGFKVIYSDTDGFFATIPGADAETVKKKAMEFLKYINAKLPGALELEYEGFYKRGFFVTKKKYAVIDEEGKITTRGLEIVRRDWSEIAKETQARVLEALLKDGDVEKAVRIVKEVTEKLSKYEVPPEKLVIHEQITRDLKDYKATGPHVAVAKRLAARGVKIRPGTVISYIVLKGSGRIGDRAIPFDEFDPTKHKYDAEYYIENQVLPAVERILRAFGYRKEDLRYQKTRQVGLSAWLKPKGT

SEQ ID NO: 679 - protein, 774 aa, synthetic construct
MILDTDYITEDGKPVIRIFKKENGEFKIEYDRTFEPYFYALLKDDSAIEEVKKITAERHGTVVTVKRVEKVQKKFLGRPVEVWKLYFTHPQDVPAIRDKIREHPAVIDIYEYDIPFAKRYLIDKGLVPMEGDEELKMLAFDIETLYHEGEEFAEGPILMISYADEEGARVITWKNVDLPYVDVVSTEREMIKRFLRVVKEKDPDVLITYNGDNFDFAYLKKRCEKLGINFALGRDGSEPKIQRMGDRFAVEVKGRIHFDLYPVIRRTINLPTYTLEAVYEAVFGQPKEKVYAEEITTAWETGENLERVARQSMEDAKVTYELGKEFLPMEAQLSRLIGQSLWDVSRSSTGNLVEWFLLRKAYERNELAPNKPDEKELARRRQSYEGGYVKEPERGLWENIVYLDFRSLYPSIIITHNVSPDTLNREGCKEYDVAPQVGHRFCKDFPGFIPSLLGDLLEERQKIKKKMKATIDPIERKLLDYRQRAIKILANSYYGYYGYARARWYCKECAESVTAWGREYITMTIKEIEEKYGFKVIYSDTDGFFATIPGADAETVKKKAMEFLKYINAKLPGALELEYEGFYKRGFFVTKKKYAVIDEEGKITTRGLEIVRRDWSEIAKETQARVLEALLKDGDVEKAVRIVKEVTEKLSKYEVPPEKLVIHEQITRDLKDYKATGPHVAVAKRLAARGVKIRPGTVISYIVLKGSGRIGDRAIPFDEFDPTKHKYDAEYYIENQVLPAVERILRAFGYRKEDLRYQKTRQVGLSAWLKPKGT

SEQ ID NO: 680 - protein, 774 aa, synthetic construct
MILDTDYITEDGKPVIRIFKKENGEFKIEYDRTFEPYFYALLKDDSAIEEVKKITAERHGTVVTVKRVEKVQKKFLGRPVEVWKLYFTHPQDVPAIRDKIREHPAVIDIYEYDIPFAKRYLIDKGLVPMEGDEELKMLAFDIETLYHEGEEFAEGPILMISYADEEGARVITWKNVDLPYVDVVSTEREMIKRFLRVVKEKDPDVLITYNGDNFDFAYLKKRCEKLGINFALGRDGSEPKIQRMGDRFAVEVKGRIHFDLYPVIRRTINLPTYTLEAVYEAVFGQPKEKVYAEEITTAWETGENLERVARRSMEDAKVTYELGKEFLPMEAQLSRLIGQSLWDVSRSSTGNLVEWFLLRKAYERNELAPNKPDEKELARRRQSYEGGYVKEPERGLWENIVYLDFRSLYPSIIITHNVSPDTLNREGCKEYDVAPQVGHRFCKDFPGFIPSLLGDLLEERQKIKKKMKATIDPIERKLLDYRQRAIKILANSYYGYYGYARARWYCKECAESVTAWGREYITMTIKEIEEKYGFKVIYSDTDGFFATIPGADAETVKKKAMEFLKYINAKLPGALELEYEGFYKRGFFVTKKKYAVIDEEGKITTRGLEIVRRDWSEIAKETQARVLEALLKDGDVEKAVRIVKEVTEKLSKYEVPPEKLVIHEQITRDLKDYKATGPHVAVAKRLAARGVKIRPGTVISYIVLKGSGRIGDRAIPFDEFDPTKHKYDAEYYIENQVLPAVERILRAFGYRKEDLRYQKTRQVGLSAWLKPKGT

SEQ ID NO: 681 - protein, 774 aa, synthetic construct
MILDTDYITEDGKPVIRIFKKENGEFKIEYDRTFEPYFYALLKDDSAIEEVKKITAERHGTVVTVKRVEKVQKKFLGRPVEVWKLYFTHPQDVPAIRDKIREHPAVIDIYEYDIPFAKRYLIDKGLVPMEGDEELKMLAFDIETLYHEGEEFAEGPILMISYADEEGARVITWKNVDLPYVDVVSTEREMIKRFLRVVKEKDPDVLITYNGDNFDFAYLKKRCEKLGINFALGRDGSEPKIQRMGDRFAVEVKGRIHFDLYPVIRRTINLPTYTLEAVYEAVFGQPKEKVYAEEITTAWETGENLERVARSSMEDAKVTYELGKEFLPMEAQLSRLIGQSLWDVSRSSTGNLVEWFLLRKAYERNELAPNKPDEKELARRRQSYEGGYVKEPERGLWENIVYLDFRSLYPSIIITHNVSPDTLNREGCKEYDVAPQVGHRFCKDFPGFIPSLLGDLLEERQKIKKKMKATIDPIERKLLDYRQRAIKILANSYYGYYGYARARWYCKECAESVTAWGREYITMTIKEIEEKYGFKVIYSDTDGFFATIPGADAETVKKKAMEFLKYINAKLPGALELEYEGFYKRGFFVTKKKYAVIDEEGKITTRGLEIVRRDWSEIAKETQARVLEALLKDGDVEKAVRIVKEVTEKLSKYEVPPEKLVIHEQITRDLKDYKATGPHVAVAKRLAARGVKIRPGTVISYIVLKGSGRIGDRAIPFDEFDPTKHKYDAEYYIENQVLPAVERILRAFGYRKEDLRYQKTRQVGLSAWLKPKGT

SEQ ID NO: 682 - protein, 774 aa, synthetic construct
MILDTDYITEDGKPVIRIFKKENGEFKIEYDRTFEPYFYALLKDDSAIEEVKKITAERHGTVVTVKRVEKVQKKFLGRPVEVWKLYFTHPQDVPAIRDKIREHPAVIDIYEYDIPFAKRYLIDKGLVPMEGDEELKMLAFDIETLYHEGEEFAEGPILMISYADEEGARVITWKNVDLPYVDVVSTEREMIKRFLRVVKEKDPDVLITYNGDNFDFAYLKKRCEKLGINFALGRDGSEPKIQRMGDRFAVEVKGRIHFDLYPVIRRTINLPTYTLEAVYEAVFGQPKEKVYAEEITTAWETGENLERVARTSMEDAKVTYELGKEFLPMEAQLSRLIGQSLWDVSRSSTGNLVEWFLLRKAYERNELAPNKPDEKELARRRQSYEGGYVKEPERGLWENIVYLDFRSLYPSIIITHNVSPDTLNREGCKEYDVAPQVGHRFCKDFPGFIPSLLGDLLEERQKIKKKMKATIDPIERKLLDYRQRAIKILANSYYGYYGYARARWYCKECAESVTAWGREYITMTIKEIEEKYGFKVIYSDTDGFFATIPGADAETVKKKAMEFLKYINAKLPGALELEYEGFYKRGFFVTKKKYAVIDEEGKITTRGLEIVRRDWSEIAKETQARVLEALLKDGDVEKAVRIVKEVTEKLSKYEVPPEKLVIHEQITRDLKDYKATGPHVAVAKRLAARGVKIRPGTVISYIVLKGSGRIGDRAIPFDEFDPTKHKYDAEYYIENQVLPAVERILRAFGYRKEDLRYQKTRQVGLSAWLKPKGT

SEQ ID NO: 683 - protein, 774 aa, synthetic construct
MILDTDYITEDGKPVIRIFKKENGEFKIEYDRTFEPYFYALLKDDSAIEEVKKITAERHGTVVTVKRVEKVQKKFLGRPVEVWKLYFTHPQDVPAIRDKIREHPAVIDIYEYDIPFAKRYLIDKGLVPMEGDEELKMLAFDIETLYHEGEEFAEGPILMISYADEEGARVITWKNVDLPYVDVVSTEREMIKRFLRVVKEKDPDVLITYNGDNFDFAYLKKRCEKLGINFALGRDGSEPKIQRMGDRFAVEVKGRIHFDLYPVIRRTINLPTYTLEAVYEAVFGQPKEKVYAEEITTAWETGENLERVARVSMEDAKVTYELGKEFLPMEAQLSRLIGQSLWDVSRSSTGNLVEWFLLRKAYERNELAPNKPDEKELARRRQSYEGGYVKEPERGLWENIVYLDFRSLYPSIIITHNVSPDTLNREGCKEYDVAPQVGHRFCKDFPGFIPSLLGDLLEERQKIKKKMKATIDPIERKLLDYRQRAIKILANSYYGYYGYARARWYCKECAESVTAWGREYITMTIKEIEEKYGFKVIYSDTDGFFATIPGADAETVKKKAMEFLKYINAKLPGALELEYEGFYKRGFFVTKKKYAVIDEEGKITTRGLEIVRRDWSEIAKETQARVLEALLKDGDVEKAVRIVKEVTEKLSKYEVPPEKLVIHEQITRDLKDYKATGPHVAVAKRLAARGVKIRPGTVISYIVLKGSGRIGDRAIPFDEFDPTKHKYDAEYYIENQVLPAVERILRAFGYRKEDLRYQKTRQVGLSAWLKPKGT

SEQ ID NO: 684 - protein, 774 aa, synthetic construct
MILDTDYITEDGKPVIRIFKKENGEFKIEYDRTFEPYFYALLKDDSAIEEVKKITAERHGTVVTVKRVEKVQKKFLGRPVEVWKLYFTHPQDVPAIRDKIREHPAVIDIYEYDIPFAKRYLIDKGLVPMEGDEELKMLAFDIETLYHEGEEFAEGPILMISYADEEGARVITWKNVDLPYVDVVSTEREMIKRFLRVVKEKDPDVLITYNGDNFDFAYLKKRCEKLGINFALGRDGSEPKIQRMGDRFAVEVKGRIHFDLYPVIRRTINLPTYTLEAVYEAVFGQPKEKVYAEEITTAWETGENLERVARWSMEDAKVTYELGKEFLPMEAQLSRLIGQSLWDVSRSSTGNLVEWFLLRKAYERNELAPNKPDEKELARRRQSYEGGYVKEPERGLWENIVYLDFRSLYPSIIITHNVSPDTLNREGCKEYDVAPQVGHRFCKDFPGFIPSLLGDLLEERQKIKKKMKATIDPIERKLLDYRQRAIKILANSYYGYYGYARARWYCKECAESVTAWGREYITMTIKEIEEKYGFKVIYSDTDGFFATIPGADAETVKKKAMEFLKYINAKLPGALELEYEGFYKRGFFVTKKKYAVIDEEGKITTRGLEIVRRDWSEIAKETQARVLEALLKDGDVEKAVRIVKEVTEKLSKYEVPPEKLVIHEQITRDLKDYKATGPHVAVAKRLAARGVKIRPGTVISYIVLKGSGRIGDRAIPFDEFDPTKHKYDAEYYIENQVLPAVERILRAFGYRKEDLRYQKTRQVGLSAWLKPKGT

SEQ ID NO: 685 - protein, 774 aa, synthetic construct
MILDTDYITEDGKPVIRIFKKENGEFKIEYDRTFEPYFYALLKDDSAIEEVKKITAERHGTVVTVKRVEKVQKKFLGRPVEVWKLYFTHPQDVPAIRDKIREHPAVIDIYEYDIPFAKRYLIDKGLVPMEGDEELKMLAFDIETLYHEGEEFAEGPILMISYADEEGARVITWKNVDLPYVDVVSTEREMIKRFLRVVKEKDPDVLITYNGDNFDFAYLKKRCEKLGINFALGRDGSEPKIQRMGDRFAVEVKGRIHFDLYPVIRRTINLPTYTLEAVYEAVFGQPKEKVYAEEITTAWETGENLERVARYDMEDAKVTYELGKEFLPMEAQLSRLIGQSLWDVSRSSTGNLVEWFLLRKAYERNELAPNKPDEKELARRRQSYEGGYVKEPERGLWENIVYLDFRSLYPSIIITHNVSPDTLNREGCKEYDVAPQVGHRFCKDFPGFIPSLLGDLLEERQKIKKKMKATIDPIERKLLDYRQRAIKILANSYYGYYGYARARWYCKECAESVTAWGREYITMTIKEIEEKYGFKVIYSDTDGFFATIPGADAETVKKKAMEFLKYINAKLPGALELEYEGFYKRGFFVTKKKYAVIDEEGKITTRGLEIVRRDWSEIAKETQARVLEALLKDGDVEKAVRIVKEVTEKLSKYEVPPEKLVIHEQITRDLKDYKATGPHVAVAKRLAARGVKIRPGTVISYIVLKGSGRIGDRAIPFDEFDPTKHKYDAEYYIENQVLPAVERILRAFGYRKEDLRYQKTRQVGLSAWLKPKGT

SEQ ID NO: 686 - protein, 774 aa, synthetic construct
MILDTDYITEDGKPVIRIFKKENGEFKIEYDRTFEPYFYALLKDDSAIEEVKKITAERHGTVVTVKRVEKVQKKFLGRPVEVWKLYFTHPQDVPAIRDKIREHPAVIDIYEYDIPFAKRYLIDKGLVPMEGDEELKMLAFDIETLYHEGEEFAEGPILMISYADEEGARVITWKNVDLPYVDVVSTEREMIKRFLRVVKEKDPDVLITYNGDNFDFAYLKKRCEKLGINFALGRDGSEPKIQRMGDRFAVEVKGRIHFDLYPVIRRTINLPTYTLEAVYEAVFGQPKEKVYAEEITTAWETGENLERVARYEMEDAKVTYELGKEFLPMEAQLSRLIGQSLWDVSRSSTGNLVEWFLLRKAYERNELAPNKPDEKELARRRQSYEGGYVKEPERGLWENIVYLDFRSLYPSIIITHNVSPDTLNREGCKEYDVAPQVGHRFCKDFPGFIPSLLGDLLEERQKIKKKMKATIDPIERKLLDYRQRAIKILANSYYGYYGYARARWYCKECAESVTAWGREYITMTIKEIEEKYGFKVIYSDTDGFFATIPGADAETVKKKAMEFLKYINAKLPGALELEYEGFYKRGFFVTKKKYAVIDEEGKITTRGLEIVRRDWSEIAKETQARVLEALLKDGDVEKAVRIVKEVTEKLSKYEVPPEKLVIHEQITRDLKDYKATGPHVAVAKRLAARGVKIRPGTVISYIVLKGSGRIGDRAIPFDEFDPTKHKYDAEYYIENQVLPAVERILRAFGYRKEDLRYQKTRQVGLSAWLKPKGT

SEQ ID NO: 687 - protein, 774 aa, synthetic construct
MILDTDYITEDGKPVIRIFKKENGEFKIEYDRTFEPYFYALLKDDSAIEEVKKITAERHGTVVTVKRVEKVQKKFLGRPVEVWKLYFTHPQDVPAIRDKIREHPAVIDIYEYDIPFAKRYLIDKGLVPMEGDEELKMLAFDIETLYHEGEEFAEGPILMISYADEEGARVITWKNVDLPYVDVVSTEREMIKRFLRVVKEKDPDVLITYNGDNFDFAYLKKRCEKLGINFALGRDGSEPKIQRMGDRFAVEVKGRIHFDLYPVIRRTINLPTYTLEAVYEAVFGQPKEKVYAEEITTAWETGENLERVARYFMEDAKVTYELGKEFLPMEAQLSRLIGQSLWDVSRSSTGNLVEWFLLRKAYERNELAPNKPDEKELARRRQSYEGGYVKEPERGLWENIVYLDFRSLYPSIIITHNVSPDTLNREGCKEYDVAPQVGHRFCKDFPGFIPSLLGDLLEERQKIKKKMKATIDPIERKLLDYRQRAIKILANSYYGYYGYARARWYCKECAESVTAWGREYITMTIKEIEEKYGFKVIYSDTDGFFATIPGADAETVKKKAMEFLKYINAKLPGALELEYEGFYKRGFFVTKKKYAVIDEEGKITTRGLEIVRRDWSEIAKETQARVLEALLKDGDVEKAVRIVKEVTEKLSKYEVPPEKLVIHEQITRDLKDYKATGPHVAVAKRLAARGVKIRPGTVISYIVLKGSGRIGDRAIPFDEFDPTKHKYDAEYYIENQVLPAVERILRAFGYRKEDLRYQKTRQVGLSAWLKPKGT

SEQ ID NO: 688 - protein, 774 aa, synthetic construct
MILDTDYITEDGKPVIRIFKKENGEFKIEYDRTFEPYFYALLKDDSAIEEVKKITAERHGTVVTVKRVEKVQKKFLGRPVEVWKLYFTHPQDVPAIRDKIREHPAVIDIYEYDIPFAKRYLIDKGLVPMEGDEELKMLAFDIETLYHEGEEFAEGPILMISYADEEGARVITWKNVDLPYVDVVSTEREMIKRFLRVVKEKDPDVLITYNGDNFDFAYLKKRCEKLGINFALGRDGSEPKIQRMGDRFAVEVKGRIHFDLYPVIRRTINLPTYTLEAVYEAVFGQPKEKVYAEEITTAWETGENLERVARYHMEDAKVTYELGKEFLPMEAQLSRLIGQSLWDVSRSSTGNLVEWFLLRKAYERNELAPNKPDEKELARRRQSYEGGYVKEPERGLWENIVYLDFRSLYPSIIITHNVSPDTLNREGCKEYDVAPQVGHRFCKDFPGFIPSLLGDLLEERQKIKKKMKATIDPIERKLLDYRQRAIKILANSYYGYYGYARARWYCKECAESVTAWGREYITMTIKEIEEKYGFKVIYSDTDGFFATIPGADAETVKKKAMEFLKYINAKLPGALELEYEGFYKRGFFVTKKKYAVIDEEGKITTRGLEIVRRDWSEIAKETQARVLEALLKDGDVEKAVRIVKEVTEKLSKYEVPPEKLVIHEQITRDLKDYKATGPHVAVAKRLAARGVKIRPGTVISYIVLKGSGRIGDRAIPFDEFDPTKHKYDAEYYIENQVLPAVERILRAFGYRKEDLRYQKTRQVGLSAWLKPKGT

SEQ ID NO: 689 - protein, 774 aa, synthetic construct
MILDTDYITEDGKPVIRIFKKENGEFKIEYDRTFEPYFYALLKDDSAIEEVKKITAERHGTVVTVKRVEKVQKKFLGRPVEVWKLYFTHPQDVPAIRDKIREHPAVIDIYEYDIPFAKRYLIDKGLVPMEGDEELKMLAFDIETLYHEGEEFAEGPILMISYADEEGARVITWKNVDLPYVDVVSTEREMIKRFLRVVKEKDPDVLITYNGDNFDFAYLKKRCEKLGINFALGRDGSEPKIQRMGDRFAVEVKGRIHFDLYPVIRRTINLPTYTLEAVYEAVFGQPKEKVYAEEITTAWETGENLERVARYIMEDAKVTYELGKEFLPMEAQLSRLIGQSLWDVSRSSTGNLVEWFLLRKAYERNELAPNKPDEKELARRRQSYEGGYVKEPERGLWENIVYLDFRSLYPSIIITHNVSPDTLNREGCKEYDVAPQVGHRFCKDFPGFIPSLLGDLLEERQKIKKKMKATIDPIERKLLDYRQRAIKILANSYYGYYGYARARWYCKECAESVTAWGREYITMTIKEIEEKYGFKVIYSDTDGFFATIPGADAETVKKKAMEFLKYINAKLPGALELEYEGFYKRGFFVTKKKYAVIDEEGKITTRGLEIVRRDWSEIAKETQARVLEALLKDGDVEKAVRIVKEVTEKLSKYEVPPEKLVIHEQITRDLKDYKATGPHVAVAKRLAARGVKIRPGTVISYIVLKGSGRIGDRAIPFDEFDPTKHKYDAEYYIENQVLPAVERILRAFGYRKEDLRYQKTRQVGLSAWLKPKGT

SEQ ID NO: 690 - protein, 774 aa, synthetic construct
MILDTDYITEDGKPVIRIFKKENGEFKIEYDRTFEPYFYALLKDDSAIEEVKKITAERHGTVVTVKRVEKVQKKFLGRPVEVWKLYFTHPQDVPAIRDKIREHPAVIDIYEYDIPFAKRYLIDKGLVPMEGDEELKMLAFDIETLYHEGEEFAEGPILMISYADEEGARVITWKNVDLPYVDVVSTEREMIKRFLRVVKEKDPDVLITYNGDNFDFAYLKKRCEKLGINFALGRDGSEPKIQRMGDRFAVEVKGRIHFDLYPVIRRTINLPTYTLEAVYEAVFGQPKEKVYAEEITTAWETGENLERVARYKMEDAKVTYELGKEFLPMEAQLSRLIGQSLWDVSRSSTGNLVEWFLLRKAYERNELAPNKPDEKELARRRQSYEGGYVKEPERGLWENIVYLDFRSLYPSIIITHNVSPDTLNREGCKEYDVAPQVGHRFCKDFPGFIPSLLGDLLEERQKIKKKMKATIDPIERKLLDYRQRAIKILANSYYGYYGYARARWYCKECAESVTAWGREYITMTIKEIEEKYGFKVIYSDTDGFFATIPGADAETVKKKAMEFLKYINAKLPGALELEYEGFYKRGFFVTKKKYAVIDEEGKITTRGLEIVRRDWSEIAKETQARVLEALLKDGDVEKAVRIVKEVTEKLSKYEVPPEKLVIHEQITRDLKDYKATGPHVAVAKRLAARGVKIRPGTVISYIVLKGSGRIGDRAIPFDEFDPTKHKYDAEYYIENQVLPAVERILRAFGYRKEDLRYQKTRQVGLSAWLKPKGT

SEQ ID NO: 691 - protein, 774 aa, synthetic construct
MILDTDYITEDGKPVIRIFKKENGEFKIEYDRTFEPYFYALLKDDSAIEEVKKITAERHGTVVTVKRVEKVQKKFLGRPVEVWKLYFTHPQDVPAIRDKIREHPAVIDIYEYDIPFAKRYLIDKGLVPMEGDEELKMLAFDIETLYHEGEEFAEGPILMISYADEEGARVITWKNVDLPYVDVVSTEREMIKRFLRVVKEKDPDVLITYNGDNFDFAYLKKRCEKLGINFALGRDGSEPKIQRMGDRFAVEVKGRIHFDLYPVIRRTINLPTYTLEAVYEAVFGQPKEKVYAEEITTAWETGENLERVARYLMEDAKVTYELGKEFLPMEAQLSRLIGQSLWDVSRSSTGNLVEWFLLRKAYERNELAPNKPDEKELARRRQSYEGGYVKEPERGLWENIVYLDFRSLYPSIIITHNVSPDTLNREGCKEYDVAPQVGHRFCKDFPGFIPSLLGDLLEERQKIKKKMKATIDPIERKLLDYRQRAIKILANSYYGYYGYARARWYCKECAESVTAWGREYITMTIKEIEEKYGFKVIYSDTDGFFATIPGADAETVKKKAMEFLKYINAKLPGALELEYEGFYKRGFFVTKKKYAVIDEEGKITTRGLEIVRRDWSEIAKETQARVLEALLKDGDVEKAVRIVKEVTEKLSKYEVPPEKLVIHEQITRDLKDYKATGPHVAVAKRLAARGVKIRPGTVISYIVLKGSGRIGDRAIPFDEFDPTKHKYDAEYYIENQVLPAVERILRAFGYRKEDLRYQKTRQVGLSAWLKPKGT

SEQ ID NO: 692 - protein, 774 aa, synthetic construct
MILDTDYITEDGKPVIRIFKKENGEFKIEYDRTFEPYFYALLKDDSAIEEVKKITAERHGTVVTVKRVEKVQKKFLGRPVEVWKLYFTHPQDVPAIRDKIREHPAVIDIYEYDIPFAKRYLIDKGLVPMEGDEELKMLAFDIETLYHEGEEFAEGPILMISYADEEGARVITWKNVDLPYVDVVSTEREMIKRFLRVVKEKDPDVLITYNGDNFDFAYLKKRCEKLGINFALGRDGSEPKIQRMGDRFAVEVKGRIHFDLYPVIRRTINLPTYTLEAVYEAVFGQPKEKVYAEEITTAWETGENLERVARYMMEDAKVTYELGKEFLPMEAQLSRLIGQSLWDVSRSSTGNLVEWFLLRKAYERNELAPNKPDEKELARRRQSYEGGYVKEPERGLWENIVYLDFRSLYPSIIITHNVSPDTLNREGCKEYDVAPQVGHRFCKDFPGFIPSLLGDLLEERQKIKKKMKATIDPIERKLLDYRQRAIKILANSYYGYYGYARARWYCKECAESVTAWGREYITMTIKEIEEKYGFKVIYSDTDGFFATIPGADAETVKKKAMEFLKYINAKLPGALELEYEGFYKRGFFVTKKKYAVIDEEGKITTRGLEIVRRDWSEIAKETQARVLEALLKDGDVEKAVRIVKEVTEKLSKYEVPPEKLVIHEQITRDLKDYKATGPHVAVAKRLAARGVKIRPGTVISYIVLKGSGRIGDRAIPFDEFDPTKHKYDAEYYIENQVLPAVERILRAFGYRKEDLRYQKTRQVGLSAWLKPKGT

SEQ ID NO: 693 - protein, 774 aa, synthetic construct
MILDTDYITEDGKPVIRIFKKENGEFKIEYDRTFEPYFYALLKDDSAIEEVKKITAERHGTVVTVKRVEKVQKKFLGRPVEVWKLYFTHPQDVPAIRDKIREHPAVIDIYEYDIPFAKRYLIDKGLVPMEGDEELKMLAFDIETLYHEGEEFAEGPILMISYADEEGARVITWKNVDLPYVDVVSTEREMIKRFLRVVKEKDPDVLITYNGDNFDFAYLKKRCEKLGINFALGRDGSEPKIQRMGDRFAVEVKGRIHFDLYPVIRRTINLPTYTLEAVYEAVFGQPKEKVYAEEITTAWETGENLERVARYNMEDAKVTYELGKEFLPMEAQLSRLIGQSLWDVSRSSTGNLVEWFLLRKAYERNELAPNKPDEKELARRRQSYEGGYVKEPERGLWENIVYLDFRSLYPSIIITHNVSPDTLNREGCKEYDVAPQVGHRFCKDFPGFIPSLLGDLLEERQKIKKKMKATIDPIERKLLDYRQRAIKILANSYYGYYGYARARWYCKECAESVTAWGREYITMTIKEIEEKYGFKVIYSDTDGFFATIPGADAETVKKKAMEFLKYINAKLPGALELEYEGFYKRGFFVTKKKYAVIDEEGKITTRGLEIVRRDWSEIAKETQARVLEALLKDGDVEKAVRIVKEVTEKLSKYEVPPEKLVIHEQITRDLKDYKATGPHVAVAKRLAARGVKIRPGTVISYIVLKGSGRIGDRAIPFDEFDPTKHKYDAEYYIENQVLPAVERILRAFGYRKEDLRYQKTRQVGLSAWLKPKGT

SEQ ID NO: 694 - protein, 774 aa, synthetic construct
MILDTDYITEDGKPVIRIFKKENGEFKIEYDRTFEPYFYALLKDDSAIEEVKKITAERHGTVVTVKRVEKVQKKFLGRPVEVWKLYFTHPQDVPAIRDKIREHPAVIDIYEYDIPFAKRYLIDKGLVPMEGDEELKMLAFDIETLYHEGEEFAEGPILMISYADEEGARVITWKNVDLPYVDVVSTEREMIKRFLRVVKEKDPDVLITYNGDNFDFAYLKKRCEKLGINFALGRDGSEPKIQRMGDRFAVEVKGRIHFDLYPVIRRTINLPTYTLEAVYEAVFGQPKEKVYAEEITTAWETGENLERVARYPMEDAKVTYELGKEFLPMEAQLSRLIGQSLWDVSRSSTGNLVEWFLLRKAYERNELAPNKPDEKELARRRQSYEGGYVKEPERGLWENIVYLDFRSLYPSIIITHNVSPDTLNREGCKEYDVAPQVGHRFCKDFPGFIPSLLGDLLEERQKIKKKMKATIDPIERKLLDYRQRAIKILANSYYGYYGYARARWYCKECAESVTAWGREYITMTIKEIEEKYGFKVIYSDTDGFFATIPGADAETVKKKAMEFLKYINAKLPGALELEYEGFYKRGFFVTKKKYAVIDEEGKITTRGLEIVRRDWSEIAKETQARVLEALLKDGDVEKAVRIVKEVTEKLSKYEVPPEKLVIHEQITRDLKDYKATGPHVAVAKRLAARGVKIRPGTVISYIVLKGSGRIGDRAIPFDEFDPTKHKYDAEYYIENQVLPAVERILRAFGYRKEDLRYQKTRQVGLSAWLKPKGT

SEQ ID NO: 695 - protein, 774 aa, synthetic construct
MILDTDYITEDGKPVIRIFKKENGEFKIEYDRTFEPYFYALLKDDSAIEEVKKITAERHGTVVTVKRVEKVQKKFLGRPVEVWKLYFTHPQDVPAIRDKIREHPAVIDIYEYDIPFAKRYLIDKGLVPMEGDEELKMLAFDIETLYHEGEEFAEGPILMISYADEEGARVITWKNVDLPYVDVVSTEREMIKRFLRVVKEKDPDVLITYNGDNFDFAYLKKRCEKLGINFALGRDGSEPKIQRMGDRFAVEVKGRIHFDLYPVIRRTINLPTYTLEAVYEAVFGQPKEKVYAEEITTAWETGENLERVARYQMEDAKVTYELGKEFLPMEAQLSRLIGQSLWDVSRSSTGNLVEWFLLRKAYERNELAPNKPDEKELARRRQSYEGGYVKEPERGLWENIVYLDFRSLYPSIIITHNVSPDTLNREGCKEYDVAPQVGHRFCKDFPGFIPSLLGDLLEERQKIKKKMKATIDPIERKLLDYRQRAIKILANSYYGYYGYARARWYCKECAESVTAWGREYITMTIKEIEEKYGFKVIYSDTDGFFATIPGADAETVKKKAMEFLKYINAKLPGALELEYEGFYKRGFFVTKKKYAVIDEEGKITTRGLEIVRRDWSEIAKETQARVLEALLKDGDVEKAVRIVKEVTEKLSKYEVPPEKLVIHEQITRDLKDYKATGPHVAVAKRLAARGVKIRPGTVISYIVLKGSGRIGDRAIPFDEFDPTKHKYDAEYYIENQVLPAVERILRAFGYRKEDLRYQKTRQVGLSAWLKPKGT

SEQ ID NO: 696 - protein, 774 aa, synthetic construct
MILDTDYITEDGKPVIRIFKKENGEFKIEYDRTFEPYFYALLKDDSAIEEVKKITAERHGTVVTVKRVEKVQKKFLGRPVEVWKLYFTHPQDVPAIRDKIREHPAVIDIYEYDIPFAKRYLIDKGLVPMEGDEELKMLAFDIETLYHEGEEFAEGPILMISYADEEGARVITWKNVDLPYVDVVSTEREMIKRFLRVVKEKDPDVLITYNGDNFDFAYLKKRCEKLGINFALGRDGSEPKIQRMGDRFAVEVKGRIHFDLYPVIRRTINLPTYTLEAVYEAVFGQPKEKVYAEEITTAWETGENLERVARYRMEDAKVTYELGKEFLPMEAQLSRLIGQSLWDVSRSSTGNLVEWFLLRKAYERNELAPNKPDEKELARRRQSYEGGYVKEPERGLWENIVYLDFRSLYPSIIITHNVSPDTLNREGCKEYDVAPQVGHRFCKDFPGFIPSLLGDLLEERQKIKKKMKATIDPIERKLLDYRQRAIKILANSYYGYYGYARARWYCKECAESVTAWGREYITMTIKEIEEKYGFKVIYSDTDGFFATIPGADAETVKKKAMEFLKYINAKLPGALELEYEGFYKRGFFVTKKKYAVIDEEGKITTRGLEIVRRDWSEIAKETQARVLEALLKDGDVEKAVRIVKEVTEKLSKYEVPPEKLVIHEQITRDLKDYKATGPHVAVAKRLAARGVKIRPGTVISYIVLKGSGRIGDRAIPFDEFDPTKHKYDAEYYIENQVLPAVERILRAFGYRKEDLRYQKTRQVGLSAWLKPKGT

SEQ ID NO: 697 - protein, 774 aa, synthetic construct
MILDTDYITEDGKPVIRIFKKENGEFKIEYDRTFEPYFYALLKDDSAIEEVKKITAERHGTVVTVKRVEKVQKKFLGRPVEVWKLYFTHPQDVPAIRDKIREHPAVIDIYEYDIPFAKRYLIDKGLVPMEGDEELKMLAFDIETLYHEGEEFAEGPILMISYADEEGARVITWKNVDLPYVDVVSTEREMIKRFLRVVKEKDPDVLITYNGDNFDFAYLKKRCEKLGINFALGRDGSEPKIQRMGDRFAVEVKGRIHFDLYPVIRRTINLPTYTLEAVYEAVFGQPKEKVYAEEITTAWETGENLERVARYVMEDAKVTYELGKEFLPMEAQLSRLIGQSLWDVSRSSTGNLVEWFLLRKAYERNELAPNKPDEKELARRRQSYEGGYVKEPERGLWENIVYLDFRSLYPSIIITHNVSPDTLNREGCKEYDVAPQVGHRFCKDFPGFIPSLLGDLLEERQKIKKKMKATIDPIERKLLDYRQRAIKILANSYYGYYGYARARWYCKECAESVTAWGREYITMTIKEIEEKYGFKVIYSDTDGFFATIPGADAETVKKKAMEFLKYINAKLPGALELEYEGFYKRGFFVTKKKYAVIDEEGKITTRGLEIVRRDWSEIAKETQARVLEALLKDGDVEKAVRIVKEVTEKLSKYEVPPEKLVIHEQITRDLKDYKATGPHVAVAKRLAARGVKIRPGTVISYIVLKGSGRIGDRAIPFDEFDPTKHKYDAEYYIENQVLPAVERILRAFGYRKEDLRYQKTRQVGLSAWLKPKGT

SEQ ID NO: 698 - protein, 774 aa, synthetic construct
MILDTDYITEDGKPVIRIFKKENGEFKIEYDRTFEPYFYALLKDDSAIEEVKKITAERHGTVVTVKRVEKVQKKFLGRPVEVWKLYFTHPQDVPAIRDKIREHPAVIDIYEYDIPFAKRYLIDKGLVPMEGDEELKMLAFDIETLYHEGEEFAEGPILMISYADEEGARVITWKNVDLPYVDVVSTEREMIKRFLRVVKEKDPDVLITYNGDNFDFAYLKKRCEKLGINFALGRDGSEPKIQRMGDRFAVEVKGRIHFDLYPVIRRTINLPTYTLEAVYEAVFGQPKEKVYAEEITTAWETGENLERVARYWMEDAKVTYELGKEFLPMEAQLSRLIGQSLWDVSRSSTGNLVEWFLLRKAYERNELAPNKPDEKELARRRQSYEGGYVKEPERGLWENIVYLDFRSLYPSIIITHNVSPDTLNREGCKEYDVAPQVGHRFCKDFPGFIPSLLGDLLEERQKIKKKMKATIDPIERKLLDYRQRAIKILANSYYGYYGYARARWYCKECAESVTAWGREYITMTIKEIEEKYGFKVIYSDTDGFFATIPGADAETVKKKAMEFLKYINAKLPGALELEYEGFYKRGFFVTKKKYAVIDEEGKITTRGLEIVRRDWSEIAKETQARVLEALLKDGDVEKAVRIVKEVTEKLSKYEVPPEKLVIHEQITRDLKDYKATGPHVAVAKRLAARGVKIRPGTVISYIVLKGSGRIGDRAIPFDEFDPTKHKYDAEYYIENQVLPAVERILRAFGYRKEDLRYQKTRQVGLSAWLKPKGT

SEQ ID NO: 699 - protein, 774 aa, synthetic construct
MILDTDYITEDGKPVIRIFKKENGEFKIEYDRTFEPYFYALLKDDSAIEEVKKITAERHGTVVTVKRVEKVQKKFLGRPVEVWKLYFTHPQDVPAIRDKIREHPAVIDIYEYDIPFAKRYLIDKGLVPMEGDEELKMLAFDIETLYHEGEEFAEGPILMISYADEEGARVITWKNVDLPYVDVVSTEREMIKRFLRVVKEKDPDVLITYNGDNFDFAYLKKRCEKLGINFALGRDGSEPKIQRMGDRFAVEVKGRIHFDLYPVIRRTINLPTYTLEAVYEAVFGQPKEKVYAEEITTAWETGENLERVARYYMEDAKVTYELGKEFLPMEAQLSRLIGQSLWDVSRSSTGNLVEWFLLRKAYERNELAPNKPDEKELARRRQSYEGGYVKEPERGLWENIVYLDFRSLYPSIIITHNVSPDTLNREGCKEYDVAPQVGHRFCKDFPGFIPSLLGDLLEERQKIKKKMKATIDPIERKLLDYRQRAIKILANSYYGYYGYARARWYCKECAESVTAWGREYITMTIKEIEEKYGFKVIYSDTDGFFATIPGADAETVKKKAMEFLKYINAKLPGALELEYEGFYKRGFFVTKKKYAVIDEEGKITTRGLEIVRRDWSEIAKETQARVLEALLKDGDVEKAVRIVKEVTEKLSKYEVPPEKLVIHEQITRDLKDYKATGPHVAVAKRLAARGVKIRPGTVISYIVLKGSGRIGDRAIPFDEFDPTKHKYDAEYYIENQVLPAVERILRAFGYRKEDLRYQKTRQVGLSAWLKPKGT

SEQ ID NO: 700 - protein, 774 aa, synthetic construct
MILDTDYITEDGKPVIRIFKKENGEFKIEYDRTFEPYFYALLKDDSAIEEVKKITAERHGTVVTVKRVEKVQKKFLGRPVEVWKLYFTHPQDVPAIRDKIREHPAVIDIYEYDIPFAKRYLIDKGLVPMEGDEELKMLAFDIETLYHEGEEFAEGPILMISYADEEGARVITWKNVDLPYVDVVSTEREMIKRFLRVVKEKDPDVLITYNGDNFDFAYLKKRCEKLGINFALGRDGSEPKIQRMGDRFAVEVKGRIHFDLYPVIRRTINLPTYTLEAVYEAVFGQPKEKVYAEEITTAWETGENLERVARYSPEDAKVTYELGKEFLPMEAQLSRLIGQSLWDVSRSSTGNLVEWFLLRKAYERNELAPNKPDEKELARRRQSYEGGYVKEPERGLWENIVYLDFRSLYPSIIITHNVSPDTLNREGCKEYDVAPQVGHRFCKDFPGFIPSLLGDLLEERQKIKKKMKATIDPIERKLLDYRQRAIKILANSYYGYYGYARARWYCKECAESVTAWGREYITMTIKEIEEKYGFKVIYSDTDGFFATIPGADAETVKKKAMEFLKYINAKLPGALELEYEGFYKRGFFVTKKKYAVIDEEGKITTRGLEIVRRDWSEIAKETQARVLEALLKDGDVEKAVRIVKEVTEKLSKYEVPPEKLVIHEQITRDLKDYKATGPHVAVAKRLAARGVKIRPGTVISYIVLKGSGRIGDRAIPFDEFDPTKHKYDAEYYIENQVLPAVERILRAFGYRKEDLRYQKTRQVGLSAWLKPKGT

SEQ ID NO: 701 - protein, 774 aa, synthetic construct
MILDTDYITEDGKPVIRIFKKENGEFKIEYDRTFEPYFYALLKDDSAIEEVKKITAERHGTVVTVKRVEKVQKKFLGRPVEVWKLYFTHPQDVPAIRDKIREHPAVIDIYEYDIPFAKRYLIDKGLVPMEGDEELKMLAFDIETLYHEGEEFAEGPILMISYADEEGARVITWKNVDLPYVDVVSTEREMIKRFLRVVKEKDPDVLITYNGDNFDFAYLKKRCEKLGINFALGRDGSEPKIQRMGDRFAVEVKGRIHFDLYPVIRRTINLPTYTLEAVYEAVFGQPKEKVYAEEITTAWETGENLERVARYSQEDAKVTYELGKEFLPMEAQLSRLIGQSLWDVSRSSTGNLVEWFLLRKAYERNELAPNKPDEKELARRRQSYEGGYVKEPERGLWENIVYLDFRSLYPSIIITHNVSPDTLNREGCKEYDVAPQVGHRFCKDFPGFIPSLLGDLLEERQKIKKKMKATIDPIERKLLDYRQRAIKILANSYYGYYGYARARWYCKECAESVTAWGREYITMTIKEIEEKYGFKVIYSDTDGFFATIPGADAETVKKKAMEFLKYINAKLPGALELEYEGFYKRGFFVTKKKYAVIDEEGKITTRGLEIVRRDWSEIAKETQARVLEALLKDGDVEKAVRIVKEVTEKLSKYEVPPEKLVIHEQITRDLKDYKATGPHVAVAKRLAARGVKIRPGTVISYIVLKGSGRIGDRAIPFDEFDPTKHKYDAEYYIENQVLPAVERILRAFGYRKEDLRYQKTRQVGLSAWLKPKGT

SEQ ID NO: 702 - protein, 774 aa, synthetic construct
MILDTDYITEDGKPVIRIFKKENGEFKIEYDRTFEPYFYALLKDDSAIEEVKKITAERHGTVVTVKRVEKVQKKFLGRPVEVWKLYFTHPQDVPAIRDKIREHPAVIDIYEYDIPFAKRYLIDKGLVPMEGDEELKMLAFDIETLYHEGEEFAEGPILMISYADEEGARVITWKNVDLPYVDVVSTEREMIKRFLRVVKEKDPDVLITYNGDNFDFAYLKKRCEKLGINFALGRDGSEPKIQRMGDRFAVEVKGRIHFDLYPVIRRTINLPTYTLEAVYEAVFGQPKEKVYAEEITTAWETGENLERVARYSMPDAKVTYELGKEFLPMEAQLSRLIGQSLWDVSRSSTGNLVEWFLLRKAYERNELAPNKPDEKELARRRQSYEGGYVKEPERGLWENIVYLDFRSLYPSIIITHNVSPDTLNREGCKEYDVAPQVGHRFCKDFPGFIPSLLGDLLEERQKIKKKMKATIDPIERKLLDYRQRAIKILANSYYGYYGYARARWYCKECAESVTAWGREYITMTIKEIEEKYGFKVIYSDTDGFFATIPGADAETVKKKAMEFLKYINAKLPGALELEYEGFYKRGFFVTKKKYAVIDEEGKITTRGLEIVRRDWSEIAKETQARVLEALLKDGDVEKAVRIVKEVTEKLSKYEVPPEKLVIHEQITRDLKDYKATGPHVAVAKRLAARGVKIRPGTVISYIVLKGSGRIGDRAIPFDEFDPTKHKYDAEYYIENQVLPAVERILRAFGYRKEDLRYQKTRQVGLSAWLKPKGT

SEQ ID NO: 703 - protein, 774 aa, synthetic construct
MILDTDYITEDGKPVIRIFKKENGEFKIEYDRTFEPYFYALLKDDSAIEEVKKITAERHGTVVTVKRVEKVQKKFLGRPVEVWKLYFTHPQDVPAIRDKIREHPAVIDIYEYDIPFAKRYLIDKGLVPMEGDEELKMLAFDIETLYHEGEEFAEGPILMISYADEEGARVITWKNVDLPYVDVVSTEREMIKRFLRVVKEKDPDVLITYNGDNFDFAYLKKRCEKLGINFALGRDGSEPKIQRMGDRFAVEVKGRIHFDLYPVIRRTINLPTYTLEAVYEAVFGQPKEKVYAEEITTAWETGENLERVARYSMEAAKVTYELGKEFLPMEAQLSRLIGQSLWDVSRSSTGNLVEWFLLRKAYERNELAPNKPDEKELARRRQSYEGGYVKEPERGLWENIVYLDFRSLYPSIIITHNVSPDTLNREGCKEYDVAPQVGHRFCKDFPGFIPSLLGDLLEERQKIKKKMKATIDPIERKLLDYRQRAIKILANSYYGYYGYARARWYCKECAESVTAWGREYITMTIKEIEEKYGFKVIYSDTDGFFATIPGADAETVKKKAMEFLKYINAKLPGALELEYEGFYKRGFFVTKKKYAVIDEEGKITTRGLEIVRRDWSEIAKETQARVLEALLKDGDVEKAVRIVKEVTEKLSKYEVPPEKLVIHEQITRDLKDYKATGPHVAVAKRLAARGVKIRPGTVISYIVLKGSGRIGDRAIPFDEFDPTKHKYDAEYYIENQVLPAVERILRAFGYRKEDLRYQKTRQVGLSAWLKPKGT

SEQ ID NO: 704 - protein, 774 aa, synthetic construct
MILDTDYITEDGKPVIRIFKKENGEFKIEYDRTFEPYFYALLKDDSAIEEVKKITAERHGTVVTVKRVEKVQKKFLGRPVEVWKLYFTHPQDVPAIRDKIREHPAVIDIYEYDIPFAKRYLIDKGLVPMEGDEELKMLAFDIETLYHEGEEFAEGPILMISYADEEGARVITWKNVDLPYVDVVSTEREMIKRFLRVVKEKDPDVLITYNGDNFDFAYLKKRCEKLGINFALGRDGSEPKIQRMGDRFAVEVKGRIHFDLYPVIRRTINLPTYTLEAVYEAVFGQPKEKVYAEEITTAWETGENLERVARYSMECAKVTYELGKEFLPMEAQLSRLIGQSLWDVSRSSTGNLVEWFLLRKAYERNELAPNKPDEKELARRRQSYEGGYVKEPERGLWENIVYLDFRSLYPSIIITHNVSPDTLNREGCKEYDVAPQVGHRFCKDFPGFIPSLLGDLLEERQKIKKKMKATIDPIERKLLDYRQRAIKILANSYYGYYGYARARWYCKECAESVTAWGREYITMTIKEIEEKYGFKVIYSDTDGFFATIPGADAETVKKKAMEFLKYINAKLPGALELEYEGFYKRGFFVTKKKYAVIDEEGKITTRGLEIVRRDWSEIAKETQARVLEALLKDGDVEKAVRIVKEVTEKLSKYEVPPEKLVIHEQITRDLKDYKATGPHVAVAKRLAARGVKIRPGTVISYIVLKGSGRIGDRAIPFDEFDPTKHKYDAEYYIENQVLPAVERILRAFGYRKEDLRYQKTRQVGLSAWLKPKGT

SEQ ID NO: 705 - protein, 774 aa, synthetic construct
MILDTDYITEDGKPVIRIFKKENGEFKIEYDRTFEPYFYALLKDDSAIEEVKKITAERHGTVVTVKRVEKVQKKFLGRPVEVWKLYFTHPQDVPAIRDKIREHPAVIDIYEYDIPFAKRYLIDKGLVPMEGDEELKMLAFDIETLYHEGEEFAEGPILMISYADEEGARVITWKNVDLPYVDVVSTEREMIKRFLRVVKEKDPDVLITYNGDNFDFAYLKKRCEKLGINFALGRDGSEPKIQRMGDRFAVEVKGRIHFDLYPVIRRTINLPTYTLEAVYEAVFGQPKEKVYAEEITTAWETGENLERVARYSMEFAKVTYELGKEFLPMEAQLSRLIGQSLWDVSRSSTGNLVEWFLLRKAYERNELAPNKPDEKELARRRQSYEGGYVKEPERGLWENIVYLDFRSLYPSIIITHNVSPDTLNREGCKEYDVAPQVGHRFCKDFPGFIPSLLGDLLEERQKIKKKMKATIDPIERKLLDYRQRAIKILANSYYGYYGYARARWYCKECAESVTAWGREYITMTIKEIEEKYGFKVIYSDTDGFFATIPGADAETVKKKAMEFLKYINAKLPGALELEYEGFYKRGFFVTKKKYAVIDEEGKITTRGLEIVRRDWSEIAKETQARVLEALLKDGDVEKAVRIVKEVTEKLSKYEVPPEKLVIHEQITRDLKDYKATGPHVAVAKRLAARGVKIRPGTVISYIVLKGSGRIGDRAIPFDEFDPTKHKYDAEYYIENQVLPAVERILRAFGYRKEDLRYQKTRQVGLSAWLKPKGT

SEQ ID NO: 706 - protein, 774 aa, synthetic construct
MILDTDYITEDGKPVIRIFKKENGEFKIEYDRTFEPYFYALLKDDSAIEEVKKITAERHGTVVTVKRVEKVQKKFLGRPVEVWKLYFTHPQDVPAIRDKIREHPAVIDIYEYDIPFAKRYLIDKGLVPMEGDEELKMLAFDIETLYHEGEEFAEGPILMISYADEEGARVITWKNVDLPYVDVVSTEREMIKRFLRVVKEKDPDVLITYNGDNFDFAYLKKRCEKLGINFALGRDGSEPKIQRMGDRFAVEVKGRIHFDLYPVIRRTINLPTYTLEAVYEAVFGQPKEKVYAEEITTAWETGENLERVARYSMEGAKVTYELGKEFLPMEAQLSRLIGQSLWDVSRSSTGNLVEWFLLRKAYERNELAPNKPDEKELARRRQSYEGGYVKEPERGLWENIVYLDFRSLYPSIIITHNVSPDTLNREGCKEYDVAPQVGHRFCKDFPGFIPSLLGDLLEERQKIKKKMKATIDPIERKLLDYRQRAIKILANSYYGYYGYARARWYCKECAESVTAWGREYITMTIKEIEEKYGFKVIYSDTDGFFATIPGADAETVKKKAMEFLKYINAKLPGALELEYEGFYKRGFFVTKKKYAVIDEEGKITTRGLEIVRRDWSEIAKETQARVLEALLKDGDVEKAVRIVKEVTEKLSKYEVPPEKLVIHEQITRDLKDYKATGPHVAVAKRLAARGVKIRPGTVISYIVLKGSGRIGDRAIPFDEFDPTKHKYDAEYYIENQVLPAVERILRAFGYRKEDLRYQKTRQVGLSAWLKPKGT

SEQ ID NO: 707 - protein, 774 aa, synthetic construct
MILDTDYITEDGKPVIRIFKKENGEFKIEYDRTFEPYFYALLKDDSAIEEVKKITAERHGTVVTVKRVEKVQKKFLGRPVEVWKLYFTHPQDVPAIRDKIREHPAVIDIYEYDIPFAKRYLIDKGLVPMEGDEELKMLAFDIETLYHEGEEFAEGPILMISYADEEGARVITWKNVDLPYVDVVSTEREMIKRFLRVVKEKDPDVLITYNGDNFDFAYLKKRCEKLGINFALGRDGSEPKIQRMGDRFAVEVKGRIHFDLYPVIRRTINLPTYTLEAVYEAVFGQPKEKVYAEEITTAWETGENLERVARYSMEIAKVTYELGKEFLPMEAQLSRLIGQSLWDVSRSSTGNLVEWFLLRKAYERNELAPNKPDEKELARRRQSYEGGYVKEPERGLWENIVYLDFRSLYPSIIITHNVSPDTLNREGCKEYDVAPQVGHRFCKDFPGFIPSLLGDLLEERQKIKKKMKATIDPIERKLLDYRQRAIKILANSYYGYYGYARARWYCKECAESVTAWGREYITMTIKEIEEKYGFKVIYSDTDGFFATIPGADAETVKKKAMEFLKYINAKLPGALELEYEGFYKRGFFVTKKKYAVIDEEGKITTRGLEIVRRDWSEIAKETQARVLEALLKDGDVEKAVRIVKEVTEKLSKYEVPPEKLVIHEQITRDLKDYKATGPHVAVAKRLAARGVKIRPGTVISYIVLKGSGRIGDRAIPFDEFDPTKHKYDAEYYIENQVLPAVERILRAFGYRKEDLRYQKTRQVGLSAWLKPKGT

SEQ ID NO: 708 - protein, 774 aa, synthetic construct
MILDTDYITEDGKPVIRIFKKENGEFKIEYDRTFEPYFYALLKDDSAIEEVKKITAERHGTVVTVKRVEKVQKKFLGRPVEVWKLYFTHPQDVPAIRDKIREHPAVIDIYEYDIPFAKRYLIDKGLVPMEGDEELKMLAFDIETLYHEGEEFAEGPILMISYADEEGARVITWKNVDLPYVDVVSTEREMIKRFLRVVKEKDPDVLITYNGDNFDFAYLKKRCEKLGINFALGRDGSEPKIQRMGDRFAVEVKGRIHFDLYPVIRRTINLPTYTLEAVYEAVFGQPKEKVYAEEITTAWETGENLERVARYSMEKAKVTYELGKEFLPMEAQLSRLIGQSLWDVSRSSTGNLVEWFLLRKAYERNELAPNKPDEKELARRRQSYEGGYVKEPERGLWENIVYLDFRSLYPSIIITHNVSPDTLNREGCKEYDVAPQVGHRFCKDFPGFIPSLLGDLLEERQKIKKKMKATIDPIERKLLDYRQRAIKILANSYYGYYGYARARWYCKECAESVTAWGREYITMTIKEIEEKYGFKVIYSDTDGFFATIPGADAETVKKKAMEFLKYINAKLPGALELEYEGFYKRGFFVTKKKYAVIDEEGKITTRGLEIVRRDWSEIAKETQARVLEALLKDGDVEKAVRIVKEVTEKLSKYEVPPEKLVIHEQITRDLKDYKATGPHVAVAKRLAARGVKIRPGTVISYIVLKGSGRIGDRAIPFDEFDPTKHKYDAEYYIENQVLPAVERILRAFGYRKEDLRYQKTRQVGLSAWLKPKGT

SEQ ID NO: 709 - protein, 774 aa, synthetic construct
MILDTDYITEDGKPVIRIFKKENGEFKIEYDRTFEPYFYALLKDDSAIEEVKKITAERHGTVVTVKRVEKVQKKFLGRPVEVWKLYFTHPQDVPAIRDKIREHPAVIDIYEYDIPFAKRYLIDKGLVPMEGDEELKMLAFDIETLYHEGEEFAEGPILMISYADEEGARVITWKNVDLPYVDVVSTEREMIKRFLRVVKEKDPDVLITYNGDNFDFAYLKKRCEKLGINFALGRDGSEPKIQRMGDRFAVEVKGRIHFDLYPVIRRTINLPTYTLEAVYEAVFGQPKEKVYAEEITTAWETGENLERVARYSMELAKVTYELGKEFLPMEAQLSRLIGQSLWDVSRSSTGNLVEWFLLRKAYERNELAPNKPDEKELARRRQSYEGGYVKEPERGLWENIVYLDFRSLYPSIIITHNVSPDTLNREGCKEYDVAPQVGHRFCKDFPGFIPSLLGDLLEERQKIKKKMKATIDPIERKLLDYRQRAIKILANSYYGYYGYARARWYCKECAESVTAWGREYITMTIKEIEEKYGFKVIYSDTDGFFATIPGADAETVKKKAMEFLKYINAKLPGALELEYEGFYKRGFFVTKKKYAVIDEEGKITTRGLEIVRRDWSEIAKETQARVLEALLKDGDVEKAVRIVKEVTEKLSKYEVPPEKLVIHEQITRDLKDYKATGPHVAVAKRLAARGVKIRPGTVISYIVLKGSGRIGDRAIPFDEFDPTKHKYDAEYYIENQVLPAVERILRAFGYRKEDLRYQKTRQVGLSAWLKPKGT

SEQ ID NO: 710 - protein, 774 aa, synthetic construct
MILDTDYITEDGKPVIRIFKKENGEFKIEYDRTFEPYFYALLKDDSAIEEVKKITAERHGTVVTVKRVEKVQKKFLGRPVEVWKLYFTHPQDVPAIRDKIREHPAVIDIYEYDIPFAKRYLIDKGLVPMEGDEELKMLAFDIETLYHEGEEFAEGPILMISYADEEGARVITWKNVDLPYVDVVSTEREMIKRFLRVVKEKDPDVLITYNGDNFDFAYLKKRCEKLGINFALGRDGSEPKIQRMGDRFAVEVKGRIHFDLYPVIRRTINLPTYTLEAVYEAVFGQPKEKVYAEEITTAWETGENLERVARYSMEMAKVTYELGKEFLPMEAQLSRLIGQSLWDVSRSSTGNLVEWFLLRKAYERNELAPNKPDEKELARRRQSYEGGYVKEPERGLWENIVYLDFRSLYPSIIITHNVSPDTLNREGCKEYDVAPQVGHRFCKDFPGFIPSLLGDLLEERQKIKKKMKATIDPIERKLLDYRQRAIKILANSYYGYYGYARARWYCKECAESVTAWGREYITMTIKEIEEKYGFKVIYSDTDGFFATIPGADAETVKKKAMEFLKYINAKLPGALELEYEGFYKRGFFVTKKKYAVIDEEGKITTRGLEIVRRDWSEIAKETQARVLEALLKDGDVEKAVRIVKEVTEKLSKYEVPPEKLVIHEQITRDLKDYKATGPHVAVAKRLAARGVKIRPGTVISYIVLKGSGRIGDRAIPFDEFDPTKHKYDAEYYIENQVLPAVERILRAFGYRKEDLRYQKTRQVGLSAWLKPKGT

SEQ ID NO: 711 - protein, 774 aa, synthetic construct
MILDTDYITEDGKPVIRIFKKENGEFKIEYDRTFEPYFYALLKDDSAIEEVKKITAERHGTVVTVKRVEKVQKKFLGRPVEVWKLYFTHPQDVPAIRDKIREHPAVIDIYEYDIPFAKRYLIDKGLVPMEGDEELKMLAFDIETLYHEGEEFAEGPILMISYADEEGARVITWKNVDLPYVDVVSTEREMIKRFLRVVKEKDPDVLITYNGDNFDFAYLKKRCEKLGINFALGRDGSEPKIQRMGDRFAVEVKGRIHFDLYPVIRRTINLPTYTLEAVYEAVFGQPKEKVYAEEITTAWETGENLERVARYSMENAKVTYELGKEFLPMEAQLSRLIGQSLWDVSRSSTGNLVEWFLLRKAYERNELAPNKPDEKELARRRQSYEGGYVKEPERGLWENIVYLDFRSLYPSIIITHNVSPDTLNREGCKEYDVAPQVGHRFCKDFPGFIPSLLGDLLEERQKIKKKMKATIDPIERKLLDYRQRAIKILANSYYGYYGYARARWYCKECAESVTAWGREYITMTIKEIEEKYGFKVIYSDTDGFFATIPGADAETVKKKAMEFLKYINAKLPGALELEYEGFYKRGFFVTKKKYAVIDEEGKITTRGLEIVRRDWSEIAKETQARVLEALLKDGDVEKAVRIVKEVTEKLSKYEVPPEKLVIHEQITRDLKDYKATGPHVAVAKRLAARGVKIRPGTVISYIVLKGSGRIGDRAIPFDEFDPTKHKYDAEYYIENQVLPAVERILRAFGYRKEDLRYQKTRQVGLSAWLKPKGT

SEQ ID NO: 712 - protein, 774 aa, synthetic construct
MILDTDYITEDGKPVIRIFKKENGEFKIEYDRTFEPYFYALLKDDSAIEEVKKITAERHGTVVTVKRVEKVQKKFLGRPVEVWKLYFTHPQDVPAIRDKIREHPAVIDIYEYDIPFAKRYLIDKGLVPMEGDEELKMLAFDIETLYHEGEEFAEGPILMISYADEEGARVITWKNVDLPYVDVVSTEREMIKRFLRVVKEKDPDVLITYNGDNFDFAYLKKRCEKLGINFALGRDGSEPKIQRMGDRFAVEVKGRIHFDLYPVIRRTINLPTYTLEAVYEAVFGQPKEKVYAEEITTAWETGENLERVARYSMEPAKVTYELGKEFLPMEAQLSRLIGQSLWDVSRSSTGNLVEWFLLRKAYERNELAPNKPDEKELARRRQSYEGGYVKEPERGLWENIVYLDFRSLYPSIIITHNVSPDTLNREGCKEYDVAPQVGHRFCKDFPGFIPSLLGDLLEERQKIKKKMKATIDPIERKLLDYRQRAIKILANSYYGYYGYARARWYCKECAESVTAWGREYITMTIKEIEEKYGFKVIYSDTDGFFATIPGADAETVKKKAMEFLKYINAKLPGALELEYEGFYKRGFFVTKKKYAVIDEEGKITTRGLEIVRRDWSEIAKETQARVLEALLKDGDVEKAVRIVKEVTEKLSKYEVPPEKLVIHEQITRDLKDYKATGPHVAVAKRLAARGVKIRPGTVISYIVLKGSGRIGDRAIPFDEFDPTKHKYDAEYYIENQVLPAVERILRAFGYRKEDLRYQKTRQVGLSAWLKPKGT

SEQ ID NO: 713 - protein, 774 aa, synthetic construct
MILDTDYITEDGKPVIRIFKKENGEFKIEYDRTFEPYFYALLKDDSAIEEVKKITAERHGTVVTVKRVEKVQKKFLGRPVEVWKLYFTHPQDVPAIRDKIREHPAVIDIYEYDIPFAKRYLIDKGLVPMEGDEELKMLAFDIETLYHEGEEFAEGPILMISYADEEGARVITWKNVDLPYVDVVSTEREMIKRFLRVVKEKDPDVLITYNGDNFDFAYLKKRCEKLGINFALGRDGSEPKIQRMGDRFAVEVKGRIHFDLYPVIRRTINLPTYTLEAVYEAVFGQPKEKVYAEEITTAWETGENLERVARYSMEQAKVTYELGKEFLPMEAQLSRLIGQSLWDVSRSSTGNLVEWFLLRKAYERNELAPNKPDEKELARRRQSYEGGYVKEPERGLWENIVYLDFRSLYPSIIITHNVSPDTLNREGCKEYDVAPQVGHRFCKDFPGFIPSLLGDLLEERQKIKKKMKATIDPIERKLLDYRQRAIKILANSYYGYYGYARARWYCKECAESVTAWGREYITMTIKEIEEKYGFKVIYSDTDGFFATIPGADAETVKKKAMEFLKYINAKLPGALELEYEGFYKRGFFVTKKKYAVIDEEGKITTRGLEIVRRDWSEIAKETQARVLEALLKDGDVEKAVRIVKEVTEKLSKYEVPPEKLVIHEQITRDLKDYKATGPHVAVAKRLAARGVKIRPGTVISYIVLKGSGRIGDRAIPFDEFDPTKHKYDAEYYIENQVLPAVERILRAFGYRKEDLRYQKTRQVGLSAWLKPKGT

SEQ ID NO: 714 - protein, 774 aa, synthetic construct
MILDTDYITEDGKPVIRIFKKENGEFKIEYDRTFEPYFYALLKDDSAIEEVKKITAERHGTVVTVKRVEKVQKKFLGRPVEVWKLYFTHPQDVPAIRDKIREHPAVIDIYEYDIPFAKRYLIDKGLVPMEGDEELKMLAFDIETLYHEGEEFAEGPILMISYADEEGARVITWKNVDLPYVDVVSTEREMIKRFLRVVKEKDPDVLITYNGDNFDFAYLKKRCEKLGINFALGRDGSEPKIQRMGDRFAVEVKGRIHFDLYPVIRRTINLPTYTLEAVYEAVFGQPKEKVYAEEITTAWETGENLERVARYSMERAKVTYELGKEFLPMEAQLSRLIGQSLWDVSRSSTGNLVEWFLLRKAYERNELAPNKPDEKELARRRQSYEGGYVKEPERGLWENIVYLDFRSLYPSIIITHNVSPDTLNREGCKEYDVAPQVGHRFCKDFPGFIPSLLGDLLEERQKIKKKMKATIDPIERKLLDYRQRAIKILANSYYGYYGYARARWYCKECAESVTAWGREYITMTIKEIEEKYGFKVIYSDTDGFFATIPGADAETVKKKAMEFLKYINAKLPGALELEYEGFYKRGFFVTKKKYAVIDEEGKITTRGLEIVRRDWSEIAKETQARVLEALLKDGDVEKAVRIVKEVTEKLSKYEVPPEKLVIHEQITRDLKDYKATGPHVAVAKRLAARGVKIRPGTVISYIVLKGSGRIGDRAIPFDEFDPTKHKYDAEYYIENQVLPAVERILRAFGYRKEDLRYQKTRQVGLSAWLKPKGT

SEQ ID NO: 715 - protein, 774 aa, synthetic construct
MILDTDYITEDGKPVIRIFKKENGEFKIEYDRTFEPYFYALLKDDSAIEEVKKITAERHGTVVTVKRVEKVQKKFLGRPVEVWKLYFTHPQDVPAIRDKIREHPAVIDIYEYDIPFAKRYLIDKGLVPMEGDEELKMLAFDIETLYHEGEEFAEGPILMISYADEEGARVITWKNVDLPYVDVVSTEREMIKRFLRVVKEKDPDVLITYNGDNFDFAYLKKRCEKLGINFALGRDGSEPKIQRMGDRFAVEVKGRIHFDLYPVIRRTINLPTYTLEAVYEAVFGQPKEKVYAEEITTAWETGENLERVARYSMESAKVTYELGKEFLPMEAQLSRLIGQSLWDVSRSSTGNLVEWFLLRKAYERNELAPNKPDEKELARRRQSYEGGYVKEPERGLWENIVYLDFRSLYPSIIITHNVSPDTLNREGCKEYDVAPQVGHRFCKDFPGFIPSLLGDLLEERQKIKKKMKATIDPIERKLLDYRQRAIKILANSYYGYYGYARARWYCKECAESVTAWGREYITMTIKEIEEKYGFKVIYSDTDGFFATIPGADAETVKKKAMEFLKYINAKLPGALELEYEGFYKRGFFVTKKKYAVIDEEGKITTRGLEIVRRDWSEIAKETQARVLEALLKDGDVEKAVRIVKEVTEKLSKYEVPPEKLVIHEQITRDLKDYKATGPHVAVAKRLAARGVKIRPGTVISYIVLKGSGRIGDRAIPFDEFDPTKHKYDAEYYIENQVLPAVERILRAFGYRKEDLRYQKTRQVGLSAWLKPKGT

SEQ ID NO: 716 - protein, 774 aa, synthetic construct
MILDTDYITEDGKPVIRIFKKENGEFKIEYDRTFEPYFYALLKDDSAIEEVKKITAERHGTVVTVKRVEKVQKKFLGRPVEVWKLYFTHPQDVPAIRDKIREHPAVIDIYEYDIPFAKRYLIDKGLVPMEGDEELKMLAFDIETLYHEGEEFAEGPILMISYADEEGARVITWKNVDLPYVDVVSTEREMIKRFLRVVKEKDPDVLITYNGDNFDFAYLKKRCEKLGINFALGRDGSEPKIQRMGDRFAVEVKGRIHFDLYPVIRRTINLPTYTLEAVYEAVFGQPKEKVYAEEITTAWETGENLERVARYSMETAKVTYELGKEFLPMEAQLSRLIGQSLWDVSRSSTGNLVEWFLLRKAYERNELAPNKPDEKELARRRQSYEGGYVKEPERGLWENIVYLDFRSLYPSIIITHNVSPDTLNREGCKEYDVAPQVGHRFCKDFPGFIPSLLGDLLEERQKIKKKMKATIDPIERKLLDYRQRAIKILANSYYGYYGYARARWYCKECAESVTAWGREYITMTIKEIEEKYGFKVIYSDTDGFFATIPGADAETVKKKAMEFLKYINAKLPGALELEYEGFYKRGFFVTKKKYAVIDEEGKITTRGLEIVRRDWSEIAKETQARVLEALLKDGDVEKAVRIVKEVTEKLSKYEVPPEKLVIHEQITRDLKDYKATGPHVAVAKRLAARGVKIRPGTVISYIVLKGSGRIGDRAIPFDEFDPTKHKYDAEYYIENQVLPAVERILRAFGYRKEDLRYQKTRQVGLSAWLKPKGT

SEQ ID NO: 717 - protein, 774 aa, synthetic construct
MILDTDYITEDGKPVIRIFKKENGEFKIEYDRTFEPYFYALLKDDSAIEEVKKITAERHGTVVTVKRVEKVQKKFLGRPVEVWKLYFTHPQDVPAIRDKIREHPAVIDIYEYDIPFAKRYLIDKGLVPMEGDEELKMLAFDIETLYHEGEEFAEGPILMISYADEEGARVITWKNVDLPYVDVVSTEREMIKRFLRVVKEKDPDVLITYNGDNFDFAYLKKRCEKLGINFALGRDGSEPKIQRMGDRFAVEVKGRIHFDLYPVIRRTINLPTYTLEAVYEAVFGQPKEKVYAEEITTAWETGENLERVARYSMEVAKVTYELGKEFLPMEAQLSRLIGQSLWDVSRSSTGNLVEWFLLRKAYERNELAPNKPDEKELARRRQSYEGGYVKEPERGLWENIVYLDFRSLYPSIIITHNVSPDTLNREGCKEYDVAPQVGHRFCKDFPGFIPSLLGDLLEERQKIKKKMKATIDPIERKLLDYRQRAIKILANSYYGYYGYARARWYCKECAESVTAWGREYITMTIKEIEEKYGFKVIYSDTDGFFATIPGADAETVKKKAMEFLKYINAKLPGALELEYEGFYKRGFFVTKKKYAVIDEEGKITTRGLEIVRRDWSEIAKETQARVLEALLKDGDVEKAVRIVKEVTEKLSKYEVPPEKLVIHEQITRDLKDYKATGPHVAVAKRLAARGVKIRPGTVISYIVLKGSGRIGDRAIPFDEFDPTKHKYDAEYYIENQVLPAVERILRAFGYRKEDLRYQKTRQVGLSAWLKPKGT

SEQ ID NO: 718 - protein, 774 aa, synthetic construct
MILDTDYITEDGKPVIRIFKKENGEFKIEYDRTFEPYFYALLKDDSAIEEVKKITAERHGTVVTVKRVEKVQKKFLGRPVEVWKLYFTHPQDVPAIRDKIREHPAVIDIYEYDIPFAKRYLIDKGLVPMEGDEELKMLAFDIETLYHEGEEFAEGPILMISYADEEGARVITWKNVDLPYVDVVSTEREMIKRFLRVVKEKDPDVLITYNGDNFDFAYLKKRCEKLGINFALGRDGSEPKIQRMGDRFAVEVKGRIHFDLYPVIRRTINLPTYTLEAVYEAVFGQPKEKVYAEEITTAWETGENLERVARYSMEWAKVTYELGKEFLPMEAQLSRLIGQSLWDVSRSSTGNLVEWFLLRKAYERNELAPNKPDEKELARRRQSYEGGYVKEPERGLWENIVYLDFRSLYPSIIITHNVSPDTLNREGCKEYDVAPQVGHRFCKDFPGFIPSLLGDLLEERQKIKKKMKATIDPIERKLLDYRQRAIKILANSYYGYYGYARARWYCKECAESVTAWGREYITMTIKEIEEKYGFKVIYSDTDGFFATIPGADAETVKKKAMEFLKYINAKLPGALELEYEGFYKRGFFVTKKKYAVIDEEGKITTRGLEIVRRDWSEIAKETQARVLEALLKDGDVEKAVRIVKEVTEKLSKYEVPPEKLVIHEQITRDLKDYKATGPHVAVAKRLAARGVKIRPGTVISYIVLKGSGRIGDRAIPFDEFDPTKHKYDAEYYIENQVLPAVERILRAFGYRKEDLRYQKTRQVGLSAWLKPKGT

SEQ ID NO: 719 - protein, 774 aa, synthetic construct
MILDTDYITEDGKPVIRIFKKENGEFKIEYDRTFEPYFYALLKDDSAIEEVKKITAERHGTVVTVKRVEKVQKKFLGRPVEVWKLYFTHPQDVPAIRDKIREHPAVIDIYEYDIPFAKRYLIDKGLVPMEGDEELKMLAFDIETLYHEGEEFAEGPILMISYADEEGARVITWKNVDLPYVDVVSTEREMIKRFLRVVKEKDPDVLITYNGDNFDFAYLKKRCEKLGINFALGRDGSEPKIQRMGDRFAVEVKGRIHFDLYPVIRRTINLPTYTLEAVYEAVFGQPKEKVYAEEITTAWETGENLERVARYSMEYAKVTYELGKEFLPMEAQLSRLIGQSLWDVSRSSTGNLVEWFLLRKAYERNELAPNKPDEKELARRRQSYEGGYVKEPERGLWENIVYLDFRSLYPSIIITHNVSPDTLNREGCKEYDVAPQVGHRFCKDFPGFIPSLLGDLLEERQKIKKKMKATIDPIERKLLDYRQRAIKILANSYYGYYGYARARWYCKECAESVTAWGREYITMTIKEIEEKYGFKVIYSDTDGFFATIPGADAETVKKKAMEFLKYINAKLPGALELEYEGFYKRGFFVTKKKYAVIDEEGKITTRGLEIVRRDWSEIAKETQARVLEALLKDGDVEKAVRIVKEVTEKLSKYEVPPEKLVIHEQITRDLKDYKATGPHVAVAKRLAARGVKIRPGTVISYIVLKGSGRIGDRAIPFDEFDPTKHKYDAEYYIENQVLPAVERILRAFGYRKEDLRYQKTRQVGLSAWLKPKGT

SEQ ID NO: 720 - protein, 774 aa, synthetic construct
MILDTDYITEDGKPVIRIFKKENGEFKIEYDRTFEPYFYALLKDDSAIEEVKKITAERHGTVVTVKRVEKVQKKFLGRPVEVWKLYFTHPQDVPAIRDKIREHPAVIDIYEYDIPFAKRYLIDKGLVPMEGDEELKMLAFDIETLYHEGEEFAEGPILMISYADEEGARVITWKNVDLPYVDVVSTEREMIKRFLRVVKEKDPDVLITYNGDNFDFAYLKKRCEKLGINFALGRDGSEPKIQRMGDRFAVEVKGRIHFDLYPVIRRTINLPTYTLEAVYEAVFGQPKEKVYAEEITTAWETGENLERVARYSMEDDKVTYELGKEFLPMEAQLSRLIGQSLWDVSRSSTGNLVEWFLLRKAYERNELAPNKPDEKELARRRQSYEGGYVKEPERGLWENIVYLDFRSLYPSIIITHNVSPDTLNREGCKEYDVAPQVGHRFCKDFPGFIPSLLGDLLEERQKIKKKMKATIDPIERKLLDYRQRAIKILANSYYGYYGYARARWYCKECAESVTAWGREYITMTIKEIEEKYGFKVIYSDTDGFFATIPGADAETVKKKAMEFLKYINAKLPGALELEYEGFYKRGFFVTKKKYAVIDEEGKITTRGLEIVRRDWSEIAKETQARVLEALLKDGDVEKAVRIVKEVTEKLSKYEVPPEKLVIHEQITRDLKDYKATGPHVAVAKRLAARGVKIRPGTVISYIVLKGSGRIGDRAIPFDEFDPTKHKYDAEYYIENQVLPAVERILRAFGYRKEDLRYQKTRQVGLSAWLKPKGT

SEQ ID NO: 721 - protein, 774 aa, synthetic construct
MILDTDYITEDGKPVIRIFKKENGEFKIEYDRTFEPYFYALLKDDSAIEEVKKITAERHGTVVTVKRVEKVQKKFLGRPVEVWKLYFTHPQDVPAIRDKIREHPAVIDIYEYDIPFAKRYLIDKGLVPMEGDEELKMLAFDIETLYHEGEEFAEGPILMISYADEEGARVITWKNVDLPYVDVVSTEREMIKRFLRVVKEKDPDVLITYNGDNFDFAYLKKRCEKLGINFALGRDGSEPKIQRMGDRFAVEVKGRIHFDLYPVIRRTINLPTYTLEAVYEAVFGQPKEKVYAEEITTAWETGENLERVARYSMEDEKVTYELGKEFLPMEAQLSRLIGQSLWDVSRSSTGNLVEWFLLRKAYERNELAPNKPDEKELARRRQSYEGGYVKEPERGLWENIVYLDFRSLYPSIIITHNVSPDTLNREGCKEYDVAPQVGHRFCKDFPGFIPSLLGDLLEERQKIKKKMKATIDPIERKLLDYRQRAIKILANSYYGYYGYARARWYCKECAESVTAWGREYITMTIKEIEEKYGFKVIYSDTDGFFATIPGADAETVKKKAMEFLKYINAKLPGALELEYEGFYKRGFFVTKKKYAVIDEEGKITTRGLEIVRRDWSEIAKETQARVLEALLKDGDVEKAVRIVKEVTEKLSKYEVPPEKLVIHEQITRDLKDYKATGPHVAVAKRLAARGVKIRPGTVISYIVLKGSGRIGDRAIPFDEFDPTKHKYDAEYYIENQVLPAVERILRAFGYRKEDLRYQKTRQVGLSAWLKPKGT

SEQ ID NO: 722 - protein, 774 aa, synthetic construct
MILDTDYITEDGKPVIRIFKKENGEFKIEYDRTFEPYFYALLKDDSAIEEVKKITAERHGTVVTVKRVEKVQKKFLGRPVEVWKLYFTHPQDVPAIRDKIREHPAVIDIYEYDIPFAKRYLIDKGLVPMEGDEELKMLAFDIETLYHEGEEFAEGPILMISYADEEGARVITWKNVDLPYVDVVSTEREMIKRFLRVVKEKDPDVLITYNGDNFDFAYLKKRCEKLGINFALGRDGSEPKIQRMGDRFAVEVKGRIHFDLYPVIRRTINLPTYTLEAVYEAVFGQPKEKVYAEEITTAWETGENLERVARYSMEDFKVTYELGKEFLPMEAQLSRLIGQSLWDVSRSSTGNLVEWFLLRKAYERNELAPNKPDEKELARRRQSYEGGYVKEPERGLWENIVYLDFRSLYPSIIITHNVSPDTLNREGCKEYDVAPQVGHRFCKDFPGFIPSLLGDLLEERQKIKKKMKATIDPIERKLLDYRQRAIKILANSYYGYYGYARARWYCKECAESVTAWGREYITMTIKEIEEKYGFKVIYSDTDGFFATIPGADAETVKKKAMEFLKYINAKLPGALELEYEGFYKRGFFVTKKKYAVIDEEGKITTRGLEIVRRDWSEIAKETQARVLEALLKDGDVEKAVRIVKEVTEKLSKYEVPPEKLVIHEQITRDLKDYKATGPHVAVAKRLAARGVKIRPGTVISYIVLKGSGRIGDRAIPFDEFDPTKHKYDAEYYIENQVLPAVERILRAFGYRKEDLRYQKTRQVGLSAWLKPKGT

SEQ ID NO: 723 - protein, 774 aa, synthetic construct
MILDTDYITEDGKPVIRIFKKENGEFKIEYDRTFEPYFYALLKDDSAIEEVKKITAERHGTVVTVKRVEKVQKKFLGRPVEVWKLYFTHPQDVPAIRDKIREHPAVIDIYEYDIPFAKRYLIDKGLVPMEGDEELKMLAFDIETLYHEGEEFAEGPILMISYADEEGARVITWKNVDLPYVDVVSTEREMIKRFLRVVKEKDPDVLITYNGDNFDFAYLKKRCEKLGINFALGRDGSEPKIQRMGDRFAVEVKGRIHFDLYPVIRRTINLPTYTLEAVYEAVFGQPKEKVYAEEITTAWETGENLERVARYSMEDHKVTYELGKEFLPMEAQLSRLIGQSLWDVSRSSTGNLVEWFLLRKAYERNELAPNKPDEKELARRRQSYEGGYVKEPERGLWENIVYLDFRSLYPSIIITHNVSPDTLNREGCKEYDVAPQVGHRFCKDFPGFIPSLLGDLLEERQKIKKKMKATIDPIERKLLDYRQRAIKILANSYYGYYGYARARWYCKECAESVTAWGREYITMTIKEIEEKYGFKVIYSDTDGFFATIPGADAETVKKKAMEFLKYINAKLPGALELEYEGFYKRGFFVTKKKYAVIDEEGKITTRGLEIVRRDWSEIAKETQARVLEALLKDGDVEKAVRIVKEVTEKLSKYEVPPEKLVIHEQITRDLKDYKATGPHVAVAKRLAARGVKIRPGTVISYIVLKGSGRIGDRAIPFDEFDPTKHKYDAEYYIENQVLPAVERILRAFGYRKEDLRYQKTRQVGLSAWLKPKGT

SEQ ID NO: 724 - protein, 774 aa, synthetic construct
MILDTDYITEDGKPVIRIFKKENGEFKIEYDRTFEPYFYALLKDDSAIEEVKKITAERHGTVVTVKRVEKVQKKFLGRPVEVWKLYFTHPQDVPAIRDKIREHPAVIDIYEYDIPFAKRYLIDKGLVPMEGDEELKMLAFDIETLYHEGEEFAEGPILMISYADEEGARVITWKNVDLPYVDVVSTEREMIKRFLRVVKEKDPDVLITYNGDNFDFAYLKKRCEKLGINFALGRDGSEPKIQRMGDRFAVEVKGRIHFDLYPVIRRTINLPTYTLEAVYEAVFGQPKEKVYAEEITTAWETGENLERVARYSMEDMKVTYELGKEFLPMEAQLSRLIGQSLWDVSRSSTGNLVEWFLLRKAYERNELAPNKPDEKELARRRQSYEGGYVKEPERGLWENIVYLDFRSLYPSIIITHNVSPDTLNREGCKEYDVAPQVGHRFCKDFPGFIPSLLGDLLEERQKIKKKMKATIDPIERKLLDYRQRAIKILANSYYGYYGYARARWYCKECAESVTAWGREYITMTIKEIEEKYGFKVIYSDTDGFFATIPGADAETVKKKAMEFLKYINAKLPGALELEYEGFYKRGFFVTKKKYAVIDEEGKITTRGLEIVRRDWSEIAKETQARVLEALLKDGDVEKAVRIVKEVTEKLSKYEVPPEKLVIHEQITRDLKDYKATGPHVAVAKRLAARGVKIRPGTVISYIVLKGSGRIGDRAIPFDEFDPTKHKYDAEYYIENQVLPAVERILRAFGYRKEDLRYQKTRQVGLSAWLKPKGT

SEQ ID NO: 725 - protein, 774 aa, synthetic construct
MILDTDYITEDGKPVIRIFKKENGEFKIEYDRTFEPYFYALLKDDSAIEEVKKITAERHGTVVTVKRVEKVQKKFLGRPVEVWKLYFTHPQDVPAIRDKIREHPAVIDIYEYDIPFAKRYLIDKGLVPMEGDEELKMLAFDIETLYHEGEEFAEGPILMISYADEEGARVITWKNVDLPYVDVVSTEREMIKRFLRVVKEKDPDVLITYNGDNFDFAYLKKRCEKLGINFALGRDGSEPKIQRMGDRFAVEVKGRIHFDLYPVIRRTINLPTYTLEAVYEAVFGQPKEKVYAEEITTAWETGENLERVARYSMEDNKVTYELGKEFLPMEAQLSRLIGQSLWDVSRSSTGNLVEWFLLRKAYERNELAPNKPDEKELARRRQSYEGGYVKEPERGLWENIVYLDFRSLYPSIIITHNVSPDTLNREGCKEYDVAPQVGHRFCKDFPGFIPSLLGDLLEERQKIKKKMKATIDPIERKLLDYRQRAIKILANSYYGYYGYARARWYCKECAESVTAWGREYITMTIKEIEEKYGFKVIYSDTDGFFATIPGADAETVKKKAMEFLKYINAKLPGALELEYEGFYKRGFFVTKKKYAVIDEEGKITTRGLEIVRRDWSEIAKETQARVLEALLKDGDVEKAVRIVKEVTEKLSKYEVPPEKLVIHEQITRDLKDYKATGPHVAVAKRLAARGVKIRPGTVISYIVLKGSGRIGDRAIPFDEFDPTKHKYDAEYYIENQVLPAVERILRAFGYRKEDLRYQKTRQVGLSAWLKPKGT

SEQ ID NO: 726 - protein, 774 aa, synthetic construct
MILDTDYITEDGKPVIRIFKKENGEFKIEYDRTFEPYFYALLKDDSAIEEVKKITAERHGTVVTVKRVEKVQKKFLGRPVEVWKLYFTHPQDVPAIRDKIREHPAVIDIYEYDIPFAKRYLIDKGLVPMEGDEELKMLAFDIETLYHEGEEFAEGPILMISYADEEGARVITWKNVDLPYVDVVSTEREMIKRFLRVVKEKDPDVLITYNGDNFDFAYLKKRCEKLGINFALGRDGSEPKIQRMGDRFAVEVKGRIHFDLYPVIRRTINLPTYTLEAVYEAVFGQPKEKVYAEEITTAWETGENLERVARYSMEDQKVTYELGKEFLPMEAQLSRLIGQSLWDVSRSSTGNLVEWFLLRKAYERNELAPNKPDEKELARRRQSYEGGYVKEPERGLWENIVYLDFRSLYPSIIITHNVSPDTLNREGCKEYDVAPQVGHRFCKDFPGFIPSLLGDLLEERQKIKKKMKATIDPIERKLLDYRQRAIKILANSYYGYYGYARARWYCKECAESVTAWGREYITMTIKEIEEKYGFKVIYSDTDGFFATIPGADAETVKKKAMEFLKYINAKLPGALELEYEGFYKRGFFVTKKKYAVIDEEGKITTRGLEIVRRDWSEIAKETQARVLEALLKDGDVEKAVRIVKEVTEKLSKYEVPPEKLVIHEQITRDLKDYKATGPHVAVAKRLAARGVKIRPGTVISYIVLKGSGRIGDRAIPFDEFDPTKHKYDAEYYIENQVLPAVERILRAFGYRKEDLRYQKTRQVGLSAWLKPKGT

SEQ ID NO: 727 - protein, 774 aa, synthetic construct
MILDTDYITEDGKPVIRIFKKENGEFKIEYDRTFEPYFYALLKDDSAIEEVKKITAERHGTVVTVKRVEKVQKKFLGRPVEVWKLYFTHPQDVPAIRDKIREHPAVIDIYEYDIPFAKRYLIDKGLVPMEGDEELKMLAFDIETLYHEGEEFAEGPILMISYADEEGARVITWKNVDLPYVDVVSTEREMIKRFLRVVKEKDPDVLITYNGDNFDFAYLKKRCEKLGINFALGRDGSEPKIQRMGDRFAVEVKGRIHFDLYPVIRRTINLPTYTLEAVYEAVFGQPKEKVYAEEITTAWETGENLERVARYSMEDRKVTYELGKEFLPMEAQLSRLIGQSLWDVSRSSTGNLVEWFLLRKAYERNELAPNKPDEKELARRRQSYEGGYVKEPERGLWENIVYLDFRSLYPSIIITHNVSPDTLNREGCKEYDVAPQVGHRFCKDFPGFIPSLLGDLLEERQKIKKKMKATIDPIERKLLDYRQRAIKILANSYYGYYGYARARWYCKECAESVTAWGREYITMTIKEIEEKYGFKVIYSDTDGFFATIPGADAETVKKKAMEFLKYINAKLPGALELEYEGFYKRGFFVTKKKYAVIDEEGKITTRGLEIVRRDWSEIAKETQARVLEALLKDGDVEKAVRIVKEVTEKLSKYEVPPEKLVIHEQITRDLKDYKATGPHVAVAKRLAARGVKIRPGTVISYIVLKGSGRIGDRAIPFDEFDPTKHKYDAEYYIENQVLPAVERILRAFGYRKEDLRYQKTRQVGLSAWLKPKGT

SEQ ID NO: 728 - protein, 774 aa, synthetic construct
MILDTDYITEDGKPVIRIFKKENGEFKIEYDRTFEPYFYALLKDDSAIEEVKKITAERHGTVVTVKRVEKVQKKFLGRPVEVWKLYFTHPQDVPAIRDKIREHPAVIDIYEYDIPFAKRYLIDKGLVPMEGDEELKMLAFDIETLYHEGEEFAEGPILMISYADEEGARVITWKNVDLPYVDVVSTEREMIKRFLRVVKEKDPDVLITYNGDNFDFAYLKKRCEKLGINFALGRDGSEPKIQRMGDRFAVEVKGRIHFDLYPVIRRTINLPTYTLEAVYEAVFGQPKEKVYAEEITTAWETGENLERVARYSMEDWKVTYELGKEFLPMEAQLSRLIGQSLWDVSRSSTGNLVEWFLLRKAYERNELAPNKPDEKELARRRQSYEGGYVKEPERGLWENIVYLDFRSLYPSIIITHNVSPDTLNREGCKEYDVAPQVGHRFCKDFPGFIPSLLGDLLEERQKIKKKMKATIDPIERKLLDYRQRAIKILANSYYGYYGYARARWYCKECAESVTAWGREYITMTIKEIEEKYGFKVIYSDTDGFFATIPGADAETVKKKAMEFLKYINAKLPGALELEYEGFYKRGFFVTKKKYAVIDEEGKITTRGLEIVRRDWSEIAKETQARVLEALLKDGDVEKAVRIVKEVTEKLSKYEVPPEKLVIHEQITRDLKDYKATGPHVAVAKRLAARGVKIRPGTVISYIVLKGSGRIGDRAIPFDEFDPTKHKYDAEYYIENQVLPAVERILRAFGYRKEDLRYQKTRQVGLSAWLKPKGT

SEQ ID NO: 729 - protein, 774 aa, synthetic construct
MILDTDYITEDGKPVIRIFKKENGEFKIEYDRTFEPYFYALLKDDSAIEEVKKITAERHGTVVTVKRVEKVQKKFLGRPVEVWKLYFTHPQDVPAIRDKIREHPAVIDIYEYDIPFAKRYLIDKGLVPMEGDEELKMLAFDIETLYHEGEEFAEGPILMISYADEEGARVITWKNVDLPYVDVVSTEREMIKRFLRVVKEKDPDVLITYNGDNFDFAYLKKRCEKLGINFALGRDGSEPKIQRMGDRFAVEVKGRIHFDLYPVIRRTINLPTYTLEAVYEAVFGQPKEKVYAEEITTAWETGENLERVARYSMEDYKVTYELGKEFLPMEAQLSRLIGQSLWDVSRSSTGNLVEWFLLRKAYERNELAPNKPDEKELARRRQSYEGGYVKEPERGLWENIVYLDFRSLYPSIIITHNVSPDTLNREGCKEYDVAPQVGHRFCKDFPGFIPSLLGDLLEERQKIKKKMKATIDPIERKLLDYRQRAIKILANSYYGYYGYARARWYCKECAESVTAWGREYITMTIKEIEEKYGFKVIYSDTDGFFATIPGADAETVKKKAMEFLKYINAKLPGALELEYEGFYKRGFFVTKKKYAVIDEEGKITTRGLEIVRRDWSEIAKETQARVLEALLKDGDVEKAVRIVKEVTEKLSKYEVPPEKLVIHEQITRDLKDYKATGPHVAVAKRLAARGVKIRPGTVISYIVLKGSGRIGDRAIPFDEFDPTKHKYDAEYYIENQVLPAVERILRAFGYRKEDLRYQKTRQVGLSAWLKPKGT

SEQ ID NO: 730 - protein, 774 aa, synthetic construct
MILDTDYITEDGKPVIRIFKKENGEFKIEYDRTFEPYFYALLKDDSAIEEVKKITAERHGTVVTVKRVEKVQKKFLGRPVEVWKLYFTHPQDVPAIRDKIREHPAVIDIYEYDIPFAKRYLIDKGLVPMEGDEELKMLAFDIETLYHEGEEFAEGPILMISYADEEGARVITWKNVDLPYVDVVSTEREMIKRFLRVVKEKDPDVLITYNGDNFDFAYLKKRCEKLGINFALGRDGSEPKIQRMGDRFAVEVKGRIHFDLYPVIRRTINLPTYTLEAVYEAVFGQPKEKVYAEEITTAWETGENLERVARYSMEDAPVTYELGKEFLPMEAQLSRLIGQSLWDVSRSSTGNLVEWFLLRKAYERNELAPNKPDEKELARRRQSYEGGYVKEPERGLWENIVYLDFRSLYPSIIITHNVSPDTLNREGCKEYDVAPQVGHRFCKDFPGFIPSLLGDLLEERQKIKKKMKATIDPIERKLLDYRQRAIKILANSYYGYYGYARARWYCKECAESVTAWGREYITMTIKEIEEKYGFKVIYSDTDGFFATIPGADAETVKKKAMEFLKYINAKLPGALELEYEGFYKRGFFVTKKKYAVIDEEGKITTRGLEIVRRDWSEIAKETQARVLEALLKDGDVEKAVRIVKEVTEKLSKYEVPPEKLVIHEQITRDLKDYKATGPHVAVAKRLAARGVKIRPGTVISYIVLKGSGRIGDRAIPFDEFDPTKHKYDAEYYIENQVLPAVERILRAFGYRKEDLRYQKTRQVGLSAWLKPKGT

SEQ ID NO: 731 - protein, 774 aa, synthetic construct
MILDTDYITEDGKPVIRIFKKENGEFKIEYDRTFEPYFYALLKDDSAIEEVKKITAERHGTVVTVKRVEKVQKKFLGRPVEVWKLYFTHPQDVPAIRDKIREHPAVIDIYEYDIPFAKRYLIDKGLVPMEGDEELKMLAFDIETLYHEGEEFAEGPILMISYADEEGARVITWKNVDLPYVDVVSTEREMIKRFLRVVKEKDPDVLITYNGDNFDFAYLKKRCEKLGINFALGRDGSEPKIQRMGDRFAVEVKGRIHFDLYPVIRRTINLPTYTLEAVYEAVFGQPKEKVYAEEITTAWETGENLERVARYSMEDAKPTYELGKEFLPMEAQLSRLIGQSLWDVSRSSTGNLVEWFLLRKAYERNELAPNKPDEKELARRRQSYEGGYVKEPERGLWENIVYLDFRSLYPSIIITHNVSPDTLNREGCKEYDVAPQVGHRFCKDFPGFIPSLLGDLLEERQKIKKKMKATIDPIERKLLDYRQRAIKILANSYYGYYGYARARWYCKECAESVTAWGREYITMTIKEIEEKYGFKVIYSDTDGFFATIPGADAETVKKKAMEFLKYINAKLPGALELEYEGFYKRGFFVTKKKYAVIDEEGKITTRGLEIVRRDWSEIAKETQARVLEALLKDGDVEKAVRIVKEVTEKLSKYEVPPEKLVIHEQITRDLKDYKATGPHVAVAKRLAARGVKIRPGTVISYIVLKGSGRIGDRAIPFDEFDPTKHKYDAEYYIENQVLPAVERILRAFGYRKEDLRYQKTRQVGLSAWLKPKGT

SEQ ID NO: 732 - protein, 774 aa, synthetic construct
MILDTDYITEDGKPVIRIFKKENGEFKIEYDRTFEPYFYALLKDDSAIEEVKKITAERHGTVVTVKRVEKVQKKFLGRPVEVWKLYFTHPQDVPAIRDKIREHPAVIDIYEYDIPFAKRYLIDKGLVPMEGDEELKMLAFDIETLYHEGEEFAEGPILMISYADEEGARVITWKNVDLPYVDVVSTEREMIKRFLRVVKEKDPDVLITYNGDNFDFAYLKKRCEKLGINFALGRDGSEPKIQRMGDRFAVEVKGRIHFDLYPVIRRTINLPTYTLEAVYEAVFGQPKEKVYAEEITTAWETGENLERVARYSMEDAKRTYELGKEFLPMEAQLSRLIGQSLWDVSRSSTGNLVEWFLLRKAYERNELAPNKPDEKELARRRQSYEGGYVKEPERGLWENIVYLDFRSLYPSIIITHNVSPDTLNREGCKEYDVAPQVGHRFCKDFPGFIPSLLGDLLEERQKIKKKMKATIDPIERKLLDYRQRAIKILANSYYGYYGYARARWYCKECAESVTAWGREYITMTIKEIEEKYGFKVIYSDTDGFFATIPGADAETVKKKAMEFLKYINAKLPGALELEYEGFYKRGFFVTKKKYAVIDEEGKITTRGLEIVRRDWSEIAKETQARVLEALLKDGDVEKAVRIVKEVTEKLSKYEVPPEKLVIHEQITRDLKDYKATGPHVAVAKRLAARGVKIRPGTVISYIVLKGSGRIGDRAIPFDEFDPTKHKYDAEYYIENQVLPAVERILRAFGYRKEDLRYQKTRQVGLSAWLKPKGT

SEQ ID NO: 733 - protein, 774 aa, synthetic construct
MILDTDYITEDGKPVIRIFKKENGEFKIEYDRTFEPYFYALLKDDSAIEEVKKITAERHGTVVTVKRVEKVQKKFLGRPVEVWKLYFTHPQDVPAIRDKIREHPAVIDIYEYDIPFAKRYLIDKGLVPMEGDEELKMLAFDIETLYHEGEEFAEGPILMISYADEEGARVITWKNVDLPYVDVVSTEREMIKRFLRVVKEKDPDVLITYNGDNFDFAYLKKRCEKLGINFALGRDGSEPKIQRMGDRFAVEVKGRIHFDLYPVIRRTINLPTYTLEAVYEAVFGQPKEKVYAEEITTAWETGENLERVARYSMEDAKVDYELGKEFLPMEAQLSRLIGQSLWDVSRSSTGNLVEWFLLRKAYERNELAPNKPDEKELARRRQSYEGGYVKEPERGLWENIVYLDFRSLYPSIIITHNVSPDTLNREGCKEYDVAPQVGHRFCKDFPGFIPSLLGDLLEERQKIKKKMKATIDPIERKLLDYRQRAIKILANSYYGYYGYARARWYCKECAESVTAWGREYITMTIKEIEEKYGFKVIYSDTDGFFATIPGADAETVKKKAMEFLKYINAKLPGALELEYEGFYKRGFFVTKKKYAVIDEEGKITTRGLEIVRRDWSEIAKETQARVLEALLKDGDVEKAVRIVKEVTEKLSKYEVPPEKLVIHEQITRDLKDYKATGPHVAVAKRLAARGVKIRPGTVISYIVLKGSGRIGDRAIPFDEFDPTKHKYDAEYYIENQVLPAVERILRAFGYRKEDLRYQKTRQVGLSAWLKPKGT

SEQ ID NO: 734 - protein, 774 aa, synthetic construct
MILDTDYITEDGKPVIRIFKKENGEFKIEYDRTFEPYFYALLKDDSAIEEVKKITAERHGTVVTVKRVEKVQKKFLGRPVEVWKLYFTHPQDVPAIRDKIREHPAVIDIYEYDIPFAKRYLIDKGLVPMEGDEELKMLAFDIETLYHEGEEFAEGPILMISYADEEGARVITWKNVDLPYVDVVSTEREMIKRFLRVVKEKDPDVLITYNGDNFDFAYLKKRCEKLGINFALGRDGSEPKIQRMGDRFAVEVKGRIHFDLYPVIRRTINLPTYTLEAVYEAVFGQPKEKVYAEEITTAWETGENLERVARYSMEDAKVIYELGKEFLPMEAQLSRLIGQSLWDVSRSSTGNLVEWFLLRKAYERNELAPNKPDEKELARRRQSYEGGYVKEPERGLWENIVYLDFRSLYPSIIITHNVSPDTLNREGCKEYDVAPQVGHRFCKDFPGFIPSLLGDLLEERQKIKKKMKATIDPIERKLLDYRQRAIKILANSYYGYYGYARARWYCKECAESVTAWGREYITMTIKEIEEKYGFKVIYSDTDGFFATIPGADAETVKKKAMEFLKYINAKLPGALELEYEGFYKRGFFVTKKKYAVIDEEGKITTRGLEIVRRDWSEIAKETQARVLEALLKDGDVEKAVRIVKEVTEKLSKYEVPPEKLVIHEQITRDLKDYKATGPHVAVAKRLAARGVKIRPGTVISYIVLKGSGRIGDRAIPFDEFDPTKHKYDAEYYIENQVLPAVERILRAFGYRKEDLRYQKTRQVGLSAWLKPKGT

SEQ ID NO: 735 - protein, 774 aa, synthetic construct
MILDTDYITEDGKPVIRIFKKENGEFKIEYDRTFEPYFYALLKDDSAIEEVKKITAERHGTVVTVKRVEKVQKKFLGRPVEVWKLYFTHPQDVPAIRDKIREHPAVIDIYEYDIPFAKRYLIDKGLVPMEGDEELKMLAFDIETLYHEGEEFAEGPILMISYADEEGARVITWKNVDLPYVDVVSTEREMIKRFLRVVKEKDPDVLITYNGDNFDFAYLKKRCEKLGINFALGRDGSEPKIQRMGDRFAVEVKGRIHFDLYPVIRRTINLPTYTLEAVYEAVFGQPKEKVYAEEITTAWETGENLERVARYSMEDAKVKYELGKEFLPMEAQLSRLIGQSLWDVSRSSTGNLVEWFLLRKAYERNELAPNKPDEKELARRRQSYEGGYVKEPERGLWENIVYLDFRSLYPSIIITHNVSPDTLNREGCKEYDVAPQVGHRFCKDFPGFIPSLLGDLLEERQKIKKKMKATIDPIERKLLDYRQRAIKILANSYYGYYGYARARWYCKECAESVTAWGREYITMTIKEIEEKYGFKVIYSDTDGFFATIPGADAETVKKKAMEFLKYINAKLPGALELEYEGFYKRGFFVTKKKYAVIDEEGKITTRGLEIVRRDWSEIAKETQARVLEALLKDGDVEKAVRIVKEVTEKLSKYEVPPEKLVIHEQITRDLKDYKATGPHVAVAKRLAARGVKIRPGTVISYIVLKGSGRIGDRAIPFDEFDPTKHKYDAEYYIENQVLPAVERILRAFGYRKEDLRYQKTRQVGLSAWLKPKGT

SEQ ID NO: 736 - protein, 774 aa, synthetic construct
MILDTDYITEDGKPVIRIFKKENGEFKIEYDRTFEPYFYALLKDDSAIEEVKKITAERHGTVVTVKRVEKVQKKFLGRPVEVWKLYFTHPQDVPAIRDKIREHPAVIDIYEYDIPFAKRYLIDKGLVPMEGDEELKMLAFDIETLYHEGEEFAEGPILMISYADEEGARVITWKNVDLPYVDVVSTEREMIKRFLRVVKEKDPDVLITYNGDNFDFAYLKKRCEKLGINFALGRDGSEPKIQRMGDRFAVEVKGRIHFDLYPVIRRTINLPTYTLEAVYEAVFGQPKEKVYAEEITTAWETGENLERVARYSMEDAKVLYELGKEFLPMEAQLSRLIGQSLWDVSRSSTGNLVEWFLLRKAYERNELAPNKPDEKELARRRQSYEGGYVKEPERGLWENIVYLDFRSLYPSIIITHNVSPDTLNREGCKEYDVAPQVGHRFCKDFPGFIPSLLGDLLEERQKIKKKMKATIDPIERKLLDYRQRAIKILANSYYGYYGYARARWYCKECAESVTAWGREYITMTIKEIEEKYGFKVIYSDTDGFFATIPGADAETVKKKAMEFLKYINAKLPGALELEYEGFYKRGFFVTKKKYAVIDEEGKITTRGLEIVRRDWSEIAKETQARVLEALLKDGDVEKAVRIVKEVTEKLSKYEVPPEKLVIHEQITRDLKDYKATGPHVAVAKRLAARGVKIRPGTVISYIVLKGSGRIGDRAIPFDEFDPTKHKYDAEYYIENQVLPAVERILRAFGYRKEDLRYQKTRQVGLSAWLKPKGT

SEQ ID NO: 737 - protein, 774 aa, synthetic construct
MILDTDYITEDGKPVIRIFKKENGEFKIEYDRTFEPYFYALLKDDSAIEEVKKITAERHGTVVTVKRVEKVQKKFLGRPVEVWKLYFTHPQDVPAIRDKIREHPAVIDIYEYDIPFAKRYLIDKGLVPMEGDEELKMLAFDIETLYHEGEEFAEGPILMISYADEEGARVITWKNVDLPYVDVVSTEREMIKRFLRVVKEKDPDVLITYNGDNFDFAYLKKRCEKLGINFALGRDGSEPKIQRMGDRFAVEVKGRIHFDLYPVIRRTINLPTYTLEAVYEAVFGQPKEKVYAEEITTAWETGENLERVARYSMEDAKVMYELGKEFLPMEAQLSRLIGQSLWDVSRSSTGNLVEWFLLRKAYERNELAPNKPDEKELARRRQSYEGGYVKEPERGLWENIVYLDFRSLYPSIIITHNVSPDTLNREGCKEYDVAPQVGHRFCKDFPGFIPSLLGDLLEERQKIKKKMKATIDPIERKLLDYRQRAIKILANSYYGYYGYARARWYCKECAESVTAWGREYITMTIKEIEEKYGFKVIYSDTDGFFATIPGADAETVKKKAMEFLKYINAKLPGALELEYEGFYKRGFFVTKKKYAVIDEEGKITTRGLEIVRRDWSEIAKETQARVLEALLKDGDVEKAVRIVKEVTEKLSKYEVPPEKLVIHEQITRDLKDYKATGPHVAVAKRLAARGVKIRPGTVISYIVLKGSGRIGDRAIPFDEFDPTKHKYDAEYYIENQVLPAVERILRAFGYRKEDLRYQKTRQVGLSAWLKPKGT

SEQ ID NO: 738 - protein, 774 aa, synthetic construct
MILDTDYITEDGKPVIRIFKKENGEFKIEYDRTFEPYFYALLKDDSAIEEVKKITAERHGTVVTVKRVEKVQKKFLGRPVEVWKLYFTHPQDVPAIRDKIREHPAVIDIYEYDIPFAKRYLIDKGLVPMEGDEELKMLAFDIETLYHEGEEFAEGPILMISYADEEGARVITWKNVDLPYVDVVSTEREMIKRFLRVVKEKDPDVLITYNGDNFDFAYLKKRCEKLGINFALGRDGSEPKIQRMGDRFAVEVKGRIHFDLYPVIRRTINLPTYTLEAVYEAVFGQPKEKVYAEEITTAWETGENLERVARYSMEDAKVQYELGKEFLPMEAQLSRLIGQSLWDVSRSSTGNLVEWFLLRKAYERNELAPNKPDEKELARRRQSYEGGYVKEPERGLWENIVYLDFRSLYPSIIITHNVSPDTLNREGCKEYDVAPQVGHRFCKDFPGFIPSLLGDLLEERQKIKKKMKATIDPIERKLLDYRQRAIKILANSYYGYYGYARARWYCKECAESVTAWGREYITMTIKEIEEKYGFKVIYSDTDGFFATIPGADAETVKKKAMEFLKYINAKLPGALELEYEGFYKRGFFVTKKKYAVIDEEGKITTRGLEIVRRDWSEIAKETQARVLEALLKDGDVEKAVRIVKEVTEKLSKYEVPPEKLVIHEQITRDLKDYKATGPHVAVAKRLAARGVKIRPGTVISYIVLKGSGRIGDRAIPFDEFDPTKHKYDAEYYIENQVLPAVERILRAFGYRKEDLRYQKTRQVGLSAWLKPKGT

SEQ ID NO: 739 - protein, 774 aa, synthetic construct
MILDTDYITEDGKPVIRIFKKENGEFKIEYDRTFEPYFYALLKDDSAIEEVKKITAERHGTVVTVKRVEKVQKKFLGRPVEVWKLYFTHPQDVPAIRDKIREHPAVIDIYEYDIPFAKRYLIDKGLVPMEGDEELKMLAFDIETLYHEGEEFAEGPILMISYADEEGARVITWKNVDLPYVDVVSTEREMIKRFLRVVKEKDPDVLITYNGDNFDFAYLKKRCEKLGINFALGRDGSEPKIQRMGDRFAVEVKGRIHFDLYPVIRRTINLPTYTLEAVYEAVFGQPKEKVYAEEITTAWETGENLERVARYSMEDAKVRYELGKEFLPMEAQLSRLIGQSLWDVSRSSTGNLVEWFLLRKAYERNELAPNKPDEKELARRRQSYEGGYVKEPERGLWENIVYLDFRSLYPSIIITHNVSPDTLNREGCKEYDVAPQVGHRFCKDFPGFIPSLLGDLLEERQKIKKKMKATIDPIERKLLDYRQRAIKILANSYYGYYGYARARWYCKECAESVTAWGREYITMTIKEIEEKYGFKVIYSDTDGFFATIPGADAETVKKKAMEFLKYINAKLPGALELEYEGFYKRGFFVTKKKYAVIDEEGKITTRGLEIVRRDWSEIAKETQARVLEALLKDGDVEKAVRIVKEVTEKLSKYEVPPEKLVIHEQITRDLKDYKATGPHVAVAKRLAARGVKIRPGTVISYIVLKGSGRIGDRAIPFDEFDPTKHKYDAEYYIENQVLPAVERILRAFGYRKEDLRYQKTRQVGLSAWLKPKGT

SEQ ID NO: 740 - protein, 774 aa, synthetic construct
MILDTDYITEDGKPVIRIFKKENGEFKIEYDRTFEPYFYALLKDDSAIEEVKKITAERHGTVVTVKRVEKVQKKFLGRPVEVWKLYFTHPQDVPAIRDKIREHPAVIDIYEYDIPFAKRYLIDKGLVPMEGDEELKMLAFDIETLYHEGEEFAEGPILMISYADEEGARVITWKNVDLPYVDVVSTEREMIKRFLRVVKEKDPDVLITYNGDNFDFAYLKKRCEKLGINFALGRDGSEPKIQRMGDRFAVEVKGRIHFDLYPVIRRTINLPTYTLEAVYEAVFGQPKEKVYAEEITTAWETGENLERVARYSMEDAKVVYELGKEFLPMEAQLSRLIGQSLWDVSRSSTGNLVEWFLLRKAYERNELAPNKPDEKELARRRQSYEGGYVKEPERGLWENIVYLDFRSLYPSIIITHNVSPDTLNREGCKEYDVAPQVGHRFCKDFPGFIPSLLGDLLEERQKIKKKMKATIDPIERKLLDYRQRAIKILANSYYGYYGYARARWYCKECAESVTAWGREYITMTIKEIEEKYGFKVIYSDTDGFFATIPGADAETVKKKAMEFLKYINAKLPGALELEYEGFYKRGFFVTKKKYAVIDEEGKITTRGLEIVRRDWSEIAKETQARVLEALLKDGDVEKAVRIVKEVTEKLSKYEVPPEKLVIHEQITRDLKDYKATGPHVAVAKRLAARGVKIRPGTVISYIVLKGSGRIGDRAIPFDEFDPTKHKYDAEYYIENQVLPAVERILRAFGYRKEDLRYQKTRQVGLSAWLKPKGT

SEQ ID NO: 741 - protein, 774 aa, synthetic construct
MILDTDYITEDGKPVFRIFKKENGEFKIEYDRTFEAYFYALLKDDSAIEEVKKITAERHGTVVTVKRVEKVQKKFLGRPVEVWKLYFTHPQDVPAIRDKIREHPAVIDIYEYDIPFAKRYLIDKGLVPMEGDEELKMLAFDIETLYHEGEEFAEGPILMISYADEEGARVITWKNVDLPYVDVVSTEREMIKRFLRVVKEKDPDVLITYNGDNFDFAYLKKRCEKLGINFALGRDGSEPKIQRMGDRFAVEVKGRIHFDLYPVIRRTINLPTYTLEAVYEAVFGQPKEKVYAEEITTAWETGENLERVARYSMEDAKVTYELGKEFLPMEAQLSRLIGQSLWDVSRSSTGNLVEWFLLRKAYERNELAPNKPDEKELARRRQSYEGGYVKEPERGLWENIVYLDFRSLYPSIIITHNVSPDTLNREGCKEYDVAPQVGHRFCKDFPGFIPSLLGDLLEERQKIKKKMKATIDPIERKLLDYRQRAIKILANSYYGYYGYARARWYCKECAESVTAWGREYITMTIKEIEEKYGFKVIYSDTDGFFATIPGADAETVKKKAMEFLKYINAKLPGALELEYEGFYKRGFFVTKKKYAVIDEEGKITTRGLEIVRRDWSEIAKETQARVLEALLKDGDVEKAVRIVKEVTEKLSKYEVPPEKLVIHEQITRDLKDYKATGPHVAVAKRLAARGVKIRPGTVISYIVLKGSGRIGDRAIPFDEFDPTKHKYDAEYYIENQVLPAVERILRAFGYRKEDLRYQKTRQVGLSAWLKPKGT

SEQ ID NO: 742 - protein, 774 aa, synthetic construct
MILDTDYITEDGKPVFRIFKKENGEFKIEYDRTFEAYFYALLKDDSAIEEVKKITAERHGTVVTVKRVEKVQKKFLGRPVEVWKLYFTHFQDVPAIRDKIREHPAVIDIYEYDIPFAKRYLIDKGLVPMEGDEELKMLAFDIETLYHEGEEFAEGPILMISYADEEGARVITWKNVDLPYVDVVSTEREMIKRFLRVVKEKDPDVLITYNGDNFDFAYLKKRCEKLGINFALGRDGSEPKIQRMGDRFAVEVKGRIHFDLYPVIRRTINLPTYTLEAVYEAVFGQPKEKVYAEEITTAWETGENLERVARYSMEDAKVTYELGKEFLPMEAQLSRLIGQSLWDVSRSSTGNLVEWFLLRKAYERNELAPNKPDEKELARRRQSYEGGYVKEPERGLWENIVYLDFRSLYPSIIITHNVSPDTLNREGCKEYDVAPQVGHRFCKDFPGFIPSLLGDLLEERQKIKKKMKATIDPIERKLLDYRQRAIKILANSYYGYYGYARARWYCKECAESVTAWGREYITMTIKEIEEKYGFKVIYSDTDGFFATIPGADAETVKKKAMEFLKYINAKLPGALELEYEGFYKRGFFVTKKKYAVIDEEGKITTRGLEIVRRDWSEIAKETQARVLEALLKDGDVEKAVRIVKEVTEKLSKYEVPPEKLVIHEQITRDLKDYKATGPHVAVAKRLAARGVKIRPGTVISYIVLKGSGRIGDRAIPFDEFDPTKHKYDAEYYIENQVLPAVERILRAFGYRKEDLRYQKTRQVGLSAWLKPKGT

SEQ ID NO: 743 - protein, 774 aa, synthetic construct
MILDTDYITEDGKPVFRIFKKENGEFKIEYDRTFEAYFYALLKDDSAIEEVKKITAERHGTVVTVKRVEKVQKKFLGRPVEVWKLYFTHFQDVPAIADKIREHPAVIDIYEYDIPFAKRYLIDKGLVPMEGDEELKMLAFDIETLYHEGEEFAEGPILMISYADEEGARVITWKNVDLPYVDVVSTEREMIKRFLRVVKEKDPDVLITYNGDNFDFAYLKKRCEKLGINFALGRDGSEPKIQRMGDRFAVEVKGRIHFDLYPVIRRTINLPTYTLEAVYEAVFGQPKEKVYAEEITTAWETGENLERVARYSMEDAKVTYELGKEFLPMEAQLSRLIGQSLWDVSRSSTGNLVEWFLLRKAYERNELAPNKPDEKELARRRQSYEGGYVKEPERGLWENIVYLDFRSLYPSIIITHNVSPDTLNREGCKEYDVAPQVGHRFCKDFPGFIPSLLGDLLEERQKIKKKMKATIDPIERKLLDYRQRAIKILANSYYGYYGYARARWYCKECAESVTAWGREYITMTIKEIEEKYGFKVIYSDTDGFFATIPGADAETVKKKAMEFLKYINAKLPGALELEYEGFYKRGFFVTKKKYAVIDEEGKITTRGLEIVRRDWSEIAKETQARVLEALLKDGDVEKAVRIVKEVTEKLSKYEVPPEKLVIHEQITRDLKDYKATGPHVAVAKRLAARGVKIRPGTVISYIVLKGSGRIGDRAIPFDEFDPTKHKYDAEYYIENQVLPAVERILRAFGYRKEDLRYQKTRQVGLSAWLKPKGT

SEQ ID NO: 744 - protein, 774 aa, synthetic construct
MILDTDYITEDGKPVFRIFKKENGEFKIEYDRTFEAYFYALLKDDSAIEEVKKITAERHGTVVTVKRVEKVQKKFLGRPVEVWKLYFTHFQDVPAIFDKIREHPAVIDIYEYDIPFAKRYLIDKGLVPMEGDEELKMLAFDIETLYHEGEEFAEGPILMISYADEEGARVITWKNVDLPYVDVVSTEREMIKRFLRVVKEKDPDVLITYNGDNFDFAYLKKRCEKLGINFALGRDGSEPKIQRMGDRFAVEVKGRIHFDLYPVIRRTINLPTYTLEAVYEAVFGQPKEKVYAEEITTAWETGENLERVARYSMEDAKVTYELGKEFLPMEAQLSRLIGQSLWDVSRSSTGNLVEWFLLRKAYERNELAPNKPDEKELARRRQSYEGGYVKEPERGLWENIVYLDFRSLYPSIIITHNVSPDTLNREGCKEYDVAPQVGHRFCKDFPGFIPSLLGDLLEERQKIKKKMKATIDPIERKLLDYRQRAIKILANSYYGYYGYARARWYCKECAESVTAWGREYITMTIKEIEEKYGFKVIYSDTDGFFATIPGADAETVKKKAMEFLKYINAKLPGALELEYEGFYKRGFFVTKKKYAVIDEEGKITTRGLEIVRRDWSEIAKETQARVLEALLKDGDVEKAVRIVKEVTEKLSKYEVPPEKLVIHEQITRDLKDYKATGPHVAVAKRLAARGVKIRPGTVISYIVLKGSGRIGDRAIPFDEFDPTKHKYDAEYYIENQVLPAVERILRAFGYRKEDLRYQKTRQVGLSAWLKPKGT

SEQ ID NO: 745 - protein, 774 aa, synthetic construct
MILDTDYITEDGKPVFRIFKKENGEFKIEYDRTFEAYFYALLKDDSAIEEVKKITAERHGTVVTVKRVEKVQKKFLGRPVEVWKLYFTHFQDIPAIRDKIREHPAVIDIYEYDIPFAKRYLIDKGLVPMEGDEELKMLAFDIETLYHEGEEFAEGPILMISYADEEGARVITWKNVDLPYVDVVSTEREMIKRFLRVVKEKDPDVLITYNGDNFDFAYLKKRCEKLGINFALGRDGSEPKIQRMGDRFAVEVKGRIHFDLYPVIRRTINLPTYTLEAVYEAVFGQPKEKVYAEEITTAWETGENLERVARYSMEDAKVTYELGKEFLPMEAQLSRLIGQSLWDVSRSSTGNLVEWFLLRKAYERNELAPNKPDEKELARRRQSYEGGYVKEPERGLWENIVYLDFRSLYPSIIITHNVSPDTLNREGCKEYDVAPQVGHRFCKDFPGFIPSLLGDLLEERQKIKKKMKATIDPIERKLLDYRQRAIKILANSYYGYYGYARARWYCKECAESVTAWGREYITMTIKEIEEKYGFKVIYSDTDGFFATIPGADAETVKKKAMEFLKYINAKLPGALELEYEGFYKRGFFVTKKKYAVIDEEGKITTRGLEIVRRDWSEIAKETQARVLEALLKDGDVEKAVRIVKEVTEKLSKYEVPPEKLVIHEQITRDLKDYKATGPHVAVAKRLAARGVKIRPGTVISYIVLKGSGRIGDRAIPFDEFDPTKHKYDAEYYIENQVLPAVERILRAFGYRKEDLRYQKTRQVGLSAWLKPKGT

SEQ ID NO: 746 - protein, 774 aa, synthetic construct
MILDTDYITEDGKPVFRIFKKENGEFKIEYDRTFEAYFYALLKDDSAIEEVKKITAERHGTVVTVKRVEKVQKKFLGRPVEVWKLYFTHFQDIPAIADKIREHPAVIDIYEYDIPFAKRYLIDKGLVPMEGDEELKMLAFDIETLYHEGEEFAEGPILMISYADEEGARVITWKNVDLPYVDVVSTEREMIKRFLRVVKEKDPDVLITYNGDNFDFAYLKKRCEKLGINFALGRDGSEPKIQRMGDRFAVEVKGRIHFDLYPVIRRTINLPTYTLEAVYEAVFGQPKEKVYAEEITTAWETGENLERVARYSMEDAKVTYELGKEFLPMEAQLSRLIGQSLWDVSRSSTGNLVEWFLLRKAYERNELAPNKPDEKELARRRQSYEGGYVKEPERGLWENIVYLDFRSLYPSIIITHNVSPDTLNREGCKEYDVAPQVGHRFCKDFPGFIPSLLGDLLEERQKIKKKMKATIDPIERKLLDYRQRAIKILANSYYGYYGYARARWYCKECAESVTAWGREYITMTIKEIEEKYGFKVIYSDTDGFFATIPGADAETVKKKAMEFLKYINAKLPGALELEYEGFYKRGFFVTKKKYAVIDEEGKITTRGLEIVRRDWSEIAKETQARVLEALLKDGDVEKAVRIVKEVTEKLSKYEVPPEKLVIHEQITRDLKDYKATGPHVAVAKRLAARGVKIRPGTVISYIVLKGSGRIGDRAIPFDEFDPTKHKYDAEYYIENQVLPAVERILRAFGYRKEDLRYQKTRQVGLSAWLKPKGT

SEQ ID NO: 747 - protein, 774 aa, synthetic construct
MILDTDYITEDGKPVFRIFKKENGEFKIEYDRTFEAYFYALLKDDSAIEEVKKITAERHGTVVTVKRVEKVQKKFLGRPVEVWKLYFTHFQDIPAIFDKIREHPAVIDIYEYDIPFAKRYLIDKGLVPMEGDEELKMLAFDIETLYHEGEEFAEGPILMISYADEEGARVITWKNVDLPYVDVVSTEREMIKRFLRVVKEKDPDVLITYNGDNFDFAYLKKRCEKLGINFALGRDGSEPKIQRMGDRFAVEVKGRIHFDLYPVIRRTINLPTYTLEAVYEAVFGQPKEKVYAEEITTAWETGENLERVARYSMEDAKVTYELGKEFLPMEAQLSRLIGQSLWDVSRSSTGNLVEWFLLRKAYERNELAPNKPDEKELARRRQSYEGGYVKEPERGLWENIVYLDFRSLYPSIIITHNVSPDTLNREGCKEYDVAPQVGHRFCKDFPGFIPSLLGDLLEERQKIKKKMKATIDPIERKLLDYRQRAIKILANSYYGYYGYARARWYCKECAESVTAWGREYITMTIKEIEEKYGFKVIYSDTDGFFATIPGADAETVKKKAMEFLKYINAKLPGALELEYEGFYKRGFFVTKKKYAVIDEEGKITTRGLEIVRRDWSEIAKETQARVLEALLKDGDVEKAVRIVKEVTEKLSKYEVPPEKLVIHEQITRDLKDYKATGPHVAVAKRLAARGVKIRPGTVISYIVLKGSGRIGDRAIPFDEFDPTKHKYDAEYYIENQVLPAVERILRAFGYRKEDLRYQKTRQVGLSAWLKPKGT

SEQ ID NO: 748 - protein, 774 aa, synthetic construct
MILDTDYITEDGKPVFRIFKKENGEFKIEYDRTFEAYFYALLKDDSAIEEVKKITAERHGTVVTVKRVEKVQKKFLGRPVEVWKLYFTHFQDIPAIHDKIREHPAVIDIYEYDIPFAKRYLIDKGLVPMEGDEELKMLAFDIETLYHEGEEFAEGPILMISYADEEGARVITWKNVDLPYVDVVSTEREMIKRFLRVVKEKDPDVLITYNGDNFDFAYLKKRCEKLGINFALGRDGSEPKIQRMGDRFAVEVKGRIHFDLYPVIRRTINLPTYTLEAVYEAVFGQPKEKVYAEEITTAWETGENLERVARYSMEDAKVTYELGKEFLPMEAQLSRLIGQSLWDVSRSSTGNLVEWFLLRKAYERNELAPNKPDEKELARRRQSYEGGYVKEPERGLWENIVYLDFRSLYPSIIITHNVSPDTLNREGCKEYDVAPQVGHRFCKDFPGFIPSLLGDLLEERQKIKKKMKATIDPIERKLLDYRQRAIKILANSYYGYYGYARARWYCKECAESVTAWGREYITMTIKEIEEKYGFKVIYSDTDGFFATIPGADAETVKKKAMEFLKYINAKLPGALELEYEGFYKRGFFVTKKKYAVIDEEGKITTRGLEIVRRDWSEIAKETQARVLEALLKDGDVEKAVRIVKEVTEKLSKYEVPPEKLVIHEQITRDLKDYKATGPHVAVAKRLAARGVKIRPGTVISYIVLKGSGRIGDRAIPFDEFDPTKHKYDAEYYIENQVLPAVERILRAFGYRKEDLRYQKTRQVGLSAWLKPKGT

SEQ ID NO: 749 - protein, 774 aa, synthetic construct
MILDTDYITEDGKPVFRIFKKENGEFKIEYDRTFEAYFYALLKDDSAIEEVKKITAERHGTVVTVKRVEKVQKKFLGRPVEVWKLYFTHFQDRPAIADKIREHPAVIDIYEYDIPFAKRYLIDKGLVPMEGDEELKMLAFDIETLYHEGEEFAEGPILMISYADEEGARVITWKNVDLPYVDVVSTEREMIKRFLRVVKEKDPDVLITYNGDNFDFAYLKKRCEKLGINFALGRDGSEPKIQRMGDRFAVEVKGRIHFDLYPVIRRTINLPTYTLEAVYEAVFGQPKEKVYAEEITTAWETGENLERVARYSMEDAKVTYELGKEFLPMEAQLSRLIGQSLWDVSRSSTGNLVEWFLLRKAYERNELAPNKPDEKELARRRQSYEGGYVKEPERGLWENIVYLDFRSLYPSIIITHNVSPDTLNREGCKEYDVAPQVGHRFCKDFPGFIPSLLGDLLEERQKIKKKMKATIDPIERKLLDYRQRAIKILANSYYGYYGYARARWYCKECAESVTAWGREYITMTIKEIEEKYGFKVIYSDTDGFFATIPGADAETVKKKAMEFLKYINAKLPGALELEYEGFYKRGFFVTKKKYAVIDEEGKITTRGLEIVRRDWSEIAKETQARVLEALLKDGDVEKAVRIVKEVTEKLSKYEVPPEKLVIHEQITRDLKDYKATGPHVAVAKRLAARGVKIRPGTVISYIVLKGSGRIGDRAIPFDEFDPTKHKYDAEYYIENQVLPAVERILRAFGYRKEDLRYQKTRQVGLSAWLKPKGT

SEQ ID NO: 750 - protein, 774 aa, synthetic construct
MILDTDYITEDGKPVFRIFKKENGEFKIEYDRTFEAYFYALLKDDSAIEEVKKITAERHGTVVTVKRVEKVQKKFLGRPVEVWKLYFTHIQDVPAIRDKIREHPAVIDIYEYDIPFAKRYLIDKGLVPMEGDEELKMLAFDIETLYHEGEEFAEGPILMISYADEEGARVITWKNVDLPYVDVVSTEREMIKRFLRVVKEKDPDVLITYNGDNFDFAYLKKRCEKLGINFALGRDGSEPKIQRMGDRFAVEVKGRIHFDLYPVIRRTINLPTYTLEAVYEAVFGQPKEKVYAEEITTAWETGENLERVARYSMEDAKVTYELGKEFLPMEAQLSRLIGQSLWDVSRSSTGNLVEWFLLRKAYERNELAPNKPDEKELARRRQSYEGGYVKEPERGLWENIVYLDFRSLYPSIIITHNVSPDTLNREGCKEYDVAPQVGHRFCKDFPGFIPSLLGDLLEERQKIKKKMKATIDPIERKLLDYRQRAIKILANSYYGYYGYARARWYCKECAESVTAWGREYITMTIKEIEEKYGFKVIYSDTDGFFATIPGADAETVKKKAMEFLKYINAKLPGALELEYEGFYKRGFFVTKKKYAVIDEEGKITTRGLEIVRRDWSEIAKETQARVLEALLKDGDVEKAVRIVKEVTEKLSKYEVPPEKLVIHEQITRDLKDYKATGPHVAVAKRLAARGVKIRPGTVISYIVLKGSGRIGDRAIPFDEFDPTKHKYDAEYYIENQVLPAVERILRAFGYRKEDLRYQKTRQVGLSAWLKPKGT

SEQ ID NO: 751 - protein, 774 aa, synthetic construct
MILDTDYITEDGKPVFRIFKKENGEFKIEYDRTFEAYFYALLKDDSAIEEVKKITAERHGTVVTVKRVEKVQKKFLGRPVEVWKLYFTHIQDVPAIADKIREHPAVIDIYEYDIPFAKRYLIDKGLVPMEGDEELKMLAFDIETLYHEGEEFAEGPILMISYADEEGARVITWKNVDLPYVDVVSTEREMIKRFLRVVKEKDPDVLITYNGDNFDFAYLKKRCEKLGINFALGRDGSEPKIQRMGDRFAVEVKGRIHFDLYPVIRRTINLPTYTLEAVYEAVFGQPKEKVYAEEITTAWETGENLERVARYSMEDAKVTYELGKEFLPMEAQLSRLIGQSLWDVSRSSTGNLVEWFLLRKAYERNELAPNKPDEKELARRRQSYEGGYVKEPERGLWENIVYLDFRSLYPSIIITHNVSPDTLNREGCKEYDVAPQVGHRFCKDFPGFIPSLLGDLLEERQKIKKKMKATIDPIERKLLDYRQRAIKILANSYYGYYGYARARWYCKECAESVTAWGREYITMTIKEIEEKYGFKVIYSDTDGFFATIPGADAETVKKKAMEFLKYINAKLPGALELEYEGFYKRGFFVTKKKYAVIDEEGKITTRGLEIVRRDWSEIAKETQARVLEALLKDGDVEKAVRIVKEVTEKLSKYEVPPEKLVIHEQITRDLKDYKATGPHVAVAKRLAARGVKIRPGTVISYIVLKGSGRIGDRAIPFDEFDPTKHKYDAEYYIENQVLPAVERILRAFGYRKEDLRYQKTRQVGLSAWLKPKGT

SEQ ID NO: 752 - protein, 774 aa, synthetic construct
MILDTDYITEDGKPVFRIFKKENGEFKIEYDRTFEAYFYALLKDDSAIEEVKKITAERHGTVVTVKRVEKVQKKFLGRPVEVWKLYFTHIQDVPAIFDKIREHPAVIDIYEYDIPFAKRYLIDKGLVPMEGDEELKMLAFDIETLYHEGEEFAEGPILMISYADEEGARVITWKNVDLPYVDVVSTEREMIKRFLRVVKEKDPDVLITYNGDNFDFAYLKKRCEKLGINFALGRDGSEPKIQRMGDRFAVEVKGRIHFDLYPVIRRTINLPTYTLEAVYEAVFGQPKEKVYAEEITTAWETGENLERVARYSMEDAKVTYELGKEFLPMEAQLSRLIGQSLWDVSRSSTGNLVEWFLLRKAYERNELAPNKPDEKELARRRQSYEGGYVKEPERGLWENIVYLDFRSLYPSIIITHNVSPDTLNREGCKEYDVAPQVGHRFCKDFPGFIPSLLGDLLEERQKIKKKMKATIDPIERKLLDYRQRAIKILANSYYGYYGYARARWYCKECAESVTAWGREYITMTIKEIEEKYGFKVIYSDTDGFFATIPGADAETVKKKAMEFLKYINAKLPGALELEYEGFYKRGFFVTKKKYAVIDEEGKITTRGLEIVRRDWSEIAKETQARVLEALLKDGDVEKAVRIVKEVTEKLSKYEVPPEKLVIHEQITRDLKDYKATGPHVAVAKRLAARGVKIRPGTVISYIVLKGSGRIGDRAIPFDEFDPTKHKYDAEYYIENQVLPAVERILRAFGYRKEDLRYQKTRQVGLSAWLKPKGT

SEQ ID NO: 753 - protein, 774 aa, synthetic construct
MILDTDYITEDGKPVFRIFKKENGEFKIEYDRTFEAYFYALLKDDSAIEEVKKITAERHGTVVTVKRVEKVQKKFLGRPVEVWKLYFTHIQDVPAIHDKIREHPAVIDIYEYDIPFAKRYLIDKGLVPMEGDEELKMLAFDIETLYHEGEEFAEGPILMISYADEEGARVITWKNVDLPYVDVVSTEREMIKRFLRVVKEKDPDVLITYNGDNFDFAYLKKRCEKLGINFALGRDGSEPKIQRMGDRFAVEVKGRIHFDLYPVIRRTINLPTYTLEAVYEAVFGQPKEKVYAEEITTAWETGENLERVARYSMEDAKVTYELGKEFLPMEAQLSRLIGQSLWDVSRSSTGNLVEWFLLRKAYERNELAPNKPDEKELARRRQSYEGGYVKEPERGLWENIVYLDFRSLYPSIIITHNVSPDTLNREGCKEYDVAPQVGHRFCKDFPGFIPSLLGDLLEERQKIKKKMKATIDPIERKLLDYRQRAIKILANSYYGYYGYARARWYCKECAESVTAWGREYITMTIKEIEEKYGFKVIYSDTDGFFATIPGADAETVKKKAMEFLKYINAKLPGALELEYEGFYKRGFFVTKKKYAVIDEEGKITTRGLEIVRRDWSEIAKETQARVLEALLKDGDVEKAVRIVKEVTEKLSKYEVPPEKLVIHEQITRDLKDYKATGPHVAVAKRLAARGVKIRPGTVISYIVLKGSGRIGDRAIPFDEFDPTKHKYDAEYYIENQVLPAVERILRAFGYRKEDLRYQKTRQVGLSAWLKPKGT

SEQ ID NO: 754 - protein, 774 aa, synthetic construct
MILDTDYITEDGKPVFRIFKKENGEFKIEYDRTFEAYFYALLKDDSAIEEVKKITAERHGTVVTVKRVEKVQKKFLGRPVEVWKLYFTHIQDIPAIRDKIREHPAVIDIYEYDIPFAKRYLIDKGLVPMEGDEELKMLAFDIETLYHEGEEFAEGPILMISYADEEGARVITWKNVDLPYVDVVSTEREMIKRFLRVVKEKDPDVLITYNGDNFDFAYLKKRCEKLGINFALGRDGSEPKIQRMGDRFAVEVKGRIHFDLYPVIRRTINLPTYTLEAVYEAVFGQPKEKVYAEEITTAWETGENLERVARYSMEDAKVTYELGKEFLPMEAQLSRLIGQSLWDVSRSSTGNLVEWFLLRKAYERNELAPNKPDEKELARRRQSYEGGYVKEPERGLWENIVYLDFRSLYPSIIITHNVSPDTLNREGCKEYDVAPQVGHRFCKDFPGFIPSLLGDLLEERQKIKKKMKATIDPIERKLLDYRQRAIKILANSYYGYYGYARARWYCKECAESVTAWGREYITMTIKEIEEKYGFKVIYSDTDGFFATIPGADAETVKKKAMEFLKYINAKLPGALELEYEGFYKRGFFVTKKKYAVIDEEGKITTRGLEIVRRDWSEIAKETQARVLEALLKDGDVEKAVRIVKEVTEKLSKYEVPPEKLVIHEQITRDLKDYKATGPHVAVAKRLAARGVKIRPGTVISYIVLKGSGRIGDRAIPFDEFDPTKHKYDAEYYIENQVLPAVERILRAFGYRKEDLRYQKTRQVGLSAWLKPKGT

SEQ ID NO: 755 - protein, 774 aa, synthetic construct
MILDTDYITEDGKPVFRIFKKENGEFKIEYDRTFEAYFYALLKDDSAIEEVKKITAERHGTVVTVKRVEKVQKKFLGRPVEVWKLYFTHIQDIPAIADKIREHPAVIDIYEYDIPFAKRYLIDKGLVPMEGDEELKMLAFDIETLYHEGEEFAEGPILMISYADEEGARVITWKNVDLPYVDVVSTEREMIKRFLRVVKEKDPDVLITYNGDNFDFAYLKKRCEKLGINFALGRDGSEPKIQRMGDRFAVEVKGRIHFDLYPVIRRTINLPTYTLEAVYEAVFGQPKEKVYAEEITTAWETGENLERVARYSMEDAKVTYELGKEFLPMEAQLSRLIGQSLWDVSRSSTGNLVEWFLLRKAYERNELAPNKPDEKELARRRQSYEGGYVKEPERGLWENIVYLDFRSLYPSIIITHNVSPDTLNREGCKEYDVAPQVGHRFCKDFPGFIPSLLGDLLEERQKIKKKMKATIDPIERKLLDYRQRAIKILANSYYGYYGYARARWYCKECAESVTAWGREYITMTIKEIEEKYGFKVIYSDTDGFFATIPGADAETVKKKAMEFLKYINAKLPGALELEYEGFYKRGFFVTKKKYAVIDEEGKITTRGLEIVRRDWSEIAKETQARVLEALLKDGDVEKAVRIVKEVTEKLSKYEVPPEKLVIHEQITRDLKDYKATGPHVAVAKRLAARGVKIRPGTVISYIVLKGSGRIGDRAIPFDEFDPTKHKYDAEYYIENQVLPAVERILRAFGYRKEDLRYQKTRQVGLSAWLKPKGT

SEQ ID NO: 756 - protein, 774 aa, synthetic construct
MILDTDYITEDGKPVFRIFKKENGEFKIEYDRTFEAYFYALLKDDSAIEEVKKITAERHGTVVTVKRVEKVQKKFLGRPVEVWKLYFTHIQDIPAIFDKIREHPAVIDIYEYDIPFAKRYLIDKGLVPMEGDEELKMLAFDIETLYHEGEEFAEGPILMISYADEEGARVITWKNVDLPYVDVVSTEREMIKRFLRVVKEKDPDVLITYNGDNFDFAYLKKRCEKLGINFALGRDGSEPKIQRMGDRFAVEVKGRIHFDLYPVIRRTINLPTYTLEAVYEAVFGQPKEKVYAEEITTAWETGENLERVARYSMEDAKVTYELGKEFLPMEAQLSRLIGQSLWDVSRSSTGNLVEWFLLRKAYERNELAPNKPDEKELARRRQSYEGGYVKEPERGLWENIVYLDFRSLYPSIIITHNVSPDTLNREGCKEYDVAPQVGHRFCKDFPGFIPSLLGDLLEERQKIKKKMKATIDPIERKLLDYRQRAIKILANSYYGYYGYARARWYCKECAESVTAWGREYITMTIKEIEEKYGFKVIYSDTDGFFATIPGADAETVKKKAMEFLKYINAKLPGALELEYEGFYKRGFFVTKKKYAVIDEEGKITTRGLEIVRRDWSEIAKETQARVLEALLKDGDVEKAVRIVKEVTEKLSKYEVPPEKLVIHEQITRDLKDYKATGPHVAVAKRLAARGVKIRPGTVISYIVLKGSGRIGDRAIPFDEFDPTKHKYDAEYYIENQVLPAVERILRAFGYRKEDLRYQKTRQVGLSAWLKPKGT

SEQ ID NO: 757 - protein, 774 aa, synthetic construct
MILDTDYITEDGKPVFRIFKKENGEFKIEYDRTFEAYFYALLKDDSAIEEVKKITAERHGTVVTVKRVEKVQKKFLGRPVEVWKLYFTHIQDIPAIHDKIREHPAVIDIYEYDIPFAKRYLIDKGLVPMEGDEELKMLAFDIETLYHEGEEFAEGPILMISYADEEGARVITWKNVDLPYVDVVSTEREMIKRFLRVVKEKDPDVLITYNGDNFDFAYLKKRCEKLGINFALGRDGSEPKIQRMGDRFAVEVKGRIHFDLYPVIRRTINLPTYTLEAVYEAVFGQPKEKVYAEEITTAWETGENLERVARYSMEDAKVTYELGKEFLPMEAQLSRLIGQSLWDVSRSSTGNLVEWFLLRKAYERNELAPNKPDEKELARRRQSYEGGYVKEPERGLWENIVYLDFRSLYPSIIITHNVSPDTLNREGCKEYDVAPQVGHRFCKDFPGFIPSLLGDLLEERQKIKKKMKATIDPIERKLLDYRQRAIKILANSYYGYYGYARARWYCKECAESVTAWGREYITMTIKEIEEKYGFKVIYSDTDGFFATIPGADAETVKKKAMEFLKYINAKLPGALELEYEGFYKRGFFVTKKKYAVIDEEGKITTRGLEIVRRDWSEIAKETQARVLEALLKDGDVEKAVRIVKEVTEKLSKYEVPPEKLVIHEQITRDLKDYKATGPHVAVAKRLAARGVKIRPGTVISYIVLKGSGRIGDRAIPFDEFDPTKHKYDAEYYIENQVLPAVERILRAFGYRKEDLRYQKTRQVGLSAWLKPKGT

SEQ ID NO: 758 - protein, 774 aa, synthetic construct
MILDTDYITEDGKPVFRIFKKENGEFKIEYDRTFEAYFYALLKDDSAIEEVKKITAERHGTVVTVKRVEKVQKKFLGRPVEVWKLYFTHIQDIPAIWDKIREHPAVIDIYEYDIPFAKRYLIDKGLVPMEGDEELKMLAFDIETLYHEGEEFAEGPILMISYADEEGARVITWKNVDLPYVDVVSTEREMIKRFLRVVKEKDPDVLITYNGDNFDFAYLKKRCEKLGINFALGRDGSEPKIQRMGDRFAVEVKGRIHFDLYPVIRRTINLPTYTLEAVYEAVFGQPKEKVYAEEITTAWETGENLERVARYSMEDAKVTYELGKEFLPMEAQLSRLIGQSLWDVSRSSTGNLVEWFLLRKAYERNELAPNKPDEKELARRRQSYEGGYVKEPERGLWENIVYLDFRSLYPSIIITHNVSPDTLNREGCKEYDVAPQVGHRFCKDFPGFIPSLLGDLLEERQKIKKKMKATIDPIERKLLDYRQRAIKILANSYYGYYGYARARWYCKECAESVTAWGREYITMTIKEIEEKYGFKVIYSDTDGFFATIPGADAETVKKKAMEFLKYINAKLPGALELEYEGFYKRGFFVTKKKYAVIDEEGKITTRGLEIVRRDWSEIAKETQARVLEALLKDGDVEKAVRIVKEVTEKLSKYEVPPEKLVIHEQITRDLKDYKATGPHVAVAKRLAARGVKIRPGTVISYIVLKGSGRIGDRAIPFDEFDPTKHKYDAEYYIENQVLPAVERILRAFGYRKEDLRYQKTRQVGLSAWLKPKGT

SEQ ID NO: 759 - protein, 774 aa, synthetic construct
MILDTDYITEDGKPVFRIFKKENGEFKIEYDRTFEAYFYALLKDDSAIEEVKKITAERHGTVVTVKRVEKVQKKFLGRPVEVWKLYFTHSQDIPAIRDKIREHPAVIDIYEYDIPFAKRYLIDKGLVPMEGDEELKMLAFDIETLYHEGEEFAEGPILMISYADEEGARVITWKNVDLPYVDVVSTEREMIKRFLRVVKEKDPDVLITYNGDNFDFAYLKKRCEKLGINFALGRDGSEPKIQRMGDRFAVEVKGRIHFDLYPVIRRTINLPTYTLEAVYEAVFGQPKEKVYAEEITTAWETGENLERVARYSMEDAKVTYELGKEFLPMEAQLSRLIGQSLWDVSRSSTGNLVEWFLLRKAYERNELAPNKPDEKELARRRQSYEGGYVKEPERGLWENIVYLDFRSLYPSIIITHNVSPDTLNREGCKEYDVAPQVGHRFCKDFPGFIPSLLGDLLEERQKIKKKMKATIDPIERKLLDYRQRAIKILANSYYGYYGYARARWYCKECAESVTAWGREYITMTIKEIEEKYGFKVIYSDTDGFFATIPGADAETVKKKAMEFLKYINAKLPGALELEYEGFYKRGFFVTKKKYAVIDEEGKITTRGLEIVRRDWSEIAKETQARVLEALLKDGDVEKAVRIVKEVTEKLSKYEVPPEKLVIHEQITRDLKDYKATGPHVAVAKRLAARGVKIRPGTVISYIVLKGSGRIGDRAIPFDEFDPTKHKYDAEYYIENQVLPAVERILRAFGYRKEDLRYQKTRQVGLSAWLKPKGT

SEQ ID NO: 760 - protein, 774 aa, synthetic construct
MILDTDYITEDGKPVFRIFKKENGEFKIEYDRTFEAYFYALLKDDSAIEEVKKITAERHGTVVTVKRVEKVQKKFLGRPVEVWKLYFTHSQDRPAIADKIREHPAVIDIYEYDIPFAKRYLIDKGLVPMEGDEELKMLAFDIETLYHEGEEFAEGPILMISYADEEGARVITWKNVDLPYVDVVSTEREMIKRFLRVVKEKDPDVLITYNGDNFDFAYLKKRCEKLGINFALGRDGSEPKIQRMGDRFAVEVKGRIHFDLYPVIRRTINLPTYTLEAVYEAVFGQPKEKVYAEEITTAWETGENLERVARYSMEDAKVTYELGKEFLPMEAQLSRLIGQSLWDVSRSSTGNLVEWFLLRKAYERNELAPNKPDEKELARRRQSYEGGYVKEPERGLWENIVYLDFRSLYPSIIITHNVSPDTLNREGCKEYDVAPQVGHRFCKDFPGFIPSLLGDLLEERQKIKKKMKATIDPIERKLLDYRQRAIKILANSYYGYYGYARARWYCKECAESVTAWGREYITMTIKEIEEKYGFKVIYSDTDGFFATIPGADAETVKKKAMEFLKYINAKLPGALELEYEGFYKRGFFVTKKKYAVIDEEGKITTRGLEIVRRDWSEIAKETQARVLEALLKDGDVEKAVRIVKEVTEKLSKYEVPPEKLVIHEQITRDLKDYKATGPHVAVAKRLAARGVKIRPGTVISYIVLKGSGRIGDRAIPFDEFDPTKHKYDAEYYIENQVLPAVERILRAFGYRKEDLRYQKTRQVGLSAWLKPKGT

SEQ ID NO: 761 - protein, 774 aa, synthetic construct
MILDTDYITEDGKPVFRIFKKENGEFKIEYDRTFEAYFYALLKDDSAIEEVKKITAERHGTVVTVKRVEKVQKKFLGRPVEVWKLYFTHWQDVPAIRDKIREHPAVIDIYEYDIPFAKRYLIDKGLVPMEGDEELKMLAFDIETLYHEGEEFAEGPILMISYADEEGARVITWKNVDLPYVDVVSTEREMIKRFLRVVKEKDPDVLITYNGDNFDFAYLKKRCEKLGINFALGRDGSEPKIQRMGDRFAVEVKGRIHFDLYPVIRRTINLPTYTLEAVYEAVFGQPKEKVYAEEITTAWETGENLERVARYSMEDAKVTYELGKEFLPMEAQLSRLIGQSLWDVSRSSTGNLVEWFLLRKAYERNELAPNKPDEKELARRRQSYEGGYVKEPERGLWENIVYLDFRSLYPSIIITHNVSPDTLNREGCKEYDVAPQVGHRFCKDFPGFIPSLLGDLLEERQKIKKKMKATIDPIERKLLDYRQRAIKILANSYYGYYGYARARWYCKECAESVTAWGREYITMTIKEIEEKYGFKVIYSDTDGFFATIPGADAETVKKKAMEFLKYINAKLPGALELEYEGFYKRGFFVTKKKYAVIDEEGKITTRGLEIVRRDWSEIAKETQARVLEALLKDGDVEKAVRIVKEVTEKLSKYEVPPEKLVIHEQITRDLKDYKATGPHVAVAKRLAARGVKIRPGTVISYIVLKGSGRIGDRAIPFDEFDPTKHKYDAEYYIENQVLPAVERILRAFGYRKEDLRYQKTRQVGLSAWLKPKGT

SEQ ID NO: 762 - protein, 774 aa, synthetic construct
MILDTDYITEDGKPVFRIFKKENGEFKIEYDRTFEAYFYALLKDDSAIEEVKKITAERHGTVVTVKRVEKVQKKFLGRPVEVWKLYFTHWQDVPAIWDKIREHPAVIDIYEYDIPFAKRYLIDKGLVPMEGDEELKMLAFDIETLYHEGEEFAEGPILMISYADEEGARVITWKNVDLPYVDVVSTEREMIKRFLRVVKEKDPDVLITYNGDNFDFAYLKKRCEKLGINFALGRDGSEPKIQRMGDRFAVEVKGRIHFDLYPVIRRTINLPTYTLEAVYEAVFGQPKEKVYAEEITTAWETGENLERVARYSMEDAKVTYELGKEFLPMEAQLSRLIGQSLWDVSRSSTGNLVEWFLLRKAYERNELAPNKPDEKELARRRQSYEGGYVKEPERGLWENIVYLDFRSLYPSIIITHNVSPDTLNREGCKEYDVAPQVGHRFCKDFPGFIPSLLGDLLEERQKIKKKMKATIDPIERKLLDYRQRAIKILANSYYGYYGYARARWYCKECAESVTAWGREYITMTIKEIEEKYGFKVIYSDTDGFFATIPGADAETVKKKAMEFLKYINAKLPGALELEYEGFYKRGFFVTKKKYAVIDEEGKITTRGLEIVRRDWSEIAKETQARVLEALLKDGDVEKAVRIVKEVTEKLSKYEVPPEKLVIHEQITRDLKDYKATGPHVAVAKRLAARGVKIRPGTVISYIVLKGSGRIGDRAIPFDEFDPTKHKYDAEYYIENQVLPAVERILRAFGYRKEDLRYQKTRQVGLSAWLKPKGT

SEQ ID NO: 763 - protein, 774 aa, synthetic construct
MILDTDYITEDGKPVFRIFKKENGEFKIEYDRTFEAYFYALLKDDSAIEEVKKITAERHGTVVTVKRVEKVQKKFLGRPVEVWKLYFTHWQDIPAIRDKIREHPAVIDIYEYDIPFAKRYLIDKGLVPMEGDEELKMLAFDIETLYHEGEEFAEGPILMISYADEEGARVITWKNVDLPYVDVVSTEREMIKRFLRVVKEKDPDVLITYNGDNFDFAYLKKRCEKLGINFALGRDGSEPKIQRMGDRFAVEVKGRIHFDLYPVIRRTINLPTYTLEAVYEAVFGQPKEKVYAEEITTAWETGENLERVARYSMEDAKVTYELGKEFLPMEAQLSRLIGQSLWDVSRSSTGNLVEWFLLRKAYERNELAPNKPDEKELARRRQSYEGGYVKEPERGLWENIVYLDFRSLYPSIIITHNVSPDTLNREGCKEYDVAPQVGHRFCKDFPGFIPSLLGDLLEERQKIKKKMKATIDPIERKLLDYRQRAIKILANSYYGYYGYARARWYCKECAESVTAWGREYITMTIKEIEEKYGFKVIYSDTDGFFATIPGADAETVKKKAMEFLKYINAKLPGALELEYEGFYKRGFFVTKKKYAVIDEEGKITTRGLEIVRRDWSEIAKETQARVLEALLKDGDVEKAVRIVKEVTEKLSKYEVPPEKLVIHEQITRDLKDYKATGPHVAVAKRLAARGVKIRPGTVISYIVLKGSGRIGDRAIPFDEFDPTKHKYDAEYYIENQVLPAVERILRAFGYRKEDLRYQKTRQVGLSAWLKPKGT

SEQ ID NO: 764 - protein, 774 aa, synthetic construct
MILDTDYITEDGKPVFRIFKKENGEFKIEYDRTFEAYFYALLKDDSAIEEVKKITAERHGTVVTVKRVEKVQKKFLGRPVEVWKLYFTHWQDIPAIADKIREHPAVIDIYEYDIPFAKRYLIDKGLVPMEGDEELKMLAFDIETLYHEGEEFAEGPILMISYADEEGARVITWKNVDLPYVDVVSTEREMIKRFLRVVKEKDPDVLITYNGDNFDFAYLKKRCEKLGINFALGRDGSEPKIQRMGDRFAVEVKGRIHFDLYPVIRRTINLPTYTLEAVYEAVFGQPKEKVYAEEITTAWETGENLERVARYSMEDAKVTYELGKEFLPMEAQLSRLIGQSLWDVSRSSTGNLVEWFLLRKAYERNELAPNKPDEKELARRRQSYEGGYVKEPERGLWENIVYLDFRSLYPSIIITHNVSPDTLNREGCKEYDVAPQVGHRFCKDFPGFIPSLLGDLLEERQKIKKKMKATIDPIERKLLDYRQRAIKILANSYYGYYGYARARWYCKECAESVTAWGREYITMTIKEIEEKYGFKVIYSDTDGFFATIPGADAETVKKKAMEFLKYINAKLPGALELEYEGFYKRGFFVTKKKYAVIDEEGKITTRGLEIVRRDWSEIAKETQARVLEALLKDGDVEKAVRIVKEVTEKLSKYEVPPEKLVIHEQITRDLKDYKATGPHVAVAKRLAARGVKIRPGTVISYIVLKGSGRIGDRAIPFDEFDPTKHKYDAEYYIENQVLPAVERILRAFGYRKEDLRYQKTRQVGLSAWLKPKGT

SEQ ID NO: 765 - protein, 774 aa, synthetic construct
MILDTDYITEDGKPVFRIFKKENGEFKIEYDRTFEAYFYALLKDDSAIEEVKKITAERHGTVVTVKRVEKVQKKFLGRPVEVWKLYFTHWQDIPAIFDKIREHPAVIDIYEYDIPFAKRYLIDKGLVPMEGDEELKMLAFDIETLYHEGEEFAEGPILMISYADEEGARVITWKNVDLPYVDVVSTEREMIKRFLRVVKEKDPDVLITYNGDNFDFAYLKKRCEKLGINFALGRDGSEPKIQRMGDRFAVEVKGRIHFDLYPVIRRTINLPTYTLEAVYEAVFGQPKEKVYAEEITTAWETGENLERVARYSMEDAKVTYELGKEFLPMEAQLSRLIGQSLWDVSRSSTGNLVEWFLLRKAYERNELAPNKPDEKELARRRQSYEGGYVKEPERGLWENIVYLDFRSLYPSIIITHNVSPDTLNREGCKEYDVAPQVGHRFCKDFPGFIPSLLGDLLEERQKIKKKMKATIDPIERKLLDYRQRAIKILANSYYGYYGYARARWYCKECAESVTAWGREYITMTIKEIEEKYGFKVIYSDTDGFFATIPGADAETVKKKAMEFLKYINAKLPGALELEYEGFYKRGFFVTKKKYAVIDEEGKITTRGLEIVRRDWSEIAKETQARVLEALLKDGDVEKAVRIVKEVTEKLSKYEVPPEKLVIHEQITRDLKDYKATGPHVAVAKRLAARGVKIRPGTVISYIVLKGSGRIGDRAIPFDEFDPTKHKYDAEYYIENQVLPAVERILRAFGYRKEDLRYQKTRQVGLSAWLKPKGT

SEQ ID NO: 766 - protein, 774 aa, synthetic construct
MILDTDYITEDGKPVFRIFKKENGEFKIEYDRTFEAYFYALLKDDSAIEEVKKITAERHGTVVTVKRVEKVQKKFLGRPVEVWKLYFTHWQDIPAIHDKIREHPAVIDIYEYDIPFAKRYLIDKGLVPMEGDEELKMLAFDIETLYHEGEEFAEGPILMISYADEEGARVITWKNVDLPYVDVVSTEREMIKRFLRVVKEKDPDVLITYNGDNFDFAYLKKRCEKLGINFALGRDGSEPKIQRMGDRFAVEVKGRIHFDLYPVIRRTINLPTYTLEAVYEAVFGQPKEKVYAEEITTAWETGENLERVARYSMEDAKVTYELGKEFLPMEAQLSRLIGQSLWDVSRSSTGNLVEWFLLRKAYERNELAPNKPDEKELARRRQSYEGGYVKEPERGLWENIVYLDFRSLYPSIIITHNVSPDTLNREGCKEYDVAPQVGHRFCKDFPGFIPSLLGDLLEERQKIKKKMKATIDPIERKLLDYRQRAIKILANSYYGYYGYARARWYCKECAESVTAWGREYITMTIKEIEEKYGFKVIYSDTDGFFATIPGADAETVKKKAMEFLKYINAKLPGALELEYEGFYKRGFFVTKKKYAVIDEEGKITTRGLEIVRRDWSEIAKETQARVLEALLKDGDVEKAVRIVKEVTEKLSKYEVPPEKLVIHEQITRDLKDYKATGPHVAVAKRLAARGVKIRPGTVISYIVLKGSGRIGDRAIPFDEFDPTKHKYDAEYYIENQVLPAVERILRAFGYRKEDLRYQKTRQVGLSAWLKPKGT

SEQ ID NO: 767 - protein, 774 aa, synthetic construct
MILDTDYITEDGKPVFRIFKKENGEFKIEYDRTFEAYFYALLKDDSAIEEVKKITAERHGTVVTVKRVEKVQKKFLGRPVEVWKLYFTHWQDIPAIWDKIREHPAVIDIYEYDIPFAKRYLIDKGLVPMEGDEELKMLAFDIETLYHEGEEFAEGPILMISYADEEGARVITWKNVDLPYVDVVSTEREMIKRFLRVVKEKDPDVLITYNGDNFDFAYLKKRCEKLGINFALGRDGSEPKIQRMGDRFAVEVKGRIHFDLYPVIRRTINLPTYTLEAVYEAVFGQPKEKVYAEEITTAWETGENLERVARYSMEDAKVTYELGKEFLPMEAQLSRLIGQSLWDVSRSSTGNLVEWFLLRKAYERNELAPNKPDEKELARRRQSYEGGYVKEPERGLWENIVYLDFRSLYPSIIITHNVSPDTLNREGCKEYDVAPQVGHRFCKDFPGFIPSLLGDLLEERQKIKKKMKATIDPIERKLLDYRQRAIKILANSYYGYYGYARARWYCKECAESVTAWGREYITMTIKEIEEKYGFKVIYSDTDGFFATIPGADAETVKKKAMEFLKYINAKLPGALELEYEGFYKRGFFVTKKKYAVIDEEGKITTRGLEIVRRDWSEIAKETQARVLEALLKDGDVEKAVRIVKEVTEKLSKYEVPPEKLVIHEQITRDLKDYKATGPHVAVAKRLAARGVKIRPGTVISYIVLKGSGRIGDRAIPFDEFDPTKHKYDAEYYIENQVLPAVERILRAFGYRKEDLRYQKTRQVGLSAWLKPKGT

SEQ ID NO: 768 - protein, 774 aa, synthetic construct
MILDTDYITEDGKPVFRIFKKENGEFKIEYDRTFEAYFYALLKDDSAIEEVKKITAERHGTVVTVKRVEKVQKKFLGRPVEVWKLYFTHWQDQPAIRDKIREHPAVIDIYEYDIPFAKRYLIDKGLVPMEGDEELKMLAFDIETLYHEGEEFAEGPILMISYADEEGARVITWKNVDLPYVDVVSTEREMIKRFLRVVKEKDPDVLITYNGDNFDFAYLKKRCEKLGINFALGRDGSEPKIQRMGDRFAVEVKGRIHFDLYPVIRRTINLPTYTLEAVYEAVFGQPKEKVYAEEITTAWETGENLERVARYSMEDAKVTYELGKEFLPMEAQLSRLIGQSLWDVSRSSTGNLVEWFLLRKAYERNELAPNKPDEKELARRRQSYEGGYVKEPERGLWENIVYLDFRSLYPSIIITHNVSPDTLNREGCKEYDVAPQVGHRFCKDFPGFIPSLLGDLLEERQKIKKKMKATIDPIERKLLDYRQRAIKILANSYYGYYGYARARWYCKECAESVTAWGREYITMTIKEIEEKYGFKVIYSDTDGFFATIPGADAETVKKKAMEFLKYINAKLPGALELEYEGFYKRGFFVTKKKYAVIDEEGKITTRGLEIVRRDWSEIAKETQARVLEALLKDGDVEKAVRIVKEVTEKLSKYEVPPEKLVIHEQITRDLKDYKATGPHVAVAKRLAARGVKIRPGTVISYIVLKGSGRIGDRAIPFDEFDPTKHKYDAEYYIENQVLPAVERILRAFGYRKEDLRYQKTRQVGLSAWLKPKGT

SEQ ID NO: 769 - protein, 774 aa, synthetic construct
MILDTDYITEDGKPVFRIFKKENGEFKIEYDRTFEAYFYALLKDDSAIEEVKKITAERHGTVVTVKRVEKVQKKFLGRPVEVWKLYFTHWQDRPAIADKIREHPAVIDIYEYDIPFAKRYLIDKGLVPMEGDEELKMLAFDIETLYHEGEEFAEGPILMISYADEEGARVITWKNVDLPYVDVVSTEREMIKRFLRVVKEKDPDVLITYNGDNFDFAYLKKRCEKLGINFALGRDGSEPKIQRMGDRFAVEVKGRIHFDLYPVIRRTINLPTYTLEAVYEAVFGQPKEKVYAEEITTAWETGENLERVARYSMEDAKVTYELGKEFLPMEAQLSRLIGQSLWDVSRSSTGNLVEWFLLRKAYERNELAPNKPDEKELARRRQSYEGGYVKEPERGLWENIVYLDFRSLYPSIIITHNVSPDTLNREGCKEYDVAPQVGHRFCKDFPGFIPSLLGDLLEERQKIKKKMKATIDPIERKLLDYRQRAIKILANSYYGYYGYARARWYCKECAESVTAWGREYITMTIKEIEEKYGFKVIYSDTDGFFATIPGADAETVKKKAMEFLKYINAKLPGALELEYEGFYKRGFFVTKKKYAVIDEEGKITTRGLEIVRRDWSEIAKETQARVLEALLKDGDVEKAVRIVKEVTEKLSKYEVPPEKLVIHEQITRDLKDYKATGPHVAVAKRLAARGVKIRPGTVISYIVLKGSGRIGDRAIPFDEFDPTKHKYDAEYYIENQVLPAVERILRAFGYRKEDLRYQKTRQVGLSAWLKPKGT

SEQ ID NO: 770 - protein, 774 aa, synthetic construct
MILDTDYITEDGKPVFRIFKKENGEFKIEYDRTFEAYFYALLKDDSAIEEVKKITAERHGTVVTVKRVEKVQKKFLGRPVEVWKLYFTHYQDVPAIRDKIREHPAVIDIYEYDIPFAKRYLIDKGLVPMEGDEELKMLAFDIETLYHEGEEFAEGPILMISYADEEGARVITWKNVDLPYVDVVSTEREMIKRFLRVVKEKDPDVLITYNGDNFDFAYLKKRCEKLGINFALGRDGSEPKIQRMGDRFAVEVKGRIHFDLYPVIRRTINLPTYTLEAVYEAVFGQPKEKVYAEEITTAWETGENLERVARYSMEDAKVTYELGKEFLPMEAQLSRLIGQSLWDVSRSSTGNLVEWFLLRKAYERNELAPNKPDEKELARRRQSYEGGYVKEPERGLWENIVYLDFRSLYPSIIITHNVSPDTLNREGCKEYDVAPQVGHRFCKDFPGFIPSLLGDLLEERQKIKKKMKATIDPIERKLLDYRQRAIKILANSYYGYYGYARARWYCKECAESVTAWGREYITMTIKEIEEKYGFKVIYSDTDGFFATIPGADAETVKKKAMEFLKYINAKLPGALELEYEGFYKRGFFVTKKKYAVIDEEGKITTRGLEIVRRDWSEIAKETQARVLEALLKDGDVEKAVRIVKEVTEKLSKYEVPPEKLVIHEQITRDLKDYKATGPHVAVAKRLAARGVKIRPGTVISYIVLKGSGRIGDRAIPFDEFDPTKHKYDAEYYIENQVLPAVERILRAFGYRKEDLRYQKTRQVGLSAWLKPKGT

SEQ ID NO: 771 - protein, 774 aa, synthetic construct
MILDTDYITEDGKPVFRIFKKENGEFKIEYDRTFEAYFYALLKDDSAIEEVKKITAERHGTVVTVKRVEKVQKKFLGRPVEVWKLYFTHYQDVPAIADKIREHPAVIDIYEYDIPFAKRYLIDKGLVPMEGDEELKMLAFDIETLYHEGEEFAEGPILMISYADEEGARVITWKNVDLPYVDVVSTEREMIKRFLRVVKEKDPDVLITYNGDNFDFAYLKKRCEKLGINFALGRDGSEPKIQRMGDRFAVEVKGRIHFDLYPVIRRTINLPTYTLEAVYEAVFGQPKEKVYAEEITTAWETGENLERVARYSMEDAKVTYELGKEFLPMEAQLSRLIGQSLWDVSRSSTGNLVEWFLLRKAYERNELAPNKPDEKELARRRQSYEGGYVKEPERGLWENIVYLDFRSLYPSIIITHNVSPDTLNREGCKEYDVAPQVGHRFCKDFPGFIPSLLGDLLEERQKIKKKMKATIDPIERKLLDYRQRAIKILANSYYGYYGYARARWYCKECAESVTAWGREYITMTIKEIEEKYGFKVIYSDTDGFFATIPGADAETVKKKAMEFLKYINAKLPGALELEYEGFYKRGFFVTKKKYAVIDEEGKITTRGLEIVRRDWSEIAKETQARVLEALLKDGDVEKAVRIVKEVTEKLSKYEVPPEKLVIHEQITRDLKDYKATGPHVAVAKRLAARGVKIRPGTVISYIVLKGSGRIGDRAIPFDEFDPTKHKYDAEYYIENQVLPAVERILRAFGYRKEDLRYQKTRQVGLSAWLKPKGT

SEQ ID NO: 772 - protein, 774 aa, synthetic construct
MILDTDYITEDGKPVFRIFKKENGEFKIEYDRTFEAYFYALLKDDSAIEEVKKITAERHGTVVTVKRVEKVQKKFLGRPVEVWKLYFTHYQDVPAIHDKIREHPAVIDIYEYDIPFAKRYLIDKGLVPMEGDEELKMLAFDIETLYHEGEEFAEGPILMISYADEEGARVITWKNVDLPYVDVVSTEREMIKRFLRVVKEKDPDVLITYNGDNFDFAYLKKRCEKLGINFALGRDGSEPKIQRMGDRFAVEVKGRIHFDLYPVIRRTINLPTYTLEAVYEAVFGQPKEKVYAEEITTAWETGENLERVARYSMEDAKVTYELGKEFLPMEAQLSRLIGQSLWDVSRSSTGNLVEWFLLRKAYERNELAPNKPDEKELARRRQSYEGGYVKEPERGLWENIVYLDFRSLYPSIIITHNVSPDTLNREGCKEYDVAPQVGHRFCKDFPGFIPSLLGDLLEERQKIKKKMKATIDPIERKLLDYRQRAIKILANSYYGYYGYARARWYCKECAESVTAWGREYITMTIKEIEEKYGFKVIYSDTDGFFATIPGADAETVKKKAMEFLKYINAKLPGALELEYEGFYKRGFFVTKKKYAVIDEEGKITTRGLEIVRRDWSEIAKETQARVLEALLKDGDVEKAVRIVKEVTEKLSKYEVPPEKLVIHEQITRDLKDYKATGPHVAVAKRLAARGVKIRPGTVISYIVLKGSGRIGDRAIPFDEFDPTKHKYDAEYYIENQVLPAVERILRAFGYRKEDLRYQKTRQVGLSAWLKPKGT

SEQ ID NO: 773 - protein, 774 aa, synthetic construct
MILDTDYITEDGKPVFRIFKKENGEFKIEYDRTFEAYFYALLKDDSAIEEVKKITAERHGTVVTVKRVEKVQKKFLGRPVEVWKLYFTHYQDIPAIRDKIREHPAVIDIYEYDIPFAKRYLIDKGLVPMEGDEELKMLAFDIETLYHEGEEFAEGPILMISYADEEGARVITWKNVDLPYVDVVSTEREMIKRFLRVVKEKDPDVLITYNGDNFDFAYLKKRCEKLGINFALGRDGSEPKIQRMGDRFAVEVKGRIHFDLYPVIRRTINLPTYTLEAVYEAVFGQPKEKVYAEEITTAWETGENLERVARYSMEDAKVTYELGKEFLPMEAQLSRLIGQSLWDVSRSSTGNLVEWFLLRKAYERNELAPNKPDEKELARRRQSYEGGYVKEPERGLWENIVYLDFRSLYPSIIITHNVSPDTLNREGCKEYDVAPQVGHRFCKDFPGFIPSLLGDLLEERQKIKKKMKATIDPIERKLLDYRQRAIKILANSYYGYYGYARARWYCKECAESVTAWGREYITMTIKEIEEKYGFKVIYSDTDGFFATIPGADAETVKKKAMEFLKYINAKLPGALELEYEGFYKRGFFVTKKKYAVIDEEGKITTRGLEIVRRDWSEIAKETQARVLEALLKDGDVEKAVRIVKEVTEKLSKYEVPPEKLVIHEQITRDLKDYKATGPHVAVAKRLAARGVKIRPGTVISYIVLKGSGRIGDRAIPFDEFDPTKHKYDAEYYIENQVLPAVERILRAFGYRKEDLRYQKTRQVGLSAWLKPKGT

SEQ ID NO: 774 - protein, 774 aa, synthetic construct
MILDTDYITEDGKPVFRIFKKENGEFKIEYDRTFEAYFYALLKDDSAIEEVKKITAERHGTVVTVKRVEKVQKKFLGRPVEVWKLYFTHYQDIPAIADKIREHPAVIDIYEYDIPFAKRYLIDKGLVPMEGDEELKMLAFDIETLYHEGEEFAEGPILMISYADEEGARVITWKNVDLPYVDVVSTEREMIKRFLRVVKEKDPDVLITYNGDNFDFAYLKKRCEKLGINFALGRDGSEPKIQRMGDRFAVEVKGRIHFDLYPVIRRTINLPTYTLEAVYEAVFGQPKEKVYAEEITTAWETGENLERVARYSMEDAKVTYELGKEFLPMEAQLSRLIGQSLWDVSRSSTGNLVEWFLLRKAYERNELAPNKPDEKELARRRQSYEGGYVKEPERGLWENIVYLDFRSLYPSIIITHNVSPDTLNREGCKEYDVAPQVGHRFCKDFPGFIPSLLGDLLEERQKIKKKMKATIDPIERKLLDYRQRAIKILANSYYGYYGYARARWYCKECAESVTAWGREYITMTIKEIEEKYGFKVIYSDTDGFFATIPGADAETVKKKAMEFLKYINAKLPGALELEYEGFYKRGFFVTKKKYAVIDEEGKITTRGLEIVRRDWSEIAKETQARVLEALLKDGDVEKAVRIVKEVTEKLSKYEVPPEKLVIHEQITRDLKDYKATGPHVAVAKRLAARGVKIRPGTVISYIVLKGSGRIGDRAIPFDEFDPTKHKYDAEYYIENQVLPAVERILRAFGYRKEDLRYQKTRQVGLSAWLKPKGT

SEQ ID NO: 775 - protein, 774 aa, synthetic construct
MILDTDYITEDGKPVFRIFKKENGEFKIEYDRTFEAYFYALLKDDSAIEEVKKITAERHGTVVTVKRVEKVQKKFLGRPVEVWKLYFTHYQDIPAIFDKIREHPAVIDIYEYDIPFAKRYLIDKGLVPMEGDEELKMLAFDIETLYHEGEEFAEGPILMISYADEEGARVITWKNVDLPYVDVVSTEREMIKRFLRVVKEKDPDVLITYNGDNFDFAYLKKRCEKLGINFALGRDGSEPKIQRMGDRFAVEVKGRIHFDLYPVIRRTINLPTYTLEAVYEAVFGQPKEKVYAEEITTAWETGENLERVARYSMEDAKVTYELGKEFLPMEAQLSRLIGQSLWDVSRSSTGNLVEWFLLRKAYERNELAPNKPDEKELARRRQSYEGGYVKEPERGLWENIVYLDFRSLYPSIIITHNVSPDTLNREGCKEYDVAPQVGHRFCKDFPGFIPSLLGDLLEERQKIKKKMKATIDPIERKLLDYRQRAIKILANSYYGYYGYARARWYCKECAESVTAWGREYITMTIKEIEEKYGFKVIYSDTDGFFATIPGADAETVKKKAMEFLKYINAKLPGALELEYEGFYKRGFFVTKKKYAVIDEEGKITTRGLEIVRRDWSEIAKETQARVLEALLKDGDVEKAVRIVKEVTEKLSKYEVPPEKLVIHEQITRDLKDYKATGPHVAVAKRLAARGVKIRPGTVISYIVLKGSGRIGDRAIPFDEFDPTKHKYDAEYYIENQVLPAVERILRAFGYRKEDLRYQKTRQVGLSAWLKPKGT

SEQ ID NO: 776 - protein, 774 aa, synthetic construct
MILDTDYITEDGKPVFRIFKKENGEFKIEYDRTFEAYFYALLKDDSAIEEVKKITAERHGTVVTVKRVEKVQKKFLGRPVEVWKLYFTHYQDIPAIHDKIREHPAVIDIYEYDIPFAKRYLIDKGLVPMEGDEELKMLAFDIETLYHEGEEFAEGPILMISYADEEGARVITWKNVDLPYVDVVSTEREMIKRFLRVVKEKDPDVLITYNGDNFDFAYLKKRCEKLGINFALGRDGSEPKIQRMGDRFAVEVKGRIHFDLYPVIRRTINLPTYTLEAVYEAVFGQPKEKVYAEEITTAWETGENLERVARYSMEDAKVTYELGKEFLPMEAQLSRLIGQSLWDVSRSSTGNLVEWFLLRKAYERNELAPNKPDEKELARRRQSYEGGYVKEPERGLWENIVYLDFRSLYPSIIITHNVSPDTLNREGCKEYDVAPQVGHRFCKDFPGFIPSLLGDLLEERQKIKKKMKATIDPIERKLLDYRQRAIKILANSYYGYYGYARARWYCKECAESVTAWGREYITMTIKEIEEKYGFKVIYSDTDGFFATIPGADAETVKKKAMEFLKYINAKLPGALELEYEGFYKRGFFVTKKKYAVIDEEGKITTRGLEIVRRDWSEIAKETQARVLEALLKDGDVEKAVRIVKEVTEKLSKYEVPPEKLVIHEQITRDLKDYKATGPHVAVAKRLAARGVKIRPGTVISYIVLKGSGRIGDRAIPFDEFDPTKHKYDAEYYIENQVLPAVERILRAFGYRKEDLRYQKTRQVGLSAWLKPKGT

SEQ ID NO: 777 - protein, 774 aa, synthetic construct
MILDTDYITEDGKPVFRIFKKENGEFKIEYDRTFEAYFYALLKDDSAIEEVKKITAERHGTVVTVKRVEKVQKKFLGRPVEVWKLYFTHYQDIPAIWDKIREHPAVIDIYEYDIPFAKRYLIDKGLVPMEGDEELKMLAFDIETLYHEGEEFAEGPILMISYADEEGARVITWKNVDLPYVDVVSTEREMIKRFLRVVKEKDPDVLITYNGDNFDFAYLKKRCEKLGINFALGRDGSEPKIQRMGDRFAVEVKGRIHFDLYPVIRRTINLPTYTLEAVYEAVFGQPKEKVYAEEITTAWETGENLERVARYSMEDAKVTYELGKEFLPMEAQLSRLIGQSLWDVSRSSTGNLVEWFLLRKAYERNELAPNKPDEKELARRRQSYEGGYVKEPERGLWENIVYLDFRSLYPSIIITHNVSPDTLNREGCKEYDVAPQVGHRFCKDFPGFIPSLLGDLLEERQKIKKKMKATIDPIERKLLDYRQRAIKILANSYYGYYGYARARWYCKECAESVTAWGREYITMTIKEIEEKYGFKVIYSDTDGFFATIPGADAETVKKKAMEFLKYINAKLPGALELEYEGFYKRGFFVTKKKYAVIDEEGKITTRGLEIVRRDWSEIAKETQARVLEALLKDGDVEKAVRIVKEVTEKLSKYEVPPEKLVIHEQITRDLKDYKATGPHVAVAKRLAARGVKIRPGTVISYIVLKGSGRIGDRAIPFDEFDPTKHKYDAEYYIENQVLPAVERILRAFGYRKEDLRYQKTRQVGLSAWLKPKGT

SEQ ID NO: 778 - protein, 774 aa, synthetic construct
MILDTDYITEDGKPVFRIFKKENGEFKIEYDRTFEAYFYALLKDDSAIEEVKKITAERHGTVVTVKRVEKVQKKFLGRPVEVWKLYFTHPQDVPAIADKIREHPAVIDIYEYDIPFAKRYLIDKGLVPMEGDEELKMLAFDIETLYHEGEEFAEGPILMISYADEEGARVITWKNVDLPYVDVVSTEREMIKRFLRVVKEKDPDVLITYNGDNFDFAYLKKRCEKLGINFALGRDGSEPKIQRMGDRFAVEVKGRIHFDLYPVIRRTINLPTYTLEAVYEAVFGQPKEKVYAEEITTAWETGENLERVARYSMEDAKVTYELGKEFLPMEAQLSRLIGQSLWDVSRSSTGNLVEWFLLRKAYERNELAPNKPDEKELARRRQSYEGGYVKEPERGLWENIVYLDFRSLYPSIIITHNVSPDTLNREGCKEYDVAPQVGHRFCKDFPGFIPSLLGDLLEERQKIKKKMKATIDPIERKLLDYRQRAIKILANSYYGYYGYARARWYCKECAESVTAWGREYITMTIKEIEEKYGFKVIYSDTDGFFATIPGADAETVKKKAMEFLKYINAKLPGALELEYEGFYKRGFFVTKKKYAVIDEEGKITTRGLEIVRRDWSEIAKETQARVLEALLKDGDVEKAVRIVKEVTEKLSKYEVPPEKLVIHEQITRDLKDYKATGPHVAVAKRLAARGVKIRPGTVISYIVLKGSGRIGDRAIPFDEFDPTKHKYDAEYYIENQVLPAVERILRAFGYRKEDLRYQKTRQVGLSAWLKPKGT

SEQ ID NO: 779 - protein, 774 aa, synthetic construct
MILDTDYITEDGKPVFRIFKKENGEFKIEYDRTFEAYFYALLKDDSAIEEVKKITAERHGTVVTVKRVEKVQKKFLGRPVEVWKLYFTHPQDVPAIFDKIREHPAVIDIYEYDIPFAKRYLIDKGLVPMEGDEELKMLAFDIETLYHEGEEFAEGPILMISYADEEGARVITWKNVDLPYVDVVSTEREMIKRFLRVVKEKDPDVLITYNGDNFDFAYLKKRCEKLGINFALGRDGSEPKIQRMGDRFAVEVKGRIHFDLYPVIRRTINLPTYTLEAVYEAVFGQPKEKVYAEEITTAWETGENLERVARYSMEDAKVTYELGKEFLPMEAQLSRLIGQSLWDVSRSSTGNLVEWFLLRKAYERNELAPNKPDEKELARRRQSYEGGYVKEPERGLWENIVYLDFRSLYPSIIITHNVSPDTLNREGCKEYDVAPQVGHRFCKDFPGFIPSLLGDLLEERQKIKKKMKATIDPIERKLLDYRQRAIKILANSYYGYYGYARARWYCKECAESVTAWGREYITMTIKEIEEKYGFKVIYSDTDGFFATIPGADAETVKKKAMEFLKYINAKLPGALELEYEGFYKRGFFVTKKKYAVIDEEGKITTRGLEIVRRDWSEIAKETQARVLEALLKDGDVEKAVRIVKEVTEKLSKYEVPPEKLVIHEQITRDLKDYKATGPHVAVAKRLAARGVKIRPGTVISYIVLKGSGRIGDRAIPFDEFDPTKHKYDAEYYIENQVLPAVERILRAFGYRKEDLRYQKTRQVGLSAWLKPKGT

SEQ ID NO: 780 - protein, 774 aa, synthetic construct
MILDTDYITEDGKPVFRIFKKENGEFKIEYDRTFEAYFYALLKDDSAIEEVKKITAERHGTVVTVKRVEKVQKKFLGRPVEVWKLYFTHPQDVPAIHDKIREHPAVIDIYEYDIPFAKRYLIDKGLVPMEGDEELKMLAFDIETLYHEGEEFAEGPILMISYADEEGARVITWKNVDLPYVDVVSTEREMIKRFLRVVKEKDPDVLITYNGDNFDFAYLKKRCEKLGINFALGRDGSEPKIQRMGDRFAVEVKGRIHFDLYPVIRRTINLPTYTLEAVYEAVFGQPKEKVYAEEITTAWETGENLERVARYSMEDAKVTYELGKEFLPMEAQLSRLIGQSLWDVSRSSTGNLVEWFLLRKAYERNELAPNKPDEKELARRRQSYEGGYVKEPERGLWENIVYLDFRSLYPSIIITHNVSPDTLNREGCKEYDVAPQVGHRFCKDFPGFIPSLLGDLLEERQKIKKKMKATIDPIERKLLDYRQRAIKILANSYYGYYGYARARWYCKECAESVTAWGREYITMTIKEIEEKYGFKVIYSDTDGFFATIPGADAETVKKKAMEFLKYINAKLPGALELEYEGFYKRGFFVTKKKYAVIDEEGKITTRGLEIVRRDWSEIAKETQARVLEALLKDGDVEKAVRIVKEVTEKLSKYEVPPEKLVIHEQITRDLKDYKATGPHVAVAKRLAARGVKIRPGTVISYIVLKGSGRIGDRAIPFDEFDPTKHKYDAEYYIENQVLPAVERILRAFGYRKEDLRYQKTRQVGLSAWLKPKGT

SEQ ID NO: 781 - protein, 774 aa, synthetic construct
MILDTDYITEDGKPVFRIFKKENGEFKIEYDRTFEAYFYALLKDDSAIEEVKKITAERHGTVVTVKRVEKVQKKFLGRPVEVWKLYFTHPQDVPAIWDKIREHPAVIDIYEYDIPFAKRYLIDKGLVPMEGDEELKMLAFDIETLYHEGEEFAEGPILMISYADEEGARVITWKNVDLPYVDVVSTEREMIKRFLRVVKEKDPDVLITYNGDNFDFAYLKKRCEKLGINFALGRDGSEPKIQRMGDRFAVEVKGRIHFDLYPVIRRTINLPTYTLEAVYEAVFGQPKEKVYAEEITTAWETGENLERVARYSMEDAKVTYELGKEFLPMEAQLSRLIGQSLWDVSRSSTGNLVEWFLLRKAYERNELAPNKPDEKELARRRQSYEGGYVKEPERGLWENIVYLDFRSLYPSIIITHNVSPDTLNREGCKEYDVAPQVGHRFCKDFPGFIPSLLGDLLEERQKIKKKMKATIDPIERKLLDYRQRAIKILANSYYGYYGYARARWYCKECAESVTAWGREYITMTIKEIEEKYGFKVIYSDTDGFFATIPGADAETVKKKAMEFLKYINAKLPGALELEYEGFYKRGFFVTKKKYAVIDEEGKITTRGLEIVRRDWSEIAKETQARVLEALLKDGDVEKAVRIVKEVTEKLSKYEVPPEKLVIHEQITRDLKDYKATGPHVAVAKRLAARGVKIRPGTVISYIVLKGSGRIGDRAIPFDEFDPTKHKYDAEYYIENQVLPAVERILRAFGYRKEDLRYQKTRQVGLSAWLKPKGT

SEQ ID NO: 782 - protein, 774 aa, synthetic construct
MILDTDYITEDGKPVFRIFKKENGEFKIEYDRTFEAYFYALLKDDSAIEEVKKITAERHGTVVTVKRVEKVQKKFLGRPVEVWKLYFTHPQDEPAIRDKIREHPAVIDIYEYDIPFAKRYLIDKGLVPMEGDEELKMLAFDIETLYHEGEEFAEGPILMISYADEEGARVITWKNVDLPYVDVVSTEREMIKRFLRVVKEKDPDVLITYNGDNFDFAYLKKRCEKLGINFALGRDGSEPKIQRMGDRFAVEVKGRIHFDLYPVIRRTINLPTYTLEAVYEAVFGQPKEKVYAEEITTAWETGENLERVARYSMEDAKVTYELGKEFLPMEAQLSRLIGQSLWDVSRSSTGNLVEWFLLRKAYERNELAPNKPDEKELARRRQSYEGGYVKEPERGLWENIVYLDFRSLYPSIIITHNVSPDTLNREGCKEYDVAPQVGHRFCKDFPGFIPSLLGDLLEERQKIKKKMKATIDPIERKLLDYRQRAIKILANSYYGYYGYARARWYCKECAESVTAWGREYITMTIKEIEEKYGFKVIYSDTDGFFATIPGADAETVKKKAMEFLKYINAKLPGALELEYEGFYKRGFFVTKKKYAVIDEEGKITTRGLEIVRRDWSEIAKETQARVLEALLKDGDVEKAVRIVKEVTEKLSKYEVPPEKLVIHEQITRDLKDYKATGPHVAVAKRLAARGVKIRPGTVISYIVLKGSGRIGDRAIPFDEFDPTKHKYDAEYYIENQVLPAVERILRAFGYRKEDLRYQKTRQVGLSAWLKPKGT

SEQ ID NO: 783 - protein, 774 aa, synthetic construct
MILDTDYITEDGKPVFRIFKKENGEFKIEYDRTFEAYFYALLKDDSAIEEVKKITAERHGTVVTVKRVEKVQKKFLGRPVEVWKLYFTHPQDIPAIRDKIREHPAVIDIYEYDIPFAKRYLIDKGLVPMEGDEELKMLAFDIETLYHEGEEFAEGPILMISYADEEGARVITWKNVDLPYVDVVSTEREMIKRFLRVVKEKDPDVLITYNGDNFDFAYLKKRCEKLGINFALGRDGSEPKIQRMGDRFAVEVKGRIHFDLYPVIRRTINLPTYTLEAVYEAVFGQPKEKVYAEEITTAWETGENLERVARYSMEDAKVTYELGKEFLPMEAQLSRLIGQSLWDVSRSSTGNLVEWFLLRKAYERNELAPNKPDEKELARRRQSYEGGYVKEPERGLWENIVYLDFRSLYPSIIITHNVSPDTLNREGCKEYDVAPQVGHRFCKDFPGFIPSLLGDLLEERQKIKKKMKATIDPIERKLLDYRQRAIKILANSYYGYYGYARARWYCKECAESVTAWGREYITMTIKEIEEKYGFKVIYSDTDGFFATIPGADAETVKKKAMEFLKYINAKLPGALELEYEGFYKRGFFVTKKKYAVIDEEGKITTRGLEIVRRDWSEIAKETQARVLEALLKDGDVEKAVRIVKEVTEKLSKYEVPPEKLVIHEQITRDLKDYKATGPHVAVAKRLAARGVKIRPGTVISYIVLKGSGRIGDRAIPFDEFDPTKHKYDAEYYIENQVLPAVERILRAFGYRKEDLRYQKTRQVGLSAWLKPKGT

SEQ ID NO: 784 - protein, 774 aa, synthetic construct
MILDTDYITEDGKPVFRIFKKENGEFKIEYDRTFEAYFYALLKDDSAIEEVKKITAERHGTVVTVKRVEKVQKKFLGRPVEVWKLYFTHPQDIPAIADKIREHPAVIDIYEYDIPFAKRYLIDKGLVPMEGDEELKMLAFDIETLYHEGEEFAEGPILMISYADEEGARVITWKNVDLPYVDVVSTEREMIKRFLRVVKEKDPDVLITYNGDNFDFAYLKKRCEKLGINFALGRDGSEPKIQRMGDRFAVEVKGRIHFDLYPVIRRTINLPTYTLEAVYEAVFGQPKEKVYAEEITTAWETGENLERVARYSMEDAKVTYELGKEFLPMEAQLSRLIGQSLWDVSRSSTGNLVEWFLLRKAYERNELAPNKPDEKELARRRQSYEGGYVKEPERGLWENIVYLDFRSLYPSIIITHNVSPDTLNREGCKEYDVAPQVGHRFCKDFPGFIPSLLGDLLEERQKIKKKMKATIDPIERKLLDYRQRAIKILANSYYGYYGYARARWYCKECAESVTAWGREYITMTIKEIEEKYGFKVIYSDTDGFFATIPGADAETVKKKAMEFLKYINAKLPGALELEYEGFYKRGFFVTKKKYAVIDEEGKITTRGLEIVRRDWSEIAKETQARVLEALLKDGDVEKAVRIVKEVTEKLSKYEVPPEKLVIHEQITRDLKDYKATGPHVAVAKRLAARGVKIRPGTVISYIVLKGSGRIGDRAIPFDEFDPTKHKYDAEYYIENQVLPAVERILRAFGYRKEDLRYQKTRQVGLSAWLKPKGT

SEQ ID NO: 785 - protein, 774 aa, synthetic construct
MILDTDYITEDGKPVFRIFKKENGEFKIEYDRTFEAYFYALLKDDSAIEEVKKITAERHGTVVTVKRVEKVQKKFLGRPVEVWKLYFTHPQDIPAIFDKIREHPAVIDIYEYDIPFAKRYLIDKGLVPMEGDEELKMLAFDIETLYHEGEEFAEGPILMISYADEEGARVITWKNVDLPYVDVVSTEREMIKRFLRVVKEKDPDVLITYNGDNFDFAYLKKRCEKLGINFALGRDGSEPKIQRMGDRFAVEVKGRIHFDLYPVIRRTINLPTYTLEAVYEAVFGQPKEKVYAEEITTAWETGENLERVARYSMEDAKVTYELGKEFLPMEAQLSRLIGQSLWDVSRSSTGNLVEWFLLRKAYERNELAPNKPDEKELARRRQSYEGGYVKEPERGLWENIVYLDFRSLYPSIIITHNVSPDTLNREGCKEYDVAPQVGHRFCKDFPGFIPSLLGDLLEERQKIKKKMKATIDPIERKLLDYRQRAIKILANSYYGYYGYARARWYCKECAESVTAWGREYITMTIKEIEEKYGFKVIYSDTDGFFATIPGADAETVKKKAMEFLKYINAKLPGALELEYEGFYKRGFFVTKKKYAVIDEEGKITTRGLEIVRRDWSEIAKETQARVLEALLKDGDVEKAVRIVKEVTEKLSKYEVPPEKLVIHEQITRDLKDYKATGPHVAVAKRLAARGVKIRPGTVISYIVLKGSGRIGDRAIPFDEFDPTKHKYDAEYYIENQVLPAVERILRAFGYRKEDLRYQKTRQVGLSAWLKPKGT

SEQ ID NO: 786 - protein, 774 aa, synthetic construct
MILDTDYITEDGKPVFRIFKKENGEFKIEYDRTFEAYFYALLKDDSAIEEVKKITAERHGTVVTVKRVEKVQKKFLGRPVEVWKLYFTHPQDIPAIHDKIREHPAVIDIYEYDIPFAKRYLIDKGLVPMEGDEELKMLAFDIETLYHEGEEFAEGPILMISYADEEGARVITWKNVDLPYVDVVSTEREMIKRFLRVVKEKDPDVLITYNGDNFDFAYLKKRCEKLGINFALGRDGSEPKIQRMGDRFAVEVKGRIHFDLYPVIRRTINLPTYTLEAVYEAVFGQPKEKVYAEEITTAWETGENLERVARYSMEDAKVTYELGKEFLPMEAQLSRLIGQSLWDVSRSSTGNLVEWFLLRKAYERNELAPNKPDEKELARRRQSYEGGYVKEPERGLWENIVYLDFRSLYPSIIITHNVSPDTLNREGCKEYDVAPQVGHRFCKDFPGFIPSLLGDLLEERQKIKKKMKATIDPIERKLLDYRQRAIKILANSYYGYYGYARARWYCKECAESVTAWGREYITMTIKEIEEKYGFKVIYSDTDGFFATIPGADAETVKKKAMEFLKYINAKLPGALELEYEGFYKRGFFVTKKKYAVIDEEGKITTRGLEIVRRDWSEIAKETQARVLEALLKDGDVEKAVRIVKEVTEKLSKYEVPPEKLVIHEQITRDLKDYKATGPHVAVAKRLAARGVKIRPGTVISYIVLKGSGRIGDRAIPFDEFDPTKHKYDAEYYIENQVLPAVERILRAFGYRKEDLRYQKTRQVGLSAWLKPKGT

SEQ ID NO: 787 - protein, 774 aa, synthetic construct
MILDTDYITEDGKPVFRIFKKENGEFKIEYDRTFEAYFYALLKDDSAIEEVKKITAERHGTVVTVKRVEKVQKKFLGRPVEVWKLYFTHPQDIPAIWDKIREHPAVIDIYEYDIPFAKRYLIDKGLVPMEGDEELKMLAFDIETLYHEGEEFAEGPILMISYADEEGARVITWKNVDLPYVDVVSTEREMIKRFLRVVKEKDPDVLITYNGDNFDFAYLKKRCEKLGINFALGRDGSEPKIQRMGDRFAVEVKGRIHFDLYPVIRRTINLPTYTLEAVYEAVFGQPKEKVYAEEITTAWETGENLERVARYSMEDAKVTYELGKEFLPMEAQLSRLIGQSLWDVSRSSTGNLVEWFLLRKAYERNELAPNKPDEKELARRRQSYEGGYVKEPERGLWENIVYLDFRSLYPSIIITHNVSPDTLNREGCKEYDVAPQVGHRFCKDFPGFIPSLLGDLLEERQKIKKKMKATIDPIERKLLDYRQRAIKILANSYYGYYGYARARWYCKECAESVTAWGREYITMTIKEIEEKYGFKVIYSDTDGFFATIPGADAETVKKKAMEFLKYINAKLPGALELEYEGFYKRGFFVTKKKYAVIDEEGKITTRGLEIVRRDWSEIAKETQARVLEALLKDGDVEKAVRIVKEVTEKLSKYEVPPEKLVIHEQITRDLKDYKATGPHVAVAKRLAARGVKIRPGTVISYIVLKGSGRIGDRAIPFDEFDPTKHKYDAEYYIENQVLPAVERILRAFGYRKEDLRYQKTRQVGLSAWLKPKGT

SEQ ID NO: 788 - protein, 774 aa, synthetic construct
MILDTDYITEDGKPVFRIFKKENGEFKIEYDRTFEAYFYALLKDDSAIEEVKKITAERHGTVVTVKRVEKVQKKFLGRPVEVWKLYFTHPQDKPAIRDKIREHPAVIDIYEYDIPFAKRYLIDKGLVPMEGDEELKMLAFDIETLYHEGEEFAEGPILMISYADEEGARVITWKNVDLPYVDVVSTEREMIKRFLRVVKEKDPDVLITYNGDNFDFAYLKKRCEKLGINFALGRDGSEPKIQRMGDRFAVEVKGRIHFDLYPVIRRTINLPTYTLEAVYEAVFGQPKEKVYAEEITTAWETGENLERVARYSMEDAKVTYELGKEFLPMEAQLSRLIGQSLWDVSRSSTGNLVEWFLLRKAYERNELAPNKPDEKELARRRQSYEGGYVKEPERGLWENIVYLDFRSLYPSIIITHNVSPDTLNREGCKEYDVAPQVGHRFCKDFPGFIPSLLGDLLEERQKIKKKMKATIDPIERKLLDYRQRAIKILANSYYGYYGYARARWYCKECAESVTAWGREYITMTIKEIEEKYGFKVIYSDTDGFFATIPGADAETVKKKAMEFLKYINAKLPGALELEYEGFYKRGFFVTKKKYAVIDEEGKITTRGLEIVRRDWSEIAKETQARVLEALLKDGDVEKAVRIVKEVTEKLSKYEVPPEKLVIHEQITRDLKDYKATGPHVAVAKRLAARGVKIRPGTVISYIVLKGSGRIGDRAIPFDEFDPTKHKYDAEYYIENQVLPAVERILRAFGYRKEDLRYQKTRQVGLSAWLKPKGT

SEQ ID NO: 789 - protein, 774 aa, synthetic construct
MILDTDYITEDGKPVFRIFKKENGEFKIEYDRTFEAYFYALLKDDSAIEEVKKITAERHGTVVTVKRVEKVQKKFLGRPVEVWKLYFTHPQDKPAIFDKIREHPAVIDIYEYDIPFAKRYLIDKGLVPMEGDEELKMLAFDIETLYHEGEEFAEGPILMISYADEEGARVITWKNVDLPYVDVVSTEREMIKRFLRVVKEKDPDVLITYNGDNFDFAYLKKRCEKLGINFALGRDGSEPKIQRMGDRFAVEVKGRIHFDLYPVIRRTINLPTYTLEAVYEAVFGQPKEKVYAEEITTAWETGENLERVARYSMEDAKVTYELGKEFLPMEAQLSRLIGQSLWDVSRSSTGNLVEWFLLRKAYERNELAPNKPDEKELARRRQSYEGGYVKEPERGLWENIVYLDFRSLYPSIIITHNVSPDTLNREGCKEYDVAPQVGHRFCKDFPGFIPSLLGDLLEERQKIKKKMKATIDPIERKLLDYRQRAIKILANSYYGYYGYARARWYCKECAESVTAWGREYITMTIKEIEEKYGFKVIYSDTDGFFATIPGADAETVKKKAMEFLKYINAKLPGALELEYEGFYKRGFFVTKKKYAVIDEEGKITTRGLEIVRRDWSEIAKETQARVLEALLKDGDVEKAVRIVKEVTEKLSKYEVPPEKLVIHEQITRDLKDYKATGPHVAVAKRLAARGVKIRPGTVISYIVLKGSGRIGDRAIPFDEFDPTKHKYDAEYYIENQVLPAVERILRAFGYRKEDLRYQKTRQVGLSAWLKPKGT

SEQ ID NO: 790 - protein, 774 aa, synthetic construct
MILDTDYITEDGKPVFRIFKKENGEFKIEYDRTFEAYFYALLKDDSAIEEVKKITAERHGTVVTVKRVEKVQKKFLGRPVEVWKLYFTHPQDQPAIRDKIREHPAVIDIYEYDIPFAKRYLIDKGLVPMEGDEELKMLAFDIETLYHEGEEFAEGPILMISYADEEGARVITWKNVDLPYVDVVSTEREMIKRFLRVVKEKDPDVLITYNGDNFDFAYLKKRCEKLGINFALGRDGSEPKIQRMGDRFAVEVKGRIHFDLYPVIRRTINLPTYTLEAVYEAVFGQPKEKVYAEEITTAWETGENLERVARYSMEDAKVTYELGKEFLPMEAQLSRLIGQSLWDVSRSSTGNLVEWFLLRKAYERNELAPNKPDEKELARRRQSYEGGYVKEPERGLWENIVYLDFRSLYPSIIITHNVSPDTLNREGCKEYDVAPQVGHRFCKDFPGFIPSLLGDLLEERQKIKKKMKATIDPIERKLLDYRQRAIKILANSYYGYYGYARARWYCKECAESVTAWGREYITMTIKEIEEKYGFKVIYSDTDGFFATIPGADAETVKKKAMEFLKYINAKLPGALELEYEGFYKRGFFVTKKKYAVIDEEGKITTRGLEIVRRDWSEIAKETQARVLEALLKDGDVEKAVRIVKEVTEKLSKYEVPPEKLVIHEQITRDLKDYKATGPHVAVAKRLAARGVKIRPGTVISYIVLKGSGRIGDRAIPFDEFDPTKHKYDAEYYIENQVLPAVERILRAFGYRKEDLRYQKTRQVGLSAWLKPKGT

SEQ ID NO: 791 - protein, 774 aa, synthetic construct
MILDTDYITEDGKPVFRIFKKENGEFKIEYDRTFEAYFYALLKDDSAIEEVKKITAERHGTVVTVKRVEKVQKKFLGRPVEVWKLYFTHPQDQPAIADKIREHPAVIDIYEYDIPFAKRYLIDKGLVPMEGDEELKMLAFDIETLYHEGEEFAEGPILMISYADEEGARVITWKNVDLPYVDVVSTEREMIKRFLRVVKEKDPDVLITYNGDNFDFAYLKKRCEKLGINFALGRDGSEPKIQRMGDRFAVEVKGRIHFDLYPVIRRTINLPTYTLEAVYEAVFGQPKEKVYAEEITTAWETGENLERVARYSMEDAKVTYELGKEFLPMEAQLSRLIGQSLWDVSRSSTGNLVEWFLLRKAYERNELAPNKPDEKELARRRQSYEGGYVKEPERGLWENIVYLDFRSLYPSIIITHNVSPDTLNREGCKEYDVAPQVGHRFCKDFPGFIPSLLGDLLEERQKIKKKMKATIDPIERKLLDYRQRAIKILANSYYGYYGYARARWYCKECAESVTAWGREYITMTIKEIEEKYGFKVIYSDTDGFFATIPGADAETVKKKAMEFLKYINAKLPGALELEYEGFYKRGFFVTKKKYAVIDEEGKITTRGLEIVRRDWSEIAKETQARVLEALLKDGDVEKAVRIVKEVTEKLSKYEVPPEKLVIHEQITRDLKDYKATGPHVAVAKRLAARGVKIRPGTVISYIVLKGSGRIGDRAIPFDEFDPTKHKYDAEYYIENQVLPAVERILRAFGYRKEDLRYQKTRQVGLSAWLKPKGT

SEQ ID NO: 792 - protein, 774 aa, synthetic construct
MILDTDYITEDGKPVFRIFKKENGEFKIEYDRTFEAYFYALLKDDSAIEEVKKITAERHGTVVTVKRVEKVQKKFLGRPVEVWKLYFTHPQDQPAIFDKIREHPAVIDIYEYDIPFAKRYLIDKGLVPMEGDEELKMLAFDIETLYHEGEEFAEGPILMISYADEEGARVITWKNVDLPYVDVVSTEREMIKRFLRVVKEKDPDVLITYNGDNFDFAYLKKRCEKLGINFALGRDGSEPKIQRMGDRFAVEVKGRIHFDLYPVIRRTINLPTYTLEAVYEAVFGQPKEKVYAEEITTAWETGENLERVARYSMEDAKVTYELGKEFLPMEAQLSRLIGQSLWDVSRSSTGNLVEWFLLRKAYERNELAPNKPDEKELARRRQSYEGGYVKEPERGLWENIVYLDFRSLYPSIIITHNVSPDTLNREGCKEYDVAPQVGHRFCKDFPGFIPSLLGDLLEERQKIKKKMKATIDPIERKLLDYRQRAIKILANSYYGYYGYARARWYCKECAESVTAWGREYITMTIKEIEEKYGFKVIYSDTDGFFATIPGADAETVKKKAMEFLKYINAKLPGALELEYEGFYKRGFFVTKKKYAVIDEEGKITTRGLEIVRRDWSEIAKETQARVLEALLKDGDVEKAVRIVKEVTEKLSKYEVPPEKLVIHEQITRDLKDYKATGPHVAVAKRLAARGVKIRPGTVISYIVLKGSGRIGDRAIPFDEFDPTKHKYDAEYYIENQVLPAVERILRAFGYRKEDLRYQKTRQVGLSAWLKPKGT

SEQ ID NO: 793 - protein, 774 aa, synthetic construct
MILDTDYITEDGKPVFRIFKKENGEFKIEYDRTFEAYFYALLKDDSAIEEVKKITAERHGTVVTVKRVEKVQKKFLGRPVEVWKLYFTHPQDQPAIWDKIREHPAVIDIYEYDIPFAKRYLIDKGLVPMEGDEELKMLAFDIETLYHEGEEFAEGPILMISYADEEGARVITWKNVDLPYVDVVSTEREMIKRFLRVVKEKDPDVLITYNGDNFDFAYLKKRCEKLGINFALGRDGSEPKIQRMGDRFAVEVKGRIHFDLYPVIRRTINLPTYTLEAVYEAVFGQPKEKVYAEEITTAWETGENLERVARYSMEDAKVTYELGKEFLPMEAQLSRLIGQSLWDVSRSSTGNLVEWFLLRKAYERNELAPNKPDEKELARRRQSYEGGYVKEPERGLWENIVYLDFRSLYPSIIITHNVSPDTLNREGCKEYDVAPQVGHRFCKDFPGFIPSLLGDLLEERQKIKKKMKATIDPIERKLLDYRQRAIKILANSYYGYYGYARARWYCKECAESVTAWGREYITMTIKEIEEKYGFKVIYSDTDGFFATIPGADAETVKKKAMEFLKYINAKLPGALELEYEGFYKRGFFVTKKKYAVIDEEGKITTRGLEIVRRDWSEIAKETQARVLEALLKDGDVEKAVRIVKEVTEKLSKYEVPPEKLVIHEQITRDLKDYKATGPHVAVAKRLAARGVKIRPGTVISYIVLKGSGRIGDRAIPFDEFDPTKHKYDAEYYIENQVLPAVERILRAFGYRKEDLRYQKTRQVGLSAWLKPKGT

SEQ ID NO: 794 - protein, 774 aa, synthetic construct
MILDTDYITEDGKPVFRIFKKENGEFKIEYDRTFEAYFYALLKDDSAIEEVKKITAERHGTVVTVKRVEKVQKKFLGRPVEVWKLYFTHPQDRPAIRDKIREHPAVIDIYEYDIPFAKRYLIDKGLVPMEGDEELKMLAFDIETLYHEGEEFAEGPILMISYADEEGARVITWKNVDLPYVDVVSTEREMIKRFLRVVKEKDPDVLITYNGDNFDFAYLKKRCEKLGINFALGRDGSEPKIQRMGDRFAVEVKGRIHFDLYPVIRRTINLPTYTLEAVYEAVFGQPKEKVYAEEITTAWETGENLERVARYSMEDAKVTYELGKEFLPMEAQLSRLIGQSLWDVSRSSTGNLVEWFLLRKAYERNELAPNKPDEKELARRRQSYEGGYVKEPERGLWENIVYLDFRSLYPSIIITHNVSPDTLNREGCKEYDVAPQVGHRFCKDFPGFIPSLLGDLLEERQKIKKKMKATIDPIERKLLDYRQRAIKILANSYYGYYGYARARWYCKECAESVTAWGREYITMTIKEIEEKYGFKVIYSDTDGFFATIPGADAETVKKKAMEFLKYINAKLPGALELEYEGFYKRGFFVTKKKYAVIDEEGKITTRGLEIVRRDWSEIAKETQARVLEALLKDGDVEKAVRIVKEVTEKLSKYEVPPEKLVIHEQITRDLKDYKATGPHVAVAKRLAARGVKIRPGTVISYIVLKGSGRIGDRAIPFDEFDPTKHKYDAEYYIENQVLPAVERILRAFGYRKEDLRYQKTRQVGLSAWLKPKGT

SEQ ID NO: 795 - protein, 774 aa, synthetic construct
MILDTDYITEDGKPVFRIFKKENGEFKIEYDRTFEAYFYALLKDDSAIEEVKKITAERHGTVVTVKRVEKVQKKFLGRPVEVWKLYFTHPQDRPAIADKIREHPAVIDIYEYDIPFAKRYLIDKGLVPMEGDEELKMLAFDIETLYHEGEEFAEGPILMISYADEEGARVITWKNVDLPYVDVVSTEREMIKRFLRVVKEKDPDVLITYNGDNFDFAYLKKRCEKLGINFALGRDGSEPKIQRMGDRFAVEVKGRIHFDLYPVIRRTINLPTYTLEAVYEAVFGQPKEKVYAEEITTAWETGENLERVARYSMEDAKVTYELGKEFLPMEAQLSRLIGQSLWDVSRSSTGNLVEWFLLRKAYERNELAPNKPDEKELARRRQSYEGGYVKEPERGLWENIVYLDFRSLYPSIIITHNVSPDTLNREGCKEYDVAPQVGHRFCKDFPGFIPSLLGDLLEERQKIKKKMKATIDPIERKLLDYRQRAIKILANSYYGYYGYARARWYCKECAESVTAWGREYITMTIKEIEEKYGFKVIYSDTDGFFATIPGADAETVKKKAMEFLKYINAKLPGALELEYEGFYKRGFFVTKKKYAVIDEEGKITTRGLEIVRRDWSEIAKETQARVLEALLKDGDVEKAVRIVKEVTEKLSKYEVPPEKLVIHEQITRDLKDYKATGPHVAVAKRLAARGVKIRPGTVISYIVLKGSGRIGDRAIPFDEFDPTKHKYDAEYYIENQVLPAVERILRAFGYRKEDLRYQKTRQVGLSAWLKPKGT

SEQ ID NO: 796 - protein, 774 aa, synthetic construct
MILDTDYITEDGKPVFRIFKKENGEFKIEYDRTFEAYFYALLKDDSAIEEVKKITAERHGTVVTVKRVEKVQKKFLGRPVEVWKLYFTHPQDRPAIADKIREHPAVIDIYEYDIPFAKQYLIDKGLVPMEGDEELKMLAFDIETLYHEGEEFAEGPILMISYADEEGARVITWKNVDLPYVDVVSTEREMIKRFLRVVKEKDPDVLITYNGDNFDFAYLKKRCEKLGINFALGRDGSEPKIQRMGDRFAVEVKGRIHFDLYPVIRRTINLPTYTLEAVYEAVFGQPKEKVYAEEITTAWETGENLERVARYSMEDAKVTYELGKEFLPMEAQLSRLIGQSLWDVSRSSTGNLVEWFLLRKAYERNELAPNKPDEKELARRRQSYEGGYVKEPERGLWENIVYLDFRSLYPSIIITHNVSPDTLNREGCKEYDVAPQVGHRFCKDFPGFIPSLLGDLLEERQKIKKKMKATIDPIERKLLDYRQRAIKILANSYYGYYGYARARWYCKECAESVTAWGREYITMTIKEIEEKYGFKVIYSDTDGFFATIPGADAETVKKKAMEFLKYINAKLPGALELEYEGFYKRGFFVTKKKYAVIDEEGKITTRGLEIVRRDWSEIAKETQARVLEALLKDGDVEKAVRIVKEVTEKLSKYEVPPEKLVIHEQITRDLKDYKATGPHVAVAKRLAARGVKIRPGTVISYIVLKGSGRIGDRAIPFDEFDPTKHKYDAEYYIENQVLPAVERILRAFGYRKEDLRYQKTRQVGLSAWLKPKGT

SEQ ID NO: 797 - protein, 774 aa, synthetic construct
MILDTDYITEDGKPVFRIFKKENGEFKIEYDRTFEAYFYALLKDDSAIEEVKKITAERHGTVVTVKRVEKVQKKFLGRPVEVWKLYFTHPQDRPAIFDKIREHPAVIDIYEYDIPFAKRYLIDKGLVPMEGDEELKMLAFDIETLYHEGEEFAEGPILMISYADEEGARVITWKNVDLPYVDVVSTEREMIKRFLRVVKEKDPDVLITYNGDNFDFAYLKKRCEKLGINFALGRDGSEPKIQRMGDRFAVEVKGRIHFDLYPVIRRTINLPTYTLEAVYEAVFGQPKEKVYAEEITTAWETGENLERVARYSMEDAKVTYELGKEFLPMEAQLSRLIGQSLWDVSRSSTGNLVEWFLLRKAYERNELAPNKPDEKELARRRQSYEGGYVKEPERGLWENIVYLDFRSLYPSIIITHNVSPDTLNREGCKEYDVAPQVGHRFCKDFPGFIPSLLGDLLEERQKIKKKMKATIDPIERKLLDYRQRAIKILANSYYGYYGYARARWYCKECAESVTAWGREYITMTIKEIEEKYGFKVIYSDTDGFFATIPGADAETVKKKAMEFLKYINAKLPGALELEYEGFYKRGFFVTKKKYAVIDEEGKITTRGLEIVRRDWSEIAKETQARVLEALLKDGDVEKAVRIVKEVTEKLSKYEVPPEKLVIHEQITRDLKDYKATGPHVAVAKRLAARGVKIRPGTVISYIVLKGSGRIGDRAIPFDEFDPTKHKYDAEYYIENQVLPAVERILRAFGYRKEDLRYQKTRQVGLSAWLKPKGT

SEQ ID NO: 798 - protein, 774 aa, synthetic construct
MILDTDYITEDGKPVFRIFKKENGEFKIEYDRTFEAYFYALLKDDSAIEEVKKITAERHGTVVTVKRVEKVQKKFLGRPVEVWKLYFTHPQDRPAIHDKIREHPAVIDIYEYDIPFAKRYLIDKGLVPMEGDEELKMLAFDIETLYHEGEEFAEGPILMISYADEEGARVITWKNVDLPYVDVVSTEREMIKRFLRVVKEKDPDVLITYNGDNFDFAYLKKRCEKLGINFALGRDGSEPKIQRMGDRFAVEVKGRIHFDLYPVIRRTINLPTYTLEAVYEAVFGQPKEKVYAEEITTAWETGENLERVARYSMEDAKVTYELGKEFLPMEAQLSRLIGQSLWDVSRSSTGNLVEWFLLRKAYERNELAPNKPDEKELARRRQSYEGGYVKEPERGLWENIVYLDFRSLYPSIIITHNVSPDTLNREGCKEYDVAPQVGHRFCKDFPGFIPSLLGDLLEERQKIKKKMKATIDPIERKLLDYRQRAIKILANSYYGYYGYARARWYCKECAESVTAWGREYITMTIKEIEEKYGFKVIYSDTDGFFATIPGADAETVKKKAMEFLKYINAKLPGALELEYEGFYKRGFFVTKKKYAVIDEEGKITTRGLEIVRRDWSEIAKETQARVLEALLKDGDVEKAVRIVKEVTEKLSKYEVPPEKLVIHEQITRDLKDYKATGPHVAVAKRLAARGVKIRPGTVISYIVLKGSGRIGDRAIPFDEFDPTKHKYDAEYYIENQVLPAVERILRAFGYRKEDLRYQKTRQVGLSAWLKPKGT

SEQ ID NO: 799 - protein, 774 aa, synthetic construct
MILDTDYITEDGKPVFRIFKKENGEFKIEYDRTFEAYFYALLKDDSAIEEVKKITAERHGTVVTVKRVEKVQKKFLGRPVEVWKLYFTHPQDRPAIWDKIREHPAVIDIYEYDIPFAKRYLIDKGLVPMEGDEELKMLAFDIETLYHEGEEFAEGPILMISYADEEGARVITWKNVDLPYVDVVSTEREMIKRFLRVVKEKDPDVLITYNGDNFDFAYLKKRCEKLGINFALGRDGSEPKIQRMGDRFAVEVKGRIHFDLYPVIRRTINLPTYTLEAVYEAVFGQPKEKVYAEEITTAWETGENLERVARYSMEDAKVTYELGKEFLPMEAQLSRLIGQSLWDVSRSSTGNLVEWFLLRKAYERNELAPNKPDEKELARRRQSYEGGYVKEPERGLWENIVYLDFRSLYPSIIITHNVSPDTLNREGCKEYDVAPQVGHRFCKDFPGFIPSLLGDLLEERQKIKKKMKATIDPIERKLLDYRQRAIKILANSYYGYYGYARARWYCKECAESVTAWGREYITMTIKEIEEKYGFKVIYSDTDGFFATIPGADAETVKKKAMEFLKYINAKLPGALELEYEGFYKRGFFVTKKKYAVIDEEGKITTRGLEIVRRDWSEIAKETQARVLEALLKDGDVEKAVRIVKEVTEKLSKYEVPPEKLVIHEQITRDLKDYKATGPHVAVAKRLAARGVKIRPGTVISYIVLKGSGRIGDRAIPFDEFDPTKHKYDAEYYIENQVLPAVERILRAFGYRKEDLRYQKTRQVGLSAWLKPKGT

SEQ ID NO: 800 - protein, 774 aa, synthetic construct
MILDTDYITEDGKPVFRIFKKENGEFKIEYDRTFEHYFYALLKDDSAIEEVKKITAERHGTVVTVKRVEKVQKKFLGRPVEVWKLYFTHPQDVPAIRDKIREHPAVIDIYEYDIPFAKRYLIDKGLVPMEGDEELKMLAFDIETLYHEGEEFAEGPILMISYADEEGARVITWKNVDLPYVDVVSTEREMIKRFLRVVKEKDPDVLITYNGDNFDFAYLKKRCEKLGINFALGRDGSEPKIQRMGDRFAVEVKGRIHFDLYPVIRRTINLPTYTLEAVYEAVFGQPKEKVYAEEITTAWETGENLERVARYSMEDAKVTYELGKEFLPMEAQLSRLIGQSLWDVSRSSTGNLVEWFLLRKAYERNELAPNKPDEKELARRRQSYEGGYVKEPERGLWENIVYLDFRSLYPSIIITHNVSPDTLNREGCKEYDVAPQVGHRFCKDFPGFIPSLLGDLLEERQKIKKKMKATIDPIERKLLDYRQRAIKILANSYYGYYGYARARWYCKECAESVTAWGREYITMTIKEIEEKYGFKVIYSDTDGFFATIPGADAETVKKKAMEFLKYINAKLPGALELEYEGFYKRGFFVTKKKYAVIDEEGKITTRGLEIVRRDWSEIAKETQARVLEALLKDGDVEKAVRIVKEVTEKLSKYEVPPEKLVIHEQITRDLKDYKATGPHVAVAKRLAARGVKIRPGTVISYIVLKGSGRIGDRAIPFDEFDPTKHKYDAEYYIENQVLPAVERILRAFGYRKEDLRYQKTRQVGLSAWLKPKGT

SEQ ID NO: 801 - protein, 774 aa, synthetic construct
MILDTDYITEDGKPVFRIFKKENGEFKIEYDRTFEHYFYALLKDDSAIEEVKKITAERHGTVVTVKRVEKVQKKFLGRPVEVWKLYFTHFQDVPAIRDKIREHPAVIDIYEYDIPFAKRYLIDKGLVPMEGDEELKMLAFDIETLYHEGEEFAEGPILMISYADEEGARVITWKNVDLPYVDVVSTEREMIKRFLRVVKEKDPDVLITYNGDNFDFAYLKKRCEKLGINFALGRDGSEPKIQRMGDRFAVEVKGRIHFDLYPVIRRTINLPTYTLEAVYEAVFGQPKEKVYAEEITTAWETGENLERVARYSMEDAKVTYELGKEFLPMEAQLSRLIGQSLWDVSRSSTGNLVEWFLLRKAYERNELAPNKPDEKELARRRQSYEGGYVKEPERGLWENIVYLDFRSLYPSIIITHNVSPDTLNREGCKEYDVAPQVGHRFCKDFPGFIPSLLGDLLEERQKIKKKMKATIDPIERKLLDYRQRAIKILANSYYGYYGYARARWYCKECAESVTAWGREYITMTIKEIEEKYGFKVIYSDTDGFFATIPGADAETVKKKAMEFLKYINAKLPGALELEYEGFYKRGFFVTKKKYAVIDEEGKITTRGLEIVRRDWSEIAKETQARVLEALLKDGDVEKAVRIVKEVTEKLSKYEVPPEKLVIHEQITRDLKDYKATGPHVAVAKRLAARGVKIRPGTVISYIVLKGSGRIGDRAIPFDEFDPTKHKYDAEYYIENQVLPAVERILRAFGYRKEDLRYQKTRQVGLSAWLKPKGT

SEQ ID NO: 802 - protein, 774 aa, synthetic construct
MILDTDYITEDGKPVFRIFKKENGEFKIEYDRTFEHYFYALLKDDSAIEEVKKITAERHGTVVTVKRVEKVQKKFLGRPVEVWKLYFTHFQDIPAIRDKIREHPAVIDIYEYDIPFAKRYLIDKGLVPMEGDEELKMLAFDIETLYHEGEEFAEGPILMISYADEEGARVITWKNVDLPYVDVVSTEREMIKRFLRVVKEKDPDVLITYNGDNFDFAYLKKRCEKLGINFALGRDGSEPKIQRMGDRFAVEVKGRIHFDLYPVIRRTINLPTYTLEAVYEAVFGQPKEKVYAEEITTAWETGENLERVARYSMEDAKVTYELGKEFLPMEAQLSRLIGQSLWDVSRSSTGNLVEWFLLRKAYERNELAPNKPDEKELARRRQSYEGGYVKEPERGLWENIVYLDFRSLYPSIIITHNVSPDTLNREGCKEYDVAPQVGHRFCKDFPGFIPSLLGDLLEERQKIKKKMKATIDPIERKLLDYRQRAIKILANSYYGYYGYARARWYCKECAESVTAWGREYITMTIKEIEEKYGFKVIYSDTDGFFATIPGADAETVKKKAMEFLKYINAKLPGALELEYEGFYKRGFFVTKKKYAVIDEEGKITTRGLEIVRRDWSEIAKETQARVLEALLKDGDVEKAVRIVKEVTEKLSKYEVPPEKLVIHEQITRDLKDYKATGPHVAVAKRLAARGVKIRPGTVISYIVLKGSGRIGDRAIPFDEFDPTKHKYDAEYYIENQVLPAVERILRAFGYRKEDLRYQKTRQVGLSAWLKPKGT

SEQ ID NO: 803 - protein, 774 aa, synthetic construct
MILDTDYITEDGKPVFRIFKKENGEFKIEYDRTFEHYFYALLKDDSAIEEVKKITAERHGTVVTVKRVEKVQKKFLGRPVEVWKLYFTHWQDVPAIRDKIREHPAVIDIYEYDIPFAKRYLIDKGLVPMEGDEELKMLAFDIETLYHEGEEFAEGPILMISYADEEGARVITWKNVDLPYVDVVSTEREMIKRFLRVVKEKDPDVLITYNGDNFDFAYLKKRCEKLGINFALGRDGSEPKIQRMGDRFAVEVKGRIHFDLYPVIRRTINLPTYTLEAVYEAVFGQPKEKVYAEEITTAWETGENLERVARYSMEDAKVTYELGKEFLPMEAQLSRLIGQSLWDVSRSSTGNLVEWFLLRKAYERNELAPNKPDEKELARRRQSYEGGYVKEPERGLWENIVYLDFRSLYPSIIITHNVSPDTLNREGCKEYDVAPQVGHRFCKDFPGFIPSLLGDLLEERQKIKKKMKATIDPIERKLLDYRQRAIKILANSYYGYYGYARARWYCKECAESVTAWGREYITMTIKEIEEKYGFKVIYSDTDGFFATIPGADAETVKKKAMEFLKYINAKLPGALELEYEGFYKRGFFVTKKKYAVIDEEGKITTRGLEIVRRDWSEIAKETQARVLEALLKDGDVEKAVRIVKEVTEKLSKYEVPPEKLVIHEQITRDLKDYKATGPHVAVAKRLAARGVKIRPGTVISYIVLKGSGRIGDRAIPFDEFDPTKHKYDAEYYIENQVLPAVERILRAFGYRKEDLRYQKTRQVGLSAWLKPKGT

SEQ ID NO: 804 - protein, 774 aa, synthetic construct
MILDTDYITEDGKPVFRIFKKENGEFKIEYDRTFEHYFYALLKDDSAIEEVKKITAERHGTVVTVKRVEKVQKKFLGRPVEVWKLYFTHWQDVPAIHDKIREHPAVIDIYEYDIPFAKRYLIDKGLVPMEGDEELKMLAFDIETLYHEGEEFAEGPILMISYADEEGARVITWKNVDLPYVDVVSTEREMIKRFLRVVKEKDPDVLITYNGDNFDFAYLKKRCEKLGINFALGRDGSEPKIQRMGDRFAVEVKGRIHFDLYPVIRRTINLPTYTLEAVYEAVFGQPKEKVYAEEITTAWETGENLERVARYSMEDAKVTYELGKEFLPMEAQLSRLIGQSLWDVSRSSTGNLVEWFLLRKAYERNELAPNKPDEKELARRRQSYEGGYVKEPERGLWENIVYLDFRSLYPSIIITHNVSPDTLNREGCKEYDVAPQVGHRFCKDFPGFIPSLLGDLLEERQKIKKKMKATIDPIERKLLDYRQRAIKILANSYYGYYGYARARWYCKECAESVTAWGREYITMTIKEIEEKYGFKVIYSDTDGFFATIPGADAETVKKKAMEFLKYINAKLPGALELEYEGFYKRGFFVTKKKYAVIDEEGKITTRGLEIVRRDWSEIAKETQARVLEALLKDGDVEKAVRIVKEVTEKLSKYEVPPEKLVIHEQITRDLKDYKATGPHVAVAKRLAARGVKIRPGTVISYIVLKGSGRIGDRAIPFDEFDPTKHKYDAEYYIENQVLPAVERILRAFGYRKEDLRYQKTRQVGLSAWLKPKGT

SEQ ID NO: 805 - protein, 774 aa, synthetic construct
MILDTDYITEDGKPVFRIFKKENGEFKIEYDRTFEHYFYALLKDDSAIEEVKKITAERHGTVVTVKRVEKVQKKFLGRPVEVWKLYFTHYQDVPAIADKIREHPAVIDIYEYDIPFAKRYLIDKGLVPMEGDEELKMLAFDIETLYHEGEEFAEGPILMISYADEEGARVITWKNVDLPYVDVVSTEREMIKRFLRVVKEKDPDVLITYNGDNFDFAYLKKRCEKLGINFALGRDGSEPKIQRMGDRFAVEVKGRIHFDLYPVIRRTINLPTYTLEAVYEAVFGQPKEKVYAEEITTAWETGENLERVARYSMEDAKVTYELGKEFLPMEAQLSRLIGQSLWDVSRSSTGNLVEWFLLRKAYERNELAPNKPDEKELARRRQSYEGGYVKEPERGLWENIVYLDFRSLYPSIIITHNVSPDTLNREGCKEYDVAPQVGHRFCKDFPGFIPSLLGDLLEERQKIKKKMKATIDPIERKLLDYRQRAIKILANSYYGYYGYARARWYCKECAESVTAWGREYITMTIKEIEEKYGFKVIYSDTDGFFATIPGADAETVKKKAMEFLKYINAKLPGALELEYEGFYKRGFFVTKKKYAVIDEEGKITTRGLEIVRRDWSEIAKETQARVLEALLKDGDVEKAVRIVKEVTEKLSKYEVPPEKLVIHEQITRDLKDYKATGPHVAVAKRLAARGVKIRPGTVISYIVLKGSGRIGDRAIPFDEFDPTKHKYDAEYYIENQVLPAVERILRAFGYRKEDLRYQKTRQVGLSAWLKPKGT

SEQ ID NO: 806 - protein, 774 aa, synthetic construct
MILDTDYITEDGKPVFRIFKKENGEFKIEYDRTFEHYFYALLKDDSAIEEVKKITAERHGTVVTVKRVEKVQKKFLGRPVEVWKLYFTHPQDVPAIADKIREHPAVIDIYEYDIPFAKRYLIDKGLVPMEGDEELKMLAFDIETLYHEGEEFAEGPILMISYADEEGARVITWKNVDLPYVDVVSTEREMIKRFLRVVKEKDPDVLITYNGDNFDFAYLKKRCEKLGINFALGRDGSEPKIQRMGDRFAVEVKGRIHFDLYPVIRRTINLPTYTLEAVYEAVFGQPKEKVYAEEITTAWETGENLERVARYSMEDAKVTYELGKEFLPMEAQLSRLIGQSLWDVSRSSTGNLVEWFLLRKAYERNELAPNKPDEKELARRRQSYEGGYVKEPERGLWENIVYLDFRSLYPSIIITHNVSPDTLNREGCKEYDVAPQVGHRFCKDFPGFIPSLLGDLLEERQKIKKKMKATIDPIERKLLDYRQRAIKILANSYYGYYGYARARWYCKECAESVTAWGREYITMTIKEIEEKYGFKVIYSDTDGFFATIPGADAETVKKKAMEFLKYINAKLPGALELEYEGFYKRGFFVTKKKYAVIDEEGKITTRGLEIVRRDWSEIAKETQARVLEALLKDGDVEKAVRIVKEVTEKLSKYEVPPEKLVIHEQITRDLKDYKATGPHVAVAKRLAARGVKIRPGTVISYIVLKGSGRIGDRAIPFDEFDPTKHKYDAEYYIENQVLPAVERILRAFGYRKEDLRYQKTRQVGLSAWLKPKGT

SEQ ID NO: 807 - protein, 774 aa, synthetic construct
MILDTDYITEDGKPVFRIFKKENGEFKIEYDRTFEHYFYALLKDDSAIEEVKKITAERHGTVVTVKRVEKVQKKFLGRPVEVWKLYFTHPQDVPAIFDKIREHPAVIDIYEYDIPFAKRYLIDKGLVPMEGDEELKMLAFDIETLYHEGEEFAEGPILMISYADEEGARVITWKNVDLPYVDVVSTEREMIKRFLRVVKEKDPDVLITYNGDNFDFAYLKKRCEKLGINFALGRDGSEPKIQRMGDRFAVEVKGRIHFDLYPVIRRTINLPTYTLEAVYEAVFGQPKEKVYAEEITTAWETGENLERVARYSMEDAKVTYELGKEFLPMEAQLSRLIGQSLWDVSRSSTGNLVEWFLLRKAYERNELAPNKPDEKELARRRQSYEGGYVKEPERGLWENIVYLDFRSLYPSIIITHNVSPDTLNREGCKEYDVAPQVGHRFCKDFPGFIPSLLGDLLEERQKIKKKMKATIDPIERKLLDYRQRAIKILANSYYGYYGYARARWYCKECAESVTAWGREYITMTIKEIEEKYGFKVIYSDTDGFFATIPGADAETVKKKAMEFLKYINAKLPGALELEYEGFYKRGFFVTKKKYAVIDEEGKITTRGLEIVRRDWSEIAKETQARVLEALLKDGDVEKAVRIVKEVTEKLSKYEVPPEKLVIHEQITRDLKDYKATGPHVAVAKRLAARGVKIRPGTVISYIVLKGSGRIGDRAIPFDEFDPTKHKYDAEYYIENQVLPAVERILRAFGYRKEDLRYQKTRQVGLSAWLKPKGT

SEQ ID NO: 808 - protein, 774 aa, synthetic construct
MILDTDYITEDGKPVFRIFKKENGEFKIEYDRTFEHYFYALLKDDSAIEEVKKITAERHGTVVTVKRVEKVQKKFLGRPVEVWKLYFTHPQDVPAIHDKIREHPAVIDIYEYDIPFAKRYLIDKGLVPMEGDEELKMLAFDIETLYHEGEEFAEGPILMISYADEEGARVITWKNVDLPYVDVVSTEREMIKRFLRVVKEKDPDVLITYNGDNFDFAYLKKRCEKLGINFALGRDGSEPKIQRMGDRFAVEVKGRIHFDLYPVIRRTINLPTYTLEAVYEAVFGQPKEKVYAEEITTAWETGENLERVARYSMEDAKVTYELGKEFLPMEAQLSRLIGQSLWDVSRSSTGNLVEWFLLRKAYERNELAPNKPDEKELARRRQSYEGGYVKEPERGLWENIVYLDFRSLYPSIIITHNVSPDTLNREGCKEYDVAPQVGHRFCKDFPGFIPSLLGDLLEERQKIKKKMKATIDPIERKLLDYRQRAIKILANSYYGYYGYARARWYCKECAESVTAWGREYITMTIKEIEEKYGFKVIYSDTDGFFATIPGADAETVKKKAMEFLKYINAKLPGALELEYEGFYKRGFFVTKKKYAVIDEEGKITTRGLEIVRRDWSEIAKETQARVLEALLKDGDVEKAVRIVKEVTEKLSKYEVPPEKLVIHEQITRDLKDYKATGPHVAVAKRLAARGVKIRPGTVISYIVLKGSGRIGDRAIPFDEFDPTKHKYDAEYYIENQVLPAVERILRAFGYRKEDLRYQKTRQVGLSAWLKPKGT

SEQ ID NO: 809 - protein, 774 aa, synthetic construct
MILDTDYITEDGKPVFRIFKKENGEFKIEYDRTFEHYFYALLKDDSAIEEVKKITAERHGTVVTVKRVEKVQKKFLGRPVEVWKLYFTHPQDVPAIRDKIREHPAVIDIYEYDIPFAKQYLIDKGLVPMEGDEELKMLAFDIETLYHEGEEFAEGPILMISYADEEGARVITWKNVDLPYVDVVSTEREMIKRFLRVVKEKDPDVLITYNGDNFDFAYLKKRCEKLGINFALGRDGSEPKIQRMGDRFAVEVKGRIHFDLYPVIRRTINLPTYTLEAVYEAVFGQPKEKVYAEEITTAWETGENLERVARYSMEDAKVTYELGKEFLPMEAQLSRLIGQSLWDVSRSSTGNLVEWFLLRKAYERNELAPNKPDEKELARRRQSYEGGYVKEPERGLWENIVYLDFRSLYPSIIITHNVSPDTLNREGCKEYDVAPQVGHRFCKDFPGFIPSLLGDLLEERQKIKKKMKATIDPIERKLLDYRQRAIKILANSYYGYYGYARARWYCKECAESVTAWGREYITMTIKEIEEKYGFKVIYSDTDGFFATIPGADAETVKKKAMEFLKYINAKLPGALELEYEGFYKRGFFVTKKKYAVIDEEGKITTRGLEIVRRDWSEIAKETQARVLEALLKDGDVEKAVRIVKEVTEKLSKYEVPPEKLVIHEQITRDLKDYKATGPHVAVAKRLAARGVKIRPGTVISYIVLKGSGRIGDRAIPFDEFDPTKHKYDAEYYIENQVLPAVERILRAFGYRKEDLRYQKTRQVGLSAWLKPKGT

SEQ ID NO: 810 - protein, 774 aa, synthetic construct
MILDTDYITEDGKPVFRIFKKENGEFKIEYDRTFEHYFYALLKDDSAIEEVKKITAERHGTVVTVKRVEKVQKKFLGRPVEVWKLYFTHPQDIPAIRDKIREHPAVIDIYEYDIPFAKRYLIDKGLVPMEGDEELKMLAFDIETLYHEGEEFAEGPILMISYADEEGARVITWKNVDLPYVDVVSTEREMIKRFLRVVKEKDPDVLITYNGDNFDFAYLKKRCEKLGINFALGRDGSEPKIQRMGDRFAVEVKGRIHFDLYPVIRRTINLPTYTLEAVYEAVFGQPKEKVYAEEITTAWETGENLERVARYSMEDAKVTYELGKEFLPMEAQLSRLIGQSLWDVSRSSTGNLVEWFLLRKAYERNELAPNKPDEKELARRRQSYEGGYVKEPERGLWENIVYLDFRSLYPSIIITHNVSPDTLNREGCKEYDVAPQVGHRFCKDFPGFIPSLLGDLLEERQKIKKKMKATIDPIERKLLDYRQRAIKILANSYYGYYGYARARWYCKECAESVTAWGREYITMTIKEIEEKYGFKVIYSDTDGFFATIPGADAETVKKKAMEFLKYINAKLPGALELEYEGFYKRGFFVTKKKYAVIDEEGKITTRGLEIVRRDWSEIAKETQARVLEALLKDGDVEKAVRIVKEVTEKLSKYEVPPEKLVIHEQITRDLKDYKATGPHVAVAKRLAARGVKIRPGTVISYIVLKGSGRIGDRAIPFDEFDPTKHKYDAEYYIENQVLPAVERILRAFGYRKEDLRYQKTRQVGLSAWLKPKGT

SEQ ID NO: 811 - protein, 774 aa, synthetic construct
MILDTDYITEDGKPVFRIFKKENGEFKIEYDRTFEHYFYALLKDDSAIEEVKKITAERHGTVVTVKRVEKVQKKFLGRPVEVWKLYFTHPQDIPAIADKIREHPAVIDIYEYDIPFAKRYLIDKGLVPMEGDEELKMLAFDIETLYHEGEEFAEGPILMISYADEEGARVITWKNVDLPYVDVVSTEREMIKRFLRVVKEKDPDVLITYNGDNFDFAYLKKRCEKLGINFALGRDGSEPKIQRMGDRFAVEVKGRIHFDLYPVIRRTINLPTYTLEAVYEAVFGQPKEKVYAEEITTAWETGENLERVARYSMEDAKVTYELGKEFLPMEAQLSRLIGQSLWDVSRSSTGNLVEWFLLRKAYERNELAPNKPDEKELARRRQSYEGGYVKEPERGLWENIVYLDFRSLYPSIIITHNVSPDTLNREGCKEYDVAPQVGHRFCKDFPGFIPSLLGDLLEERQKIKKKMKATIDPIERKLLDYRQRAIKILANSYYGYYGYARARWYCKECAESVTAWGREYITMTIKEIEEKYGFKVIYSDTDGFFATIPGADAETVKKKAMEFLKYINAKLPGALELEYEGFYKRGFFVTKKKYAVIDEEGKITTRGLEIVRRDWSEIAKETQARVLEALLKDGDVEKAVRIVKEVTEKLSKYEVPPEKLVIHEQITRDLKDYKATGPHVAVAKRLAARGVKIRPGTVISYIVLKGSGRIGDRAIPFDEFDPTKHKYDAEYYIENQVLPAVERILRAFGYRKEDLRYQKTRQVGLSAWLKPKGT

SEQ ID NO: 812 - protein, 774 aa, synthetic construct
MILDTDYITEDGKPVFRIFKKENGEFKIEYDRTFEHYFYALLKDDSAIEEVKKITAERHGTVVTVKRVEKVQKKFLGRPVEVWKLYFTHPQDIPAIFDKIREHPAVIDIYEYDIPFAKRYLIDKGLVPMEGDEELKMLAFDIETLYHEGEEFAEGPILMISYADEEGARVITWKNVDLPYVDVVSTEREMIKRFLRVVKEKDPDVLITYNGDNFDFAYLKKRCEKLGINFALGRDGSEPKIQRMGDRFAVEVKGRIHFDLYPVIRRTINLPTYTLEAVYEAVFGQPKEKVYAEEITTAWETGENLERVARYSMEDAKVTYELGKEFLPMEAQLSRLIGQSLWDVSRSSTGNLVEWFLLRKAYERNELAPNKPDEKELARRRQSYEGGYVKEPERGLWENIVYLDFRSLYPSIIITHNVSPDTLNREGCKEYDVAPQVGHRFCKDFPGFIPSLLGDLLEERQKIKKKMKATIDPIERKLLDYRQRAIKILANSYYGYYGYARARWYCKECAESVTAWGREYITMTIKEIEEKYGFKVIYSDTDGFFATIPGADAETVKKKAMEFLKYINAKLPGALELEYEGFYKRGFFVTKKKYAVIDEEGKITTRGLEIVRRDWSEIAKETQARVLEALLKDGDVEKAVRIVKEVTEKLSKYEVPPEKLVIHEQITRDLKDYKATGPHVAVAKRLAARGVKIRPGTVISYIVLKGSGRIGDRAIPFDEFDPTKHKYDAEYYIENQVLPAVERILRAFGYRKEDLRYQKTRQVGLSAWLKPKGT

SEQ ID NO: 813 - protein, 774 aa, synthetic construct
MILDTDYITEDGKPVFRIFKKENGEFKIEYDRTFEHYFYALLKDDSAIEEVKKITAERHGTVVTVKRVEKVQKKFLGRPVEVWKLYFTHPQDIPAIHDKIREHPAVIDIYEYDIPFAKRYLIDKGLVPMEGDEELKMLAFDIETLYHEGEEFAEGPILMISYADEEGARVITWKNVDLPYVDVVSTEREMIKRFLRVVKEKDPDVLITYNGDNFDFAYLKKRCEKLGINFALGRDGSEPKIQRMGDRFAVEVKGRIHFDLYPVIRRTINLPTYTLEAVYEAVFGQPKEKVYAEEITTAWETGENLERVARYSMEDAKVTYELGKEFLPMEAQLSRLIGQSLWDVSRSSTGNLVEWFLLRKAYERNELAPNKPDEKELARRRQSYEGGYVKEPERGLWENIVYLDFRSLYPSIIITHNVSPDTLNREGCKEYDVAPQVGHRFCKDFPGFIPSLLGDLLEERQKIKKKMKATIDPIERKLLDYRQRAIKILANSYYGYYGYARARWYCKECAESVTAWGREYITMTIKEIEEKYGFKVIYSDTDGFFATIPGADAETVKKKAMEFLKYINAKLPGALELEYEGFYKRGFFVTKKKYAVIDEEGKITTRGLEIVRRDWSEIAKETQARVLEALLKDGDVEKAVRIVKEVTEKLSKYEVPPEKLVIHEQITRDLKDYKATGPHVAVAKRLAARGVKIRPGTVISYIVLKGSGRIGDRAIPFDEFDPTKHKYDAEYYIENQVLPAVERILRAFGYRKEDLRYQKTRQVGLSAWLKPKGT

SEQ ID NO: 814 - protein, 774 aa, synthetic construct
MILDTDYITEDGKPVFRIFKKENGEFKIEYDRTFEHYFYALLKDDSAIEEVKKITAERHGTVVTVKRVEKVQKKFLGRPVEVWKLYFTHPQDQPAIRDKIREHPAVIDIYEYDIPFAKRYLIDKGLVPMEGDEELKMLAFDIETLYHEGEEFAEGPILMISYADEEGARVITWKNVDLPYVDVVSTEREMIKRFLRVVKEKDPDVLITYNGDNFDFAYLKKRCEKLGINFALGRDGSEPKIQRMGDRFAVEVKGRIHFDLYPVIRRTINLPTYTLEAVYEAVFGQPKEKVYAEEITTAWETGENLERVARYSMEDAKVTYELGKEFLPMEAQLSRLIGQSLWDVSRSSTGNLVEWFLLRKAYERNELAPNKPDEKELARRRQSYEGGYVKEPERGLWENIVYLDFRSLYPSIIITHNVSPDTLNREGCKEYDVAPQVGHRFCKDFPGFIPSLLGDLLEERQKIKKKMKATIDPIERKLLDYRQRAIKILANSYYGYYGYARARWYCKECAESVTAWGREYITMTIKEIEEKYGFKVIYSDTDGFFATIPGADAETVKKKAMEFLKYINAKLPGALELEYEGFYKRGFFVTKKKYAVIDEEGKITTRGLEIVRRDWSEIAKETQARVLEALLKDGDVEKAVRIVKEVTEKLSKYEVPPEKLVIHEQITRDLKDYKATGPHVAVAKRLAARGVKIRPGTVISYIVLKGSGRIGDRAIPFDEFDPTKHKYDAEYYIENQVLPAVERILRAFGYRKEDLRYQKTRQVGLSAWLKPKGT

SEQ ID NO: 815 - protein, 774 aa, synthetic construct
MILDTDYITEDGKPVFRIFKKENGEFKIEYDRTFERYFYALLKDDSAIEEVKKITAERHGTVVTVKRVEKVQKKFLGRPVEVWKLYFTHPQDVPAIRDKIREHPAVIDIYEYDIPFAKRYLIDKGLVPMEGDEELKMLAFDIETLYHEGEEFAEGPILMISYADEEGARVITWKNVDLPYVDVVSTEREMIKRFLRVVKEKDPDVLITYNGDNFDFAYLKKRCEKLGINFALGRDGSEPKIQRMGDRFAVEVKGRIHFDLYPVIRRTINLPTYTLEAVYEAVFGQPKEKVYAEEITTAWETGENLERVARYSMEDAKVTYELGKEFLPMEAQLSRLIGQSLWDVSRSSTGNLVEWFLLRKAYERNELAPNKPDEKELARRRQSYEGGYVKEPERGLWENIVYLDFRSLYPSIIITHNVSPDTLNREGCKEYDVAPQVGHRFCKDFPGFIPSLLGDLLEERQKIKKKMKATIDPIERKLLDYRQRAIKILANSYYGYYGYARARWYCKECAESVTAWGREYITMTIKEIEEKYGFKVIYSDTDGFFATIPGADAETVKKKAMEFLKYINAKLPGALELEYEGFYKRGFFVTKKKYAVIDEEGKITTRGLEIVRRDWSEIAKETQARVLEALLKDGDVEKAVRIVKEVTEKLSKYEVPPEKLVIHEQITRDLKDYKATGPHVAVAKRLAARGVKIRPGTVISYIVLKGSGRIGDRAIPFDEFDPTKHKYDAEYYIENQVLPAVERILRAFGYRKEDLRYQKTRQVGLSAWLKPKGT

SEQ ID NO: 816 - protein, 774 aa, synthetic construct
MILDTDYITEDGKPVFRIFKKENGEFKIEYDRTFERYFYALLKDDSAIEEVKKITAERHGTVVTVKRVEKVQKKFLGRPVEVWKLYFTHPQDVPAIADKIREHPAVIDIYEYDIPFAKRYLIDKGLVPMEGDEELKMLAFDIETLYHEGEEFAEGPILMISYADEEGARVITWKNVDLPYVDVVSTEREMIKRFLRVVKEKDPDVLITYNGDNFDFAYLKKRCEKLGINFALGRDGSEPKIQRMGDRFAVEVKGRIHFDLYPVIRRTINLPTYTLEAVYEAVFGQPKEKVYAEEITTAWETGENLERVARYSMEDAKVTYELGKEFLPMEAQLSRLIGQSLWDVSRSSTGNLVEWFLLRKAYERNELAPNKPDEKELARRRQSYEGGYVKEPERGLWENIVYLDFRSLYPSIIITHNVSPDTLNREGCKEYDVAPQVGHRFCKDFPGFIPSLLGDLLEERQKIKKKMKATIDPIERKLLDYRQRAIKILANSYYGYYGYARARWYCKECAESVTAWGREYITMTIKEIEEKYGFKVIYSDTDGFFATIPGADAETVKKKAMEFLKYINAKLPGALELEYEGFYKRGFFVTKKKYAVIDEEGKITTRGLEIVRRDWSEIAKETQARVLEALLKDGDVEKAVRIVKEVTEKLSKYEVPPEKLVIHEQITRDLKDYKATGPHVAVAKRLAARGVKIRPGTVISYIVLKGSGRIGDRAIPFDEFDPTKHKYDAEYYIENQVLPAVERILRAFGYRKEDLRYQKTRQVGLSAWLKPKGT

SEQ ID NO: 817 - protein, 774 aa, synthetic construct
MILDTDYITEDGKPVFRIFKKENGEFKIEYDRTFERYFYALLKDDSAIEEVKKITAERHGTVVTVKRVEKVQKKFLGRPVEVWKLYFTHPQDVPAIFDKIREHPAVIDIYEYDIPFAKRYLIDKGLVPMEGDEELKMLAFDIETLYHEGEEFAEGPILMISYADEEGARVITWKNVDLPYVDVVSTEREMIKRFLRVVKEKDPDVLITYNGDNFDFAYLKKRCEKLGINFALGRDGSEPKIQRMGDRFAVEVKGRIHFDLYPVIRRTINLPTYTLEAVYEAVFGQPKEKVYAEEITTAWETGENLERVARYSMEDAKVTYELGKEFLPMEAQLSRLIGQSLWDVSRSSTGNLVEWFLLRKAYERNELAPNKPDEKELARRRQSYEGGYVKEPERGLWENIVYLDFRSLYPSIIITHNVSPDTLNREGCKEYDVAPQVGHRFCKDFPGFIPSLLGDLLEERQKIKKKMKATIDPIERKLLDYRQRAIKILANSYYGYYGYARARWYCKECAESVTAWGREYITMTIKEIEEKYGFKVIYSDTDGFFATIPGADAETVKKKAMEFLKYINAKLPGALELEYEGFYKRGFFVTKKKYAVIDEEGKITTRGLEIVRRDWSEIAKETQARVLEALLKDGDVEKAVRIVKEVTEKLSKYEVPPEKLVIHEQITRDLKDYKATGPHVAVAKRLAARGVKIRPGTVISYIVLKGSGRIGDRAIPFDEFDPTKHKYDAEYYIENQVLPAVERILRAFGYRKEDLRYQKTRQVGLSAWLKPKGT

SEQ ID NO: 818 - protein, 774 aa, synthetic construct
MILDTDYITEDGKPVFRIFKKENGEFKIEYDRTFERYFYALLKDDSAIEEVKKITAERHGTVVTVKRVEKVQKKFLGRPVEVWKLYFTHPQDVPAIHDKIREHPAVIDIYEYDIPFAKRYLIDKGLVPMEGDEELKMLAFDIETLYHEGEEFAEGPILMISYADEEGARVITWKNVDLPYVDVVSTEREMIKRFLRVVKEKDPDVLITYNGDNFDFAYLKKRCEKLGINFALGRDGSEPKIQRMGDRFAVEVKGRIHFDLYPVIRRTINLPTYTLEAVYEAVFGQPKEKVYAEEITTAWETGENLERVARYSMEDAKVTYELGKEFLPMEAQLSRLIGQSLWDVSRSSTGNLVEWFLLRKAYERNELAPNKPDEKELARRRQSYEGGYVKEPERGLWENIVYLDFRSLYPSIIITHNVSPDTLNREGCKEYDVAPQVGHRFCKDFPGFIPSLLGDLLEERQKIKKKMKATIDPIERKLLDYRQRAIKILANSYYGYYGYARARWYCKECAESVTAWGREYITMTIKEIEEKYGFKVIYSDTDGFFATIPGADAETVKKKAMEFLKYINAKLPGALELEYEGFYKRGFFVTKKKYAVIDEEGKITTRGLEIVRRDWSEIAKETQARVLEALLKDGDVEKAVRIVKEVTEKLSKYEVPPEKLVIHEQITRDLKDYKATGPHVAVAKRLAARGVKIRPGTVISYIVLKGSGRIGDRAIPFDEFDPTKHKYDAEYYIENQVLPAVERILRAFGYRKEDLRYQKTRQVGLSAWLKPKGT

SEQ ID NO: 819 - protein, 774 aa, synthetic construct
MILDTDYITEDGKPVFRIFKKENGEFKIEYDRTFESYFYALLKDDSAIEEVKKITAERHGTVVTVKRVEKVQKKFLGRPVEVWKLYFTHPQDVPAIRDKIREHPAVIDIYEYDIPFAKRYLIDKGLVPMEGDEELKMLAFDIETLYHEGEEFAEGPILMISYADEEGARVITWKNVDLPYVDVVSTEREMIKRFLRVVKEKDPDVLITYNGDNFDFAYLKKRCEKLGINFALGRDGSEPKIQRMGDRFAVEVKGRIHFDLYPVIRRTINLPTYTLEAVYEAVFGQPKEKVYAEEITTAWETGENLERVARYSMEDAKVTYELGKEFLPMEAQLSRLIGQSLWDVSRSSTGNLVEWFLLRKAYERNELAPNKPDEKELARRRQSYEGGYVKEPERGLWENIVYLDFRSLYPSIIITHNVSPDTLNREGCKEYDVAPQVGHRFCKDFPGFIPSLLGDLLEERQKIKKKMKATIDPIERKLLDYRQRAIKILANSYYGYYGYARARWYCKECAESVTAWGREYITMTIKEIEEKYGFKVIYSDTDGFFATIPGADAETVKKKAMEFLKYINAKLPGALELEYEGFYKRGFFVTKKKYAVIDEEGKITTRGLEIVRRDWSEIAKETQARVLEALLKDGDVEKAVRIVKEVTEKLSKYEVPPEKLVIHEQITRDLKDYKATGPHVAVAKRLAARGVKIRPGTVISYIVLKGSGRIGDRAIPFDEFDPTKHKYDAEYYIENQVLPAVERILRAFGYRKEDLRYQKTRQVGLSAWLKPKGT

SEQ ID NO: 820 - protein, 774 aa, synthetic construct
MILDTDYITEDGKPVFRIFKKENGEFKIEYDRTFESYFYALLKDDSAIEEVKKITAERHGTVVTVKRVEKVQKKFLGRPVEVWKLYFTHFQDVPAIADKIREHPAVIDIYEYDIPFAKRYLIDKGLVPMEGDEELKMLAFDIETLYHEGEEFAEGPILMISYADEEGARVITWKNVDLPYVDVVSTEREMIKRFLRVVKEKDPDVLITYNGDNFDFAYLKKRCEKLGINFALGRDGSEPKIQRMGDRFAVEVKGRIHFDLYPVIRRTINLPTYTLEAVYEAVFGQPKEKVYAEEITTAWETGENLERVARYSMEDAKVTYELGKEFLPMEAQLSRLIGQSLWDVSRSSTGNLVEWFLLRKAYERNELAPNKPDEKELARRRQSYEGGYVKEPERGLWENIVYLDFRSLYPSIIITHNVSPDTLNREGCKEYDVAPQVGHRFCKDFPGFIPSLLGDLLEERQKIKKKMKATIDPIERKLLDYRQRAIKILANSYYGYYGYARARWYCKECAESVTAWGREYITMTIKEIEEKYGFKVIYSDTDGFFATIPGADAETVKKKAMEFLKYINAKLPGALELEYEGFYKRGFFVTKKKYAVIDEEGKITTRGLEIVRRDWSEIAKETQARVLEALLKDGDVEKAVRIVKEVTEKLSKYEVPPEKLVIHEQITRDLKDYKATGPHVAVAKRLAARGVKIRPGTVISYIVLKGSGRIGDRAIPFDEFDPTKHKYDAEYYIENQVLPAVERILRAFGYRKEDLRYQKTRQVGLSAWLKPKGT

SEQ ID NO: 821 - protein, 774 aa, synthetic construct
MILDTDYITEDGKPVFRIFKKENGEFKIEYDRTFESYFYALLKDDSAIEEVKKITAERHGTVVTVKRVEKVQKKFLGRPVEVWKLYFTHFQDIPAIRDKIREHPAVIDIYEYDIPFAKRYLIDKGLVPMEGDEELKMLAFDIETLYHEGEEFAEGPILMISYADEEGARVITWKNVDLPYVDVVSTEREMIKRFLRVVKEKDPDVLITYNGDNFDFAYLKKRCEKLGINFALGRDGSEPKIQRMGDRFAVEVKGRIHFDLYPVIRRTINLPTYTLEAVYEAVFGQPKEKVYAEEITTAWETGENLERVARYSMEDAKVTYELGKEFLPMEAQLSRLIGQSLWDVSRSSTGNLVEWFLLRKAYERNELAPNKPDEKELARRRQSYEGGYVKEPERGLWENIVYLDFRSLYPSIIITHNVSPDTLNREGCKEYDVAPQVGHRFCKDFPGFIPSLLGDLLEERQKIKKKMKATIDPIERKLLDYRQRAIKILANSYYGYYGYARARWYCKECAESVTAWGREYITMTIKEIEEKYGFKVIYSDTDGFFATIPGADAETVKKKAMEFLKYINAKLPGALELEYEGFYKRGFFVTKKKYAVIDEEGKITTRGLEIVRRDWSEIAKETQARVLEALLKDGDVEKAVRIVKEVTEKLSKYEVPPEKLVIHEQITRDLKDYKATGPHVAVAKRLAARGVKIRPGTVISYIVLKGSGRIGDRAIPFDEFDPTKHKYDAEYYIENQVLPAVERILRAFGYRKEDLRYQKTRQVGLSAWLKPKGT

SEQ ID NO: 822 - protein, 774 aa, synthetic construct
MILDTDYITEDGKPVFRIFKKENGEFKIEYDRTFESYFYALLKDDSAIEEVKKITAERHGTVVTVKRVEKVQKKFLGRPVEVWKLYFTHFQDIPAIADKIREHPAVIDIYEYDIPFAKRYLIDKGLVPMEGDEELKMLAFDIETLYHEGEEFAEGPILMISYADEEGARVITWKNVDLPYVDVVSTEREMIKRFLRVVKEKDPDVLITYNGDNFDFAYLKKRCEKLGINFALGRDGSEPKIQRMGDRFAVEVKGRIHFDLYPVIRRTINLPTYTLEAVYEAVFGQPKEKVYAEEITTAWETGENLERVARYSMEDAKVTYELGKEFLPMEAQLSRLIGQSLWDVSRSSTGNLVEWFLLRKAYERNELAPNKPDEKELARRRQSYEGGYVKEPERGLWENIVYLDFRSLYPSIIITHNVSPDTLNREGCKEYDVAPQVGHRFCKDFPGFIPSLLGDLLEERQKIKKKMKATIDPIERKLLDYRQRAIKILANSYYGYYGYARARWYCKECAESVTAWGREYITMTIKEIEEKYGFKVIYSDTDGFFATIPGADAETVKKKAMEFLKYINAKLPGALELEYEGFYKRGFFVTKKKYAVIDEEGKITTRGLEIVRRDWSEIAKETQARVLEALLKDGDVEKAVRIVKEVTEKLSKYEVPPEKLVIHEQITRDLKDYKATGPHVAVAKRLAARGVKIRPGTVISYIVLKGSGRIGDRAIPFDEFDPTKHKYDAEYYIENQVLPAVERILRAFGYRKEDLRYQKTRQVGLSAWLKPKGT

SEQ ID NO: 823 - protein, 774 aa, synthetic construct
MILDTDYITEDGKPVFRIFKKENGEFKIEYDRTFESYFYALLKDDSAIEEVKKITAERHGTVVTVKRVEKVQKKFLGRPVEVWKLYFTHIQDIPAIRDKIREHPAVIDIYEYDIPFAKRYLIDKGLVPMEGDEELKMLAFDIETLYHEGEEFAEGPILMISYADEEGARVITWKNVDLPYVDVVSTEREMIKRFLRVVKEKDPDVLITYNGDNFDFAYLKKRCEKLGINFALGRDGSEPKIQRMGDRFAVEVKGRIHFDLYPVIRRTINLPTYTLEAVYEAVFGQPKEKVYAEEITTAWETGENLERVARYSMEDAKVTYELGKEFLPMEAQLSRLIGQSLWDVSRSSTGNLVEWFLLRKAYERNELAPNKPDEKELARRRQSYEGGYVKEPERGLWENIVYLDFRSLYPSIIITHNVSPDTLNREGCKEYDVAPQVGHRFCKDFPGFIPSLLGDLLEERQKIKKKMKATIDPIERKLLDYRQRAIKILANSYYGYYGYARARWYCKECAESVTAWGREYITMTIKEIEEKYGFKVIYSDTDGFFATIPGADAETVKKKAMEFLKYINAKLPGALELEYEGFYKRGFFVTKKKYAVIDEEGKITTRGLEIVRRDWSEIAKETQARVLEALLKDGDVEKAVRIVKEVTEKLSKYEVPPEKLVIHEQITRDLKDYKATGPHVAVAKRLAARGVKIRPGTVISYIVLKGSGRIGDRAIPFDEFDPTKHKYDAEYYIENQVLPAVERILRAFGYRKEDLRYQKTRQVGLSAWLKPKGT

SEQ ID NO: 824 - protein, 774 aa, synthetic construct
MILDTDYITEDGKPVFRIFKKENGEFKIEYDRTFESYFYALLKDDSAIEEVKKITAERHGTVVTVKRVEKVQKKFLGRPVEVWKLYFTHIQDIPAIFDKIREHPAVIDIYEYDIPFAKRYLIDKGLVPMEGDEELKMLAFDIETLYHEGEEFAEGPILMISYADEEGARVITWKNVDLPYVDVVSTEREMIKRFLRVVKEKDPDVLITYNGDNFDFAYLKKRCEKLGINFALGRDGSEPKIQRMGDRFAVEVKGRIHFDLYPVIRRTINLPTYTLEAVYEAVFGQPKEKVYAEEITTAWETGENLERVARYSMEDAKVTYELGKEFLPMEAQLSRLIGQSLWDVSRSSTGNLVEWFLLRKAYERNELAPNKPDEKELARRRQSYEGGYVKEPERGLWENIVYLDFRSLYPSIIITHNVSPDTLNREGCKEYDVAPQVGHRFCKDFPGFIPSLLGDLLEERQKIKKKMKATIDPIERKLLDYRQRAIKILANSYYGYYGYARARWYCKECAESVTAWGREYITMTIKEIEEKYGFKVIYSDTDGFFATIPGADAETVKKKAMEFLKYINAKLPGALELEYEGFYKRGFFVTKKKYAVIDEEGKITTRGLEIVRRDWSEIAKETQARVLEALLKDGDVEKAVRIVKEVTEKLSKYEVPPEKLVIHEQITRDLKDYKATGPHVAVAKRLAARGVKIRPGTVISYIVLKGSGRIGDRAIPFDEFDPTKHKYDAEYYIENQVLPAVERILRAFGYRKEDLRYQKTRQVGLSAWLKPKGT

SEQ ID NO: 825 - protein, 774 aa, synthetic construct
MILDTDYITEDGKPVFRIFKKENGEFKIEYDRTFESYFYALLKDDSAIEEVKKITAERHGTVVTVKRVEKVQKKFLGRPVEVWKLYFTHWQDVPAIADKIREHPAVIDIYEYDIPFAKRYLIDKGLVPMEGDEELKMLAFDIETLYHEGEEFAEGPILMISYADEEGARVITWKNVDLPYVDVVSTEREMIKRFLRVVKEKDPDVLITYNGDNFDFAYLKKRCEKLGINFALGRDGSEPKIQRMGDRFAVEVKGRIHFDLYPVIRRTINLPTYTLEAVYEAVFGQPKEKVYAEEITTAWETGENLERVARYSMEDAKVTYELGKEFLPMEAQLSRLIGQSLWDVSRSSTGNLVEWFLLRKAYERNELAPNKPDEKELARRRQSYEGGYVKEPERGLWENIVYLDFRSLYPSIIITHNVSPDTLNREGCKEYDVAPQVGHRFCKDFPGFIPSLLGDLLEERQKIKKKMKATIDPIERKLLDYRQRAIKILANSYYGYYGYARARWYCKECAESVTAWGREYITMTIKEIEEKYGFKVIYSDTDGFFATIPGADAETVKKKAMEFLKYINAKLPGALELEYEGFYKRGFFVTKKKYAVIDEEGKITTRGLEIVRRDWSEIAKETQARVLEALLKDGDVEKAVRIVKEVTEKLSKYEVPPEKLVIHEQITRDLKDYKATGPHVAVAKRLAARGVKIRPGTVISYIVLKGSGRIGDRAIPFDEFDPTKHKYDAEYYIENQVLPAVERILRAFGYRKEDLRYQKTRQVGLSAWLKPKGT

SEQ ID NO: 826 - protein, 774 aa, synthetic construct
MILDTDYITEDGKPVFRIFKKENGEFKIEYDRTFESYFYALLKDDSAIEEVKKITAERHGTVVTVKRVEKVQKKFLGRPVEVWKLYFTHYQDVPAIRDKIREHPAVIDIYEYDIPFAKRYLIDKGLVPMEGDEELKMLAFDIETLYHEGEEFAEGPILMISYADEEGARVITWKNVDLPYVDVVSTEREMIKRFLRVVKEKDPDVLITYNGDNFDFAYLKKRCEKLGINFALGRDGSEPKIQRMGDRFAVEVKGRIHFDLYPVIRRTINLPTYTLEAVYEAVFGQPKEKVYAEEITTAWETGENLERVARYSMEDAKVTYELGKEFLPMEAQLSRLIGQSLWDVSRSSTGNLVEWFLLRKAYERNELAPNKPDEKELARRRQSYEGGYVKEPERGLWENIVYLDFRSLYPSIIITHNVSPDTLNREGCKEYDVAPQVGHRFCKDFPGFIPSLLGDLLEERQKIKKKMKATIDPIERKLLDYRQRAIKILANSYYGYYGYARARWYCKECAESVTAWGREYITMTIKEIEEKYGFKVIYSDTDGFFATIPGADAETVKKKAMEFLKYINAKLPGALELEYEGFYKRGFFVTKKKYAVIDEEGKITTRGLEIVRRDWSEIAKETQARVLEALLKDGDVEKAVRIVKEVTEKLSKYEVPPEKLVIHEQITRDLKDYKATGPHVAVAKRLAARGVKIRPGTVISYIVLKGSGRIGDRAIPFDEFDPTKHKYDAEYYIENQVLPAVERILRAFGYRKEDLRYQKTRQVGLSAWLKPKGT

SEQ ID NO: 827 - protein, 774 aa, synthetic construct
MILDTDYITEDGKPVFRIFKKENGEFKIEYDRTFESYFYALLKDDSAIEEVKKITAERHGTVVTVKRVEKVQKKFLGRPVEVWKLYFTHPQDVPAIADKIREHPAVIDIYEYDIPFAKRYLIDKGLVPMEGDEELKMLAFDIETLYHEGEEFAEGPILMISYADEEGARVITWKNVDLPYVDVVSTEREMIKRFLRVVKEKDPDVLITYNGDNFDFAYLKKRCEKLGINFALGRDGSEPKIQRMGDRFAVEVKGRIHFDLYPVIRRTINLPTYTLEAVYEAVFGQPKEKVYAEEITTAWETGENLERVARYSMEDAKVTYELGKEFLPMEAQLSRLIGQSLWDVSRSSTGNLVEWFLLRKAYERNELAPNKPDEKELARRRQSYEGGYVKEPERGLWENIVYLDFRSLYPSIIITHNVSPDTLNREGCKEYDVAPQVGHRFCKDFPGFIPSLLGDLLEERQKIKKKMKATIDPIERKLLDYRQRAIKILANSYYGYYGYARARWYCKECAESVTAWGREYITMTIKEIEEKYGFKVIYSDTDGFFATIPGADAETVKKKAMEFLKYINAKLPGALELEYEGFYKRGFFVTKKKYAVIDEEGKITTRGLEIVRRDWSEIAKETQARVLEALLKDGDVEKAVRIVKEVTEKLSKYEVPPEKLVIHEQITRDLKDYKATGPHVAVAKRLAARGVKIRPGTVISYIVLKGSGRIGDRAIPFDEFDPTKHKYDAEYYIENQVLPAVERILRAFGYRKEDLRYQKTRQVGLSAWLKPKGT

SEQ ID NO: 828 - protein, 774 aa, synthetic construct
MILDTDYITEDGKPVFRIFKKENGEFKIEYDRTFESYFYALLKDDSAIEEVKKITAERHGTVVTVKRVEKVQKKFLGRPVEVWKLYFTHPQDVPAIFDKIREHPAVIDIYEYDIPFAKRYLIDKGLVPMEGDEELKMLAFDIETLYHEGEEFAEGPILMISYADEEGARVITWKNVDLPYVDVVSTEREMIKRFLRVVKEKDPDVLITYNGDNFDFAYLKKRCEKLGINFALGRDGSEPKIQRMGDRFAVEVKGRIHFDLYPVIRRTINLPTYTLEAVYEAVFGQPKEKVYAEEITTAWETGENLERVARYSMEDAKVTYELGKEFLPMEAQLSRLIGQSLWDVSRSSTGNLVEWFLLRKAYERNELAPNKPDEKELARRRQSYEGGYVKEPERGLWENIVYLDFRSLYPSIIITHNVSPDTLNREGCKEYDVAPQVGHRFCKDFPGFIPSLLGDLLEERQKIKKKMKATIDPIERKLLDYRQRAIKILANSYYGYYGYARARWYCKECAESVTAWGREYITMTIKEIEEKYGFKVIYSDTDGFFATIPGADAETVKKKAMEFLKYINAKLPGALELEYEGFYKRGFFVTKKKYAVIDEEGKITTRGLEIVRRDWSEIAKETQARVLEALLKDGDVEKAVRIVKEVTEKLSKYEVPPEKLVIHEQITRDLKDYKATGPHVAVAKRLAARGVKIRPGTVISYIVLKGSGRIGDRAIPFDEFDPTKHKYDAEYYIENQVLPAVERILRAFGYRKEDLRYQKTRQVGLSAWLKPKGT

SEQ ID NO: 829 - protein, 774 aa, synthetic construct
MILDTDYITEDGKPVFRIFKKENGEFKIEYDRTFESYFYALLKDDSAIEEVKKITAERHGTVVTVKRVEKVQKKFLGRPVEVWKLYFTHPQDVPAIHDKIREHPAVIDIYEYDIPFAKRYLIDKGLVPMEGDEELKMLAFDIETLYHEGEEFAEGPILMISYADEEGARVITWKNVDLPYVDVVSTEREMIKRFLRVVKEKDPDVLITYNGDNFDFAYLKKRCEKLGINFALGRDGSEPKIQRMGDRFAVEVKGRIHFDLYPVIRRTINLPTYTLEAVYEAVFGQPKEKVYAEEITTAWETGENLERVARYSMEDAKVTYELGKEFLPMEAQLSRLIGQSLWDVSRSSTGNLVEWFLLRKAYERNELAPNKPDEKELARRRQSYEGGYVKEPERGLWENIVYLDFRSLYPSIIITHNVSPDTLNREGCKEYDVAPQVGHRFCKDFPGFIPSLLGDLLEERQKIKKKMKATIDPIERKLLDYRQRAIKILANSYYGYYGYARARWYCKECAESVTAWGREYITMTIKEIEEKYGFKVIYSDTDGFFATIPGADAETVKKKAMEFLKYINAKLPGALELEYEGFYKRGFFVTKKKYAVIDEEGKITTRGLEIVRRDWSEIAKETQARVLEALLKDGDVEKAVRIVKEVTEKLSKYEVPPEKLVIHEQITRDLKDYKATGPHVAVAKRLAARGVKIRPGTVISYIVLKGSGRIGDRAIPFDEFDPTKHKYDAEYYIENQVLPAVERILRAFGYRKEDLRYQKTRQVGLSAWLKPKGT

SEQ ID NO: 830 - protein, 774 aa, synthetic construct
MILDTDYITEDGKPVFRIFKKENGEFKIEYDRTFESYFYALLKDDSAIEEVKKITAERHGTVVTVKRVEKVQKKFLGRPVEVWKLYFTHPQDIPAIRDKIREHPAVIDIYEYDIPFAKRYLIDKGLVPMEGDEELKMLAFDIETLYHEGEEFAEGPILMISYADEEGARVITWKNVDLPYVDVVSTEREMIKRFLRVVKEKDPDVLITYNGDNFDFAYLKKRCEKLGINFALGRDGSEPKIQRMGDRFAVEVKGRIHFDLYPVIRRTINLPTYTLEAVYEAVFGQPKEKVYAEEITTAWETGENLERVARYSMEDAKVTYELGKEFLPMEAQLSRLIGQSLWDVSRSSTGNLVEWFLLRKAYERNELAPNKPDEKELARRRQSYEGGYVKEPERGLWENIVYLDFRSLYPSIIITHNVSPDTLNREGCKEYDVAPQVGHRFCKDFPGFIPSLLGDLLEERQKIKKKMKATIDPIERKLLDYRQRAIKILANSYYGYYGYARARWYCKECAESVTAWGREYITMTIKEIEEKYGFKVIYSDTDGFFATIPGADAETVKKKAMEFLKYINAKLPGALELEYEGFYKRGFFVTKKKYAVIDEEGKITTRGLEIVRRDWSEIAKETQARVLEALLKDGDVEKAVRIVKEVTEKLSKYEVPPEKLVIHEQITRDLKDYKATGPHVAVAKRLAARGVKIRPGTVISYIVLKGSGRIGDRAIPFDEFDPTKHKYDAEYYIENQVLPAVERILRAFGYRKEDLRYQKTRQVGLSAWLKPKGT

SEQ ID NO: 831 - protein, 774 aa, synthetic construct
MILDTDYITEDGKPVFRIFKKENGEFKIEYDRTFESYFYALLKDDSAIEEVKKITAERHGTVVTVKRVEKVQKKFLGRPVEVWKLYFTHPQDIPAIFDKIREHPAVIDIYEYDIPFAKRYLIDKGLVPMEGDEELKMLAFDIETLYHEGEEFAEGPILMISYADEEGARVITWKNVDLPYVDVVSTEREMIKRFLRVVKEKDPDVLITYNGDNFDFAYLKKRCEKLGINFALGRDGSEPKIQRMGDRFAVEVKGRIHFDLYPVIRRTINLPTYTLEAVYEAVFGQPKEKVYAEEITTAWETGENLERVARYSMEDAKVTYELGKEFLPMEAQLSRLIGQSLWDVSRSSTGNLVEWFLLRKAYERNELAPNKPDEKELARRRQSYEGGYVKEPERGLWENIVYLDFRSLYPSIIITHNVSPDTLNREGCKEYDVAPQVGHRFCKDFPGFIPSLLGDLLEERQKIKKKMKATIDPIERKLLDYRQRAIKILANSYYGYYGYARARWYCKECAESVTAWGREYITMTIKEIEEKYGFKVIYSDTDGFFATIPGADAETVKKKAMEFLKYINAKLPGALELEYEGFYKRGFFVTKKKYAVIDEEGKITTRGLEIVRRDWSEIAKETQARVLEALLKDGDVEKAVRIVKEVTEKLSKYEVPPEKLVIHEQITRDLKDYKATGPHVAVAKRLAARGVKIRPGTVISYIVLKGSGRIGDRAIPFDEFDPTKHKYDAEYYIENQVLPAVERILRAFGYRKEDLRYQKTRQVGLSAWLKPKGT

SEQ ID NO: 832 - protein, 774 aa, synthetic construct
MILDTDYITEDGKPVFRIFKKENGEFKIEYDRTFESYFYALLKDDSAIEEVKKITAERHGTVVTVKRVEKVQKKFLGRPVEVWKLYFTHPQDIPAIWDKIREHPAVIDIYEYDIPFAKRYLIDKGLVPMEGDEELKMLAFDIETLYHEGEEFAEGPILMISYADEEGARVITWKNVDLPYVDVVSTEREMIKRFLRVVKEKDPDVLITYNGDNFDFAYLKKRCEKLGINFALGRDGSEPKIQRMGDRFAVEVKGRIHFDLYPVIRRTINLPTYTLEAVYEAVFGQPKEKVYAEEITTAWETGENLERVARYSMEDAKVTYELGKEFLPMEAQLSRLIGQSLWDVSRSSTGNLVEWFLLRKAYERNELAPNKPDEKELARRRQSYEGGYVKEPERGLWENIVYLDFRSLYPSIIITHNVSPDTLNREGCKEYDVAPQVGHRFCKDFPGFIPSLLGDLLEERQKIKKKMKATIDPIERKLLDYRQRAIKILANSYYGYYGYARARWYCKECAESVTAWGREYITMTIKEIEEKYGFKVIYSDTDGFFATIPGADAETVKKKAMEFLKYINAKLPGALELEYEGFYKRGFFVTKKKYAVIDEEGKITTRGLEIVRRDWSEIAKETQARVLEALLKDGDVEKAVRIVKEVTEKLSKYEVPPEKLVIHEQITRDLKDYKATGPHVAVAKRLAARGVKIRPGTVISYIVLKGSGRIGDRAIPFDEFDPTKHKYDAEYYIENQVLPAVERILRAFGYRKEDLRYQKTRQVGLSAWLKPKGT

SEQ ID NO: 833 - protein, 774 aa, synthetic construct
MILDTDYITEDGKPVFRIFKKENGEFKIEYDRTFESYFYALLKDDSAIEEVKKITAERHGTVVTVKRVEKVQKKFLGRPVEVWKLYFTHPQDQPAIRDKIREHPAVIDIYEYDIPFAKRYLIDKGLVPMEGDEELKMLAFDIETLYHEGEEFAEGPILMISYADEEGARVITWKNVDLPYVDVVSTEREMIKRFLRVVKEKDPDVLITYNGDNFDFAYLKKRCEKLGINFALGRDGSEPKIQRMGDRFAVEVKGRIHFDLYPVIRRTINLPTYTLEAVYEAVFGQPKEKVYAEEITTAWETGENLERVARYSMEDAKVTYELGKEFLPMEAQLSRLIGQSLWDVSRSSTGNLVEWFLLRKAYERNELAPNKPDEKELARRRQSYEGGYVKEPERGLWENIVYLDFRSLYPSIIITHNVSPDTLNREGCKEYDVAPQVGHRFCKDFPGFIPSLLGDLLEERQKIKKKMKATIDPIERKLLDYRQRAIKILANSYYGYYGYARARWYCKECAESVTAWGREYITMTIKEIEEKYGFKVIYSDTDGFFATIPGADAETVKKKAMEFLKYINAKLPGALELEYEGFYKRGFFVTKKKYAVIDEEGKITTRGLEIVRRDWSEIAKETQARVLEALLKDGDVEKAVRIVKEVTEKLSKYEVPPEKLVIHEQITRDLKDYKATGPHVAVAKRLAARGVKIRPGTVISYIVLKGSGRIGDRAIPFDEFDPTKHKYDAEYYIENQVLPAVERILRAFGYRKEDLRYQKTRQVGLSAWLKPKGT

SEQ ID NO: 834 - protein, 774 aa, synthetic construct
MILDTDYITEDGKPVFRIFKKENGEFKIEYDRTFESYFYALLKDDSAIEEVKKITAERHGTVVTVKRVEKVQKKFLGRPVEVWKLYFTHPQDRPAIFDKIREHPAVIDIYEYDIPFAKRYLIDKGLVPMEGDEELKMLAFDIETLYHEGEEFAEGPILMISYADEEGARVITWKNVDLPYVDVVSTEREMIKRFLRVVKEKDPDVLITYNGDNFDFAYLKKRCEKLGINFALGRDGSEPKIQRMGDRFAVEVKGRIHFDLYPVIRRTINLPTYTLEAVYEAVFGQPKEKVYAEEITTAWETGENLERVARYSMEDAKVTYELGKEFLPMEAQLSRLIGQSLWDVSRSSTGNLVEWFLLRKAYERNELAPNKPDEKELARRRQSYEGGYVKEPERGLWENIVYLDFRSLYPSIIITHNVSPDTLNREGCKEYDVAPQVGHRFCKDFPGFIPSLLGDLLEERQKIKKKMKATIDPIERKLLDYRQRAIKILANSYYGYYGYARARWYCKECAESVTAWGREYITMTIKEIEEKYGFKVIYSDTDGFFATIPGADAETVKKKAMEFLKYINAKLPGALELEYEGFYKRGFFVTKKKYAVIDEEGKITTRGLEIVRRDWSEIAKETQARVLEALLKDGDVEKAVRIVKEVTEKLSKYEVPPEKLVIHEQITRDLKDYKATGPHVAVAKRLAARGVKIRPGTVISYIVLKGSGRIGDRAIPFDEFDPTKHKYDAEYYIENQVLPAVERILRAFGYRKEDLRYQKTRQVGLSAWLKPKGT

SEQ ID NO: 835 - protein, 774 aa, synthetic construct
MILDTDYITEDGKPVFRIFKKENGEFKIEYDRTFESYFYALLKDDSAIEEVKKITAERHGTVVTVKRVEKVQKKFLGRPVEVWKLYFTHPQDRPAIHDKIREHPAVIDIYEYDIPFAKRYLIDKGLVPMEGDEELKMLAFDIETLYHEGEEFAEGPILMISYADEEGARVITWKNVDLPYVDVVSTEREMIKRFLRVVKEKDPDVLITYNGDNFDFAYLKKRCEKLGINFALGRDGSEPKIQRMGDRFAVEVKGRIHFDLYPVIRRTINLPTYTLEAVYEAVFGQPKEKVYAEEITTAWETGENLERVARYSMEDAKVTYELGKEFLPMEAQLSRLIGQSLWDVSRSSTGNLVEWFLLRKAYERNELAPNKPDEKELARRRQSYEGGYVKEPERGLWENIVYLDFRSLYPSIIITHNVSPDTLNREGCKEYDVAPQVGHRFCKDFPGFIPSLLGDLLEERQKIKKKMKATIDPIERKLLDYRQRAIKILANSYYGYYGYARARWYCKECAESVTAWGREYITMTIKEIEEKYGFKVIYSDTDGFFATIPGADAETVKKKAMEFLKYINAKLPGALELEYEGFYKRGFFVTKKKYAVIDEEGKITTRGLEIVRRDWSEIAKETQARVLEALLKDGDVEKAVRIVKEVTEKLSKYEVPPEKLVIHEQITRDLKDYKATGPHVAVAKRLAARGVKIRPGTVISYIVLKGSGRIGDRAIPFDEFDPTKHKYDAEYYIENQVLPAVERILRAFGYRKEDLRYQKTRQVGLSAWLKPKGT

SEQ ID NO: 836 - protein, 774 aa, synthetic construct
MILDTDYITEDGKPVFRIFKKENGEFKIEYDRTFEWYFYALLKDDSAIEEVKKITAERHGTVVTVKRVEKVQKKFLGRPVEVWKLYFTHPQDVPAIRDKIREHPAVIDIYEYDIPFAKRYLIDKGLVPMEGDEELKMLAFDIETLYHEGEEFAEGPILMISYADEEGARVITWKNVDLPYVDVVSTEREMIKRFLRVVKEKDPDVLITYNGDNFDFAYLKKRCEKLGINFALGRDGSEPKIQRMGDRFAVEVKGRIHFDLYPVIRRTINLPTYTLEAVYEAVFGQPKEKVYAEEITTAWETGENLERVARYSMEDAKVTYELGKEFLPMEAQLSRLIGQSLWDVSRSSTGNLVEWFLLRKAYERNELAPNKPDEKELARRRQSYEGGYVKEPERGLWENIVYLDFRSLYPSIIITHNVSPDTLNREGCKEYDVAPQVGHRFCKDFPGFIPSLLGDLLEERQKIKKKMKATIDPIERKLLDYRQRAIKILANSYYGYYGYARARWYCKECAESVTAWGREYITMTIKEIEEKYGFKVIYSDTDGFFATIPGADAETVKKKAMEFLKYINAKLPGALELEYEGFYKRGFFVTKKKYAVIDEEGKITTRGLEIVRRDWSEIAKETQARVLEALLKDGDVEKAVRIVKEVTEKLSKYEVPPEKLVIHEQITRDLKDYKATGPHVAVAKRLAARGVKIRPGTVISYIVLKGSGRIGDRAIPFDEFDPTKHKYDAEYYIENQVLPAVERILRAFGYRKEDLRYQKTRQVGLSAWLKPKGT

SEQ ID NO: 837 - protein, 774 aa, synthetic construct
MILDTDYITEDGKPVFRIFKKENGEFKIEYDRTFEWYFYALLKDDSAIEEVKKITAERHGTVVTVKRVEKVQKKFLGRPVEVWKLYFTHFQDIPAIRDKIREHPAVIDIYEYDIPFAKRYLIDKGLVPMEGDEELKMLAFDIETLYHEGEEFAEGPILMISYADEEGARVITWKNVDLPYVDVVSTEREMIKRFLRVVKEKDPDVLITYNGDNFDFAYLKKRCEKLGINFALGRDGSEPKIQRMGDRFAVEVKGRIHFDLYPVIRRTINLPTYTLEAVYEAVFGQPKEKVYAEEITTAWETGENLERVARYSMEDAKVTYELGKEFLPMEAQLSRLIGQSLWDVSRSSTGNLVEWFLLRKAYERNELAPNKPDEKELARRRQSYEGGYVKEPERGLWENIVYLDFRSLYPSIIITHNVSPDTLNREGCKEYDVAPQVGHRFCKDFPGFIPSLLGDLLEERQKIKKKMKATIDPIERKLLDYRQRAIKILANSYYGYYGYARARWYCKECAESVTAWGREYITMTIKEIEEKYGFKVIYSDTDGFFATIPGADAETVKKKAMEFLKYINAKLPGALELEYEGFYKRGFFVTKKKYAVIDEEGKITTRGLEIVRRDWSEIAKETQARVLEALLKDGDVEKAVRIVKEVTEKLSKYEVPPEKLVIHEQITRDLKDYKATGPHVAVAKRLAARGVKIRPGTVISYIVLKGSGRIGDRAIPFDEFDPTKHKYDAEYYIENQVLPAVERILRAFGYRKEDLRYQKTRQVGLSAWLKPKGT

SEQ ID NO: 838 - protein, 774 aa, synthetic construct
MILDTDYITEDGKPVFRIFKKENGEFKIEYDRTFEWYFYALLKDDSAIEEVKKITAERHGTVVTVKRVEKVQKKFLGRPVEVWKLYFTHFQDIPAIADKIREHPAVIDIYEYDIPFAKRYLIDKGLVPMEGDEELKMLAFDIETLYHEGEEFAEGPILMISYADEEGARVITWKNVDLPYVDVVSTEREMIKRFLRVVKEKDPDVLITYNGDNFDFAYLKKRCEKLGINFALGRDGSEPKIQRMGDRFAVEVKGRIHFDLYPVIRRTINLPTYTLEAVYEAVFGQPKEKVYAEEITTAWETGENLERVARYSMEDAKVTYELGKEFLPMEAQLSRLIGQSLWDVSRSSTGNLVEWFLLRKAYERNELAPNKPDEKELARRRQSYEGGYVKEPERGLWENIVYLDFRSLYPSIIITHNVSPDTLNREGCKEYDVAPQVGHRFCKDFPGFIPSLLGDLLEERQKIKKKMKATIDPIERKLLDYRQRAIKILANSYYGYYGYARARWYCKECAESVTAWGREYITMTIKEIEEKYGFKVIYSDTDGFFATIPGADAETVKKKAMEFLKYINAKLPGALELEYEGFYKRGFFVTKKKYAVIDEEGKITTRGLEIVRRDWSEIAKETQARVLEALLKDGDVEKAVRIVKEVTEKLSKYEVPPEKLVIHEQITRDLKDYKATGPHVAVAKRLAARGVKIRPGTVISYIVLKGSGRIGDRAIPFDEFDPTKHKYDAEYYIENQVLPAVERILRAFGYRKEDLRYQKTRQVGLSAWLKPKGT

SEQ ID NO: 839 - protein, 774 aa, synthetic construct
MILDTDYITEDGKPVFRIFKKENGEFKIEYDRTFEWYFYALLKDDSAIEEVKKITAERHGTVVTVKRVEKVQKKFLGRPVEVWKLYFTHFQDIPAIFDKIREHPAVIDIYEYDIPFAKRYLIDKGLVPMEGDEELKMLAFDIETLYHEGEEFAEGPILMISYADEEGARVITWKNVDLPYVDVVSTEREMIKRFLRVVKEKDPDVLITYNGDNFDFAYLKKRCEKLGINFALGRDGSEPKIQRMGDRFAVEVKGRIHFDLYPVIRRTINLPTYTLEAVYEAVFGQPKEKVYAEEITTAWETGENLERVARYSMEDAKVTYELGKEFLPMEAQLSRLIGQSLWDVSRSSTGNLVEWFLLRKAYERNELAPNKPDEKELARRRQSYEGGYVKEPERGLWENIVYLDFRSLYPSIIITHNVSPDTLNREGCKEYDVAPQVGHRFCKDFPGFIPSLLGDLLEERQKIKKKMKATIDPIERKLLDYRQRAIKILANSYYGYYGYARARWYCKECAESVTAWGREYITMTIKEIEEKYGFKVIYSDTDGFFATIPGADAETVKKKAMEFLKYINAKLPGALELEYEGFYKRGFFVTKKKYAVIDEEGKITTRGLEIVRRDWSEIAKETQARVLEALLKDGDVEKAVRIVKEVTEKLSKYEVPPEKLVIHEQITRDLKDYKATGPHVAVAKRLAARGVKIRPGTVISYIVLKGSGRIGDRAIPFDEFDPTKHKYDAEYYIENQVLPAVERILRAFGYRKEDLRYQKTRQVGLSAWLKPKGT

SEQ ID NO: 840 - protein, 774 aa, synthetic construct
MILDTDYITEDGKPVFRIFKKENGEFKIEYDRTFEWYFYALLKDDSAIEEVKKITAERHGTVVTVKRVEKVQKKFLGRPVEVWKLYFTHFQDKPAIADKIREHPAVIDIYEYDIPFAKRYLIDKGLVPMEGDEELKMLAFDIETLYHEGEEFAEGPILMISYADEEGARVITWKNVDLPYVDVVSTEREMIKRFLRVVKEKDPDVLITYNGDNFDFAYLKKRCEKLGINFALGRDGSEPKIQRMGDRFAVEVKGRIHFDLYPVIRRTINLPTYTLEAVYEAVFGQPKEKVYAEEITTAWETGENLERVARYSMEDAKVTYELGKEFLPMEAQLSRLIGQSLWDVSRSSTGNLVEWFLLRKAYERNELAPNKPDEKELARRRQSYEGGYVKEPERGLWENIVYLDFRSLYPSIIITHNVSPDTLNREGCKEYDVAPQVGHRFCKDFPGFIPSLLGDLLEERQKIKKKMKATIDPIERKLLDYRQRAIKILANSYYGYYGYARARWYCKECAESVTAWGREYITMTIKEIEEKYGFKVIYSDTDGFFATIPGADAETVKKKAMEFLKYINAKLPGALELEYEGFYKRGFFVTKKKYAVIDEEGKITTRGLEIVRRDWSEIAKETQARVLEALLKDGDVEKAVRIVKEVTEKLSKYEVPPEKLVIHEQITRDLKDYKATGPHVAVAKRLAARGVKIRPGTVISYIVLKGSGRIGDRAIPFDEFDPTKHKYDAEYYIENQVLPAVERILRAFGYRKEDLRYQKTRQVGLSAWLKPKGT

SEQ ID NO: 841 - protein, 774 aa, synthetic construct
MILDTDYITEDGKPVFRIFKKENGEFKIEYDRTFEWYFYALLKDDSAIEEVKKITAERHGTVVTVKRVEKVQKKFLGRPVEVWKLYFTHFQDRPAIADKIREHPAVIDIYEYDIPFAKRYLIDKGLVPMEGDEELKMLAFDIETLYHEGEEFAEGPILMISYADEEGARVITWKNVDLPYVDVVSTEREMIKRFLRVVKEKDPDVLITYNGDNFDFAYLKKRCEKLGINFALGRDGSEPKIQRMGDRFAVEVKGRIHFDLYPVIRRTINLPTYTLEAVYEAVFGQPKEKVYAEEITTAWETGENLERVARYSMEDAKVTYELGKEFLPMEAQLSRLIGQSLWDVSRSSTGNLVEWFLLRKAYERNELAPNKPDEKELARRRQSYEGGYVKEPERGLWENIVYLDFRSLYPSIIITHNVSPDTLNREGCKEYDVAPQVGHRFCKDFPGFIPSLLGDLLEERQKIKKKMKATIDPIERKLLDYRQRAIKILANSYYGYYGYARARWYCKECAESVTAWGREYITMTIKEIEEKYGFKVIYSDTDGFFATIPGADAETVKKKAMEFLKYINAKLPGALELEYEGFYKRGFFVTKKKYAVIDEEGKITTRGLEIVRRDWSEIAKETQARVLEALLKDGDVEKAVRIVKEVTEKLSKYEVPPEKLVIHEQITRDLKDYKATGPHVAVAKRLAARGVKIRPGTVISYIVLKGSGRIGDRAIPFDEFDPTKHKYDAEYYIENQVLPAVERILRAFGYRKEDLRYQKTRQVGLSAWLKPKGT

SEQ ID NO: 842 - protein, 774 aa, synthetic construct
MILDTDYITEDGKPVFRIFKKENGEFKIEYDRTFEWYFYALLKDDSAIEEVKKITAERHGTVVTVKRVEKVQKKFLGRPVEVWKLYFTHIQDIPAIRDKIREHPAVIDIYEYDIPFAKRYLIDKGLVPMEGDEELKMLAFDIETLYHEGEEFAEGPILMISYADEEGARVITWKNVDLPYVDVVSTEREMIKRFLRVVKEKDPDVLITYNGDNFDFAYLKKRCEKLGINFALGRDGSEPKIQRMGDRFAVEVKGRIHFDLYPVIRRTINLPTYTLEAVYEAVFGQPKEKVYAEEITTAWETGENLERVARYSMEDAKVTYELGKEFLPMEAQLSRLIGQSLWDVSRSSTGNLVEWFLLRKAYERNELAPNKPDEKELARRRQSYEGGYVKEPERGLWENIVYLDFRSLYPSIIITHNVSPDTLNREGCKEYDVAPQVGHRFCKDFPGFIPSLLGDLLEERQKIKKKMKATIDPIERKLLDYRQRAIKILANSYYGYYGYARARWYCKECAESVTAWGREYITMTIKEIEEKYGFKVIYSDTDGFFATIPGADAETVKKKAMEFLKYINAKLPGALELEYEGFYKRGFFVTKKKYAVIDEEGKITTRGLEIVRRDWSEIAKETQARVLEALLKDGDVEKAVRIVKEVTEKLSKYEVPPEKLVIHEQITRDLKDYKATGPHVAVAKRLAARGVKIRPGTVISYIVLKGSGRIGDRAIPFDEFDPTKHKYDAEYYIENQVLPAVERILRAFGYRKEDLRYQKTRQVGLSAWLKPKGT

SEQ ID NO: 843 - protein, 774 aa, synthetic construct
MILDTDYITEDGKPVFRIFKKENGEFKIEYDRTFEWYFYALLKDDSAIEEVKKITAERHGTVVTVKRVEKVQKKFLGRPVEVWKLYFTHIQDRPAIFDKIREHPAVIDIYEYDIPFAKRYLIDKGLVPMEGDEELKMLAFDIETLYHEGEEFAEGPILMISYADEEGARVITWKNVDLPYVDVVSTEREMIKRFLRVVKEKDPDVLITYNGDNFDFAYLKKRCEKLGINFALGRDGSEPKIQRMGDRFAVEVKGRIHFDLYPVIRRTINLPTYTLEAVYEAVFGQPKEKVYAEEITTAWETGENLERVARYSMEDAKVTYELGKEFLPMEAQLSRLIGQSLWDVSRSSTGNLVEWFLLRKAYERNELAPNKPDEKELARRRQSYEGGYVKEPERGLWENIVYLDFRSLYPSIIITHNVSPDTLNREGCKEYDVAPQVGHRFCKDFPGFIPSLLGDLLEERQKIKKKMKATIDPIERKLLDYRQRAIKILANSYYGYYGYARARWYCKECAESVTAWGREYITMTIKEIEEKYGFKVIYSDTDGFFATIPGADAETVKKKAMEFLKYINAKLPGALELEYEGFYKRGFFVTKKKYAVIDEEGKITTRGLEIVRRDWSEIAKETQARVLEALLKDGDVEKAVRIVKEVTEKLSKYEVPPEKLVIHEQITRDLKDYKATGPHVAVAKRLAARGVKIRPGTVISYIVLKGSGRIGDRAIPFDEFDPTKHKYDAEYYIENQVLPAVERILRAFGYRKEDLRYQKTRQVGLSAWLKPKGT

SEQ ID NO: 844 - protein, 774 aa, synthetic construct
MILDTDYITEDGKPVFRIFKKENGEFKIEYDRTFEWYFYALLKDDSAIEEVKKITAERHGTVVTVKRVEKVQKKFLGRPVEVWKLYFTHWQDIPAIRDKIREHPAVIDIYEYDIPFAKRYLIDKGLVPMEGDEELKMLAFDIETLYHEGEEFAEGPILMISYADEEGARVITWKNVDLPYVDVVSTEREMIKRFLRVVKEKDPDVLITYNGDNFDFAYLKKRCEKLGINFALGRDGSEPKIQRMGDRFAVEVKGRIHFDLYPVIRRTINLPTYTLEAVYEAVFGQPKEKVYAEEITTAWETGENLERVARYSMEDAKVTYELGKEFLPMEAQLSRLIGQSLWDVSRSSTGNLVEWFLLRKAYERNELAPNKPDEKELARRRQSYEGGYVKEPERGLWENIVYLDFRSLYPSIIITHNVSPDTLNREGCKEYDVAPQVGHRFCKDFPGFIPSLLGDLLEERQKIKKKMKATIDPIERKLLDYRQRAIKILANSYYGYYGYARARWYCKECAESVTAWGREYITMTIKEIEEKYGFKVIYSDTDGFFATIPGADAETVKKKAMEFLKYINAKLPGALELEYEGFYKRGFFVTKKKYAVIDEEGKITTRGLEIVRRDWSEIAKETQARVLEALLKDGDVEKAVRIVKEVTEKLSKYEVPPEKLVIHEQITRDLKDYKATGPHVAVAKRLAARGVKIRPGTVISYIVLKGSGRIGDRAIPFDEFDPTKHKYDAEYYIENQVLPAVERILRAFGYRKEDLRYQKTRQVGLSAWLKPKGT

SEQ ID NO: 845 - protein, 774 aa, synthetic construct
MILDTDYITEDGKPVFRIFKKENGEFKIEYDRTFEWYFYALLKDDSAIEEVKKITAERHGTVVTVKRVEKVQKKFLGRPVEVWKLYFTHYQDKPAIFDKIREHPAVIDIYEYDIPFAKRYLIDKGLVPMEGDEELKMLAFDIETLYHEGEEFAEGPILMISYADEEGARVITWKNVDLPYVDVVSTEREMIKRFLRVVKEKDPDVLITYNGDNFDFAYLKKRCEKLGINFALGRDGSEPKIQRMGDRFAVEVKGRIHFDLYPVIRRTINLPTYTLEAVYEAVFGQPKEKVYAEEITTAWETGENLERVARYSMEDAKVTYELGKEFLPMEAQLSRLIGQSLWDVSRSSTGNLVEWFLLRKAYERNELAPNKPDEKELARRRQSYEGGYVKEPERGLWENIVYLDFRSLYPSIIITHNVSPDTLNREGCKEYDVAPQVGHRFCKDFPGFIPSLLGDLLEERQKIKKKMKATIDPIERKLLDYRQRAIKILANSYYGYYGYARARWYCKECAESVTAWGREYITMTIKEIEEKYGFKVIYSDTDGFFATIPGADAETVKKKAMEFLKYINAKLPGALELEYEGFYKRGFFVTKKKYAVIDEEGKITTRGLEIVRRDWSEIAKETQARVLEALLKDGDVEKAVRIVKEVTEKLSKYEVPPEKLVIHEQITRDLKDYKATGPHVAVAKRLAARGVKIRPGTVISYIVLKGSGRIGDRAIPFDEFDPTKHKYDAEYYIENQVLPAVERILRAFGYRKEDLRYQKTRQVGLSAWLKPKGT

SEQ ID NO: 846 - protein, 774 aa, synthetic construct
MILDTDYITEDGKPVFRIFKKENGEFKIEYDRTFEWYFYALLKDDSAIEEVKKITAERHGTVVTVKRVEKVQKKFLGRPVEVWKLYFTHPQDVPAIADKIREHPAVIDIYEYDIPFAKRYLIDKGLVPMEGDEELKMLAFDIETLYHEGEEFAEGPILMISYADEEGARVITWKNVDLPYVDVVSTEREMIKRFLRVVKEKDPDVLITYNGDNFDFAYLKKRCEKLGINFALGRDGSEPKIQRMGDRFAVEVKGRIHFDLYPVIRRTINLPTYTLEAVYEAVFGQPKEKVYAEEITTAWETGENLERVARYSMEDAKVTYELGKEFLPMEAQLSRLIGQSLWDVSRSSTGNLVEWFLLRKAYERNELAPNKPDEKELARRRQSYEGGYVKEPERGLWENIVYLDFRSLYPSIIITHNVSPDTLNREGCKEYDVAPQVGHRFCKDFPGFIPSLLGDLLEERQKIKKKMKATIDPIERKLLDYRQRAIKILANSYYGYYGYARARWYCKECAESVTAWGREYITMTIKEIEEKYGFKVIYSDTDGFFATIPGADAETVKKKAMEFLKYINAKLPGALELEYEGFYKRGFFVTKKKYAVIDEEGKITTRGLEIVRRDWSEIAKETQARVLEALLKDGDVEKAVRIVKEVTEKLSKYEVPPEKLVIHEQITRDLKDYKATGPHVAVAKRLAARGVKIRPGTVISYIVLKGSGRIGDRAIPFDEFDPTKHKYDAEYYIENQVLPAVERILRAFGYRKEDLRYQKTRQVGLSAWLKPKGT

SEQ ID NO: 847 - protein, 774 aa, synthetic construct
MILDTDYITEDGKPVFRIFKKENGEFKIEYDRTFEWYFYALLKDDSAIEEVKKITAERHGTVVTVKRVEKVQKKFLGRPVEVWKLYFTHPQDVPAIFDKIREHPAVIDIYEYDIPFAKRYLIDKGLVPMEGDEELKMLAFDIETLYHEGEEFAEGPILMISYADEEGARVITWKNVDLPYVDVVSTEREMIKRFLRVVKEKDPDVLITYNGDNFDFAYLKKRCEKLGINFALGRDGSEPKIQRMGDRFAVEVKGRIHFDLYPVIRRTINLPTYTLEAVYEAVFGQPKEKVYAEEITTAWETGENLERVARYSMEDAKVTYELGKEFLPMEAQLSRLIGQSLWDVSRSSTGNLVEWFLLRKAYERNELAPNKPDEKELARRRQSYEGGYVKEPERGLWENIVYLDFRSLYPSIIITHNVSPDTLNREGCKEYDVAPQVGHRFCKDFPGFIPSLLGDLLEERQKIKKKMKATIDPIERKLLDYRQRAIKILANSYYGYYGYARARWYCKECAESVTAWGREYITMTIKEIEEKYGFKVIYSDTDGFFATIPGADAETVKKKAMEFLKYINAKLPGALELEYEGFYKRGFFVTKKKYAVIDEEGKITTRGLEIVRRDWSEIAKETQARVLEALLKDGDVEKAVRIVKEVTEKLSKYEVPPEKLVIHEQITRDLKDYKATGPHVAVAKRLAARGVKIRPGTVISYIVLKGSGRIGDRAIPFDEFDPTKHKYDAEYYIENQVLPAVERILRAFGYRKEDLRYQKTRQVGLSAWLKPKGT

SEQ ID NO: 848 - protein, 774 aa, synthetic construct
MILDTDYITEDGKPVFRIFKKENGEFKIEYDRTFEWYFYALLKDDSAIEEVKKITAERHGTVVTVKRVEKVQKKFLGRPVEVWKLYFTHPQDIPAIRDKIREHPAVIDIYEYDIPFAKRYLIDKGLVPMEGDEELKMLAFDIETLYHEGEEFAEGPILMISYADEEGARVITWKNVDLPYVDVVSTEREMIKRFLRVVKEKDPDVLITYNGDNFDFAYLKKRCEKLGINFALGRDGSEPKIQRMGDRFAVEVKGRIHFDLYPVIRRTINLPTYTLEAVYEAVFGQPKEKVYAEEITTAWETGENLERVARYSMEDAKVTYELGKEFLPMEAQLSRLIGQSLWDVSRSSTGNLVEWFLLRKAYERNELAPNKPDEKELARRRQSYEGGYVKEPERGLWENIVYLDFRSLYPSIIITHNVSPDTLNREGCKEYDVAPQVGHRFCKDFPGFIPSLLGDLLEERQKIKKKMKATIDPIERKLLDYRQRAIKILANSYYGYYGYARARWYCKECAESVTAWGREYITMTIKEIEEKYGFKVIYSDTDGFFATIPGADAETVKKKAMEFLKYINAKLPGALELEYEGFYKRGFFVTKKKYAVIDEEGKITTRGLEIVRRDWSEIAKETQARVLEALLKDGDVEKAVRIVKEVTEKLSKYEVPPEKLVIHEQITRDLKDYKATGPHVAVAKRLAARGVKIRPGTVISYIVLKGSGRIGDRAIPFDEFDPTKHKYDAEYYIENQVLPAVERILRAFGYRKEDLRYQKTRQVGLSAWLKPKGT

SEQ ID NO: 849 - protein, 774 aa, synthetic construct
MILDTDYITEDGKPVFRIFKKENGEFKIEYDRTFEWYFYALLKDDSAIEEVKKITAERHGTVVTVKRVEKVQKKFLGRPVEVWKLYFTHPQDIPAIADKIREHPAVIDIYEYDIPFAKRYLIDKGLVPMEGDEELKMLAFDIETLYHEGEEFAEGPILMISYADEEGARVITWKNVDLPYVDVVSTEREMIKRFLRVVKEKDPDVLITYNGDNFDFAYLKKRCEKLGINFALGRDGSEPKIQRMGDRFAVEVKGRIHFDLYPVIRRTINLPTYTLEAVYEAVFGQPKEKVYAEEITTAWETGENLERVARYSMEDAKVTYELGKEFLPMEAQLSRLIGQSLWDVSRSSTGNLVEWFLLRKAYERNELAPNKPDEKELARRRQSYEGGYVKEPERGLWENIVYLDFRSLYPSIIITHNVSPDTLNREGCKEYDVAPQVGHRFCKDFPGFIPSLLGDLLEERQKIKKKMKATIDPIERKLLDYRQRAIKILANSYYGYYGYARARWYCKECAESVTAWGREYITMTIKEIEEKYGFKVIYSDTDGFFATIPGADAETVKKKAMEFLKYINAKLPGALELEYEGFYKRGFFVTKKKYAVIDEEGKITTRGLEIVRRDWSEIAKETQARVLEALLKDGDVEKAVRIVKEVTEKLSKYEVPPEKLVIHEQITRDLKDYKATGPHVAVAKRLAARGVKIRPGTVISYIVLKGSGRIGDRAIPFDEFDPTKHKYDAEYYIENQVLPAVERILRAFGYRKEDLRYQKTRQVGLSAWLKPKGT

SEQ ID NO: 850 - protein, 774 aa, synthetic construct
MILDTDYITEDGKPVFRIFKKENGEFKIEYDRTFEPYFYALLKDDSAIEEVKKITAERHGTVVTVKRVEKVQKKFLGRPVEVWKLYFTHFQDVPAIRDKIREHPAVIDIYEYDIPFAKRYLIDKGLVPMEGDEELKMLAFDIETLYHEGEEFAEGPILMISYADEEGARVITWKNVDLPYVDVVSTEREMIKRFLRVVKEKDPDVLITYNGDNFDFAYLKKRCEKLGINFALGRDGSEPKIQRMGDRFAVEVKGRIHFDLYPVIRRTINLPTYTLEAVYEAVFGQPKEKVYAEEITTAWETGENLERVARYSMEDAKVTYELGKEFLPMEAQLSRLIGQSLWDVSRSSTGNLVEWFLLRKAYERNELAPNKPDEKELARRRQSYEGGYVKEPERGLWENIVYLDFRSLYPSIIITHNVSPDTLNREGCKEYDVAPQVGHRFCKDFPGFIPSLLGDLLEERQKIKKKMKATIDPIERKLLDYRQRAIKILANSYYGYYGYARARWYCKECAESVTAWGREYITMTIKEIEEKYGFKVIYSDTDGFFATIPGADAETVKKKAMEFLKYINAKLPGALELEYEGFYKRGFFVTKKKYAVIDEEGKITTRGLEIVRRDWSEIAKETQARVLEALLKDGDVEKAVRIVKEVTEKLSKYEVPPEKLVIHEQITRDLKDYKATGPHVAVAKRLAARGVKIRPGTVISYIVLKGSGRIGDRAIPFDEFDPTKHKYDAEYYIENQVLPAVERILRAFGYRKEDLRYQKTRQVGLSAWLKPKGT

SEQ ID NO: 851 - protein, 774 aa, synthetic construct
MILDTDYITEDGKPVFRIFKKENGEFKIEYDRTFEPYFYALLKDDSAIEEVKKITAERHGTVVTVKRVEKVQKKFLGRPVEVWKLYFTHFQDVPAIADKIREHPAVIDIYEYDIPFAKRYLIDKGLVPMEGDEELKMLAFDIETLYHEGEEFAEGPILMISYADEEGARVITWKNVDLPYVDVVSTEREMIKRFLRVVKEKDPDVLITYNGDNFDFAYLKKRCEKLGINFALGRDGSEPKIQRMGDRFAVEVKGRIHFDLYPVIRRTINLPTYTLEAVYEAVFGQPKEKVYAEEITTAWETGENLERVARYSMEDAKVTYELGKEFLPMEAQLSRLIGQSLWDVSRSSTGNLVEWFLLRKAYERNELAPNKPDEKELARRRQSYEGGYVKEPERGLWENIVYLDFRSLYPSIIITHNVSPDTLNREGCKEYDVAPQVGHRFCKDFPGFIPSLLGDLLEERQKIKKKMKATIDPIERKLLDYRQRAIKILANSYYGYYGYARARWYCKECAESVTAWGREYITMTIKEIEEKYGFKVIYSDTDGFFATIPGADAETVKKKAMEFLKYINAKLPGALELEYEGFYKRGFFVTKKKYAVIDEEGKITTRGLEIVRRDWSEIAKETQARVLEALLKDGDVEKAVRIVKEVTEKLSKYEVPPEKLVIHEQITRDLKDYKATGPHVAVAKRLAARGVKIRPGTVISYIVLKGSGRIGDRAIPFDEFDPTKHKYDAEYYIENQVLPAVERILRAFGYRKEDLRYQKTRQVGLSAWLKPKGT

SEQ ID NO: 852 - protein, 774 aa, synthetic construct
MILDTDYITEDGKPVFRIFKKENGEFKIEYDRTFEPYFYALLKDDSAIEEVKKITAERHGTVVTVKRVEKVQKKFLGRPVEVWKLYFTHFQDVPAIFDKIREHPAVIDIYEYDIPFAKRYLIDKGLVPMEGDEELKMLAFDIETLYHEGEEFAEGPILMISYADEEGARVITWKNVDLPYVDVVSTEREMIKRFLRVVKEKDPDVLITYNGDNFDFAYLKKRCEKLGINFALGRDGSEPKIQRMGDRFAVEVKGRIHFDLYPVIRRTINLPTYTLEAVYEAVFGQPKEKVYAEEITTAWETGENLERVARYSMEDAKVTYELGKEFLPMEAQLSRLIGQSLWDVSRSSTGNLVEWFLLRKAYERNELAPNKPDEKELARRRQSYEGGYVKEPERGLWENIVYLDFRSLYPSIIITHNVSPDTLNREGCKEYDVAPQVGHRFCKDFPGFIPSLLGDLLEERQKIKKKMKATIDPIERKLLDYRQRAIKILANSYYGYYGYARARWYCKECAESVTAWGREYITMTIKEIEEKYGFKVIYSDTDGFFATIPGADAETVKKKAMEFLKYINAKLPGALELEYEGFYKRGFFVTKKKYAVIDEEGKITTRGLEIVRRDWSEIAKETQARVLEALLKDGDVEKAVRIVKEVTEKLSKYEVPPEKLVIHEQITRDLKDYKATGPHVAVAKRLAARGVKIRPGTVISYIVLKGSGRIGDRAIPFDEFDPTKHKYDAEYYIENQVLPAVERILRAFGYRKEDLRYQKTRQVGLSAWLKPKGT

SEQ ID NO: 853 - protein, 774 aa, synthetic construct
MILDTDYITEDGKPVFRIFKKENGEFKIEYDRTFEPYFYALLKDDSAIEEVKKITAERHGTVVTVKRVEKVQKKFLGRPVEVWKLYFTHFQDVPAIHDKIREHPAVIDIYEYDIPFAKRYLIDKGLVPMEGDEELKMLAFDIETLYHEGEEFAEGPILMISYADEEGARVITWKNVDLPYVDVVSTEREMIKRFLRVVKEKDPDVLITYNGDNFDFAYLKKRCEKLGINFALGRDGSEPKIQRMGDRFAVEVKGRIHFDLYPVIRRTINLPTYTLEAVYEAVFGQPKEKVYAEEITTAWETGENLERVARYSMEDAKVTYELGKEFLPMEAQLSRLIGQSLWDVSRSSTGNLVEWFLLRKAYERNELAPNKPDEKELARRRQSYEGGYVKEPERGLWENIVYLDFRSLYPSIIITHNVSPDTLNREGCKEYDVAPQVGHRFCKDFPGFIPSLLGDLLEERQKIKKKMKATIDPIERKLLDYRQRAIKILANSYYGYYGYARARWYCKECAESVTAWGREYITMTIKEIEEKYGFKVIYSDTDGFFATIPGADAETVKKKAMEFLKYINAKLPGALELEYEGFYKRGFFVTKKKYAVIDEEGKITTRGLEIVRRDWSEIAKETQARVLEALLKDGDVEKAVRIVKEVTEKLSKYEVPPEKLVIHEQITRDLKDYKATGPHVAVAKRLAARGVKIRPGTVISYIVLKGSGRIGDRAIPFDEFDPTKHKYDAEYYIENQVLPAVERILRAFGYRKEDLRYQKTRQVGLSAWLKPKGT

SEQ ID NO: 854 - protein, 774 aa, synthetic construct
MILDTDYITEDGKPVFRIFKKENGEFKIEYDRTFEPYFYALLKDDSAIEEVKKITAERHGTVVTVKRVEKVQKKFLGRPVEVWKLYFTHFQDVPAIWDKIREHPAVIDIYEYDIPFAKRYLIDKGLVPMEGDEELKMLAFDIETLYHEGEEFAEGPILMISYADEEGARVITWKNVDLPYVDVVSTEREMIKRFLRVVKEKDPDVLITYNGDNFDFAYLKKRCEKLGINFALGRDGSEPKIQRMGDRFAVEVKGRIHFDLYPVIRRTINLPTYTLEAVYEAVFGQPKEKVYAEEITTAWETGENLERVARYSMEDAKVTYELGKEFLPMEAQLSRLIGQSLWDVSRSSTGNLVEWFLLRKAYERNELAPNKPDEKELARRRQSYEGGYVKEPERGLWENIVYLDFRSLYPSIIITHNVSPDTLNREGCKEYDVAPQVGHRFCKDFPGFIPSLLGDLLEERQKIKKKMKATIDPIERKLLDYRQRAIKILANSYYGYYGYARARWYCKECAESVTAWGREYITMTIKEIEEKYGFKVIYSDTDGFFATIPGADAETVKKKAMEFLKYINAKLPGALELEYEGFYKRGFFVTKKKYAVIDEEGKITTRGLEIVRRDWSEIAKETQARVLEALLKDGDVEKAVRIVKEVTEKLSKYEVPPEKLVIHEQITRDLKDYKATGPHVAVAKRLAARGVKIRPGTVISYIVLKGSGRIGDRAIPFDEFDPTKHKYDAEYYIENQVLPAVERILRAFGYRKEDLRYQKTRQVGLSAWLKPKGT

SEQ ID NO: 855 - protein, 774 aa, synthetic construct
MILDTDYITEDGKPVFRIFKKENGEFKIEYDRTFEPYFYALLKDDSAIEEVKKITAERHGTVVTVKRVEKVQKKFLGRPVEVWKLYFTHFQDIPAIRDKIREHPAVIDIYEYDIPFAKRYLIDKGLVPMEGDEELKMLAFDIETLYHEGEEFAEGPILMISYADEEGARVITWKNVDLPYVDVVSTEREMIKRFLRVVKEKDPDVLITYNGDNFDFAYLKKRCEKLGINFALGRDGSEPKIQRMGDRFAVEVKGRIHFDLYPVIRRTINLPTYTLEAVYEAVFGQPKEKVYAEEITTAWETGENLERVARYSMEDAKVTYELGKEFLPMEAQLSRLIGQSLWDVSRSSTGNLVEWFLLRKAYERNELAPNKPDEKELARRRQSYEGGYVKEPERGLWENIVYLDFRSLYPSIIITHNVSPDTLNREGCKEYDVAPQVGHRFCKDFPGFIPSLLGDLLEERQKIKKKMKATIDPIERKLLDYRQRAIKILANSYYGYYGYARARWYCKECAESVTAWGREYITMTIKEIEEKYGFKVIYSDTDGFFATIPGADAETVKKKAMEFLKYINAKLPGALELEYEGFYKRGFFVTKKKYAVIDEEGKITTRGLEIVRRDWSEIAKETQARVLEALLKDGDVEKAVRIVKEVTEKLSKYEVPPEKLVIHEQITRDLKDYKATGPHVAVAKRLAARGVKIRPGTVISYIVLKGSGRIGDRAIPFDEFDPTKHKYDAEYYIENQVLPAVERILRAFGYRKEDLRYQKTRQVGLSAWLKPKGT

SEQ ID NO: 856 - protein, 774 aa, synthetic construct
MILDTDYITEDGKPVFRIFKKENGEFKIEYDRTFEPYFYALLKDDSAIEEVKKITAERHGTVVTVKRVEKVQKKFLGRPVEVWKLYFTHFQDIPAIADKIREHPAVIDIYEYDIPFAKRYLIDKGLVPMEGDEELKMLAFDIETLYHEGEEFAEGPILMISYADEEGARVITWKNVDLPYVDVVSTEREMIKRFLRVVKEKDPDVLITYNGDNFDFAYLKKRCEKLGINFALGRDGSEPKIQRMGDRFAVEVKGRIHFDLYPVIRRTINLPTYTLEAVYEAVFGQPKEKVYAEEITTAWETGENLERVARYSMEDAKVTYELGKEFLPMEAQLSRLIGQSLWDVSRSSTGNLVEWFLLRKAYERNELAPNKPDEKELARRRQSYEGGYVKEPERGLWENIVYLDFRSLYPSIIITHNVSPDTLNREGCKEYDVAPQVGHRFCKDFPGFIPSLLGDLLEERQKIKKKMKATIDPIERKLLDYRQRAIKILANSYYGYYGYARARWYCKECAESVTAWGREYITMTIKEIEEKYGFKVIYSDTDGFFATIPGADAETVKKKAMEFLKYINAKLPGALELEYEGFYKRGFFVTKKKYAVIDEEGKITTRGLEIVRRDWSEIAKETQARVLEALLKDGDVEKAVRIVKEVTEKLSKYEVPPEKLVIHEQITRDLKDYKATGPHVAVAKRLAARGVKIRPGTVISYIVLKGSGRIGDRAIPFDEFDPTKHKYDAEYYIENQVLPAVERILRAFGYRKEDLRYQKTRQVGLSAWLKPKGT

SEQ ID NO: 857 - protein, 774 aa, synthetic construct
MILDTDYITEDGKPVFRIFKKENGEFKIEYDRTFEPYFYALLKDDSAIEEVKKITAERHGTVVTVKRVEKVQKKFLGRPVEVWKLYFTHFQDIPAIFDKIREHPAVIDIYEYDIPFAKRYLIDKGLVPMEGDEELKMLAFDIETLYHEGEEFAEGPILMISYADEEGARVITWKNVDLPYVDVVSTEREMIKRFLRVVKEKDPDVLITYNGDNFDFAYLKKRCEKLGINFALGRDGSEPKIQRMGDRFAVEVKGRIHFDLYPVIRRTINLPTYTLEAVYEAVFGQPKEKVYAEEITTAWETGENLERVARYSMEDAKVTYELGKEFLPMEAQLSRLIGQSLWDVSRSSTGNLVEWFLLRKAYERNELAPNKPDEKELARRRQSYEGGYVKEPERGLWENIVYLDFRSLYPSIIITHNVSPDTLNREGCKEYDVAPQVGHRFCKDFPGFIPSLLGDLLEERQKIKKKMKATIDPIERKLLDYRQRAIKILANSYYGYYGYARARWYCKECAESVTAWGREYITMTIKEIEEKYGFKVIYSDTDGFFATIPGADAETVKKKAMEFLKYINAKLPGALELEYEGFYKRGFFVTKKKYAVIDEEGKITTRGLEIVRRDWSEIAKETQARVLEALLKDGDVEKAVRIVKEVTEKLSKYEVPPEKLVIHEQITRDLKDYKATGPHVAVAKRLAARGVKIRPGTVISYIVLKGSGRIGDRAIPFDEFDPTKHKYDAEYYIENQVLPAVERILRAFGYRKEDLRYQKTRQVGLSAWLKPKGT

SEQ ID NO: 858 - protein, 774 aa, synthetic construct
MILDTDYITEDGKPVFRIFKKENGEFKIEYDRTFEPYFYALLKDDSAIEEVKKITAERHGTVVTVKRVEKVQKKFLGRPVEVWKLYFTHFQDIPAIHDKIREHPAVIDIYEYDIPFAKRYLIDKGLVPMEGDEELKMLAFDIETLYHEGEEFAEGPILMISYADEEGARVITWKNVDLPYVDVVSTEREMIKRFLRVVKEKDPDVLITYNGDNFDFAYLKKRCEKLGINFALGRDGSEPKIQRMGDRFAVEVKGRIHFDLYPVIRRTINLPTYTLEAVYEAVFGQPKEKVYAEEITTAWETGENLERVARYSMEDAKVTYELGKEFLPMEAQLSRLIGQSLWDVSRSSTGNLVEWFLLRKAYERNELAPNKPDEKELARRRQSYEGGYVKEPERGLWENIVYLDFRSLYPSIIITHNVSPDTLNREGCKEYDVAPQVGHRFCKDFPGFIPSLLGDLLEERQKIKKKMKATIDPIERKLLDYRQRAIKILANSYYGYYGYARARWYCKECAESVTAWGREYITMTIKEIEEKYGFKVIYSDTDGFFATIPGADAETVKKKAMEFLKYINAKLPGALELEYEGFYKRGFFVTKKKYAVIDEEGKITTRGLEIVRRDWSEIAKETQARVLEALLKDGDVEKAVRIVKEVTEKLSKYEVPPEKLVIHEQITRDLKDYKATGPHVAVAKRLAARGVKIRPGTVISYIVLKGSGRIGDRAIPFDEFDPTKHKYDAEYYIENQVLPAVERILRAFGYRKEDLRYQKTRQVGLSAWLKPKGT

SEQ ID NO: 859 - protein, 774 aa, synthetic construct
MILDTDYITEDGKPVFRIFKKENGEFKIEYDRTFEPYFYALLKDDSAIEEVKKITAERHGTVVTVKRVEKVQKKFLGRPVEVWKLYFTHFQDIPAIWDKIREHPAVIDIYEYDIPFAKRYLIDKGLVPMEGDEELKMLAFDIETLYHEGEEFAEGPILMISYADEEGARVITWKNVDLPYVDVVSTEREMIKRFLRVVKEKDPDVLITYNGDNFDFAYLKKRCEKLGINFALGRDGSEPKIQRMGDRFAVEVKGRIHFDLYPVIRRTINLPTYTLEAVYEAVFGQPKEKVYAEEITTAWETGENLERVARYSMEDAKVTYELGKEFLPMEAQLSRLIGQSLWDVSRSSTGNLVEWFLLRKAYERNELAPNKPDEKELARRRQSYEGGYVKEPERGLWENIVYLDFRSLYPSIIITHNVSPDTLNREGCKEYDVAPQVGHRFCKDFPGFIPSLLGDLLEERQKIKKKMKATIDPIERKLLDYRQRAIKILANSYYGYYGYARARWYCKECAESVTAWGREYITMTIKEIEEKYGFKVIYSDTDGFFATIPGADAETVKKKAMEFLKYINAKLPGALELEYEGFYKRGFFVTKKKYAVIDEEGKITTRGLEIVRRDWSEIAKETQARVLEALLKDGDVEKAVRIVKEVTEKLSKYEVPPEKLVIHEQITRDLKDYKATGPHVAVAKRLAARGVKIRPGTVISYIVLKGSGRIGDRAIPFDEFDPTKHKYDAEYYIENQVLPAVERILRAFGYRKEDLRYQKTRQVGLSAWLKPKGT

SEQ ID NO: 860 - protein, 774 aa, synthetic construct
MILDTDYITEDGKPVFRIFKKENGEFKIEYDRTFEPYFYALLKDDSAIEEVKKITAERHGTVVTVKRVEKVQKKFLGRPVEVWKLYFTHFQDKPAIRDKIREHPAVIDIYEYDIPFAKRYLIDKGLVPMEGDEELKMLAFDIETLYHEGEEFAEGPILMISYADEEGARVITWKNVDLPYVDVVSTEREMIKRFLRVVKEKDPDVLITYNGDNFDFAYLKKRCEKLGINFALGRDGSEPKIQRMGDRFAVEVKGRIHFDLYPVIRRTINLPTYTLEAVYEAVFGQPKEKVYAEEITTAWETGENLERVARYSMEDAKVTYELGKEFLPMEAQLSRLIGQSLWDVSRSSTGNLVEWFLLRKAYERNELAPNKPDEKELARRRQSYEGGYVKEPERGLWENIVYLDFRSLYPSIIITHNVSPDTLNREGCKEYDVAPQVGHRFCKDFPGFIPSLLGDLLEERQKIKKKMKATIDPIERKLLDYRQRAIKILANSYYGYYGYARARWYCKECAESVTAWGREYITMTIKEIEEKYGFKVIYSDTDGFFATIPGADAETVKKKAMEFLKYINAKLPGALELEYEGFYKRGFFVTKKKYAVIDEEGKITTRGLEIVRRDWSEIAKETQARVLEALLKDGDVEKAVRIVKEVTEKLSKYEVPPEKLVIHEQITRDLKDYKATGPHVAVAKRLAARGVKIRPGTVISYIVLKGSGRIGDRAIPFDEFDPTKHKYDAEYYIENQVLPAVERILRAFGYRKEDLRYQKTRQVGLSAWLKPKGT

SEQ ID NO: 861 - protein, 774 aa, synthetic construct
MILDTDYITEDGKPVFRIFKKENGEFKIEYDRTFEPYFYALLKDDSAIEEVKKITAERHGTVVTVKRVEKVQKKFLGRPVEVWKLYFTHFQDKPAIADKIREHPAVIDIYEYDIPFAKRYLIDKGLVPMEGDEELKMLAFDIETLYHEGEEFAEGPILMISYADEEGARVITWKNVDLPYVDVVSTEREMIKRFLRVVKEKDPDVLITYNGDNFDFAYLKKRCEKLGINFALGRDGSEPKIQRMGDRFAVEVKGRIHFDLYPVIRRTINLPTYTLEAVYEAVFGQPKEKVYAEEITTAWETGENLERVARYSMEDAKVTYELGKEFLPMEAQLSRLIGQSLWDVSRSSTGNLVEWFLLRKAYERNELAPNKPDEKELARRRQSYEGGYVKEPERGLWENIVYLDFRSLYPSIIITHNVSPDTLNREGCKEYDVAPQVGHRFCKDFPGFIPSLLGDLLEERQKIKKKMKATIDPIERKLLDYRQRAIKILANSYYGYYGYARARWYCKECAESVTAWGREYITMTIKEIEEKYGFKVIYSDTDGFFATIPGADAETVKKKAMEFLKYINAKLPGALELEYEGFYKRGFFVTKKKYAVIDEEGKITTRGLEIVRRDWSEIAKETQARVLEALLKDGDVEKAVRIVKEVTEKLSKYEVPPEKLVIHEQITRDLKDYKATGPHVAVAKRLAARGVKIRPGTVISYIVLKGSGRIGDRAIPFDEFDPTKHKYDAEYYIENQVLPAVERILRAFGYRKEDLRYQKTRQVGLSAWLKPKGT

SEQ ID NO: 862 - protein, 774 aa, synthetic construct
MILDTDYITEDGKPVFRIFKKENGEFKIEYDRTFEPYFYALLKDDSAIEEVKKITAERHGTVVTVKRVEKVQKKFLGRPVEVWKLYFTHFQDKPAIFDKIREHPAVIDIYEYDIPFAKRYLIDKGLVPMEGDEELKMLAFDIETLYHEGEEFAEGPILMISYADEEGARVITWKNVDLPYVDVVSTEREMIKRFLRVVKEKDPDVLITYNGDNFDFAYLKKRCEKLGINFALGRDGSEPKIQRMGDRFAVEVKGRIHFDLYPVIRRTINLPTYTLEAVYEAVFGQPKEKVYAEEITTAWETGENLERVARYSMEDAKVTYELGKEFLPMEAQLSRLIGQSLWDVSRSSTGNLVEWFLLRKAYERNELAPNKPDEKELARRRQSYEGGYVKEPERGLWENIVYLDFRSLYPSIIITHNVSPDTLNREGCKEYDVAPQVGHRFCKDFPGFIPSLLGDLLEERQKIKKKMKATIDPIERKLLDYRQRAIKILANSYYGYYGYARARWYCKECAESVTAWGREYITMTIKEIEEKYGFKVIYSDTDGFFATIPGADAETVKKKAMEFLKYINAKLPGALELEYEGFYKRGFFVTKKKYAVIDEEGKITTRGLEIVRRDWSEIAKETQARVLEALLKDGDVEKAVRIVKEVTEKLSKYEVPPEKLVIHEQITRDLKDYKATGPHVAVAKRLAARGVKIRPGTVISYIVLKGSGRIGDRAIPFDEFDPTKHKYDAEYYIENQVLPAVERILRAFGYRKEDLRYQKTRQVGLSAWLKPKGT

SEQ ID NO: 863 - protein, 774 aa, synthetic construct
MILDTDYITEDGKPVFRIFKKENGEFKIEYDRTFEPYFYALLKDDSAIEEVKKITAERHGTVVTVKRVEKVQKKFLGRPVEVWKLYFTHFQDKPAIHDKIREHPAVIDIYEYDIPFAKRYLIDKGLVPMEGDEELKMLAFDIETLYHEGEEFAEGPILMISYADEEGARVITWKNVDLPYVDVVSTEREMIKRFLRVVKEKDPDVLITYNGDNFDFAYLKKRCEKLGINFALGRDGSEPKIQRMGDRFAVEVKGRIHFDLYPVIRRTINLPTYTLEAVYEAVFGQPKEKVYAEEITTAWETGENLERVARYSMEDAKVTYELGKEFLPMEAQLSRLIGQSLWDVSRSSTGNLVEWFLLRKAYERNELAPNKPDEKELARRRQSYEGGYVKEPERGLWENIVYLDFRSLYPSIIITHNVSPDTLNREGCKEYDVAPQVGHRFCKDFPGFIPSLLGDLLEERQKIKKKMKATIDPIERKLLDYRQRAIKILANSYYGYYGYARARWYCKECAESVTAWGREYITMTIKEIEEKYGFKVIYSDTDGFFATIPGADAETVKKKAMEFLKYINAKLPGALELEYEGFYKRGFFVTKKKYAVIDEEGKITTRGLEIVRRDWSEIAKETQARVLEALLKDGDVEKAVRIVKEVTEKLSKYEVPPEKLVIHEQITRDLKDYKATGPHVAVAKRLAARGVKIRPGTVISYIVLKGSGRIGDRAIPFDEFDPTKHKYDAEYYIENQVLPAVERILRAFGYRKEDLRYQKTRQVGLSAWLKPKGT

SEQ ID NO: 864 - protein, 774 aa, synthetic construct
MILDTDYITEDGKPVFRIFKKENGEFKIEYDRTFEPYFYALLKDDSAIEEVKKITAERHGTVVTVKRVEKVQKKFLGRPVEVWKLYFTHFQDQPAIRDKIREHPAVIDIYEYDIPFAKRYLIDKGLVPMEGDEELKMLAFDIETLYHEGEEFAEGPILMISYADEEGARVITWKNVDLPYVDVVSTEREMIKRFLRVVKEKDPDVLITYNGDNFDFAYLKKRCEKLGINFALGRDGSEPKIQRMGDRFAVEVKGRIHFDLYPVIRRTINLPTYTLEAVYEAVFGQPKEKVYAEEITTAWETGENLERVARYSMEDAKVTYELGKEFLPMEAQLSRLIGQSLWDVSRSSTGNLVEWFLLRKAYERNELAPNKPDEKELARRRQSYEGGYVKEPERGLWENIVYLDFRSLYPSIIITHNVSPDTLNREGCKEYDVAPQVGHRFCKDFPGFIPSLLGDLLEERQKIKKKMKATIDPIERKLLDYRQRAIKILANSYYGYYGYARARWYCKECAESVTAWGREYITMTIKEIEEKYGFKVIYSDTDGFFATIPGADAETVKKKAMEFLKYINAKLPGALELEYEGFYKRGFFVTKKKYAVIDEEGKITTRGLEIVRRDWSEIAKETQARVLEALLKDGDVEKAVRIVKEVTEKLSKYEVPPEKLVIHEQITRDLKDYKATGPHVAVAKRLAARGVKIRPGTVISYIVLKGSGRIGDRAIPFDEFDPTKHKYDAEYYIENQVLPAVERILRAFGYRKEDLRYQKTRQVGLSAWLKPKGT

SEQ ID NO: 865 - protein, 774 aa, synthetic construct
MILDTDYITEDGKPVFRIFKKENGEFKIEYDRTFEPYFYALLKDDSAIEEVKKITAERHGTVVTVKRVEKVQKKFLGRPVEVWKLYFTHFQDQPAIADKIREHPAVIDIYEYDIPFAKRYLIDKGLVPMEGDEELKMLAFDIETLYHEGEEFAEGPILMISYADEEGARVITWKNVDLPYVDVVSTEREMIKRFLRVVKEKDPDVLITYNGDNFDFAYLKKRCEKLGINFALGRDGSEPKIQRMGDRFAVEVKGRIHFDLYPVIRRTINLPTYTLEAVYEAVFGQPKEKVYAEEITTAWETGENLERVARYSMEDAKVTYELGKEFLPMEAQLSRLIGQSLWDVSRSSTGNLVEWFLLRKAYERNELAPNKPDEKELARRRQSYEGGYVKEPERGLWENIVYLDFRSLYPSIIITHNVSPDTLNREGCKEYDVAPQVGHRFCKDFPGFIPSLLGDLLEERQKIKKKMKATIDPIERKLLDYRQRAIKILANSYYGYYGYARARWYCKECAESVTAWGREYITMTIKEIEEKYGFKVIYSDTDGFFATIPGADAETVKKKAMEFLKYINAKLPGALELEYEGFYKRGFFVTKKKYAVIDEEGKITTRGLEIVRRDWSEIAKETQARVLEALLKDGDVEKAVRIVKEVTEKLSKYEVPPEKLVIHEQITRDLKDYKATGPHVAVAKRLAARGVKIRPGTVISYIVLKGSGRIGDRAIPFDEFDPTKHKYDAEYYIENQVLPAVERILRAFGYRKEDLRYQKTRQVGLSAWLKPKGT

SEQ ID NO: 866 - protein, 774 aa, synthetic construct
MILDTDYITEDGKPVFRIFKKENGEFKIEYDRTFEPYFYALLKDDSAIEEVKKITAERHGTVVTVKRVEKVQKKFLGRPVEVWKLYFTHFQDQPAIFDKIREHPAVIDIYEYDIPFAKRYLIDKGLVPMEGDEELKMLAFDIETLYHEGEEFAEGPILMISYADEEGARVITWKNVDLPYVDVVSTEREMIKRFLRVVKEKDPDVLITYNGDNFDFAYLKKRCEKLGINFALGRDGSEPKIQRMGDRFAVEVKGRIHFDLYPVIRRTINLPTYTLEAVYEAVFGQPKEKVYAEEITTAWETGENLERVARYSMEDAKVTYELGKEFLPMEAQLSRLIGQSLWDVSRSSTGNLVEWFLLRKAYERNELAPNKPDEKELARRRQSYEGGYVKEPERGLWENIVYLDFRSLYPSIIITHNVSPDTLNREGCKEYDVAPQVGHRFCKDFPGFIPSLLGDLLEERQKIKKKMKATIDPIERKLLDYRQRAIKILANSYYGYYGYARARWYCKECAESVTAWGREYITMTIKEIEEKYGFKVIYSDTDGFFATIPGADAETVKKKAMEFLKYINAKLPGALELEYEGFYKRGFFVTKKKYAVIDEEGKITTRGLEIVRRDWSEIAKETQARVLEALLKDGDVEKAVRIVKEVTEKLSKYEVPPEKLVIHEQITRDLKDYKATGPHVAVAKRLAARGVKIRPGTVISYIVLKGSGRIGDRAIPFDEFDPTKHKYDAEYYIENQVLPAVERILRAFGYRKEDLRYQKTRQVGLSAWLKPKGT

SEQ ID NO: 867 - protein, 774 aa, synthetic construct
MILDTDYITEDGKPVFRIFKKENGEFKIEYDRTFEPYFYALLKDDSAIEEVKKITAERHGTVVTVKRVEKVQKKFLGRPVEVWKLYFTHFQDQPAIHDKIREHPAVIDIYEYDIPFAKRYLIDKGLVPMEGDEELKMLAFDIETLYHEGEEFAEGPILMISYADEEGARVITWKNVDLPYVDVVSTEREMIKRFLRVVKEKDPDVLITYNGDNFDFAYLKKRCEKLGINFALGRDGSEPKIQRMGDRFAVEVKGRIHFDLYPVIRRTINLPTYTLEAVYEAVFGQPKEKVYAEEITTAWETGENLERVARYSMEDAKVTYELGKEFLPMEAQLSRLIGQSLWDVSRSSTGNLVEWFLLRKAYERNELAPNKPDEKELARRRQSYEGGYVKEPERGLWENIVYLDFRSLYPSIIITHNVSPDTLNREGCKEYDVAPQVGHRFCKDFPGFIPSLLGDLLEERQKIKKKMKATIDPIERKLLDYRQRAIKILANSYYGYYGYARARWYCKECAESVTAWGREYITMTIKEIEEKYGFKVIYSDTDGFFATIPGADAETVKKKAMEFLKYINAKLPGALELEYEGFYKRGFFVTKKKYAVIDEEGKITTRGLEIVRRDWSEIAKETQARVLEALLKDGDVEKAVRIVKEVTEKLSKYEVPPEKLVIHEQITRDLKDYKATGPHVAVAKRLAARGVKIRPGTVISYIVLKGSGRIGDRAIPFDEFDPTKHKYDAEYYIENQVLPAVERILRAFGYRKEDLRYQKTRQVGLSAWLKPKGT

SEQ ID NO: 868 - protein, 774 aa, synthetic construct
MILDTDYITEDGKPVFRIFKKENGEFKIEYDRTFEPYFYALLKDDSAIEEVKKITAERHGTVVTVKRVEKVQKKFLGRPVEVWKLYFTHFQDQPAIWDKIREHPAVIDIYEYDIPFAKRYLIDKGLVPMEGDEELKMLAFDIETLYHEGEEFAEGPILMISYADEEGARVITWKNVDLPYVDVVSTEREMIKRFLRVVKEKDPDVLITYNGDNFDFAYLKKRCEKLGINFALGRDGSEPKIQRMGDRFAVEVKGRIHFDLYPVIRRTINLPTYTLEAVYEAVFGQPKEKVYAEEITTAWETGENLERVARYSMEDAKVTYELGKEFLPMEAQLSRLIGQSLWDVSRSSTGNLVEWFLLRKAYERNELAPNKPDEKELARRRQSYEGGYVKEPERGLWENIVYLDFRSLYPSIIITHNVSPDTLNREGCKEYDVAPQVGHRFCKDFPGFIPSLLGDLLEERQKIKKKMKATIDPIERKLLDYRQRAIKILANSYYGYYGYARARWYCKECAESVTAWGREYITMTIKEIEEKYGFKVIYSDTDGFFATIPGADAETVKKKAMEFLKYINAKLPGALELEYEGFYKRGFFVTKKKYAVIDEEGKITTRGLEIVRRDWSEIAKETQARVLEALLKDGDVEKAVRIVKEVTEKLSKYEVPPEKLVIHEQITRDLKDYKATGPHVAVAKRLAARGVKIRPGTVISYIVLKGSGRIGDRAIPFDEFDPTKHKYDAEYYIENQVLPAVERILRAFGYRKEDLRYQKTRQVGLSAWLKPKGT

SEQ ID NO: 869 - protein, 774 aa, synthetic construct
MILDTDYITEDGKPVFRIFKKENGEFKIEYDRTFEPYFYALLKDDSAIEEVKKITAERHGTVVTVKRVEKVQKKFLGRPVEVWKLYFTHFQDRPAIRDKIREHPAVIDIYEYDIPFAKRYLIDKGLVPMEGDEELKMLAFDIETLYHEGEEFAEGPILMISYADEEGARVITWKNVDLPYVDVVSTEREMIKRFLRVVKEKDPDVLITYNGDNFDFAYLKKRCEKLGINFALGRDGSEPKIQRMGDRFAVEVKGRIHFDLYPVIRRTINLPTYTLEAVYEAVFGQPKEKVYAEEITTAWETGENLERVARYSMEDAKVTYELGKEFLPMEAQLSRLIGQSLWDVSRSSTGNLVEWFLLRKAYERNELAPNKPDEKELARRRQSYEGGYVKEPERGLWENIVYLDFRSLYPSIIITHNVSPDTLNREGCKEYDVAPQVGHRFCKDFPGFIPSLLGDLLEERQKIKKKMKATIDPIERKLLDYRQRAIKILANSYYGYYGYARARWYCKECAESVTAWGREYITMTIKEIEEKYGFKVIYSDTDGFFATIPGADAETVKKKAMEFLKYINAKLPGALELEYEGFYKRGFFVTKKKYAVIDEEGKITTRGLEIVRRDWSEIAKETQARVLEALLKDGDVEKAVRIVKEVTEKLSKYEVPPEKLVIHEQITRDLKDYKATGPHVAVAKRLAARGVKIRPGTVISYIVLKGSGRIGDRAIPFDEFDPTKHKYDAEYYIENQVLPAVERILRAFGYRKEDLRYQKTRQVGLSAWLKPKGT

SEQ ID NO: 870 - protein, 774 aa, synthetic construct
MILDTDYITEDGKPVFRIFKKENGEFKIEYDRTFEPYFYALLKDDSAIEEVKKITAERHGTVVTVKRVEKVQKKFLGRPVEVWKLYFTHFQDRPAIADKIREHPAVIDIYEYDIPFAKRYLIDKGLVPMEGDEELKMLAFDIETLYHEGEEFAEGPILMISYADEEGARVITWKNVDLPYVDVVSTEREMIKRFLRVVKEKDPDVLITYNGDNFDFAYLKKRCEKLGINFALGRDGSEPKIQRMGDRFAVEVKGRIHFDLYPVIRRTINLPTYTLEAVYEAVFGQPKEKVYAEEITTAWETGENLERVARYSMEDAKVTYELGKEFLPMEAQLSRLIGQSLWDVSRSSTGNLVEWFLLRKAYERNELAPNKPDEKELARRRQSYEGGYVKEPERGLWENIVYLDFRSLYPSIIITHNVSPDTLNREGCKEYDVAPQVGHRFCKDFPGFIPSLLGDLLEERQKIKKKMKATIDPIERKLLDYRQRAIKILANSYYGYYGYARARWYCKECAESVTAWGREYITMTIKEIEEKYGFKVIYSDTDGFFATIPGADAETVKKKAMEFLKYINAKLPGALELEYEGFYKRGFFVTKKKYAVIDEEGKITTRGLEIVRRDWSEIAKETQARVLEALLKDGDVEKAVRIVKEVTEKLSKYEVPPEKLVIHEQITRDLKDYKATGPHVAVAKRLAARGVKIRPGTVISYIVLKGSGRIGDRAIPFDEFDPTKHKYDAEYYIENQVLPAVERILRAFGYRKEDLRYQKTRQVGLSAWLKPKGT

SEQ ID NO: 871 - protein, 774 aa, synthetic construct
MILDTDYITEDGKPVFRIFKKENGEFKIEYDRTFEPYFYALLKDDSAIEEVKKITAERHGTVVTVKRVEKVQKKFLGRPVEVWKLYFTHFQDRPAIFDKIREHPAVIDIYEYDIPFAKRYLIDKGLVPMEGDEELKMLAFDIETLYHEGEEFAEGPILMISYADEEGARVITWKNVDLPYVDVVSTEREMIKRFLRVVKEKDPDVLITYNGDNFDFAYLKKRCEKLGINFALGRDGSEPKIQRMGDRFAVEVKGRIHFDLYPVIRRTINLPTYTLEAVYEAVFGQPKEKVYAEEITTAWETGENLERVARYSMEDAKVTYELGKEFLPMEAQLSRLIGQSLWDVSRSSTGNLVEWFLLRKAYERNELAPNKPDEKELARRRQSYEGGYVKEPERGLWENIVYLDFRSLYPSIIITHNVSPDTLNREGCKEYDVAPQVGHRFCKDFPGFIPSLLGDLLEERQKIKKKMKATIDPIERKLLDYRQRAIKILANSYYGYYGYARARWYCKECAESVTAWGREYITMTIKEIEEKYGFKVIYSDTDGFFATIPGADAETVKKKAMEFLKYINAKLPGALELEYEGFYKRGFFVTKKKYAVIDEEGKITTRGLEIVRRDWSEIAKETQARVLEALLKDGDVEKAVRIVKEVTEKLSKYEVPPEKLVIHEQITRDLKDYKATGPHVAVAKRLAARGVKIRPGTVISYIVLKGSGRIGDRAIPFDEFDPTKHKYDAEYYIENQVLPAVERILRAFGYRKEDLRYQKTRQVGLSAWLKPKGT

SEQ ID NO: 872 - protein, 774 aa, synthetic construct
MILDTDYITEDGKPVFRIFKKENGEFKIEYDRTFEPYFYALLKDDSAIEEVKKITAERHGTVVTVKRVEKVQKKFLGRPVEVWKLYFTHFQDRPAIHDKIREHPAVIDIYEYDIPFAKRYLIDKGLVPMEGDEELKMLAFDIETLYHEGEEFAEGPILMISYADEEGARVITWKNVDLPYVDVVSTEREMIKRFLRVVKEKDPDVLITYNGDNFDFAYLKKRCEKLGINFALGRDGSEPKIQRMGDRFAVEVKGRIHFDLYPVIRRTINLPTYTLEAVYEAVFGQPKEKVYAEEITTAWETGENLERVARYSMEDAKVTYELGKEFLPMEAQLSRLIGQSLWDVSRSSTGNLVEWFLLRKAYERNELAPNKPDEKELARRRQSYEGGYVKEPERGLWENIVYLDFRSLYPSIIITHNVSPDTLNREGCKEYDVAPQVGHRFCKDFPGFIPSLLGDLLEERQKIKKKMKATIDPIERKLLDYRQRAIKILANSYYGYYGYARARWYCKECAESVTAWGREYITMTIKEIEEKYGFKVIYSDTDGFFATIPGADAETVKKKAMEFLKYINAKLPGALELEYEGFYKRGFFVTKKKYAVIDEEGKITTRGLEIVRRDWSEIAKETQARVLEALLKDGDVEKAVRIVKEVTEKLSKYEVPPEKLVIHEQITRDLKDYKATGPHVAVAKRLAARGVKIRPGTVISYIVLKGSGRIGDRAIPFDEFDPTKHKYDAEYYIENQVLPAVERILRAFGYRKEDLRYQKTRQVGLSAWLKPKGT

SEQ ID NO: 873 - protein, 774 aa, synthetic construct
MILDTDYITEDGKPVFRIFKKENGEFKIEYDRTFEPYFYALLKDDSAIEEVKKITAERHGTVVTVKRVEKVQKKFLGRPVEVWKLYFTHFQDRPAIPDKIREHPAVIDIYEYDIPFAKRYLIDKGLVPMEGDEELKMLAFDIETLYHEGEEFAEGPILMISYADEEGARVITWKNVDLPYVDVVSTEREMIKRFLRVVKEKDPDVLITYNGDNFDFAYLKKRCEKLGINFALGRDGSEPKIQRMGDRFAVEVKGRIHFDLYPVIRRTINLPTYTLEAVYEAVFGQPKEKVYAEEITTAWETGENLERVARYSMEDAKVTYELGKEFLPMEAQLSRLIGQSLWDVSRSSTGNLVEWFLLRKAYERNELAPNKPDEKELARRRQSYEGGYVKEPERGLWENIVYLDFRSLYPSIIITHNVSPDTLNREGCKEYDVAPQVGHRFCKDFPGFIPSLLGDLLEERQKIKKKMKATIDPIERKLLDYRQRAIKILANSYYGYYGYARARWYCKECAESVTAWGREYITMTIKEIEEKYGFKVIYSDTDGFFATIPGADAETVKKKAMEFLKYINAKLPGALELEYEGFYKRGFFVTKKKYAVIDEEGKITTRGLEIVRRDWSEIAKETQARVLEALLKDGDVEKAVRIVKEVTEKLSKYEVPPEKLVIHEQITRDLKDYKATGPHVAVAKRLAARGVKIRPGTVISYIVLKGSGRIGDRAIPFDEFDPTKHKYDAEYYIENQVLPAVERILRAFGYRKEDLRYQKTRQVGLSAWLKPKGT

SEQ ID NO: 874 - protein, 774 aa, synthetic construct
MILDTDYITEDGKPVFRIFKKENGEFKIEYDRTFEPYFYALLKDDSAIEEVKKITAERHGTVVTVKRVEKVQKKFLGRPVEVWKLYFTHIQDVPAIRDKIREHPAVIDIYEYDIPFAKRYLIDKGLVPMEGDEELKMLAFDIETLYHEGEEFAEGPILMISYADEEGARVITWKNVDLPYVDVVSTEREMIKRFLRVVKEKDPDVLITYNGDNFDFAYLKKRCEKLGINFALGRDGSEPKIQRMGDRFAVEVKGRIHFDLYPVIRRTINLPTYTLEAVYEAVFGQPKEKVYAEEITTAWETGENLERVARYSMEDAKVTYELGKEFLPMEAQLSRLIGQSLWDVSRSSTGNLVEWFLLRKAYERNELAPNKPDEKELARRRQSYEGGYVKEPERGLWENIVYLDFRSLYPSIIITHNVSPDTLNREGCKEYDVAPQVGHRFCKDFPGFIPSLLGDLLEERQKIKKKMKATIDPIERKLLDYRQRAIKILANSYYGYYGYARARWYCKECAESVTAWGREYITMTIKEIEEKYGFKVIYSDTDGFFATIPGADAETVKKKAMEFLKYINAKLPGALELEYEGFYKRGFFVTKKKYAVIDEEGKITTRGLEIVRRDWSEIAKETQARVLEALLKDGDVEKAVRIVKEVTEKLSKYEVPPEKLVIHEQITRDLKDYKATGPHVAVAKRLAARGVKIRPGTVISYIVLKGSGRIGDRAIPFDEFDPTKHKYDAEYYIENQVLPAVERILRAFGYRKEDLRYQKTRQVGLSAWLKPKGT

SEQ ID NO: 875 - protein, 774 aa, synthetic construct
MILDTDYITEDGKPVFRIFKKENGEFKIEYDRTFEPYFYALLKDDSAIEEVKKITAERHGTVVTVKRVEKVQKKFLGRPVEVWKLYFTHIQDVPAIADKIREHPAVIDIYEYDIPFAKRYLIDKGLVPMEGDEELKMLAFDIETLYHEGEEFAEGPILMISYADEEGARVITWKNVDLPYVDVVSTEREMIKRFLRVVKEKDPDVLITYNGDNFDFAYLKKRCEKLGINFALGRDGSEPKIQRMGDRFAVEVKGRIHFDLYPVIRRTINLPTYTLEAVYEAVFGQPKEKVYAEEITTAWETGENLERVARYSMEDAKVTYELGKEFLPMEAQLSRLIGQSLWDVSRSSTGNLVEWFLLRKAYERNELAPNKPDEKELARRRQSYEGGYVKEPERGLWENIVYLDFRSLYPSIIITHNVSPDTLNREGCKEYDVAPQVGHRFCKDFPGFIPSLLGDLLEERQKIKKKMKATIDPIERKLLDYRQRAIKILANSYYGYYGYARARWYCKECAESVTAWGREYITMTIKEIEEKYGFKVIYSDTDGFFATIPGADAETVKKKAMEFLKYINAKLPGALELEYEGFYKRGFFVTKKKYAVIDEEGKITTRGLEIVRRDWSEIAKETQARVLEALLKDGDVEKAVRIVKEVTEKLSKYEVPPEKLVIHEQITRDLKDYKATGPHVAVAKRLAARGVKIRPGTVISYIVLKGSGRIGDRAIPFDEFDPTKHKYDAEYYIENQVLPAVERILRAFGYRKEDLRYQKTRQVGLSAWLKPKGT

SEQ ID NO: 876 - protein, 774 aa, synthetic construct
MILDTDYITEDGKPVFRIFKKENGEFKIEYDRTFEPYFYALLKDDSAIEEVKKITAERHGTVVTVKRVEKVQKKFLGRPVEVWKLYFTHIQDVPAIFDKIREHPAVIDIYEYDIPFAKRYLIDKGLVPMEGDEELKMLAFDIETLYHEGEEFAEGPILMISYADEEGARVITWKNVDLPYVDVVSTEREMIKRFLRVVKEKDPDVLITYNGDNFDFAYLKKRCEKLGINFALGRDGSEPKIQRMGDRFAVEVKGRIHFDLYPVIRRTINLPTYTLEAVYEAVFGQPKEKVYAEEITTAWETGENLERVARYSMEDAKVTYELGKEFLPMEAQLSRLIGQSLWDVSRSSTGNLVEWFLLRKAYERNELAPNKPDEKELARRRQSYEGGYVKEPERGLWENIVYLDFRSLYPSIIITHNVSPDTLNREGCKEYDVAPQVGHRFCKDFPGFIPSLLGDLLEERQKIKKKMKATIDPIERKLLDYRQRAIKILANSYYGYYGYARARWYCKECAESVTAWGREYITMTIKEIEEKYGFKVIYSDTDGFFATIPGADAETVKKKAMEFLKYINAKLPGALELEYEGFYKRGFFVTKKKYAVIDEEGKITTRGLEIVRRDWSEIAKETQARVLEALLKDGDVEKAVRIVKEVTEKLSKYEVPPEKLVIHEQITRDLKDYKATGPHVAVAKRLAARGVKIRPGTVISYIVLKGSGRIGDRAIPFDEFDPTKHKYDAEYYIENQVLPAVERILRAFGYRKEDLRYQKTRQVGLSAWLKPKGT

SEQ ID NO: 877 - protein, 774 aa, synthetic construct
MILDTDYITEDGKPVFRIFKKENGEFKIEYDRTFEPYFYALLKDDSAIEEVKKITAERHGTVVTVKRVEKVQKKFLGRPVEVWKLYFTHIQDVPAIHDKIREHPAVIDIYEYDIPFAKRYLIDKGLVPMEGDEELKMLAFDIETLYHEGEEFAEGPILMISYADEEGARVITWKNVDLPYVDVVSTEREMIKRFLRVVKEKDPDVLITYNGDNFDFAYLKKRCEKLGINFALGRDGSEPKIQRMGDRFAVEVKGRIHFDLYPVIRRTINLPTYTLEAVYEAVFGQPKEKVYAEEITTAWETGENLERVARYSMEDAKVTYELGKEFLPMEAQLSRLIGQSLWDVSRSSTGNLVEWFLLRKAYERNELAPNKPDEKELARRRQSYEGGYVKEPERGLWENIVYLDFRSLYPSIIITHNVSPDTLNREGCKEYDVAPQVGHRFCKDFPGFIPSLLGDLLEERQKIKKKMKATIDPIERKLLDYRQRAIKILANSYYGYYGYARARWYCKECAESVTAWGREYITMTIKEIEEKYGFKVIYSDTDGFFATIPGADAETVKKKAMEFLKYINAKLPGALELEYEGFYKRGFFVTKKKYAVIDEEGKITTRGLEIVRRDWSEIAKETQARVLEALLKDGDVEKAVRIVKEVTEKLSKYEVPPEKLVIHEQITRDLKDYKATGPHVAVAKRLAARGVKIRPGTVISYIVLKGSGRIGDRAIPFDEFDPTKHKYDAEYYIENQVLPAVERILRAFGYRKEDLRYQKTRQVGLSAWLKPKGT

SEQ ID NO: 878 - protein, 774 aa, synthetic construct
MILDTDYITEDGKPVFRIFKKENGEFKIEYDRTFEPYFYALLKDDSAIEEVKKITAERHGTVVTVKRVEKVQKKFLGRPVEVWKLYFTHIQDVPAIPDKIREHPAVIDIYEYDIPFAKRYLIDKGLVPMEGDEELKMLAFDIETLYHEGEEFAEGPILMISYADEEGARVITWKNVDLPYVDVVSTEREMIKRFLRVVKEKDPDVLITYNGDNFDFAYLKKRCEKLGINFALGRDGSEPKIQRMGDRFAVEVKGRIHFDLYPVIRRTINLPTYTLEAVYEAVFGQPKEKVYAEEITTAWETGENLERVARYSMEDAKVTYELGKEFLPMEAQLSRLIGQSLWDVSRSSTGNLVEWFLLRKAYERNELAPNKPDEKELARRRQSYEGGYVKEPERGLWENIVYLDFRSLYPSIIITHNVSPDTLNREGCKEYDVAPQVGHRFCKDFPGFIPSLLGDLLEERQKIKKKMKATIDPIERKLLDYRQRAIKILANSYYGYYGYARARWYCKECAESVTAWGREYITMTIKEIEEKYGFKVIYSDTDGFFATIPGADAETVKKKAMEFLKYINAKLPGALELEYEGFYKRGFFVTKKKYAVIDEEGKITTRGLEIVRRDWSEIAKETQARVLEALLKDGDVEKAVRIVKEVTEKLSKYEVPPEKLVIHEQITRDLKDYKATGPHVAVAKRLAARGVKIRPGTVISYIVLKGSGRIGDRAIPFDEFDPTKHKYDAEYYIENQVLPAVERILRAFGYRKEDLRYQKTRQVGLSAWLKPKGT

SEQ ID NO: 879 - protein, 774 aa, synthetic construct
MILDTDYITEDGKPVFRIFKKENGEFKIEYDRTFEPYFYALLKDDSAIEEVKKITAERHGTVVTVKRVEKVQKKFLGRPVEVWKLYFTHIQDVPAIWDKIREHPAVIDIYEYDIPFAKRYLIDKGLVPMEGDEELKMLAFDIETLYHEGEEFAEGPILMISYADEEGARVITWKNVDLPYVDVVSTEREMIKRFLRVVKEKDPDVLITYNGDNFDFAYLKKRCEKLGINFALGRDGSEPKIQRMGDRFAVEVKGRIHFDLYPVIRRTINLPTYTLEAVYEAVFGQPKEKVYAEEITTAWETGENLERVARYSMEDAKVTYELGKEFLPMEAQLSRLIGQSLWDVSRSSTGNLVEWFLLRKAYERNELAPNKPDEKELARRRQSYEGGYVKEPERGLWENIVYLDFRSLYPSIIITHNVSPDTLNREGCKEYDVAPQVGHRFCKDFPGFIPSLLGDLLEERQKIKKKMKATIDPIERKLLDYRQRAIKILANSYYGYYGYARARWYCKECAESVTAWGREYITMTIKEIEEKYGFKVIYSDTDGFFATIPGADAETVKKKAMEFLKYINAKLPGALELEYEGFYKRGFFVTKKKYAVIDEEGKITTRGLEIVRRDWSEIAKETQARVLEALLKDGDVEKAVRIVKEVTEKLSKYEVPPEKLVIHEQITRDLKDYKATGPHVAVAKRLAARGVKIRPGTVISYIVLKGSGRIGDRAIPFDEFDPTKHKYDAEYYIENQVLPAVERILRAFGYRKEDLRYQKTRQVGLSAWLKPKGT

SEQ ID NO: 880 - protein, 774 aa, synthetic construct
MILDTDYITEDGKPVFRIFKKENGEFKIEYDRTFEPYFYALLKDDSAIEEVKKITAERHGTVVTVKRVEKVQKKFLGRPVEVWKLYFTHIQDEPAIRDKIREHPAVIDIYEYDIPFAKRYLIDKGLVPMEGDEELKMLAFDIETLYHEGEEFAEGPILMISYADEEGARVITWKNVDLPYVDVVSTEREMIKRFLRVVKEKDPDVLITYNGDNFDFAYLKKRCEKLGINFALGRDGSEPKIQRMGDRFAVEVKGRIHFDLYPVIRRTINLPTYTLEAVYEAVFGQPKEKVYAEEITTAWETGENLERVARYSMEDAKVTYELGKEFLPMEAQLSRLIGQSLWDVSRSSTGNLVEWFLLRKAYERNELAPNKPDEKELARRRQSYEGGYVKEPERGLWENIVYLDFRSLYPSIIITHNVSPDTLNREGCKEYDVAPQVGHRFCKDFPGFIPSLLGDLLEERQKIKKKMKATIDPIERKLLDYRQRAIKILANSYYGYYGYARARWYCKECAESVTAWGREYITMTIKEIEEKYGFKVIYSDTDGFFATIPGADAETVKKKAMEFLKYINAKLPGALELEYEGFYKRGFFVTKKKYAVIDEEGKITTRGLEIVRRDWSEIAKETQARVLEALLKDGDVEKAVRIVKEVTEKLSKYEVPPEKLVIHEQITRDLKDYKATGPHVAVAKRLAARGVKIRPGTVISYIVLKGSGRIGDRAIPFDEFDPTKHKYDAEYYIENQVLPAVERILRAFGYRKEDLRYQKTRQVGLSAWLKPKGT

SEQ ID NO: 881 - protein, 774 aa, synthetic construct
MILDTDYITEDGKPVFRIFKKENGEFKIEYDRTFEPYFYALLKDDSAIEEVKKITAERHGTVVTVKRVEKVQKKFLGRPVEVWKLYFTHIQDIPAIRDKIREHPAVIDIYEYDIPFAKRYLIDKGLVPMEGDEELKMLAFDIETLYHEGEEFAEGPILMISYADEEGARVITWKNVDLPYVDVVSTEREMIKRFLRVVKEKDPDVLITYNGDNFDFAYLKKRCEKLGINFALGRDGSEPKIQRMGDRFAVEVKGRIHFDLYPVIRRTINLPTYTLEAVYEAVFGQPKEKVYAEEITTAWETGENLERVARYSMEDAKVTYELGKEFLPMEAQLSRLIGQSLWDVSRSSTGNLVEWFLLRKAYERNELAPNKPDEKELARRRQSYEGGYVKEPERGLWENIVYLDFRSLYPSIIITHNVSPDTLNREGCKEYDVAPQVGHRFCKDFPGFIPSLLGDLLEERQKIKKKMKATIDPIERKLLDYRQRAIKILANSYYGYYGYARARWYCKECAESVTAWGREYITMTIKEIEEKYGFKVIYSDTDGFFATIPGADAETVKKKAMEFLKYINAKLPGALELEYEGFYKRGFFVTKKKYAVIDEEGKITTRGLEIVRRDWSEIAKETQARVLEALLKDGDVEKAVRIVKEVTEKLSKYEVPPEKLVIHEQITRDLKDYKATGPHVAVAKRLAARGVKIRPGTVISYIVLKGSGRIGDRAIPFDEFDPTKHKYDAEYYIENQVLPAVERILRAFGYRKEDLRYQKTRQVGLSAWLKPKGT

SEQ ID NO: 882 - protein, 774 aa, synthetic construct
MILDTDYITEDGKPVFRIFKKENGEFKIEYDRTFEPYFYALLKDDSAIEEVKKITAERHGTVVTVKRVEKVQKKFLGRPVEVWKLYFTHIQDIPAIADKIREHPAVIDIYEYDIPFAKRYLIDKGLVPMEGDEELKMLAFDIETLYHEGEEFAEGPILMISYADEEGARVITWKNVDLPYVDVVSTEREMIKRFLRVVKEKDPDVLITYNGDNFDFAYLKKRCEKLGINFALGRDGSEPKIQRMGDRFAVEVKGRIHFDLYPVIRRTINLPTYTLEAVYEAVFGQPKEKVYAEEITTAWETGENLERVARYSMEDAKVTYELGKEFLPMEAQLSRLIGQSLWDVSRSSTGNLVEWFLLRKAYERNELAPNKPDEKELARRRQSYEGGYVKEPERGLWENIVYLDFRSLYPSIIITHNVSPDTLNREGCKEYDVAPQVGHRFCKDFPGFIPSLLGDLLEERQKIKKKMKATIDPIERKLLDYRQRAIKILANSYYGYYGYARARWYCKECAESVTAWGREYITMTIKEIEEKYGFKVIYSDTDGFFATIPGADAETVKKKAMEFLKYINAKLPGALELEYEGFYKRGFFVTKKKYAVIDEEGKITTRGLEIVRRDWSEIAKETQARVLEALLKDGDVEKAVRIVKEVTEKLSKYEVPPEKLVIHEQITRDLKDYKATGPHVAVAKRLAARGVKIRPGTVISYIVLKGSGRIGDRAIPFDEFDPTKHKYDAEYYIENQVLPAVERILRAFGYRKEDLRYQKTRQVGLSAWLKPKGT

SEQ ID NO: 883 - protein, 774 aa, synthetic construct
MILDTDYITEDGKPVFRIFKKENGEFKIEYDRTFEPYFYALLKDDSAIEEVKKITAERHGTVVTVKRVEKVQKKFLGRPVEVWKLYFTHIQDIPAIFDKIREHPAVIDIYEYDIPFAKRYLIDKGLVPMEGDEELKMLAFDIETLYHEGEEFAEGPILMISYADEEGARVITWKNVDLPYVDVVSTEREMIKRFLRVVKEKDPDVLITYNGDNFDFAYLKKRCEKLGINFALGRDGSEPKIQRMGDRFAVEVKGRIHFDLYPVIRRTINLPTYTLEAVYEAVFGQPKEKVYAEEITTAWETGENLERVARYSMEDAKVTYELGKEFLPMEAQLSRLIGQSLWDVSRSSTGNLVEWFLLRKAYERNELAPNKPDEKELARRRQSYEGGYVKEPERGLWENIVYLDFRSLYPSIIITHNVSPDTLNREGCKEYDVAPQVGHRFCKDFPGFIPSLLGDLLEERQKIKKKMKATIDPIERKLLDYRQRAIKILANSYYGYYGYARARWYCKECAESVTAWGREYITMTIKEIEEKYGFKVIYSDTDGFFATIPGADAETVKKKAMEFLKYINAKLPGALELEYEGFYKRGFFVTKKKYAVIDEEGKITTRGLEIVRRDWSEIAKETQARVLEALLKDGDVEKAVRIVKEVTEKLSKYEVPPEKLVIHEQITRDLKDYKATGPHVAVAKRLAARGVKIRPGTVISYIVLKGSGRIGDRAIPFDEFDPTKHKYDAEYYIENQVLPAVERILRAFGYRKEDLRYQKTRQVGLSAWLKPKGT

SEQ ID NO: 884 - protein, 774 aa, synthetic construct
MILDTDYITEDGKPVFRIFKKENGEFKIEYDRTFEPYFYALLKDDSAIEEVKKITAERHGTVVTVKRVEKVQKKFLGRPVEVWKLYFTHIQDIPAIHDKIREHPAVIDIYEYDIPFAKRYLIDKGLVPMEGDEELKMLAFDIETLYHEGEEFAEGPILMISYADEEGARVITWKNVDLPYVDVVSTEREMIKRFLRVVKEKDPDVLITYNGDNFDFAYLKKRCEKLGINFALGRDGSEPKIQRMGDRFAVEVKGRIHFDLYPVIRRTINLPTYTLEAVYEAVFGQPKEKVYAEEITTAWETGENLERVARYSMEDAKVTYELGKEFLPMEAQLSRLIGQSLWDVSRSSTGNLVEWFLLRKAYERNELAPNKPDEKELARRRQSYEGGYVKEPERGLWENIVYLDFRSLYPSIIITHNVSPDTLNREGCKEYDVAPQVGHRFCKDFPGFIPSLLGDLLEERQKIKKKMKATIDPIERKLLDYRQRAIKILANSYYGYYGYARARWYCKECAESVTAWGREYITMTIKEIEEKYGFKVIYSDTDGFFATIPGADAETVKKKAMEFLKYINAKLPGALELEYEGFYKRGFFVTKKKYAVIDEEGKITTRGLEIVRRDWSEIAKETQARVLEALLKDGDVEKAVRIVKEVTEKLSKYEVPPEKLVIHEQITRDLKDYKATGPHVAVAKRLAARGVKIRPGTVISYIVLKGSGRIGDRAIPFDEFDPTKHKYDAEYYIENQVLPAVERILRAFGYRKEDLRYQKTRQVGLSAWLKPKGT

SEQ ID NO: 885 - protein, 774 aa, synthetic construct
MILDTDYITEDGKPVFRIFKKENGEFKIEYDRTFEPYFYALLKDDSAIEEVKKITAERHGTVVTVKRVEKVQKKFLGRPVEVWKLYFTHIQDIPAIPDKIREHPAVIDIYEYDIPFAKRYLIDKGLVPMEGDEELKMLAFDIETLYHEGEEFAEGPILMISYADEEGARVITWKNVDLPYVDVVSTEREMIKRFLRVVKEKDPDVLITYNGDNFDFAYLKKRCEKLGINFALGRDGSEPKIQRMGDRFAVEVKGRIHFDLYPVIRRTINLPTYTLEAVYEAVFGQPKEKVYAEEITTAWETGENLERVARYSMEDAKVTYELGKEFLPMEAQLSRLIGQSLWDVSRSSTGNLVEWFLLRKAYERNELAPNKPDEKELARRRQSYEGGYVKEPERGLWENIVYLDFRSLYPSIIITHNVSPDTLNREGCKEYDVAPQVGHRFCKDFPGFIPSLLGDLLEERQKIKKKMKATIDPIERKLLDYRQRAIKILANSYYGYYGYARARWYCKECAESVTAWGREYITMTIKEIEEKYGFKVIYSDTDGFFATIPGADAETVKKKAMEFLKYINAKLPGALELEYEGFYKRGFFVTKKKYAVIDEEGKITTRGLEIVRRDWSEIAKETQARVLEALLKDGDVEKAVRIVKEVTEKLSKYEVPPEKLVIHEQITRDLKDYKATGPHVAVAKRLAARGVKIRPGTVISYIVLKGSGRIGDRAIPFDEFDPTKHKYDAEYYIENQVLPAVERILRAFGYRKEDLRYQKTRQVGLSAWLKPKGT

SEQ ID NO: 886 - protein, 774 aa, synthetic construct
MILDTDYITEDGKPVFRIFKKENGEFKIEYDRTFEPYFYALLKDDSAIEEVKKITAERHGTVVTVKRVEKVQKKFLGRPVEVWKLYFTHIQDIPAIWDKIREHPAVIDIYEYDIPFAKRYLIDKGLVPMEGDEELKMLAFDIETLYHEGEEFAEGPILMISYADEEGARVITWKNVDLPYVDVVSTEREMIKRFLRVVKEKDPDVLITYNGDNFDFAYLKKRCEKLGINFALGRDGSEPKIQRMGDRFAVEVKGRIHFDLYPVIRRTINLPTYTLEAVYEAVFGQPKEKVYAEEITTAWETGENLERVARYSMEDAKVTYELGKEFLPMEAQLSRLIGQSLWDVSRSSTGNLVEWFLLRKAYERNELAPNKPDEKELARRRQSYEGGYVKEPERGLWENIVYLDFRSLYPSIIITHNVSPDTLNREGCKEYDVAPQVGHRFCKDFPGFIPSLLGDLLEERQKIKKKMKATIDPIERKLLDYRQRAIKILANSYYGYYGYARARWYCKECAESVTAWGREYITMTIKEIEEKYGFKVIYSDTDGFFATIPGADAETVKKKAMEFLKYINAKLPGALELEYEGFYKRGFFVTKKKYAVIDEEGKITTRGLEIVRRDWSEIAKETQARVLEALLKDGDVEKAVRIVKEVTEKLSKYEVPPEKLVIHEQITRDLKDYKATGPHVAVAKRLAARGVKIRPGTVISYIVLKGSGRIGDRAIPFDEFDPTKHKYDAEYYIENQVLPAVERILRAFGYRKEDLRYQKTRQVGLSAWLKPKGT

SEQ ID NO: 887 - protein, 774 aa, synthetic construct
MILDTDYITEDGKPVFRIFKKENGEFKIEYDRTFEPYFYALLKDDSAIEEVKKITAERHGTVVTVKRVEKVQKKFLGRPVEVWKLYFTHIQDKPAIRDKIREHPAVIDIYEYDIPFAKRYLIDKGLVPMEGDEELKMLAFDIETLYHEGEEFAEGPILMISYADEEGARVITWKNVDLPYVDVVSTEREMIKRFLRVVKEKDPDVLITYNGDNFDFAYLKKRCEKLGINFALGRDGSEPKIQRMGDRFAVEVKGRIHFDLYPVIRRTINLPTYTLEAVYEAVFGQPKEKVYAEEITTAWETGENLERVARYSMEDAKVTYELGKEFLPMEAQLSRLIGQSLWDVSRSSTGNLVEWFLLRKAYERNELAPNKPDEKELARRRQSYEGGYVKEPERGLWENIVYLDFRSLYPSIIITHNVSPDTLNREGCKEYDVAPQVGHRFCKDFPGFIPSLLGDLLEERQKIKKKMKATIDPIERKLLDYRQRAIKILANSYYGYYGYARARWYCKECAESVTAWGREYITMTIKEIEEKYGFKVIYSDTDGFFATIPGADAETVKKKAMEFLKYINAKLPGALELEYEGFYKRGFFVTKKKYAVIDEEGKITTRGLEIVRRDWSEIAKETQARVLEALLKDGDVEKAVRIVKEVTEKLSKYEVPPEKLVIHEQITRDLKDYKATGPHVAVAKRLAARGVKIRPGTVISYIVLKGSGRIGDRAIPFDEFDPTKHKYDAEYYIENQVLPAVERILRAFGYRKEDLRYQKTRQVGLSAWLKPKGT

SEQ ID NO: 888 - protein, 774 aa, synthetic construct
MILDTDYITEDGKPVFRIFKKENGEFKIEYDRTFEPYFYALLKDDSAIEEVKKITAERHGTVVTVKRVEKVQKKFLGRPVEVWKLYFTHIQDKPAIADKIREHPAVIDIYEYDIPFAKRYLIDKGLVPMEGDEELKMLAFDIETLYHEGEEFAEGPILMISYADEEGARVITWKNVDLPYVDVVSTEREMIKRFLRVVKEKDPDVLITYNGDNFDFAYLKKRCEKLGINFALGRDGSEPKIQRMGDRFAVEVKGRIHFDLYPVIRRTINLPTYTLEAVYEAVFGQPKEKVYAEEITTAWETGENLERVARYSMEDAKVTYELGKEFLPMEAQLSRLIGQSLWDVSRSSTGNLVEWFLLRKAYERNELAPNKPDEKELARRRQSYEGGYVKEPERGLWENIVYLDFRSLYPSIIITHNVSPDTLNREGCKEYDVAPQVGHRFCKDFPGFIPSLLGDLLEERQKIKKKMKATIDPIERKLLDYRQRAIKILANSYYGYYGYARARWYCKECAESVTAWGREYITMTIKEIEEKYGFKVIYSDTDGFFATIPGADAETVKKKAMEFLKYINAKLPGALELEYEGFYKRGFFVTKKKYAVIDEEGKITTRGLEIVRRDWSEIAKETQARVLEALLKDGDVEKAVRIVKEVTEKLSKYEVPPEKLVIHEQITRDLKDYKATGPHVAVAKRLAARGVKIRPGTVISYIVLKGSGRIGDRAIPFDEFDPTKHKYDAEYYIENQVLPAVERILRAFGYRKEDLRYQKTRQVGLSAWLKPKGT

SEQ ID NO: 889 - protein, 774 aa, synthetic construct
MILDTDYITEDGKPVFRIFKKENGEFKIEYDRTFEPYFYALLKDDSAIEEVKKITAERHGTVVTVKRVEKVQKKFLGRPVEVWKLYFTHIQDKPAIFDKIREHPAVIDIYEYDIPFAKRYLIDKGLVPMEGDEELKMLAFDIETLYHEGEEFAEGPILMISYADEEGARVITWKNVDLPYVDVVSTEREMIKRFLRVVKEKDPDVLITYNGDNFDFAYLKKRCEKLGINFALGRDGSEPKIQRMGDRFAVEVKGRIHFDLYPVIRRTINLPTYTLEAVYEAVFGQPKEKVYAEEITTAWETGENLERVARYSMEDAKVTYELGKEFLPMEAQLSRLIGQSLWDVSRSSTGNLVEWFLLRKAYERNELAPNKPDEKELARRRQSYEGGYVKEPERGLWENIVYLDFRSLYPSIIITHNVSPDTLNREGCKEYDVAPQVGHRFCKDFPGFIPSLLGDLLEERQKIKKKMKATIDPIERKLLDYRQRAIKILANSYYGYYGYARARWYCKECAESVTAWGREYITMTIKEIEEKYGFKVIYSDTDGFFATIPGADAETVKKKAMEFLKYINAKLPGALELEYEGFYKRGFFVTKKKYAVIDEEGKITTRGLEIVRRDWSEIAKETQARVLEALLKDGDVEKAVRIVKEVTEKLSKYEVPPEKLVIHEQITRDLKDYKATGPHVAVAKRLAARGVKIRPGTVISYIVLKGSGRIGDRAIPFDEFDPTKHKYDAEYYIENQVLPAVERILRAFGYRKEDLRYQKTRQVGLSAWLKPKGT

SEQ ID NO: 890 - protein, 774 aa, synthetic construct
MILDTDYITEDGKPVFRIFKKENGEFKIEYDRTFEPYFYALLKDDSAIEEVKKITAERHGTVVTVKRVEKVQKKFLGRPVEVWKLYFTHIQDKPAIWDKIREHPAVIDIYEYDIPFAKRYLIDKGLVPMEGDEELKMLAFDIETLYHEGEEFAEGPILMISYADEEGARVITWKNVDLPYVDVVSTEREMIKRFLRVVKEKDPDVLITYNGDNFDFAYLKKRCEKLGINFALGRDGSEPKIQRMGDRFAVEVKGRIHFDLYPVIRRTINLPTYTLEAVYEAVFGQPKEKVYAEEITTAWETGENLERVARYSMEDAKVTYELGKEFLPMEAQLSRLIGQSLWDVSRSSTGNLVEWFLLRKAYERNELAPNKPDEKELARRRQSYEGGYVKEPERGLWENIVYLDFRSLYPSIIITHNVSPDTLNREGCKEYDVAPQVGHRFCKDFPGFIPSLLGDLLEERQKIKKKMKATIDPIERKLLDYRQRAIKILANSYYGYYGYARARWYCKECAESVTAWGREYITMTIKEIEEKYGFKVIYSDTDGFFATIPGADAETVKKKAMEFLKYINAKLPGALELEYEGFYKRGFFVTKKKYAVIDEEGKITTRGLEIVRRDWSEIAKETQARVLEALLKDGDVEKAVRIVKEVTEKLSKYEVPPEKLVIHEQITRDLKDYKATGPHVAVAKRLAARGVKIRPGTVISYIVLKGSGRIGDRAIPFDEFDPTKHKYDAEYYIENQVLPAVERILRAFGYRKEDLRYQKTRQVGLSAWLKPKGT

SEQ ID NO: 891 - protein, 774 aa, synthetic construct
MILDTDYITEDGKPVFRIFKKENGEFKIEYDRTFEPYFYALLKDDSAIEEVKKITAERHGTVVTVKRVEKVQKKFLGRPVEVWKLYFTHIQDQPAIRDKIREHPAVIDIYEYDIPFAKRYLIDKGLVPMEGDEELKMLAFDIETLYHEGEEFAEGPILMISYADEEGARVITWKNVDLPYVDVVSTEREMIKRFLRVVKEKDPDVLITYNGDNFDFAYLKKRCEKLGINFALGRDGSEPKIQRMGDRFAVEVKGRIHFDLYPVIRRTINLPTYTLEAVYEAVFGQPKEKVYAEEITTAWETGENLERVARYSMEDAKVTYELGKEFLPMEAQLSRLIGQSLWDVSRSSTGNLVEWFLLRKAYERNELAPNKPDEKELARRRQSYEGGYVKEPERGLWENIVYLDFRSLYPSIIITHNVSPDTLNREGCKEYDVAPQVGHRFCKDFPGFIPSLLGDLLEERQKIKKKMKATIDPIERKLLDYRQRAIKILANSYYGYYGYARARWYCKECAESVTAWGREYITMTIKEIEEKYGFKVIYSDTDGFFATIPGADAETVKKKAMEFLKYINAKLPGALELEYEGFYKRGFFVTKKKYAVIDEEGKITTRGLEIVRRDWSEIAKETQARVLEALLKDGDVEKAVRIVKEVTEKLSKYEVPPEKLVIHEQITRDLKDYKATGPHVAVAKRLAARGVKIRPGTVISYIVLKGSGRIGDRAIPFDEFDPTKHKYDAEYYIENQVLPAVERILRAFGYRKEDLRYQKTRQVGLSAWLKPKGT

SEQ ID NO: 892 - protein, 774 aa, synthetic construct
MILDTDYITEDGKPVFRIFKKENGEFKIEYDRTFEPYFYALLKDDSAIEEVKKITAERHGTVVTVKRVEKVQKKFLGRPVEVWKLYFTHIQDQPAIADKIREHPAVIDIYEYDIPFAKRYLIDKGLVPMEGDEELKMLAFDIETLYHEGEEFAEGPILMISYADEEGARVITWKNVDLPYVDVVSTEREMIKRFLRVVKEKDPDVLITYNGDNFDFAYLKKRCEKLGINFALGRDGSEPKIQRMGDRFAVEVKGRIHFDLYPVIRRTINLPTYTLEAVYEAVFGQPKEKVYAEEITTAWETGENLERVARYSMEDAKVTYELGKEFLPMEAQLSRLIGQSLWDVSRSSTGNLVEWFLLRKAYERNELAPNKPDEKELARRRQSYEGGYVKEPERGLWENIVYLDFRSLYPSIIITHNVSPDTLNREGCKEYDVAPQVGHRFCKDFPGFIPSLLGDLLEERQKIKKKMKATIDPIERKLLDYRQRAIKILANSYYGYYGYARARWYCKECAESVTAWGREYITMTIKEIEEKYGFKVIYSDTDGFFATIPGADAETVKKKAMEFLKYINAKLPGALELEYEGFYKRGFFVTKKKYAVIDEEGKITTRGLEIVRRDWSEIAKETQARVLEALLKDGDVEKAVRIVKEVTEKLSKYEVPPEKLVIHEQITRDLKDYKATGPHVAVAKRLAARGVKIRPGTVISYIVLKGSGRIGDRAIPFDEFDPTKHKYDAEYYIENQVLPAVERILRAFGYRKEDLRYQKTRQVGLSAWLKPKGT

SEQ ID NO: 893 - protein, 774 aa, synthetic construct
MILDTDYITEDGKPVFRIFKKENGEFKIEYDRTFEPYFYALLKDDSAIEEVKKITAERHGTVVTVKRVEKVQKKFLGRPVEVWKLYFTHIQDQPAIFDKIREHPAVIDIYEYDIPFAKRYLIDKGLVPMEGDEELKMLAFDIETLYHEGEEFAEGPILMISYADEEGARVITWKNVDLPYVDVVSTEREMIKRFLRVVKEKDPDVLITYNGDNFDFAYLKKRCEKLGINFALGRDGSEPKIQRMGDRFAVEVKGRIHFDLYPVIRRTINLPTYTLEAVYEAVFGQPKEKVYAEEITTAWETGENLERVARYSMEDAKVTYELGKEFLPMEAQLSRLIGQSLWDVSRSSTGNLVEWFLLRKAYERNELAPNKPDEKELARRRQSYEGGYVKEPERGLWENIVYLDFRSLYPSIIITHNVSPDTLNREGCKEYDVAPQVGHRFCKDFPGFIPSLLGDLLEERQKIKKKMKATIDPIERKLLDYRQRAIKILANSYYGYYGYARARWYCKECAESVTAWGREYITMTIKEIEEKYGFKVIYSDTDGFFATIPGADAETVKKKAMEFLKYINAKLPGALELEYEGFYKRGFFVTKKKYAVIDEEGKITTRGLEIVRRDWSEIAKETQARVLEALLKDGDVEKAVRIVKEVTEKLSKYEVPPEKLVIHEQITRDLKDYKATGPHVAVAKRLAARGVKIRPGTVISYIVLKGSGRIGDRAIPFDEFDPTKHKYDAEYYIENQVLPAVERILRAFGYRKEDLRYQKTRQVGLSAWLKPKGT

SEQ ID NO: 894 - protein, 774 aa, synthetic construct
MILDTDYITEDGKPVFRIFKKENGEFKIEYDRTFEPYFYALLKDDSAIEEVKKITAERHGTVVTVKRVEKVQKKFLGRPVEVWKLYFTHIQDQPAIHDKIREHPAVIDIYEYDIPFAKRYLIDKGLVPMEGDEELKMLAFDIETLYHEGEEFAEGPILMISYADEEGARVITWKNVDLPYVDVVSTEREMIKRFLRVVKEKDPDVLITYNGDNFDFAYLKKRCEKLGINFALGRDGSEPKIQRMGDRFAVEVKGRIHFDLYPVIRRTINLPTYTLEAVYEAVFGQPKEKVYAEEITTAWETGENLERVARYSMEDAKVTYELGKEFLPMEAQLSRLIGQSLWDVSRSSTGNLVEWFLLRKAYERNELAPNKPDEKELARRRQSYEGGYVKEPERGLWENIVYLDFRSLYPSIIITHNVSPDTLNREGCKEYDVAPQVGHRFCKDFPGFIPSLLGDLLEERQKIKKKMKATIDPIERKLLDYRQRAIKILANSYYGYYGYARARWYCKECAESVTAWGREYITMTIKEIEEKYGFKVIYSDTDGFFATIPGADAETVKKKAMEFLKYINAKLPGALELEYEGFYKRGFFVTKKKYAVIDEEGKITTRGLEIVRRDWSEIAKETQARVLEALLKDGDVEKAVRIVKEVTEKLSKYEVPPEKLVIHEQITRDLKDYKATGPHVAVAKRLAARGVKIRPGTVISYIVLKGSGRIGDRAIPFDEFDPTKHKYDAEYYIENQVLPAVERILRAFGYRKEDLRYQKTRQVGLSAWLKPKGT

SEQ ID NO: 895 - protein, 774 aa, synthetic construct
MILDTDYITEDGKPVFRIFKKENGEFKIEYDRTFEPYFYALLKDDSAIEEVKKITAERHGTVVTVKRVEKVQKKFLGRPVEVWKLYFTHIQDRPAIRDKIREHPAVIDIYEYDIPFAKRYLIDKGLVPMEGDEELKMLAFDIETLYHEGEEFAEGPILMISYADEEGARVITWKNVDLPYVDVVSTEREMIKRFLRVVKEKDPDVLITYNGDNFDFAYLKKRCEKLGINFALGRDGSEPKIQRMGDRFAVEVKGRIHFDLYPVIRRTINLPTYTLEAVYEAVFGQPKEKVYAEEITTAWETGENLERVARYSMEDAKVTYELGKEFLPMEAQLSRLIGQSLWDVSRSSTGNLVEWFLLRKAYERNELAPNKPDEKELARRRQSYEGGYVKEPERGLWENIVYLDFRSLYPSIIITHNVSPDTLNREGCKEYDVAPQVGHRFCKDFPGFIPSLLGDLLEERQKIKKKMKATIDPIERKLLDYRQRAIKILANSYYGYYGYARARWYCKECAESVTAWGREYITMTIKEIEEKYGFKVIYSDTDGFFATIPGADAETVKKKAMEFLKYINAKLPGALELEYEGFYKRGFFVTKKKYAVIDEEGKITTRGLEIVRRDWSEIAKETQARVLEALLKDGDVEKAVRIVKEVTEKLSKYEVPPEKLVIHEQITRDLKDYKATGPHVAVAKRLAARGVKIRPGTVISYIVLKGSGRIGDRAIPFDEFDPTKHKYDAEYYIENQVLPAVERILRAFGYRKEDLRYQKTRQVGLSAWLKPKGT

SEQ ID NO: 896 - protein, 774 aa, synthetic construct
MILDTDYITEDGKPVFRIFKKENGEFKIEYDRTFEPYFYALLKDDSAIEEVKKITAERHGTVVTVKRVEKVQKKFLGRPVEVWKLYFTHIQDRPAIADKIREHPAVIDIYEYDIPFAKRYLIDKGLVPMEGDEELKMLAFDIETLYHEGEEFAEGPILMISYADEEGARVITWKNVDLPYVDVVSTEREMIKRFLRVVKEKDPDVLITYNGDNFDFAYLKKRCEKLGINFALGRDGSEPKIQRMGDRFAVEVKGRIHFDLYPVIRRTINLPTYTLEAVYEAVFGQPKEKVYAEEITTAWETGENLERVARYSMEDAKVTYELGKEFLPMEAQLSRLIGQSLWDVSRSSTGNLVEWFLLRKAYERNELAPNKPDEKELARRRQSYEGGYVKEPERGLWENIVYLDFRSLYPSIIITHNVSPDTLNREGCKEYDVAPQVGHRFCKDFPGFIPSLLGDLLEERQKIKKKMKATIDPIERKLLDYRQRAIKILANSYYGYYGYARARWYCKECAESVTAWGREYITMTIKEIEEKYGFKVIYSDTDGFFATIPGADAETVKKKAMEFLKYINAKLPGALELEYEGFYKRGFFVTKKKYAVIDEEGKITTRGLEIVRRDWSEIAKETQARVLEALLKDGDVEKAVRIVKEVTEKLSKYEVPPEKLVIHEQITRDLKDYKATGPHVAVAKRLAARGVKIRPGTVISYIVLKGSGRIGDRAIPFDEFDPTKHKYDAEYYIENQVLPAVERILRAFGYRKEDLRYQKTRQVGLSAWLKPKGT

SEQ ID NO: 897 - protein, 774 aa, synthetic construct
MILDTDYITEDGKPVFRIFKKENGEFKIEYDRTFEPYFYALLKDDSAIEEVKKITAERHGTVVTVKRVEKVQKKFLGRPVEVWKLYFTHIQDRPAIADKIREHPAVIDIYEYDIPFAKQYLIDKGLVPMEGDEELKMLAFDIETLYHEGEEFAEGPILMISYADEEGARVITWKNVDLPYVDVVSTEREMIKRFLRVVKEKDPDVLITYNGDNFDFAYLKKRCEKLGINFALGRDGSEPKIQRMGDRFAVEVKGRIHFDLYPVIRRTINLPTYTLEAVYEAVFGQPKEKVYAEEITTAWETGENLERVARYSMEDAKVTYELGKEFLPMEAQLSRLIGQSLWDVSRSSTGNLVEWFLLRKAYERNELAPNKPDEKELARRRQSYEGGYVKEPERGLWENIVYLDFRSLYPSIIITHNVSPDTLNREGCKEYDVAPQVGHRFCKDFPGFIPSLLGDLLEERQKIKKKMKATIDPIERKLLDYRQRAIKILANSYYGYYGYARARWYCKECAESVTAWGREYITMTIKEIEEKYGFKVIYSDTDGFFATIPGADAETVKKKAMEFLKYINAKLPGALELEYEGFYKRGFFVTKKKYAVIDEEGKITTRGLEIVRRDWSEIAKETQARVLEALLKDGDVEKAVRIVKEVTEKLSKYEVPPEKLVIHEQITRDLKDYKATGPHVAVAKRLAARGVKIRPGTVISYIVLKGSGRIGDRAIPFDEFDPTKHKYDAEYYIENQVLPAVERILRAFGYRKEDLRYQKTRQVGLSAWLKPKGT

SEQ ID NO: 898 - protein, 774 aa, synthetic construct
MILDTDYITEDGKPVFRIFKKENGEFKIEYDRTFEPYFYALLKDDSAIEEVKKITAERHGTVVTVKRVEKVQKKFLGRPVEVWKLYFTHIQDRPAIFDKIREHPAVIDIYEYDIPFAKRYLIDKGLVPMEGDEELKMLAFDIETLYHEGEEFAEGPILMISYADEEGARVITWKNVDLPYVDVVSTEREMIKRFLRVVKEKDPDVLITYNGDNFDFAYLKKRCEKLGINFALGRDGSEPKIQRMGDRFAVEVKGRIHFDLYPVIRRTINLPTYTLEAVYEAVFGQPKEKVYAEEITTAWETGENLERVARYSMEDAKVTYELGKEFLPMEAQLSRLIGQSLWDVSRSSTGNLVEWFLLRKAYERNELAPNKPDEKELARRRQSYEGGYVKEPERGLWENIVYLDFRSLYPSIIITHNVSPDTLNREGCKEYDVAPQVGHRFCKDFPGFIPSLLGDLLEERQKIKKKMKATIDPIERKLLDYRQRAIKILANSYYGYYGYARARWYCKECAESVTAWGREYITMTIKEIEEKYGFKVIYSDTDGFFATIPGADAETVKKKAMEFLKYINAKLPGALELEYEGFYKRGFFVTKKKYAVIDEEGKITTRGLEIVRRDWSEIAKETQARVLEALLKDGDVEKAVRIVKEVTEKLSKYEVPPEKLVIHEQITRDLKDYKATGPHVAVAKRLAARGVKIRPGTVISYIVLKGSGRIGDRAIPFDEFDPTKHKYDAEYYIENQVLPAVERILRAFGYRKEDLRYQKTRQVGLSAWLKPKGT

SEQ ID NO: 899 - protein, 774 aa, synthetic construct
MILDTDYITEDGKPVFRIFKKENGEFKIEYDRTFEPYFYALLKDDSAIEEVKKITAERHGTVVTVKRVEKVQKKFLGRPVEVWKLYFTHIQDRPAIHDKIREHPAVIDIYEYDIPFAKRYLIDKGLVPMEGDEELKMLAFDIETLYHEGEEFAEGPILMISYADEEGARVITWKNVDLPYVDVVSTEREMIKRFLRVVKEKDPDVLITYNGDNFDFAYLKKRCEKLGINFALGRDGSEPKIQRMGDRFAVEVKGRIHFDLYPVIRRTINLPTYTLEAVYEAVFGQPKEKVYAEEITTAWETGENLERVARYSMEDAKVTYELGKEFLPMEAQLSRLIGQSLWDVSRSSTGNLVEWFLLRKAYERNELAPNKPDEKELARRRQSYEGGYVKEPERGLWENIVYLDFRSLYPSIIITHNVSPDTLNREGCKEYDVAPQVGHRFCKDFPGFIPSLLGDLLEERQKIKKKMKATIDPIERKLLDYRQRAIKILANSYYGYYGYARARWYCKECAESVTAWGREYITMTIKEIEEKYGFKVIYSDTDGFFATIPGADAETVKKKAMEFLKYINAKLPGALELEYEGFYKRGFFVTKKKYAVIDEEGKITTRGLEIVRRDWSEIAKETQARVLEALLKDGDVEKAVRIVKEVTEKLSKYEVPPEKLVIHEQITRDLKDYKATGPHVAVAKRLAARGVKIRPGTVISYIVLKGSGRIGDRAIPFDEFDPTKHKYDAEYYIENQVLPAVERILRAFGYRKEDLRYQKTRQVGLSAWLKPKGT

SEQ ID NO: 900 - protein, 774 aa, synthetic construct
MILDTDYITEDGKPVFRIFKKENGEFKIEYDRTFEPYFYALLKDDSAIEEVKKITAERHGTVVTVKRVEKVQKKFLGRPVEVWKLYFTHIQDRPAIWDKIREHPAVIDIYEYDIPFAKRYLIDKGLVPMEGDEELKMLAFDIETLYHEGEEFAEGPILMISYADEEGARVITWKNVDLPYVDVVSTEREMIKRFLRVVKEKDPDVLITYNGDNFDFAYLKKRCEKLGINFALGRDGSEPKIQRMGDRFAVEVKGRIHFDLYPVIRRTINLPTYTLEAVYEAVFGQPKEKVYAEEITTAWETGENLERVARYSMEDAKVTYELGKEFLPMEAQLSRLIGQSLWDVSRSSTGNLVEWFLLRKAYERNELAPNKPDEKELARRRQSYEGGYVKEPERGLWENIVYLDFRSLYPSIIITHNVSPDTLNREGCKEYDVAPQVGHRFCKDFPGFIPSLLGDLLEERQKIKKKMKATIDPIERKLLDYRQRAIKILANSYYGYYGYARARWYCKECAESVTAWGREYITMTIKEIEEKYGFKVIYSDTDGFFATIPGADAETVKKKAMEFLKYINAKLPGALELEYEGFYKRGFFVTKKKYAVIDEEGKITTRGLEIVRRDWSEIAKETQARVLEALLKDGDVEKAVRIVKEVTEKLSKYEVPPEKLVIHEQITRDLKDYKATGPHVAVAKRLAARGVKIRPGTVISYIVLKGSGRIGDRAIPFDEFDPTKHKYDAEYYIENQVLPAVERILRAFGYRKEDLRYQKTRQVGLSAWLKPKGT

SEQ ID NO: 901 - protein, 774 aa, synthetic construct
MILDTDYITEDGKPVFRIFKKENGEFKIEYDRTFEPYFYALLKDDSAIEEVKKITAERHGTVVTVKRVEKVQKKFLGRPVEVWKLYFTHSQDVPAIRDKIREHPAVIDIYEYDIPFAKRYLIDKGLVPMEGDEELKMLAFDIETLYHEGEEFAEGPILMISYADEEGARVITWKNVDLPYVDVVSTEREMIKRFLRVVKEKDPDVLITYNGDNFDFAYLKKRCEKLGINFALGRDGSEPKIQRMGDRFAVEVKGRIHFDLYPVIRRTINLPTYTLEAVYEAVFGQPKEKVYAEEITTAWETGENLERVARYSMEDAKVTYELGKEFLPMEAQLSRLIGQSLWDVSRSSTGNLVEWFLLRKAYERNELAPNKPDEKELARRRQSYEGGYVKEPERGLWENIVYLDFRSLYPSIIITHNVSPDTLNREGCKEYDVAPQVGHRFCKDFPGFIPSLLGDLLEERQKIKKKMKATIDPIERKLLDYRQRAIKILANSYYGYYGYARARWYCKECAESVTAWGREYITMTIKEIEEKYGFKVIYSDTDGFFATIPGADAETVKKKAMEFLKYINAKLPGALELEYEGFYKRGFFVTKKKYAVIDEEGKITTRGLEIVRRDWSEIAKETQARVLEALLKDGDVEKAVRIVKEVTEKLSKYEVPPEKLVIHEQITRDLKDYKATGPHVAVAKRLAARGVKIRPGTVISYIVLKGSGRIGDRAIPFDEFDPTKHKYDAEYYIENQVLPAVERILRAFGYRKEDLRYQKTRQVGLSAWLKPKGT

SEQ ID NO: 902 - protein, 774 aa, synthetic construct
MILDTDYITEDGKPVFRIFKKENGEFKIEYDRTFEPYFYALLKDDSAIEEVKKITAERHGTVVTVKRVEKVQKKFLGRPVEVWKLYFTHSQDVPAIADKIREHPAVIDIYEYDIPFAKRYLIDKGLVPMEGDEELKMLAFDIETLYHEGEEFAEGPILMISYADEEGARVITWKNVDLPYVDVVSTEREMIKRFLRVVKEKDPDVLITYNGDNFDFAYLKKRCEKLGINFALGRDGSEPKIQRMGDRFAVEVKGRIHFDLYPVIRRTINLPTYTLEAVYEAVFGQPKEKVYAEEITTAWETGENLERVARYSMEDAKVTYELGKEFLPMEAQLSRLIGQSLWDVSRSSTGNLVEWFLLRKAYERNELAPNKPDEKELARRRQSYEGGYVKEPERGLWENIVYLDFRSLYPSIIITHNVSPDTLNREGCKEYDVAPQVGHRFCKDFPGFIPSLLGDLLEERQKIKKKMKATIDPIERKLLDYRQRAIKILANSYYGYYGYARARWYCKECAESVTAWGREYITMTIKEIEEKYGFKVIYSDTDGFFATIPGADAETVKKKAMEFLKYINAKLPGALELEYEGFYKRGFFVTKKKYAVIDEEGKITTRGLEIVRRDWSEIAKETQARVLEALLKDGDVEKAVRIVKEVTEKLSKYEVPPEKLVIHEQITRDLKDYKATGPHVAVAKRLAARGVKIRPGTVISYIVLKGSGRIGDRAIPFDEFDPTKHKYDAEYYIENQVLPAVERILRAFGYRKEDLRYQKTRQVGLSAWLKPKGT

SEQ ID NO: 903 - protein, 774 aa, synthetic construct
MILDTDYITEDGKPVFRIFKKENGEFKIEYDRTFEPYFYALLKDDSAIEEVKKITAERHGTVVTVKRVEKVQKKFLGRPVEVWKLYFTHSQDVPAIFDKIREHPAVIDIYEYDIPFAKRYLIDKGLVPMEGDEELKMLAFDIETLYHEGEEFAEGPILMISYADEEGARVITWKNVDLPYVDVVSTEREMIKRFLRVVKEKDPDVLITYNGDNFDFAYLKKRCEKLGINFALGRDGSEPKIQRMGDRFAVEVKGRIHFDLYPVIRRTINLPTYTLEAVYEAVFGQPKEKVYAEEITTAWETGENLERVARYSMEDAKVTYELGKEFLPMEAQLSRLIGQSLWDVSRSSTGNLVEWFLLRKAYERNELAPNKPDEKELARRRQSYEGGYVKEPERGLWENIVYLDFRSLYPSIIITHNVSPDTLNREGCKEYDVAPQVGHRFCKDFPGFIPSLLGDLLEERQKIKKKMKATIDPIERKLLDYRQRAIKILANSYYGYYGYARARWYCKECAESVTAWGREYITMTIKEIEEKYGFKVIYSDTDGFFATIPGADAETVKKKAMEFLKYINAKLPGALELEYEGFYKRGFFVTKKKYAVIDEEGKITTRGLEIVRRDWSEIAKETQARVLEALLKDGDVEKAVRIVKEVTEKLSKYEVPPEKLVIHEQITRDLKDYKATGPHVAVAKRLAARGVKIRPGTVISYIVLKGSGRIGDRAIPFDEFDPTKHKYDAEYYIENQVLPAVERILRAFGYRKEDLRYQKTRQVGLSAWLKPKGT

SEQ ID NO: 904 - protein, 774 aa, synthetic construct
MILDTDYITEDGKPVFRIFKKENGEFKIEYDRTFEPYFYALLKDDSAIEEVKKITAERHGTVVTVKRVEKVQKKFLGRPVEVWKLYFTHSQDVPAIWDKIREHPAVIDIYEYDIPFAKRYLIDKGLVPMEGDEELKMLAFDIETLYHEGEEFAEGPILMISYADEEGARVITWKNVDLPYVDVVSTEREMIKRFLRVVKEKDPDVLITYNGDNFDFAYLKKRCEKLGINFALGRDGSEPKIQRMGDRFAVEVKGRIHFDLYPVIRRTINLPTYTLEAVYEAVFGQPKEKVYAEEITTAWETGENLERVARYSMEDAKVTYELGKEFLPMEAQLSRLIGQSLWDVSRSSTGNLVEWFLLRKAYERNELAPNKPDEKELARRRQSYEGGYVKEPERGLWENIVYLDFRSLYPSIIITHNVSPDTLNREGCKEYDVAPQVGHRFCKDFPGFIPSLLGDLLEERQKIKKKMKATIDPIERKLLDYRQRAIKILANSYYGYYGYARARWYCKECAESVTAWGREYITMTIKEIEEKYGFKVIYSDTDGFFATIPGADAETVKKKAMEFLKYINAKLPGALELEYEGFYKRGFFVTKKKYAVIDEEGKITTRGLEIVRRDWSEIAKETQARVLEALLKDGDVEKAVRIVKEVTEKLSKYEVPPEKLVIHEQITRDLKDYKATGPHVAVAKRLAARGVKIRPGTVISYIVLKGSGRIGDRAIPFDEFDPTKHKYDAEYYIENQVLPAVERILRAFGYRKEDLRYQKTRQVGLSAWLKPKGT

SEQ ID NO: 905 - protein, 774 aa, synthetic construct
MILDTDYITEDGKPVFRIFKKENGEFKIEYDRTFEPYFYALLKDDSAIEEVKKITAERHGTVVTVKRVEKVQKKFLGRPVEVWKLYFTHSQDIPAIRDKIREHPAVIDIYEYDIPFAKRYLIDKGLVPMEGDEELKMLAFDIETLYHEGEEFAEGPILMISYADEEGARVITWKNVDLPYVDVVSTEREMIKRFLRVVKEKDPDVLITYNGDNFDFAYLKKRCEKLGINFALGRDGSEPKIQRMGDRFAVEVKGRIHFDLYPVIRRTINLPTYTLEAVYEAVFGQPKEKVYAEEITTAWETGENLERVARYSMEDAKVTYELGKEFLPMEAQLSRLIGQSLWDVSRSSTGNLVEWFLLRKAYERNELAPNKPDEKELARRRQSYEGGYVKEPERGLWENIVYLDFRSLYPSIIITHNVSPDTLNREGCKEYDVAPQVGHRFCKDFPGFIPSLLGDLLEERQKIKKKMKATIDPIERKLLDYRQRAIKILANSYYGYYGYARARWYCKECAESVTAWGREYITMTIKEIEEKYGFKVIYSDTDGFFATIPGADAETVKKKAMEFLKYINAKLPGALELEYEGFYKRGFFVTKKKYAVIDEEGKITTRGLEIVRRDWSEIAKETQARVLEALLKDGDVEKAVRIVKEVTEKLSKYEVPPEKLVIHEQITRDLKDYKATGPHVAVAKRLAARGVKIRPGTVISYIVLKGSGRIGDRAIPFDEFDPTKHKYDAEYYIENQVLPAVERILRAFGYRKEDLRYQKTRQVGLSAWLKPKGT

SEQ ID NO: 906 - protein, 774 aa, synthetic construct
MILDTDYITEDGKPVFRIFKKENGEFKIEYDRTFEPYFYALLKDDSAIEEVKKITAERHGTVVTVKRVEKVQKKFLGRPVEVWKLYFTHSQDIPAIADKIREHPAVIDIYEYDIPFAKRYLIDKGLVPMEGDEELKMLAFDIETLYHEGEEFAEGPILMISYADEEGARVITWKNVDLPYVDVVSTEREMIKRFLRVVKEKDPDVLITYNGDNFDFAYLKKRCEKLGINFALGRDGSEPKIQRMGDRFAVEVKGRIHFDLYPVIRRTINLPTYTLEAVYEAVFGQPKEKVYAEEITTAWETGENLERVARYSMEDAKVTYELGKEFLPMEAQLSRLIGQSLWDVSRSSTGNLVEWFLLRKAYERNELAPNKPDEKELARRRQSYEGGYVKEPERGLWENIVYLDFRSLYPSIIITHNVSPDTLNREGCKEYDVAPQVGHRFCKDFPGFIPSLLGDLLEERQKIKKKMKATIDPIERKLLDYRQRAIKILANSYYGYYGYARARWYCKECAESVTAWGREYITMTIKEIEEKYGFKVIYSDTDGFFATIPGADAETVKKKAMEFLKYINAKLPGALELEYEGFYKRGFFVTKKKYAVIDEEGKITTRGLEIVRRDWSEIAKETQARVLEALLKDGDVEKAVRIVKEVTEKLSKYEVPPEKLVIHEQITRDLKDYKATGPHVAVAKRLAARGVKIRPGTVISYIVLKGSGRIGDRAIPFDEFDPTKHKYDAEYYIENQVLPAVERILRAFGYRKEDLRYQKTRQVGLSAWLKPKGT

SEQ ID NO: 907 - protein, 774 aa, synthetic construct
MILDTDYITEDGKPVFRIFKKENGEFKIEYDRTFEPYFYALLKDDSAIEEVKKITAERHGTVVTVKRVEKVQKKFLGRPVEVWKLYFTHSQDIPAIFDKIREHPAVIDIYEYDIPFAKRYLIDKGLVPMEGDEELKMLAFDIETLYHEGEEFAEGPILMISYADEEGARVITWKNVDLPYVDVVSTEREMIKRFLRVVKEKDPDVLITYNGDNFDFAYLKKRCEKLGINFALGRDGSEPKIQRMGDRFAVEVKGRIHFDLYPVIRRTINLPTYTLEAVYEAVFGQPKEKVYAEEITTAWETGENLERVARYSMEDAKVTYELGKEFLPMEAQLSRLIGQSLWDVSRSSTGNLVEWFLLRKAYERNELAPNKPDEKELARRRQSYEGGYVKEPERGLWENIVYLDFRSLYPSIIITHNVSPDTLNREGCKEYDVAPQVGHRFCKDFPGFIPSLLGDLLEERQKIKKKMKATIDPIERKLLDYRQRAIKILANSYYGYYGYARARWYCKECAESVTAWGREYITMTIKEIEEKYGFKVIYSDTDGFFATIPGADAETVKKKAMEFLKYINAKLPGALELEYEGFYKRGFFVTKKKYAVIDEEGKITTRGLEIVRRDWSEIAKETQARVLEALLKDGDVEKAVRIVKEVTEKLSKYEVPPEKLVIHEQITRDLKDYKATGPHVAVAKRLAARGVKIRPGTVISYIVLKGSGRIGDRAIPFDEFDPTKHKYDAEYYIENQVLPAVERILRAFGYRKEDLRYQKTRQVGLSAWLKPKGT

SEQ ID NO: 908 - protein, 774 aa, synthetic construct
MILDTDYITEDGKPVFRIFKKENGEFKIEYDRTFEPYFYALLKDDSAIEEVKKITAERHGTVVTVKRVEKVQKKFLGRPVEVWKLYFTHSQDIPAIHDKIREHPAVIDIYEYDIPFAKRYLIDKGLVPMEGDEELKMLAFDIETLYHEGEEFAEGPILMISYADEEGARVITWKNVDLPYVDVVSTEREMIKRFLRVVKEKDPDVLITYNGDNFDFAYLKKRCEKLGINFALGRDGSEPKIQRMGDRFAVEVKGRIHFDLYPVIRRTINLPTYTLEAVYEAVFGQPKEKVYAEEITTAWETGENLERVARYSMEDAKVTYELGKEFLPMEAQLSRLIGQSLWDVSRSSTGNLVEWFLLRKAYERNELAPNKPDEKELARRRQSYEGGYVKEPERGLWENIVYLDFRSLYPSIIITHNVSPDTLNREGCKEYDVAPQVGHRFCKDFPGFIPSLLGDLLEERQKIKKKMKATIDPIERKLLDYRQRAIKILANSYYGYYGYARARWYCKECAESVTAWGREYITMTIKEIEEKYGFKVIYSDTDGFFATIPGADAETVKKKAMEFLKYINAKLPGALELEYEGFYKRGFFVTKKKYAVIDEEGKITTRGLEIVRRDWSEIAKETQARVLEALLKDGDVEKAVRIVKEVTEKLSKYEVPPEKLVIHEQITRDLKDYKATGPHVAVAKRLAARGVKIRPGTVISYIVLKGSGRIGDRAIPFDEFDPTKHKYDAEYYIENQVLPAVERILRAFGYRKEDLRYQKTRQVGLSAWLKPKGT

SEQ ID NO: 909 - protein, 774 aa, synthetic construct
MILDTDYITEDGKPVFRIFKKENGEFKIEYDRTFEPYFYALLKDDSAIEEVKKITAERHGTVVTVKRVEKVQKKFLGRPVEVWKLYFTHSQDIPAIWDKIREHPAVIDIYEYDIPFAKRYLIDKGLVPMEGDEELKMLAFDIETLYHEGEEFAEGPILMISYADEEGARVITWKNVDLPYVDVVSTEREMIKRFLRVVKEKDPDVLITYNGDNFDFAYLKKRCEKLGINFALGRDGSEPKIQRMGDRFAVEVKGRIHFDLYPVIRRTINLPTYTLEAVYEAVFGQPKEKVYAEEITTAWETGENLERVARYSMEDAKVTYELGKEFLPMEAQLSRLIGQSLWDVSRSSTGNLVEWFLLRKAYERNELAPNKPDEKELARRRQSYEGGYVKEPERGLWENIVYLDFRSLYPSIIITHNVSPDTLNREGCKEYDVAPQVGHRFCKDFPGFIPSLLGDLLEERQKIKKKMKATIDPIERKLLDYRQRAIKILANSYYGYYGYARARWYCKECAESVTAWGREYITMTIKEIEEKYGFKVIYSDTDGFFATIPGADAETVKKKAMEFLKYINAKLPGALELEYEGFYKRGFFVTKKKYAVIDEEGKITTRGLEIVRRDWSEIAKETQARVLEALLKDGDVEKAVRIVKEVTEKLSKYEVPPEKLVIHEQITRDLKDYKATGPHVAVAKRLAARGVKIRPGTVISYIVLKGSGRIGDRAIPFDEFDPTKHKYDAEYYIENQVLPAVERILRAFGYRKEDLRYQKTRQVGLSAWLKPKGT

SEQ ID NO: 910 - protein, 774 aa, synthetic construct
MILDTDYITEDGKPVFRIFKKENGEFKIEYDRTFEPYFYALLKDDSAIEEVKKITAERHGTVVTVKRVEKVQKKFLGRPVEVWKLYFTHSQDQPAIRDKIREHPAVIDIYEYDIPFAKRYLIDKGLVPMEGDEELKMLAFDIETLYHEGEEFAEGPILMISYADEEGARVITWKNVDLPYVDVVSTEREMIKRFLRVVKEKDPDVLITYNGDNFDFAYLKKRCEKLGINFALGRDGSEPKIQRMGDRFAVEVKGRIHFDLYPVIRRTINLPTYTLEAVYEAVFGQPKEKVYAEEITTAWETGENLERVARYSMEDAKVTYELGKEFLPMEAQLSRLIGQSLWDVSRSSTGNLVEWFLLRKAYERNELAPNKPDEKELARRRQSYEGGYVKEPERGLWENIVYLDFRSLYPSIIITHNVSPDTLNREGCKEYDVAPQVGHRFCKDFPGFIPSLLGDLLEERQKIKKKMKATIDPIERKLLDYRQRAIKILANSYYGYYGYARARWYCKECAESVTAWGREYITMTIKEIEEKYGFKVIYSDTDGFFATIPGADAETVKKKAMEFLKYINAKLPGALELEYEGFYKRGFFVTKKKYAVIDEEGKITTRGLEIVRRDWSEIAKETQARVLEALLKDGDVEKAVRIVKEVTEKLSKYEVPPEKLVIHEQITRDLKDYKATGPHVAVAKRLAARGVKIRPGTVISYIVLKGSGRIGDRAIPFDEFDPTKHKYDAEYYIENQVLPAVERILRAFGYRKEDLRYQKTRQVGLSAWLKPKGT

SEQ ID NO: 911 - protein, 774 aa, synthetic construct
MILDTDYITEDGKPVFRIFKKENGEFKIEYDRTFEPYFYALLKDDSAIEEVKKITAERHGTVVTVKRVEKVQKKFLGRPVEVWKLYFTHSQDRPAIRDKIREHPAVIDIYEYDIPFAKRYLIDKGLVPMEGDEELKMLAFDIETLYHEGEEFAEGPILMISYADEEGARVITWKNVDLPYVDVVSTEREMIKRFLRVVKEKDPDVLITYNGDNFDFAYLKKRCEKLGINFALGRDGSEPKIQRMGDRFAVEVKGRIHFDLYPVIRRTINLPTYTLEAVYEAVFGQPKEKVYAEEITTAWETGENLERVARYSMEDAKVTYELGKEFLPMEAQLSRLIGQSLWDVSRSSTGNLVEWFLLRKAYERNELAPNKPDEKELARRRQSYEGGYVKEPERGLWENIVYLDFRSLYPSIIITHNVSPDTLNREGCKEYDVAPQVGHRFCKDFPGFIPSLLGDLLEERQKIKKKMKATIDPIERKLLDYRQRAIKILANSYYGYYGYARARWYCKECAESVTAWGREYITMTIKEIEEKYGFKVIYSDTDGFFATIPGADAETVKKKAMEFLKYINAKLPGALELEYEGFYKRGFFVTKKKYAVIDEEGKITTRGLEIVRRDWSEIAKETQARVLEALLKDGDVEKAVRIVKEVTEKLSKYEVPPEKLVIHEQITRDLKDYKATGPHVAVAKRLAARGVKIRPGTVISYIVLKGSGRIGDRAIPFDEFDPTKHKYDAEYYIENQVLPAVERILRAFGYRKEDLRYQKTRQVGLSAWLKPKGT

SEQ ID NO: 912 - protein, 774 aa, synthetic construct
MILDTDYITEDGKPVFRIFKKENGEFKIEYDRTFEPYFYALLKDDSAIEEVKKITAERHGTVVTVKRVEKVQKKFLGRPVEVWKLYFTHSQDRPAIFDKIREHPAVIDIYEYDIPFAKRYLIDKGLVPMEGDEELKMLAFDIETLYHEGEEFAEGPILMISYADEEGARVITWKNVDLPYVDVVSTEREMIKRFLRVVKEKDPDVLITYNGDNFDFAYLKKRCEKLGINFALGRDGSEPKIQRMGDRFAVEVKGRIHFDLYPVIRRTINLPTYTLEAVYEAVFGQPKEKVYAEEITTAWETGENLERVARYSMEDAKVTYELGKEFLPMEAQLSRLIGQSLWDVSRSSTGNLVEWFLLRKAYERNELAPNKPDEKELARRRQSYEGGYVKEPERGLWENIVYLDFRSLYPSIIITHNVSPDTLNREGCKEYDVAPQVGHRFCKDFPGFIPSLLGDLLEERQKIKKKMKATIDPIERKLLDYRQRAIKILANSYYGYYGYARARWYCKECAESVTAWGREYITMTIKEIEEKYGFKVIYSDTDGFFATIPGADAETVKKKAMEFLKYINAKLPGALELEYEGFYKRGFFVTKKKYAVIDEEGKITTRGLEIVRRDWSEIAKETQARVLEALLKDGDVEKAVRIVKEVTEKLSKYEVPPEKLVIHEQITRDLKDYKATGPHVAVAKRLAARGVKIRPGTVISYIVLKGSGRIGDRAIPFDEFDPTKHKYDAEYYIENQVLPAVERILRAFGYRKEDLRYQKTRQVGLSAWLKPKGT

SEQ ID NO: 913 - protein, 774 aa, synthetic construct
MILDTDYITEDGKPVFRIFKKENGEFKIEYDRTFEPYFYALLKDDSAIEEVKKITAERHGTVVTVKRVEKVQKKFLGRPVEVWKLYFTHSQDRPAIHDKIREHPAVIDIYEYDIPFAKRYLIDKGLVPMEGDEELKMLAFDIETLYHEGEEFAEGPILMISYADEEGARVITWKNVDLPYVDVVSTEREMIKRFLRVVKEKDPDVLITYNGDNFDFAYLKKRCEKLGINFALGRDGSEPKIQRMGDRFAVEVKGRIHFDLYPVIRRTINLPTYTLEAVYEAVFGQPKEKVYAEEITTAWETGENLERVARYSMEDAKVTYELGKEFLPMEAQLSRLIGQSLWDVSRSSTGNLVEWFLLRKAYERNELAPNKPDEKELARRRQSYEGGYVKEPERGLWENIVYLDFRSLYPSIIITHNVSPDTLNREGCKEYDVAPQVGHRFCKDFPGFIPSLLGDLLEERQKIKKKMKATIDPIERKLLDYRQRAIKILANSYYGYYGYARARWYCKECAESVTAWGREYITMTIKEIEEKYGFKVIYSDTDGFFATIPGADAETVKKKAMEFLKYINAKLPGALELEYEGFYKRGFFVTKKKYAVIDEEGKITTRGLEIVRRDWSEIAKETQARVLEALLKDGDVEKAVRIVKEVTEKLSKYEVPPEKLVIHEQITRDLKDYKATGPHVAVAKRLAARGVKIRPGTVISYIVLKGSGRIGDRAIPFDEFDPTKHKYDAEYYIENQVLPAVERILRAFGYRKEDLRYQKTRQVGLSAWLKPKGT

SEQ ID NO: 914 - protein, 774 aa, synthetic construct
MILDTDYITEDGKPVFRIFKKENGEFKIEYDRTFEPYFYALLKDDSAIEEVKKITAERHGTVVTVKRVEKVQKKFLGRPVEVWKLYFTHSQDRPAIWDKIREHPAVIDIYEYDIPFAKRYLIDKGLVPMEGDEELKMLAFDIETLYHEGEEFAEGPILMISYADEEGARVITWKNVDLPYVDVVSTEREMIKRFLRVVKEKDPDVLITYNGDNFDFAYLKKRCEKLGINFALGRDGSEPKIQRMGDRFAVEVKGRIHFDLYPVIRRTINLPTYTLEAVYEAVFGQPKEKVYAEEITTAWETGENLERVARYSMEDAKVTYELGKEFLPMEAQLSRLIGQSLWDVSRSSTGNLVEWFLLRKAYERNELAPNKPDEKELARRRQSYEGGYVKEPERGLWENIVYLDFRSLYPSIIITHNVSPDTLNREGCKEYDVAPQVGHRFCKDFPGFIPSLLGDLLEERQKIKKKMKATIDPIERKLLDYRQRAIKILANSYYGYYGYARARWYCKECAESVTAWGREYITMTIKEIEEKYGFKVIYSDTDGFFATIPGADAETVKKKAMEFLKYINAKLPGALELEYEGFYKRGFFVTKKKYAVIDEEGKITTRGLEIVRRDWSEIAKETQARVLEALLKDGDVEKAVRIVKEVTEKLSKYEVPPEKLVIHEQITRDLKDYKATGPHVAVAKRLAARGVKIRPGTVISYIVLKGSGRIGDRAIPFDEFDPTKHKYDAEYYIENQVLPAVERILRAFGYRKEDLRYQKTRQVGLSAWLKPKGT

SEQ ID NO: 915 - protein, 774 aa, synthetic construct
MILDTDYITEDGKPVFRIFKKENGEFKIEYDRTFEPYFYALLKDDSAIEEVKKITAERHGTVVTVKRVEKVQKKFLGRPVEVWKLYFTHWQDVPAIRDKIREHPAVIDIYEYDIPFAKRYLIDKGLVPMEGDEELKMLAFDIETLYHEGEEFAEGPILMISYADEEGARVITWKNVDLPYVDVVSTEREMIKRFLRVVKEKDPDVLITYNGDNFDFAYLKKRCEKLGINFALGRDGSEPKIQRMGDRFAVEVKGRIHFDLYPVIRRTINLPTYTLEAVYEAVFGQPKEKVYAEEITTAWETGENLERVARYSMEDAKVTYELGKEFLPMEAQLSRLIGQSLWDVSRSSTGNLVEWFLLRKAYERNELAPNKPDEKELARRRQSYEGGYVKEPERGLWENIVYLDFRSLYPSIIITHNVSPDTLNREGCKEYDVAPQVGHRFCKDFPGFIPSLLGDLLEERQKIKKKMKATIDPIERKLLDYRQRAIKILANSYYGYYGYARARWYCKECAESVTAWGREYITMTIKEIEEKYGFKVIYSDTDGFFATIPGADAETVKKKAMEFLKYINAKLPGALELEYEGFYKRGFFVTKKKYAVIDEEGKITTRGLEIVRRDWSEIAKETQARVLEALLKDGDVEKAVRIVKEVTEKLSKYEVPPEKLVIHEQITRDLKDYKATGPHVAVAKRLAARGVKIRPGTVISYIVLKGSGRIGDRAIPFDEFDPTKHKYDAEYYIENQVLPAVERILRAFGYRKEDLRYQKTRQVGLSAWLKPKGT

SEQ ID NO: 916 - protein, 774 aa, synthetic construct
MILDTDYITEDGKPVFRIFKKENGEFKIEYDRTFEPYFYALLKDDSAIEEVKKITAERHGTVVTVKRVEKVQKKFLGRPVEVWKLYFTHWQDVPAIADKIREHPAVIDIYEYDIPFAKRYLIDKGLVPMEGDEELKMLAFDIETLYHEGEEFAEGPILMISYADEEGARVITWKNVDLPYVDVVSTEREMIKRFLRVVKEKDPDVLITYNGDNFDFAYLKKRCEKLGINFALGRDGSEPKIQRMGDRFAVEVKGRIHFDLYPVIRRTINLPTYTLEAVYEAVFGQPKEKVYAEEITTAWETGENLERVARYSMEDAKVTYELGKEFLPMEAQLSRLIGQSLWDVSRSSTGNLVEWFLLRKAYERNELAPNKPDEKELARRRQSYEGGYVKEPERGLWENIVYLDFRSLYPSIIITHNVSPDTLNREGCKEYDVAPQVGHRFCKDFPGFIPSLLGDLLEERQKIKKKMKATIDPIERKLLDYRQRAIKILANSYYGYYGYARARWYCKECAESVTAWGREYITMTIKEIEEKYGFKVIYSDTDGFFATIPGADAETVKKKAMEFLKYINAKLPGALELEYEGFYKRGFFVTKKKYAVIDEEGKITTRGLEIVRRDWSEIAKETQARVLEALLKDGDVEKAVRIVKEVTEKLSKYEVPPEKLVIHEQITRDLKDYKATGPHVAVAKRLAARGVKIRPGTVISYIVLKGSGRIGDRAIPFDEFDPTKHKYDAEYYIENQVLPAVERILRAFGYRKEDLRYQKTRQVGLSAWLKPKGT

SEQ ID NO: 917 - protein, 774 aa, synthetic construct
MILDTDYITEDGKPVFRIFKKENGEFKIEYDRTFEPYFYALLKDDSAIEEVKKITAERHGTVVTVKRVEKVQKKFLGRPVEVWKLYFTHWQDVPAIFDKIREHPAVIDIYEYDIPFAKRYLIDKGLVPMEGDEELKMLAFDIETLYHEGEEFAEGPILMISYADEEGARVITWKNVDLPYVDVVSTEREMIKRFLRVVKEKDPDVLITYNGDNFDFAYLKKRCEKLGINFALGRDGSEPKIQRMGDRFAVEVKGRIHFDLYPVIRRTINLPTYTLEAVYEAVFGQPKEKVYAEEITTAWETGENLERVARYSMEDAKVTYELGKEFLPMEAQLSRLIGQSLWDVSRSSTGNLVEWFLLRKAYERNELAPNKPDEKELARRRQSYEGGYVKEPERGLWENIVYLDFRSLYPSIIITHNVSPDTLNREGCKEYDVAPQVGHRFCKDFPGFIPSLLGDLLEERQKIKKKMKATIDPIERKLLDYRQRAIKILANSYYGYYGYARARWYCKECAESVTAWGREYITMTIKEIEEKYGFKVIYSDTDGFFATIPGADAETVKKKAMEFLKYINAKLPGALELEYEGFYKRGFFVTKKKYAVIDEEGKITTRGLEIVRRDWSEIAKETQARVLEALLKDGDVEKAVRIVKEVTEKLSKYEVPPEKLVIHEQITRDLKDYKATGPHVAVAKRLAARGVKIRPGTVISYIVLKGSGRIGDRAIPFDEFDPTKHKYDAEYYIENQVLPAVERILRAFGYRKEDLRYQKTRQVGLSAWLKPKGT

SEQ ID NO: 918 - protein, 774 aa, synthetic construct
MILDTDYITEDGKPVFRIFKKENGEFKIEYDRTFEPYFYALLKDDSAIEEVKKITAERHGTVVTVKRVEKVQKKFLGRPVEVWKLYFTHWQDVPAIHDKIREHPAVIDIYEYDIPFAKRYLIDKGLVPMEGDEELKMLAFDIETLYHEGEEFAEGPILMISYADEEGARVITWKNVDLPYVDVVSTEREMIKRFLRVVKEKDPDVLITYNGDNFDFAYLKKRCEKLGINFALGRDGSEPKIQRMGDRFAVEVKGRIHFDLYPVIRRTINLPTYTLEAVYEAVFGQPKEKVYAEEITTAWETGENLERVARYSMEDAKVTYELGKEFLPMEAQLSRLIGQSLWDVSRSSTGNLVEWFLLRKAYERNELAPNKPDEKELARRRQSYEGGYVKEPERGLWENIVYLDFRSLYPSIIITHNVSPDTLNREGCKEYDVAPQVGHRFCKDFPGFIPSLLGDLLEERQKIKKKMKATIDPIERKLLDYRQRAIKILANSYYGYYGYARARWYCKECAESVTAWGREYITMTIKEIEEKYGFKVIYSDTDGFFATIPGADAETVKKKAMEFLKYINAKLPGALELEYEGFYKRGFFVTKKKYAVIDEEGKITTRGLEIVRRDWSEIAKETQARVLEALLKDGDVEKAVRIVKEVTEKLSKYEVPPEKLVIHEQITRDLKDYKATGPHVAVAKRLAARGVKIRPGTVISYIVLKGSGRIGDRAIPFDEFDPTKHKYDAEYYIENQVLPAVERILRAFGYRKEDLRYQKTRQVGLSAWLKPKGT

SEQ ID NO: 919 - protein, 774 aa, synthetic construct
MILDTDYITEDGKPVFRIFKKENGEFKIEYDRTFEPYFYALLKDDSAIEEVKKITAERHGTVVTVKRVEKVQKKFLGRPVEVWKLYFTHWQDVPAIWDKIREHPAVIDIYEYDIPFAKRYLIDKGLVPMEGDEELKMLAFDIETLYHEGEEFAEGPILMISYADEEGARVITWKNVDLPYVDVVSTEREMIKRFLRVVKEKDPDVLITYNGDNFDFAYLKKRCEKLGINFALGRDGSEPKIQRMGDRFAVEVKGRIHFDLYPVIRRTINLPTYTLEAVYEAVFGQPKEKVYAEEITTAWETGENLERVARYSMEDAKVTYELGKEFLPMEAQLSRLIGQSLWDVSRSSTGNLVEWFLLRKAYERNELAPNKPDEKELARRRQSYEGGYVKEPERGLWENIVYLDFRSLYPSIIITHNVSPDTLNREGCKEYDVAPQVGHRFCKDFPGFIPSLLGDLLEERQKIKKKMKATIDPIERKLLDYRQRAIKILANSYYGYYGYARARWYCKECAESVTAWGREYITMTIKEIEEKYGFKVIYSDTDGFFATIPGADAETVKKKAMEFLKYINAKLPGALELEYEGFYKRGFFVTKKKYAVIDEEGKITTRGLEIVRRDWSEIAKETQARVLEALLKDGDVEKAVRIVKEVTEKLSKYEVPPEKLVIHEQITRDLKDYKATGPHVAVAKRLAARGVKIRPGTVISYIVLKGSGRIGDRAIPFDEFDPTKHKYDAEYYIENQVLPAVERILRAFGYRKEDLRYQKTRQVGLSAWLKPKGT

SEQ ID NO: 920 - protein, 774 aa, synthetic construct
MILDTDYITEDGKPVFRIFKKENGEFKIEYDRTFEPYFYALLKDDSAIEEVKKITAERHGTVVTVKRVEKVQKKFLGRPVEVWKLYFTHWQDEPAIFDKIREHPAVIDIYEYDIPFAKRYLIDKGLVPMEGDEELKMLAFDIETLYHEGEEFAEGPILMISYADEEGARVITWKNVDLPYVDVVSTEREMIKRFLRVVKEKDPDVLITYNGDNFDFAYLKKRCEKLGINFALGRDGSEPKIQRMGDRFAVEVKGRIHFDLYPVIRRTINLPTYTLEAVYEAVFGQPKEKVYAEEITTAWETGENLERVARYSMEDAKVTYELGKEFLPMEAQLSRLIGQSLWDVSRSSTGNLVEWFLLRKAYERNELAPNKPDEKELARRRQSYEGGYVKEPERGLWENIVYLDFRSLYPSIIITHNVSPDTLNREGCKEYDVAPQVGHRFCKDFPGFIPSLLGDLLEERQKIKKKMKATIDPIERKLLDYRQRAIKILANSYYGYYGYARARWYCKECAESVTAWGREYITMTIKEIEEKYGFKVIYSDTDGFFATIPGADAETVKKKAMEFLKYINAKLPGALELEYEGFYKRGFFVTKKKYAVIDEEGKITTRGLEIVRRDWSEIAKETQARVLEALLKDGDVEKAVRIVKEVTEKLSKYEVPPEKLVIHEQITRDLKDYKATGPHVAVAKRLAARGVKIRPGTVISYIVLKGSGRIGDRAIPFDEFDPTKHKYDAEYYIENQVLPAVERILRAFGYRKEDLRYQKTRQVGLSAWLKPKGT

SEQ ID NO: 921 - protein, 774 aa, synthetic construct
MILDTDYITEDGKPVFRIFKKENGEFKIEYDRTFEPYFYALLKDDSAIEEVKKITAERHGTVVTVKRVEKVQKKFLGRPVEVWKLYFTHWQDIPAIRDKIREHPAVIDIYEYDIPFAKRYLIDKGLVPMEGDEELKMLAFDIETLYHEGEEFAEGPILMISYADEEGARVITWKNVDLPYVDVVSTEREMIKRFLRVVKEKDPDVLITYNGDNFDFAYLKKRCEKLGINFALGRDGSEPKIQRMGDRFAVEVKGRIHFDLYPVIRRTINLPTYTLEAVYEAVFGQPKEKVYAEEITTAWETGENLERVARYSMEDAKVTYELGKEFLPMEAQLSRLIGQSLWDVSRSSTGNLVEWFLLRKAYERNELAPNKPDEKELARRRQSYEGGYVKEPERGLWENIVYLDFRSLYPSIIITHNVSPDTLNREGCKEYDVAPQVGHRFCKDFPGFIPSLLGDLLEERQKIKKKMKATIDPIERKLLDYRQRAIKILANSYYGYYGYARARWYCKECAESVTAWGREYITMTIKEIEEKYGFKVIYSDTDGFFATIPGADAETVKKKAMEFLKYINAKLPGALELEYEGFYKRGFFVTKKKYAVIDEEGKITTRGLEIVRRDWSEIAKETQARVLEALLKDGDVEKAVRIVKEVTEKLSKYEVPPEKLVIHEQITRDLKDYKATGPHVAVAKRLAARGVKIRPGTVISYIVLKGSGRIGDRAIPFDEFDPTKHKYDAEYYIENQVLPAVERILRAFGYRKEDLRYQKTRQVGLSAWLKPKGT

SEQ ID NO: 922 - protein, 774 aa, synthetic construct
MILDTDYITEDGKPVFRIFKKENGEFKIEYDRTFEPYFYALLKDDSAIEEVKKITAERHGTVVTVKRVEKVQKKFLGRPVEVWKLYFTHWQDIPAIADKIREHPAVIDIYEYDIPFAKRYLIDKGLVPMEGDEELKMLAFDIETLYHEGEEFAEGPILMISYADEEGARVITWKNVDLPYVDVVSTEREMIKRFLRVVKEKDPDVLITYNGDNFDFAYLKKRCEKLGINFALGRDGSEPKIQRMGDRFAVEVKGRIHFDLYPVIRRTINLPTYTLEAVYEAVFGQPKEKVYAEEITTAWETGENLERVARYSMEDAKVTYELGKEFLPMEAQLSRLIGQSLWDVSRSSTGNLVEWFLLRKAYERNELAPNKPDEKELARRRQSYEGGYVKEPERGLWENIVYLDFRSLYPSIIITHNVSPDTLNREGCKEYDVAPQVGHRFCKDFPGFIPSLLGDLLEERQKIKKKMKATIDPIERKLLDYRQRAIKILANSYYGYYGYARARWYCKECAESVTAWGREYITMTIKEIEEKYGFKVIYSDTDGFFATIPGADAETVKKKAMEFLKYINAKLPGALELEYEGFYKRGFFVTKKKYAVIDEEGKITTRGLEIVRRDWSEIAKETQARVLEALLKDGDVEKAVRIVKEVTEKLSKYEVPPEKLVIHEQITRDLKDYKATGPHVAVAKRLAARGVKIRPGTVISYIVLKGSGRIGDRAIPFDEFDPTKHKYDAEYYIENQVLPAVERILRAFGYRKEDLRYQKTRQVGLSAWLKPKGT

SEQ ID NO: 923 - protein, 774 aa, synthetic construct
MILDTDYITEDGKPVFRIFKKENGEFKIEYDRTFEPYFYALLKDDSAIEEVKKITAERHGTVVTVKRVEKVQKKFLGRPVEVWKLYFTHWQDIPAIFDKIREHPAVIDIYEYDIPFAKRYLIDKGLVPMEGDEELKMLAFDIETLYHEGEEFAEGPILMISYADEEGARVITWKNVDLPYVDVVSTEREMIKRFLRVVKEKDPDVLITYNGDNFDFAYLKKRCEKLGINFALGRDGSEPKIQRMGDRFAVEVKGRIHFDLYPVIRRTINLPTYTLEAVYEAVFGQPKEKVYAEEITTAWETGENLERVARYSMEDAKVTYELGKEFLPMEAQLSRLIGQSLWDVSRSSTGNLVEWFLLRKAYERNELAPNKPDEKELARRRQSYEGGYVKEPERGLWENIVYLDFRSLYPSIIITHNVSPDTLNREGCKEYDVAPQVGHRFCKDFPGFIPSLLGDLLEERQKIKKKMKATIDPIERKLLDYRQRAIKILANSYYGYYGYARARWYCKECAESVTAWGREYITMTIKEIEEKYGFKVIYSDTDGFFATIPGADAETVKKKAMEFLKYINAKLPGALELEYEGFYKRGFFVTKKKYAVIDEEGKITTRGLEIVRRDWSEIAKETQARVLEALLKDGDVEKAVRIVKEVTEKLSKYEVPPEKLVIHEQITRDLKDYKATGPHVAVAKRLAARGVKIRPGTVISYIVLKGSGRIGDRAIPFDEFDPTKHKYDAEYYIENQVLPAVERILRAFGYRKEDLRYQKTRQVGLSAWLKPKGT

SEQ ID NO: 924 - protein, 774 aa, synthetic construct
MILDTDYITEDGKPVFRIFKKENGEFKIEYDRTFEPYFYALLKDDSAIEEVKKITAERHGTVVTVKRVEKVQKKFLGRPVEVWKLYFTHWQDIPAIHDKIREHPAVIDIYEYDIPFAKRYLIDKGLVPMEGDEELKMLAFDIETLYHEGEEFAEGPILMISYADEEGARVITWKNVDLPYVDVVSTEREMIKRFLRVVKEKDPDVLITYNGDNFDFAYLKKRCEKLGINFALGRDGSEPKIQRMGDRFAVEVKGRIHFDLYPVIRRTINLPTYTLEAVYEAVFGQPKEKVYAEEITTAWETGENLERVARYSMEDAKVTYELGKEFLPMEAQLSRLIGQSLWDVSRSSTGNLVEWFLLRKAYERNELAPNKPDEKELARRRQSYEGGYVKEPERGLWENIVYLDFRSLYPSIIITHNVSPDTLNREGCKEYDVAPQVGHRFCKDFPGFIPSLLGDLLEERQKIKKKMKATIDPIERKLLDYRQRAIKILANSYYGYYGYARARWYCKECAESVTAWGREYITMTIKEIEEKYGFKVIYSDTDGFFATIPGADAETVKKKAMEFLKYINAKLPGALELEYEGFYKRGFFVTKKKYAVIDEEGKITTRGLEIVRRDWSEIAKETQARVLEALLKDGDVEKAVRIVKEVTEKLSKYEVPPEKLVIHEQITRDLKDYKATGPHVAVAKRLAARGVKIRPGTVISYIVLKGSGRIGDRAIPFDEFDPTKHKYDAEYYIENQVLPAVERILRAFGYRKEDLRYQKTRQVGLSAWLKPKGT

SEQ ID NO: 925 - protein, 774 aa, synthetic construct
MILDTDYITEDGKPVFRIFKKENGEFKIEYDRTFEPYFYALLKDDSAIEEVKKITAERHGTVVTVKRVEKVQKKFLGRPVEVWKLYFTHWQDIPAIWDKIREHPAVIDIYEYDIPFAKRYLIDKGLVPMEGDEELKMLAFDIETLYHEGEEFAEGPILMISYADEEGARVITWKNVDLPYVDVVSTEREMIKRFLRVVKEKDPDVLITYNGDNFDFAYLKKRCEKLGINFALGRDGSEPKIQRMGDRFAVEVKGRIHFDLYPVIRRTINLPTYTLEAVYEAVFGQPKEKVYAEEITTAWETGENLERVARYSMEDAKVTYELGKEFLPMEAQLSRLIGQSLWDVSRSSTGNLVEWFLLRKAYERNELAPNKPDEKELARRRQSYEGGYVKEPERGLWENIVYLDFRSLYPSIIITHNVSPDTLNREGCKEYDVAPQVGHRFCKDFPGFIPSLLGDLLEERQKIKKKMKATIDPIERKLLDYRQRAIKILANSYYGYYGYARARWYCKECAESVTAWGREYITMTIKEIEEKYGFKVIYSDTDGFFATIPGADAETVKKKAMEFLKYINAKLPGALELEYEGFYKRGFFVTKKKYAVIDEEGKITTRGLEIVRRDWSEIAKETQARVLEALLKDGDVEKAVRIVKEVTEKLSKYEVPPEKLVIHEQITRDLKDYKATGPHVAVAKRLAARGVKIRPGTVISYIVLKGSGRIGDRAIPFDEFDPTKHKYDAEYYIENQVLPAVERILRAFGYRKEDLRYQKTRQVGLSAWLKPKGT

SEQ ID NO: 926 - protein, 774 aa, synthetic construct
MILDTDYITEDGKPVFRIFKKENGEFKIEYDRTFEPYFYALLKDDSAIEEVKKITAERHGTVVTVKRVEKVQKKFLGRPVEVWKLYFTHWQDKPAIRDKIREHPAVIDIYEYDIPFAKRYLIDKGLVPMEGDEELKMLAFDIETLYHEGEEFAEGPILMISYADEEGARVITWKNVDLPYVDVVSTEREMIKRFLRVVKEKDPDVLITYNGDNFDFAYLKKRCEKLGINFALGRDGSEPKIQRMGDRFAVEVKGRIHFDLYPVIRRTINLPTYTLEAVYEAVFGQPKEKVYAEEITTAWETGENLERVARYSMEDAKVTYELGKEFLPMEAQLSRLIGQSLWDVSRSSTGNLVEWFLLRKAYERNELAPNKPDEKELARRRQSYEGGYVKEPERGLWENIVYLDFRSLYPSIIITHNVSPDTLNREGCKEYDVAPQVGHRFCKDFPGFIPSLLGDLLEERQKIKKKMKATIDPIERKLLDYRQRAIKILANSYYGYYGYARARWYCKECAESVTAWGREYITMTIKEIEEKYGFKVIYSDTDGFFATIPGADAETVKKKAMEFLKYINAKLPGALELEYEGFYKRGFFVTKKKYAVIDEEGKITTRGLEIVRRDWSEIAKETQARVLEALLKDGDVEKAVRIVKEVTEKLSKYEVPPEKLVIHEQITRDLKDYKATGPHVAVAKRLAARGVKIRPGTVISYIVLKGSGRIGDRAIPFDEFDPTKHKYDAEYYIENQVLPAVERILRAFGYRKEDLRYQKTRQVGLSAWLKPKGT

SEQ ID NO: 927 - protein, 774 aa, synthetic construct
MILDTDYITEDGKPVFRIFKKENGEFKIEYDRTFEPYFYALLKDDSAIEEVKKITAERHGTVVTVKRVEKVQKKFLGRPVEVWKLYFTHWQDKPAIFDKIREHPAVIDIYEYDIPFAKRYLIDKGLVPMEGDEELKMLAFDIETLYHEGEEFAEGPILMISYADEEGARVITWKNVDLPYVDVVSTEREMIKRFLRVVKEKDPDVLITYNGDNFDFAYLKKRCEKLGINFALGRDGSEPKIQRMGDRFAVEVKGRIHFDLYPVIRRTINLPTYTLEAVYEAVFGQPKEKVYAEEITTAWETGENLERVARYSMEDAKVTYELGKEFLPMEAQLSRLIGQSLWDVSRSSTGNLVEWFLLRKAYERNELAPNKPDEKELARRRQSYEGGYVKEPERGLWENIVYLDFRSLYPSIIITHNVSPDTLNREGCKEYDVAPQVGHRFCKDFPGFIPSLLGDLLEERQKIKKKMKATIDPIERKLLDYRQRAIKILANSYYGYYGYARARWYCKECAESVTAWGREYITMTIKEIEEKYGFKVIYSDTDGFFATIPGADAETVKKKAMEFLKYINAKLPGALELEYEGFYKRGFFVTKKKYAVIDEEGKITTRGLEIVRRDWSEIAKETQARVLEALLKDGDVEKAVRIVKEVTEKLSKYEVPPEKLVIHEQITRDLKDYKATGPHVAVAKRLAARGVKIRPGTVISYIVLKGSGRIGDRAIPFDEFDPTKHKYDAEYYIENQVLPAVERILRAFGYRKEDLRYQKTRQVGLSAWLKPKGT

SEQ ID NO: 928 - protein, 774 aa, synthetic construct
MILDTDYITEDGKPVFRIFKKENGEFKIEYDRTFEPYFYALLKDDSAIEEVKKITAERHGTVVTVKRVEKVQKKFLGRPVEVWKLYFTHWQDKPAIWDKIREHPAVIDIYEYDIPFAKRYLIDKGLVPMEGDEELKMLAFDIETLYHEGEEFAEGPILMISYADEEGARVITWKNVDLPYVDVVSTEREMIKRFLRVVKEKDPDVLITYNGDNFDFAYLKKRCEKLGINFALGRDGSEPKIQRMGDRFAVEVKGRIHFDLYPVIRRTINLPTYTLEAVYEAVFGQPKEKVYAEEITTAWETGENLERVARYSMEDAKVTYELGKEFLPMEAQLSRLIGQSLWDVSRSSTGNLVEWFLLRKAYERNELAPNKPDEKELARRRQSYEGGYVKEPERGLWENIVYLDFRSLYPSIIITHNVSPDTLNREGCKEYDVAPQVGHRFCKDFPGFIPSLLGDLLEERQKIKKKMKATIDPIERKLLDYRQRAIKILANSYYGYYGYARARWYCKECAESVTAWGREYITMTIKEIEEKYGFKVIYSDTDGFFATIPGADAETVKKKAMEFLKYINAKLPGALELEYEGFYKRGFFVTKKKYAVIDEEGKITTRGLEIVRRDWSEIAKETQARVLEALLKDGDVEKAVRIVKEVTEKLSKYEVPPEKLVIHEQITRDLKDYKATGPHVAVAKRLAARGVKIRPGTVISYIVLKGSGRIGDRAIPFDEFDPTKHKYDAEYYIENQVLPAVERILRAFGYRKEDLRYQKTRQVGLSAWLKPKGT

SEQ ID NO: 929 - protein, 774 aa, synthetic construct
MILDTDYITEDGKPVFRIFKKENGEFKIEYDRTFEPYFYALLKDDSAIEEVKKITAERHGTVVTVKRVEKVQKKFLGRPVEVWKLYFTHWQDQPAIRDKIREHPAVIDIYEYDIPFAKRYLIDKGLVPMEGDEELKMLAFDIETLYHEGEEFAEGPILMISYADEEGARVITWKNVDLPYVDVVSTEREMIKRFLRVVKEKDPDVLITYNGDNFDFAYLKKRCEKLGINFALGRDGSEPKIQRMGDRFAVEVKGRIHFDLYPVIRRTINLPTYTLEAVYEAVFGQPKEKVYAEEITTAWETGENLERVARYSMEDAKVTYELGKEFLPMEAQLSRLIGQSLWDVSRSSTGNLVEWFLLRKAYERNELAPNKPDEKELARRRQSYEGGYVKEPERGLWENIVYLDFRSLYPSIIITHNVSPDTLNREGCKEYDVAPQVGHRFCKDFPGFIPSLLGDLLEERQKIKKKMKATIDPIERKLLDYRQRAIKILANSYYGYYGYARARWYCKECAESVTAWGREYITMTIKEIEEKYGFKVIYSDTDGFFATIPGADAETVKKKAMEFLKYINAKLPGALELEYEGFYKRGFFVTKKKYAVIDEEGKITTRGLEIVRRDWSEIAKETQARVLEALLKDGDVEKAVRIVKEVTEKLSKYEVPPEKLVIHEQITRDLKDYKATGPHVAVAKRLAARGVKIRPGTVISYIVLKGSGRIGDRAIPFDEFDPTKHKYDAEYYIENQVLPAVERILRAFGYRKEDLRYQKTRQVGLSAWLKPKGT

SEQ ID NO: 930 - protein, 774 aa, synthetic construct
MILDTDYITEDGKPVFRIFKKENGEFKIEYDRTFEPYFYALLKDDSAIEEVKKITAERHGTVVTVKRVEKVQKKFLGRPVEVWKLYFTHWQDQPAIADKIREHPAVIDIYEYDIPFAKRYLIDKGLVPMEGDEELKMLAFDIETLYHEGEEFAEGPILMISYADEEGARVITWKNVDLPYVDVVSTEREMIKRFLRVVKEKDPDVLITYNGDNFDFAYLKKRCEKLGINFALGRDGSEPKIQRMGDRFAVEVKGRIHFDLYPVIRRTINLPTYTLEAVYEAVFGQPKEKVYAEEITTAWETGENLERVARYSMEDAKVTYELGKEFLPMEAQLSRLIGQSLWDVSRSSTGNLVEWFLLRKAYERNELAPNKPDEKELARRRQSYEGGYVKEPERGLWENIVYLDFRSLYPSIIITHNVSPDTLNREGCKEYDVAPQVGHRFCKDFPGFIPSLLGDLLEERQKIKKKMKATIDPIERKLLDYRQRAIKILANSYYGYYGYARARWYCKECAESVTAWGREYITMTIKEIEEKYGFKVIYSDTDGFFATIPGADAETVKKKAMEFLKYINAKLPGALELEYEGFYKRGFFVTKKKYAVIDEEGKITTRGLEIVRRDWSEIAKETQARVLEALLKDGDVEKAVRIVKEVTEKLSKYEVPPEKLVIHEQITRDLKDYKATGPHVAVAKRLAARGVKIRPGTVISYIVLKGSGRIGDRAIPFDEFDPTKHKYDAEYYIENQVLPAVERILRAFGYRKEDLRYQKTRQVGLSAWLKPKGT

SEQ ID NO: 931 - protein, 774 aa, synthetic construct
MILDTDYITEDGKPVFRIFKKENGEFKIEYDRTFEPYFYALLKDDSAIEEVKKITAERHGTVVTVKRVEKVQKKFLGRPVEVWKLYFTHWQDQPAIFDKIREHPAVIDIYEYDIPFAKRYLIDKGLVPMEGDEELKMLAFDIETLYHEGEEFAEGPILMISYADEEGARVITWKNVDLPYVDVVSTEREMIKRFLRVVKEKDPDVLITYNGDNFDFAYLKKRCEKLGINFALGRDGSEPKIQRMGDRFAVEVKGRIHFDLYPVIRRTINLPTYTLEAVYEAVFGQPKEKVYAEEITTAWETGENLERVARYSMEDAKVTYELGKEFLPMEAQLSRLIGQSLWDVSRSSTGNLVEWFLLRKAYERNELAPNKPDEKELARRRQSYEGGYVKEPERGLWENIVYLDFRSLYPSIIITHNVSPDTLNREGCKEYDVAPQVGHRFCKDFPGFIPSLLGDLLEERQKIKKKMKATIDPIERKLLDYRQRAIKILANSYYGYYGYARARWYCKECAESVTAWGREYITMTIKEIEEKYGFKVIYSDTDGFFATIPGADAETVKKKAMEFLKYINAKLPGALELEYEGFYKRGFFVTKKKYAVIDEEGKITTRGLEIVRRDWSEIAKETQARVLEALLKDGDVEKAVRIVKEVTEKLSKYEVPPEKLVIHEQITRDLKDYKATGPHVAVAKRLAARGVKIRPGTVISYIVLKGSGRIGDRAIPFDEFDPTKHKYDAEYYIENQVLPAVERILRAFGYRKEDLRYQKTRQVGLSAWLKPKGT

SEQ ID NO: 932 - protein, 774 aa, synthetic construct
MILDTDYITEDGKPVFRIFKKENGEFKIEYDRTFEPYFYALLKDDSAIEEVKKITAERHGTVVTVKRVEKVQKKFLGRPVEVWKLYFTHWQDQPAIWDKIREHPAVIDIYEYDIPFAKRYLIDKGLVPMEGDEELKMLAFDIETLYHEGEEFAEGPILMISYADEEGARVITWKNVDLPYVDVVSTEREMIKRFLRVVKEKDPDVLITYNGDNFDFAYLKKRCEKLGINFALGRDGSEPKIQRMGDRFAVEVKGRIHFDLYPVIRRTINLPTYTLEAVYEAVFGQPKEKVYAEEITTAWETGENLERVARYSMEDAKVTYELGKEFLPMEAQLSRLIGQSLWDVSRSSTGNLVEWFLLRKAYERNELAPNKPDEKELARRRQSYEGGYVKEPERGLWENIVYLDFRSLYPSIIITHNVSPDTLNREGCKEYDVAPQVGHRFCKDFPGFIPSLLGDLLEERQKIKKKMKATIDPIERKLLDYRQRAIKILANSYYGYYGYARARWYCKECAESVTAWGREYITMTIKEIEEKYGFKVIYSDTDGFFATIPGADAETVKKKAMEFLKYINAKLPGALELEYEGFYKRGFFVTKKKYAVIDEEGKITTRGLEIVRRDWSEIAKETQARVLEALLKDGDVEKAVRIVKEVTEKLSKYEVPPEKLVIHEQITRDLKDYKATGPHVAVAKRLAARGVKIRPGTVISYIVLKGSGRIGDRAIPFDEFDPTKHKYDAEYYIENQVLPAVERILRAFGYRKEDLRYQKTRQVGLSAWLKPKGT

SEQ ID NO: 933 - protein, 774 aa, synthetic construct
MILDTDYITEDGKPVFRIFKKENGEFKIEYDRTFEPYFYALLKDDSAIEEVKKITAERHGTVVTVKRVEKVQKKFLGRPVEVWKLYFTHWQDRPAIRDKIREHPAVIDIYEYDIPFAKRYLIDKGLVPMEGDEELKMLAFDIETLYHEGEEFAEGPILMISYADEEGARVITWKNVDLPYVDVVSTEREMIKRFLRVVKEKDPDVLITYNGDNFDFAYLKKRCEKLGINFALGRDGSEPKIQRMGDRFAVEVKGRIHFDLYPVIRRTINLPTYTLEAVYEAVFGQPKEKVYAEEITTAWETGENLERVARYSMEDAKVTYELGKEFLPMEAQLSRLIGQSLWDVSRSSTGNLVEWFLLRKAYERNELAPNKPDEKELARRRQSYEGGYVKEPERGLWENIVYLDFRSLYPSIIITHNVSPDTLNREGCKEYDVAPQVGHRFCKDFPGFIPSLLGDLLEERQKIKKKMKATIDPIERKLLDYRQRAIKILANSYYGYYGYARARWYCKECAESVTAWGREYITMTIKEIEEKYGFKVIYSDTDGFFATIPGADAETVKKKAMEFLKYINAKLPGALELEYEGFYKRGFFVTKKKYAVIDEEGKITTRGLEIVRRDWSEIAKETQARVLEALLKDGDVEKAVRIVKEVTEKLSKYEVPPEKLVIHEQITRDLKDYKATGPHVAVAKRLAARGVKIRPGTVISYIVLKGSGRIGDRAIPFDEFDPTKHKYDAEYYIENQVLPAVERILRAFGYRKEDLRYQKTRQVGLSAWLKPKGT

SEQ ID NO: 934 - protein, 774 aa, synthetic construct
MILDTDYITEDGKPVFRIFKKENGEFKIEYDRTFEPYFYALLKDDSAIEEVKKITAERHGTVVTVKRVEKVQKKFLGRPVEVWKLYFTHWQDRPAIADKIREHPAVIDIYEYDIPFAKRYLIDKGLVPMEGDEELKMLAFDIETLYHEGEEFAEGPILMISYADEEGARVITWKNVDLPYVDVVSTEREMIKRFLRVVKEKDPDVLITYNGDNFDFAYLKKRCEKLGINFALGRDGSEPKIQRMGDRFAVEVKGRIHFDLYPVIRRTINLPTYTLEAVYEAVFGQPKEKVYAEEITTAWETGENLERVARYSMEDAKVTYELGKEFLPMEAQLSRLIGQSLWDVSRSSTGNLVEWFLLRKAYERNELAPNKPDEKELARRRQSYEGGYVKEPERGLWENIVYLDFRSLYPSIIITHNVSPDTLNREGCKEYDVAPQVGHRFCKDFPGFIPSLLGDLLEERQKIKKKMKATIDPIERKLLDYRQRAIKILANSYYGYYGYARARWYCKECAESVTAWGREYITMTIKEIEEKYGFKVIYSDTDGFFATIPGADAETVKKKAMEFLKYINAKLPGALELEYEGFYKRGFFVTKKKYAVIDEEGKITTRGLEIVRRDWSEIAKETQARVLEALLKDGDVEKAVRIVKEVTEKLSKYEVPPEKLVIHEQITRDLKDYKATGPHVAVAKRLAARGVKIRPGTVISYIVLKGSGRIGDRAIPFDEFDPTKHKYDAEYYIENQVLPAVERILRAFGYRKEDLRYQKTRQVGLSAWLKPKGT

SEQ ID NO: 935 - protein, 774 aa, synthetic construct
MILDTDYITEDGKPVFRIFKKENGEFKIEYDRTFEPYFYALLKDDSAIEEVKKITAERHGTVVTVKRVEKVQKKFLGRPVEVWKLYFTHWQDRPAIHDKIREHPAVIDIYEYDIPFAKRYLIDKGLVPMEGDEELKMLAFDIETLYHEGEEFAEGPILMISYADEEGARVITWKNVDLPYVDVVSTEREMIKRFLRVVKEKDPDVLITYNGDNFDFAYLKKRCEKLGINFALGRDGSEPKIQRMGDRFAVEVKGRIHFDLYPVIRRTINLPTYTLEAVYEAVFGQPKEKVYAEEITTAWETGENLERVARYSMEDAKVTYELGKEFLPMEAQLSRLIGQSLWDVSRSSTGNLVEWFLLRKAYERNELAPNKPDEKELARRRQSYEGGYVKEPERGLWENIVYLDFRSLYPSIIITHNVSPDTLNREGCKEYDVAPQVGHRFCKDFPGFIPSLLGDLLEERQKIKKKMKATIDPIERKLLDYRQRAIKILANSYYGYYGYARARWYCKECAESVTAWGREYITMTIKEIEEKYGFKVIYSDTDGFFATIPGADAETVKKKAMEFLKYINAKLPGALELEYEGFYKRGFFVTKKKYAVIDEEGKITTRGLEIVRRDWSEIAKETQARVLEALLKDGDVEKAVRIVKEVTEKLSKYEVPPEKLVIHEQITRDLKDYKATGPHVAVAKRLAARGVKIRPGTVISYIVLKGSGRIGDRAIPFDEFDPTKHKYDAEYYIENQVLPAVERILRAFGYRKEDLRYQKTRQVGLSAWLKPKGT

SEQ ID NO: 936 - protein, 774 aa, synthetic construct
MILDTDYITEDGKPVFRIFKKENGEFKIEYDRTFEPYFYALLKDDSAIEEVKKITAERHGTVVTVKRVEKVQKKFLGRPVEVWKLYFTHWQDRPAIWDKIREHPAVIDIYEYDIPFAKRYLIDKGLVPMEGDEELKMLAFDIETLYHEGEEFAEGPILMISYADEEGARVITWKNVDLPYVDVVSTEREMIKRFLRVVKEKDPDVLITYNGDNFDFAYLKKRCEKLGINFALGRDGSEPKIQRMGDRFAVEVKGRIHFDLYPVIRRTINLPTYTLEAVYEAVFGQPKEKVYAEEITTAWETGENLERVARYSMEDAKVTYELGKEFLPMEAQLSRLIGQSLWDVSRSSTGNLVEWFLLRKAYERNELAPNKPDEKELARRRQSYEGGYVKEPERGLWENIVYLDFRSLYPSIIITHNVSPDTLNREGCKEYDVAPQVGHRFCKDFPGFIPSLLGDLLEERQKIKKKMKATIDPIERKLLDYRQRAIKILANSYYGYYGYARARWYCKECAESVTAWGREYITMTIKEIEEKYGFKVIYSDTDGFFATIPGADAETVKKKAMEFLKYINAKLPGALELEYEGFYKRGFFVTKKKYAVIDEEGKITTRGLEIVRRDWSEIAKETQARVLEALLKDGDVEKAVRIVKEVTEKLSKYEVPPEKLVIHEQITRDLKDYKATGPHVAVAKRLAARGVKIRPGTVISYIVLKGSGRIGDRAIPFDEFDPTKHKYDAEYYIENQVLPAVERILRAFGYRKEDLRYQKTRQVGLSAWLKPKGT

SEQ ID NO: 937 - protein, 774 aa, synthetic construct
MILDTDYITEDGKPVFRIFKKENGEFKIEYDRTFEPYFYALLKDDSAIEEVKKITAERHGTVVTVKRVEKVQKKFLGRPVEVWKLYFTHYQDVPAIRDKIREHPAVIDIYEYDIPFAKRYLIDKGLVPMEGDEELKMLAFDIETLYHEGEEFAEGPILMISYADEEGARVITWKNVDLPYVDVVSTEREMIKRFLRVVKEKDPDVLITYNGDNFDFAYLKKRCEKLGINFALGRDGSEPKIQRMGDRFAVEVKGRIHFDLYPVIRRTINLPTYTLEAVYEAVFGQPKEKVYAEEITTAWETGENLERVARYSMEDAKVTYELGKEFLPMEAQLSRLIGQSLWDVSRSSTGNLVEWFLLRKAYERNELAPNKPDEKELARRRQSYEGGYVKEPERGLWENIVYLDFRSLYPSIIITHNVSPDTLNREGCKEYDVAPQVGHRFCKDFPGFIPSLLGDLLEERQKIKKKMKATIDPIERKLLDYRQRAIKILANSYYGYYGYARARWYCKECAESVTAWGREYITMTIKEIEEKYGFKVIYSDTDGFFATIPGADAETVKKKAMEFLKYINAKLPGALELEYEGFYKRGFFVTKKKYAVIDEEGKITTRGLEIVRRDWSEIAKETQARVLEALLKDGDVEKAVRIVKEVTEKLSKYEVPPEKLVIHEQITRDLKDYKATGPHVAVAKRLAARGVKIRPGTVISYIVLKGSGRIGDRAIPFDEFDPTKHKYDAEYYIENQVLPAVERILRAFGYRKEDLRYQKTRQVGLSAWLKPKGT

SEQ ID NO: 938 - protein, 774 aa, synthetic construct
MILDTDYITEDGKPVFRIFKKENGEFKIEYDRTFEPYFYALLKDDSAIEEVKKITAERHGTVVTVKRVEKVQKKFLGRPVEVWKLYFTHYQDVPAIADKIREHPAVIDIYEYDIPFAKRYLIDKGLVPMEGDEELKMLAFDIETLYHEGEEFAEGPILMISYADEEGARVITWKNVDLPYVDVVSTEREMIKRFLRVVKEKDPDVLITYNGDNFDFAYLKKRCEKLGINFALGRDGSEPKIQRMGDRFAVEVKGRIHFDLYPVIRRTINLPTYTLEAVYEAVFGQPKEKVYAEEITTAWETGENLERVARYSMEDAKVTYELGKEFLPMEAQLSRLIGQSLWDVSRSSTGNLVEWFLLRKAYERNELAPNKPDEKELARRRQSYEGGYVKEPERGLWENIVYLDFRSLYPSIIITHNVSPDTLNREGCKEYDVAPQVGHRFCKDFPGFIPSLLGDLLEERQKIKKKMKATIDPIERKLLDYRQRAIKILANSYYGYYGYARARWYCKECAESVTAWGREYITMTIKEIEEKYGFKVIYSDTDGFFATIPGADAETVKKKAMEFLKYINAKLPGALELEYEGFYKRGFFVTKKKYAVIDEEGKITTRGLEIVRRDWSEIAKETQARVLEALLKDGDVEKAVRIVKEVTEKLSKYEVPPEKLVIHEQITRDLKDYKATGPHVAVAKRLAARGVKIRPGTVISYIVLKGSGRIGDRAIPFDEFDPTKHKYDAEYYIENQVLPAVERILRAFGYRKEDLRYQKTRQVGLSAWLKPKGT

SEQ ID NO: 939 - protein, 774 aa, synthetic construct
MILDTDYITEDGKPVFRIFKKENGEFKIEYDRTFEPYFYALLKDDSAIEEVKKITAERHGTVVTVKRVEKVQKKFLGRPVEVWKLYFTHYQDVPAIFDKIREHPAVIDIYEYDIPFAKRYLIDKGLVPMEGDEELKMLAFDIETLYHEGEEFAEGPILMISYADEEGARVITWKNVDLPYVDVVSTEREMIKRFLRVVKEKDPDVLITYNGDNFDFAYLKKRCEKLGINFALGRDGSEPKIQRMGDRFAVEVKGRIHFDLYPVIRRTINLPTYTLEAVYEAVFGQPKEKVYAEEITTAWETGENLERVARYSMEDAKVTYELGKEFLPMEAQLSRLIGQSLWDVSRSSTGNLVEWFLLRKAYERNELAPNKPDEKELARRRQSYEGGYVKEPERGLWENIVYLDFRSLYPSIIITHNVSPDTLNREGCKEYDVAPQVGHRFCKDFPGFIPSLLGDLLEERQKIKKKMKATIDPIERKLLDYRQRAIKILANSYYGYYGYARARWYCKECAESVTAWGREYITMTIKEIEEKYGFKVIYSDTDGFFATIPGADAETVKKKAMEFLKYINAKLPGALELEYEGFYKRGFFVTKKKYAVIDEEGKITTRGLEIVRRDWSEIAKETQARVLEALLKDGDVEKAVRIVKEVTEKLSKYEVPPEKLVIHEQITRDLKDYKATGPHVAVAKRLAARGVKIRPGTVISYIVLKGSGRIGDRAIPFDEFDPTKHKYDAEYYIENQVLPAVERILRAFGYRKEDLRYQKTRQVGLSAWLKPKGT

SEQ ID NO: 940 - protein, 774 aa, synthetic construct
MILDTDYITEDGKPVFRIFKKENGEFKIEYDRTFEPYFYALLKDDSAIEEVKKITAERHGTVVTVKRVEKVQKKFLGRPVEVWKLYFTHYQDVPAIHDKIREHPAVIDIYEYDIPFAKRYLIDKGLVPMEGDEELKMLAFDIETLYHEGEEFAEGPILMISYADEEGARVITWKNVDLPYVDVVSTEREMIKRFLRVVKEKDPDVLITYNGDNFDFAYLKKRCEKLGINFALGRDGSEPKIQRMGDRFAVEVKGRIHFDLYPVIRRTINLPTYTLEAVYEAVFGQPKEKVYAEEITTAWETGENLERVARYSMEDAKVTYELGKEFLPMEAQLSRLIGQSLWDVSRSSTGNLVEWFLLRKAYERNELAPNKPDEKELARRRQSYEGGYVKEPERGLWENIVYLDFRSLYPSIIITHNVSPDTLNREGCKEYDVAPQVGHRFCKDFPGFIPSLLGDLLEERQKIKKKMKATIDPIERKLLDYRQRAIKILANSYYGYYGYARARWYCKECAESVTAWGREYITMTIKEIEEKYGFKVIYSDTDGFFATIPGADAETVKKKAMEFLKYINAKLPGALELEYEGFYKRGFFVTKKKYAVIDEEGKITTRGLEIVRRDWSEIAKETQARVLEALLKDGDVEKAVRIVKEVTEKLSKYEVPPEKLVIHEQITRDLKDYKATGPHVAVAKRLAARGVKIRPGTVISYIVLKGSGRIGDRAIPFDEFDPTKHKYDAEYYIENQVLPAVERILRAFGYRKEDLRYQKTRQVGLSAWLKPKGT

SEQ ID NO: 941 - protein, 774 aa, synthetic construct
MILDTDYITEDGKPVFRIFKKENGEFKIEYDRTFEPYFYALLKDDSAIEEVKKITAERHGTVVTVKRVEKVQKKFLGRPVEVWKLYFTHYQDIPAIRDKIREHPAVIDIYEYDIPFAKRYLIDKGLVPMEGDEELKMLAFDIETLYHEGEEFAEGPILMISYADEEGARVITWKNVDLPYVDVVSTEREMIKRFLRVVKEKDPDVLITYNGDNFDFAYLKKRCEKLGINFALGRDGSEPKIQRMGDRFAVEVKGRIHFDLYPVIRRTINLPTYTLEAVYEAVFGQPKEKVYAEEITTAWETGENLERVARYSMEDAKVTYELGKEFLPMEAQLSRLIGQSLWDVSRSSTGNLVEWFLLRKAYERNELAPNKPDEKELARRRQSYEGGYVKEPERGLWENIVYLDFRSLYPSIIITHNVSPDTLNREGCKEYDVAPQVGHRFCKDFPGFIPSLLGDLLEERQKIKKKMKATIDPIERKLLDYRQRAIKILANSYYGYYGYARARWYCKECAESVTAWGREYITMTIKEIEEKYGFKVIYSDTDGFFATIPGADAETVKKKAMEFLKYINAKLPGALELEYEGFYKRGFFVTKKKYAVIDEEGKITTRGLEIVRRDWSEIAKETQARVLEALLKDGDVEKAVRIVKEVTEKLSKYEVPPEKLVIHEQITRDLKDYKATGPHVAVAKRLAARGVKIRPGTVISYIVLKGSGRIGDRAIPFDEFDPTKHKYDAEYYIENQVLPAVERILRAFGYRKEDLRYQKTRQVGLSAWLKPKGT

SEQ ID NO: 942 - protein, 774 aa, synthetic construct
MILDTDYITEDGKPVFRIFKKENGEFKIEYDRTFEPYFYALLKDDSAIEEVKKITAERHGTVVTVKRVEKVQKKFLGRPVEVWKLYFTHYQDIPAIADKIREHPAVIDIYEYDIPFAKRYLIDKGLVPMEGDEELKMLAFDIETLYHEGEEFAEGPILMISYADEEGARVITWKNVDLPYVDVVSTEREMIKRFLRVVKEKDPDVLITYNGDNFDFAYLKKRCEKLGINFALGRDGSEPKIQRMGDRFAVEVKGRIHFDLYPVIRRTINLPTYTLEAVYEAVFGQPKEKVYAEEITTAWETGENLERVARYSMEDAKVTYELGKEFLPMEAQLSRLIGQSLWDVSRSSTGNLVEWFLLRKAYERNELAPNKPDEKELARRRQSYEGGYVKEPERGLWENIVYLDFRSLYPSIIITHNVSPDTLNREGCKEYDVAPQVGHRFCKDFPGFIPSLLGDLLEERQKIKKKMKATIDPIERKLLDYRQRAIKILANSYYGYYGYARARWYCKECAESVTAWGREYITMTIKEIEEKYGFKVIYSDTDGFFATIPGADAETVKKKAMEFLKYINAKLPGALELEYEGFYKRGFFVTKKKYAVIDEEGKITTRGLEIVRRDWSEIAKETQARVLEALLKDGDVEKAVRIVKEVTEKLSKYEVPPEKLVIHEQITRDLKDYKATGPHVAVAKRLAARGVKIRPGTVISYIVLKGSGRIGDRAIPFDEFDPTKHKYDAEYYIENQVLPAVERILRAFGYRKEDLRYQKTRQVGLSAWLKPKGT

SEQ ID NO: 943 - protein, 774 aa, synthetic construct
MILDTDYITEDGKPVFRIFKKENGEFKIEYDRTFEPYFYALLKDDSAIEEVKKITAERHGTVVTVKRVEKVQKKFLGRPVEVWKLYFTHYQDIPAIFDKIREHPAVIDIYEYDIPFAKRYLIDKGLVPMEGDEELKMLAFDIETLYHEGEEFAEGPILMISYADEEGARVITWKNVDLPYVDVVSTEREMIKRFLRVVKEKDPDVLITYNGDNFDFAYLKKRCEKLGINFALGRDGSEPKIQRMGDRFAVEVKGRIHFDLYPVIRRTINLPTYTLEAVYEAVFGQPKEKVYAEEITTAWETGENLERVARYSMEDAKVTYELGKEFLPMEAQLSRLIGQSLWDVSRSSTGNLVEWFLLRKAYERNELAPNKPDEKELARRRQSYEGGYVKEPERGLWENIVYLDFRSLYPSIIITHNVSPDTLNREGCKEYDVAPQVGHRFCKDFPGFIPSLLGDLLEERQKIKKKMKATIDPIERKLLDYRQRAIKILANSYYGYYGYARARWYCKECAESVTAWGREYITMTIKEIEEKYGFKVIYSDTDGFFATIPGADAETVKKKAMEFLKYINAKLPGALELEYEGFYKRGFFVTKKKYAVIDEEGKITTRGLEIVRRDWSEIAKETQARVLEALLKDGDVEKAVRIVKEVTEKLSKYEVPPEKLVIHEQITRDLKDYKATGPHVAVAKRLAARGVKIRPGTVISYIVLKGSGRIGDRAIPFDEFDPTKHKYDAEYYIENQVLPAVERILRAFGYRKEDLRYQKTRQVGLSAWLKPKGT

SEQ ID NO: 944 - protein, 774 aa, synthetic construct
MILDTDYITEDGKPVFRIFKKENGEFKIEYDRTFEPYFYALLKDDSAIEEVKKITAERHGTVVTVKRVEKVQKKFLGRPVEVWKLYFTHYQDIPAIHDKIREHPAVIDIYEYDIPFAKRYLIDKGLVPMEGDEELKMLAFDIETLYHEGEEFAEGPILMISYADEEGARVITWKNVDLPYVDVVSTEREMIKRFLRVVKEKDPDVLITYNGDNFDFAYLKKRCEKLGINFALGRDGSEPKIQRMGDRFAVEVKGRIHFDLYPVIRRTINLPTYTLEAVYEAVFGQPKEKVYAEEITTAWETGENLERVARYSMEDAKVTYELGKEFLPMEAQLSRLIGQSLWDVSRSSTGNLVEWFLLRKAYERNELAPNKPDEKELARRRQSYEGGYVKEPERGLWENIVYLDFRSLYPSIIITHNVSPDTLNREGCKEYDVAPQVGHRFCKDFPGFIPSLLGDLLEERQKIKKKMKATIDPIERKLLDYRQRAIKILANSYYGYYGYARARWYCKECAESVTAWGREYITMTIKEIEEKYGFKVIYSDTDGFFATIPGADAETVKKKAMEFLKYINAKLPGALELEYEGFYKRGFFVTKKKYAVIDEEGKITTRGLEIVRRDWSEIAKETQARVLEALLKDGDVEKAVRIVKEVTEKLSKYEVPPEKLVIHEQITRDLKDYKATGPHVAVAKRLAARGVKIRPGTVISYIVLKGSGRIGDRAIPFDEFDPTKHKYDAEYYIENQVLPAVERILRAFGYRKEDLRYQKTRQVGLSAWLKPKGT

SEQ ID NO: 945 - protein, 774 aa, synthetic construct
MILDTDYITEDGKPVFRIFKKENGEFKIEYDRTFEPYFYALLKDDSAIEEVKKITAERHGTVVTVKRVEKVQKKFLGRPVEVWKLYFTHYQDIPAIWDKIREHPAVIDIYEYDIPFAKRYLIDKGLVPMEGDEELKMLAFDIETLYHEGEEFAEGPILMISYADEEGARVITWKNVDLPYVDVVSTEREMIKRFLRVVKEKDPDVLITYNGDNFDFAYLKKRCEKLGINFALGRDGSEPKIQRMGDRFAVEVKGRIHFDLYPVIRRTINLPTYTLEAVYEAVFGQPKEKVYAEEITTAWETGENLERVARYSMEDAKVTYELGKEFLPMEAQLSRLIGQSLWDVSRSSTGNLVEWFLLRKAYERNELAPNKPDEKELARRRQSYEGGYVKEPERGLWENIVYLDFRSLYPSIIITHNVSPDTLNREGCKEYDVAPQVGHRFCKDFPGFIPSLLGDLLEERQKIKKKMKATIDPIERKLLDYRQRAIKILANSYYGYYGYARARWYCKECAESVTAWGREYITMTIKEIEEKYGFKVIYSDTDGFFATIPGADAETVKKKAMEFLKYINAKLPGALELEYEGFYKRGFFVTKKKYAVIDEEGKITTRGLEIVRRDWSEIAKETQARVLEALLKDGDVEKAVRIVKEVTEKLSKYEVPPEKLVIHEQITRDLKDYKATGPHVAVAKRLAARGVKIRPGTVISYIVLKGSGRIGDRAIPFDEFDPTKHKYDAEYYIENQVLPAVERILRAFGYRKEDLRYQKTRQVGLSAWLKPKGT

SEQ ID NO: 946 - protein, 774 aa, synthetic construct
MILDTDYITEDGKPVFRIFKKENGEFKIEYDRTFEPYFYALLKDDSAIEEVKKITAERHGTVVTVKRVEKVQKKFLGRPVEVWKLYFTHYQDKPAIADKIREHPAVIDIYEYDIPFAKRYLIDKGLVPMEGDEELKMLAFDIETLYHEGEEFAEGPILMISYADEEGARVITWKNVDLPYVDVVSTEREMIKRFLRVVKEKDPDVLITYNGDNFDFAYLKKRCEKLGINFALGRDGSEPKIQRMGDRFAVEVKGRIHFDLYPVIRRTINLPTYTLEAVYEAVFGQPKEKVYAEEITTAWETGENLERVARYSMEDAKVTYELGKEFLPMEAQLSRLIGQSLWDVSRSSTGNLVEWFLLRKAYERNELAPNKPDEKELARRRQSYEGGYVKEPERGLWENIVYLDFRSLYPSIIITHNVSPDTLNREGCKEYDVAPQVGHRFCKDFPGFIPSLLGDLLEERQKIKKKMKATIDPIERKLLDYRQRAIKILANSYYGYYGYARARWYCKECAESVTAWGREYITMTIKEIEEKYGFKVIYSDTDGFFATIPGADAETVKKKAMEFLKYINAKLPGALELEYEGFYKRGFFVTKKKYAVIDEEGKITTRGLEIVRRDWSEIAKETQARVLEALLKDGDVEKAVRIVKEVTEKLSKYEVPPEKLVIHEQITRDLKDYKATGPHVAVAKRLAARGVKIRPGTVISYIVLKGSGRIGDRAIPFDEFDPTKHKYDAEYYIENQVLPAVERILRAFGYRKEDLRYQKTRQVGLSAWLKPKGT

SEQ ID NO: 947 - protein, 774 aa, synthetic construct
MILDTDYITEDGKPVFRIFKKENGEFKIEYDRTFEPYFYALLKDDSAIEEVKKITAERHGTVVTVKRVEKVQKKFLGRPVEVWKLYFTHYQDKPAIFDKIREHPAVIDIYEYDIPFAKRYLIDKGLVPMEGDEELKMLAFDIETLYHEGEEFAEGPILMISYADEEGARVITWKNVDLPYVDVVSTEREMIKRFLRVVKEKDPDVLITYNGDNFDFAYLKKRCEKLGINFALGRDGSEPKIQRMGDRFAVEVKGRIHFDLYPVIRRTINLPTYTLEAVYEAVFGQPKEKVYAEEITTAWETGENLERVARYSMEDAKVTYELGKEFLPMEAQLSRLIGQSLWDVSRSSTGNLVEWFLLRKAYERNELAPNKPDEKELARRRQSYEGGYVKEPERGLWENIVYLDFRSLYPSIIITHNVSPDTLNREGCKEYDVAPQVGHRFCKDFPGFIPSLLGDLLEERQKIKKKMKATIDPIERKLLDYRQRAIKILANSYYGYYGYARARWYCKECAESVTAWGREYITMTIKEIEEKYGFKVIYSDTDGFFATIPGADAETVKKKAMEFLKYINAKLPGALELEYEGFYKRGFFVTKKKYAVIDEEGKITTRGLEIVRRDWSEIAKETQARVLEALLKDGDVEKAVRIVKEVTEKLSKYEVPPEKLVIHEQITRDLKDYKATGPHVAVAKRLAARGVKIRPGTVISYIVLKGSGRIGDRAIPFDEFDPTKHKYDAEYYIENQVLPAVERILRAFGYRKEDLRYQKTRQVGLSAWLKPKGT

SEQ ID NO: 948 - protein, 774 aa, synthetic construct
MILDTDYITEDGKPVFRIFKKENGEFKIEYDRTFEPYFYALLKDDSAIEEVKKITAERHGTVVTVKRVEKVQKKFLGRPVEVWKLYFTHYQDQPAIRDKIREHPAVIDIYEYDIPFAKRYLIDKGLVPMEGDEELKMLAFDIETLYHEGEEFAEGPILMISYADEEGARVITWKNVDLPYVDVVSTEREMIKRFLRVVKEKDPDVLITYNGDNFDFAYLKKRCEKLGINFALGRDGSEPKIQRMGDRFAVEVKGRIHFDLYPVIRRTINLPTYTLEAVYEAVFGQPKEKVYAEEITTAWETGENLERVARYSMEDAKVTYELGKEFLPMEAQLSRLIGQSLWDVSRSSTGNLVEWFLLRKAYERNELAPNKPDEKELARRRQSYEGGYVKEPERGLWENIVYLDFRSLYPSIIITHNVSPDTLNREGCKEYDVAPQVGHRFCKDFPGFIPSLLGDLLEERQKIKKKMKATIDPIERKLLDYRQRAIKILANSYYGYYGYARARWYCKECAESVTAWGREYITMTIKEIEEKYGFKVIYSDTDGFFATIPGADAETVKKKAMEFLKYINAKLPGALELEYEGFYKRGFFVTKKKYAVIDEEGKITTRGLEIVRRDWSEIAKETQARVLEALLKDGDVEKAVRIVKEVTEKLSKYEVPPEKLVIHEQITRDLKDYKATGPHVAVAKRLAARGVKIRPGTVISYIVLKGSGRIGDRAIPFDEFDPTKHKYDAEYYIENQVLPAVERILRAFGYRKEDLRYQKTRQVGLSAWLKPKGT

SEQ ID NO: 949 - protein, 774 aa, synthetic construct
MILDTDYITEDGKPVFRIFKKENGEFKIEYDRTFEPYFYALLKDDSAIEEVKKITAERHGTVVTVKRVEKVQKKFLGRPVEVWKLYFTHYQDQPAIADKIREHPAVIDIYEYDIPFAKRYLIDKGLVPMEGDEELKMLAFDIETLYHEGEEFAEGPILMISYADEEGARVITWKNVDLPYVDVVSTEREMIKRFLRVVKEKDPDVLITYNGDNFDFAYLKKRCEKLGINFALGRDGSEPKIQRMGDRFAVEVKGRIHFDLYPVIRRTINLPTYTLEAVYEAVFGQPKEKVYAEEITTAWETGENLERVARYSMEDAKVTYELGKEFLPMEAQLSRLIGQSLWDVSRSSTGNLVEWFLLRKAYERNELAPNKPDEKELARRRQSYEGGYVKEPERGLWENIVYLDFRSLYPSIIITHNVSPDTLNREGCKEYDVAPQVGHRFCKDFPGFIPSLLGDLLEERQKIKKKMKATIDPIERKLLDYRQRAIKILANSYYGYYGYARARWYCKECAESVTAWGREYITMTIKEIEEKYGFKVIYSDTDGFFATIPGADAETVKKKAMEFLKYINAKLPGALELEYEGFYKRGFFVTKKKYAVIDEEGKITTRGLEIVRRDWSEIAKETQARVLEALLKDGDVEKAVRIVKEVTEKLSKYEVPPEKLVIHEQITRDLKDYKATGPHVAVAKRLAARGVKIRPGTVISYIVLKGSGRIGDRAIPFDEFDPTKHKYDAEYYIENQVLPAVERILRAFGYRKEDLRYQKTRQVGLSAWLKPKGT

SEQ ID NO: 950 - protein, 774 aa, synthetic construct
MILDTDYITEDGKPVFRIFKKENGEFKIEYDRTFEPYFYALLKDDSAIEEVKKITAERHGTVVTVKRVEKVQKKFLGRPVEVWKLYFTHYQDQPAIFDKIREHPAVIDIYEYDIPFAKRYLIDKGLVPMEGDEELKMLAFDIETLYHEGEEFAEGPILMISYADEEGARVITWKNVDLPYVDVVSTEREMIKRFLRVVKEKDPDVLITYNGDNFDFAYLKKRCEKLGINFALGRDGSEPKIQRMGDRFAVEVKGRIHFDLYPVIRRTINLPTYTLEAVYEAVFGQPKEKVYAEEITTAWETGENLERVARYSMEDAKVTYELGKEFLPMEAQLSRLIGQSLWDVSRSSTGNLVEWFLLRKAYERNELAPNKPDEKELARRRQSYEGGYVKEPERGLWENIVYLDFRSLYPSIIITHNVSPDTLNREGCKEYDVAPQVGHRFCKDFPGFIPSLLGDLLEERQKIKKKMKATIDPIERKLLDYRQRAIKILANSYYGYYGYARARWYCKECAESVTAWGREYITMTIKEIEEKYGFKVIYSDTDGFFATIPGADAETVKKKAMEFLKYINAKLPGALELEYEGFYKRGFFVTKKKYAVIDEEGKITTRGLEIVRRDWSEIAKETQARVLEALLKDGDVEKAVRIVKEVTEKLSKYEVPPEKLVIHEQITRDLKDYKATGPHVAVAKRLAARGVKIRPGTVISYIVLKGSGRIGDRAIPFDEFDPTKHKYDAEYYIENQVLPAVERILRAFGYRKEDLRYQKTRQVGLSAWLKPKGT

SEQ ID NO: 951 - protein, 774 aa, synthetic construct
MILDTDYITEDGKPVFRIFKKENGEFKIEYDRTFEPYFYALLKDDSAIEEVKKITAERHGTVVTVKRVEKVQKKFLGRPVEVWKLYFTHYQDQPAIHDKIREHPAVIDIYEYDIPFAKRYLIDKGLVPMEGDEELKMLAFDIETLYHEGEEFAEGPILMISYADEEGARVITWKNVDLPYVDVVSTEREMIKRFLRVVKEKDPDVLITYNGDNFDFAYLKKRCEKLGINFALGRDGSEPKIQRMGDRFAVEVKGRIHFDLYPVIRRTINLPTYTLEAVYEAVFGQPKEKVYAEEITTAWETGENLERVARYSMEDAKVTYELGKEFLPMEAQLSRLIGQSLWDVSRSSTGNLVEWFLLRKAYERNELAPNKPDEKELARRRQSYEGGYVKEPERGLWENIVYLDFRSLYPSIIITHNVSPDTLNREGCKEYDVAPQVGHRFCKDFPGFIPSLLGDLLEERQKIKKKMKATIDPIERKLLDYRQRAIKILANSYYGYYGYARARWYCKECAESVTAWGREYITMTIKEIEEKYGFKVIYSDTDGFFATIPGADAETVKKKAMEFLKYINAKLPGALELEYEGFYKRGFFVTKKKYAVIDEEGKITTRGLEIVRRDWSEIAKETQARVLEALLKDGDVEKAVRIVKEVTEKLSKYEVPPEKLVIHEQITRDLKDYKATGPHVAVAKRLAARGVKIRPGTVISYIVLKGSGRIGDRAIPFDEFDPTKHKYDAEYYIENQVLPAVERILRAFGYRKEDLRYQKTRQVGLSAWLKPKGT

SEQ ID NO: 952 - protein, 774 aa, synthetic construct
MILDTDYITEDGKPVFRIFKKENGEFKIEYDRTFEPYFYALLKDDSAIEEVKKITAERHGTVVTVKRVEKVQKKFLGRPVEVWKLYFTHYQDQPAIWDKIREHPAVIDIYEYDIPFAKRYLIDKGLVPMEGDEELKMLAFDIETLYHEGEEFAEGPILMISYADEEGARVITWKNVDLPYVDVVSTEREMIKRFLRVVKEKDPDVLITYNGDNFDFAYLKKRCEKLGINFALGRDGSEPKIQRMGDRFAVEVKGRIHFDLYPVIRRTINLPTYTLEAVYEAVFGQPKEKVYAEEITTAWETGENLERVARYSMEDAKVTYELGKEFLPMEAQLSRLIGQSLWDVSRSSTGNLVEWFLLRKAYERNELAPNKPDEKELARRRQSYEGGYVKEPERGLWENIVYLDFRSLYPSIIITHNVSPDTLNREGCKEYDVAPQVGHRFCKDFPGFIPSLLGDLLEERQKIKKKMKATIDPIERKLLDYRQRAIKILANSYYGYYGYARARWYCKECAESVTAWGREYITMTIKEIEEKYGFKVIYSDTDGFFATIPGADAETVKKKAMEFLKYINAKLPGALELEYEGFYKRGFFVTKKKYAVIDEEGKITTRGLEIVRRDWSEIAKETQARVLEALLKDGDVEKAVRIVKEVTEKLSKYEVPPEKLVIHEQITRDLKDYKATGPHVAVAKRLAARGVKIRPGTVISYIVLKGSGRIGDRAIPFDEFDPTKHKYDAEYYIENQVLPAVERILRAFGYRKEDLRYQKTRQVGLSAWLKPKGT

SEQ ID NO: 953 - protein, 774 aa, synthetic construct
MILDTDYITEDGKPVFRIFKKENGEFKIEYDRTFEPYFYALLKDDSAIEEVKKITAERHGTVVTVKRVEKVQKKFLGRPVEVWKLYFTHYQDRPAIRDKIREHPAVIDIYEYDIPFAKRYLIDKGLVPMEGDEELKMLAFDIETLYHEGEEFAEGPILMISYADEEGARVITWKNVDLPYVDVVSTEREMIKRFLRVVKEKDPDVLITYNGDNFDFAYLKKRCEKLGINFALGRDGSEPKIQRMGDRFAVEVKGRIHFDLYPVIRRTINLPTYTLEAVYEAVFGQPKEKVYAEEITTAWETGENLERVARYSMEDAKVTYELGKEFLPMEAQLSRLIGQSLWDVSRSSTGNLVEWFLLRKAYERNELAPNKPDEKELARRRQSYEGGYVKEPERGLWENIVYLDFRSLYPSIIITHNVSPDTLNREGCKEYDVAPQVGHRFCKDFPGFIPSLLGDLLEERQKIKKKMKATIDPIERKLLDYRQRAIKILANSYYGYYGYARARWYCKECAESVTAWGREYITMTIKEIEEKYGFKVIYSDTDGFFATIPGADAETVKKKAMEFLKYINAKLPGALELEYEGFYKRGFFVTKKKYAVIDEEGKITTRGLEIVRRDWSEIAKETQARVLEALLKDGDVEKAVRIVKEVTEKLSKYEVPPEKLVIHEQITRDLKDYKATGPHVAVAKRLAARGVKIRPGTVISYIVLKGSGRIGDRAIPFDEFDPTKHKYDAEYYIENQVLPAVERILRAFGYRKEDLRYQKTRQVGLSAWLKPKGT

SEQ ID NO: 954 - protein, 774 aa, synthetic construct
MILDTDYITEDGKPVFRIFKKENGEFKIEYDRTFEPYFYALLKDDSAIEEVKKITAERHGTVVTVKRVEKVQKKFLGRPVEVWKLYFTHYQDRPAIADKIREHPAVIDIYEYDIPFAKRYLIDKGLVPMEGDEELKMLAFDIETLYHEGEEFAEGPILMISYADEEGARVITWKNVDLPYVDVVSTEREMIKRFLRVVKEKDPDVLITYNGDNFDFAYLKKRCEKLGINFALGRDGSEPKIQRMGDRFAVEVKGRIHFDLYPVIRRTINLPTYTLEAVYEAVFGQPKEKVYAEEITTAWETGENLERVARYSMEDAKVTYELGKEFLPMEAQLSRLIGQSLWDVSRSSTGNLVEWFLLRKAYERNELAPNKPDEKELARRRQSYEGGYVKEPERGLWENIVYLDFRSLYPSIIITHNVSPDTLNREGCKEYDVAPQVGHRFCKDFPGFIPSLLGDLLEERQKIKKKMKATIDPIERKLLDYRQRAIKILANSYYGYYGYARARWYCKECAESVTAWGREYITMTIKEIEEKYGFKVIYSDTDGFFATIPGADAETVKKKAMEFLKYINAKLPGALELEYEGFYKRGFFVTKKKYAVIDEEGKITTRGLEIVRRDWSEIAKETQARVLEALLKDGDVEKAVRIVKEVTEKLSKYEVPPEKLVIHEQITRDLKDYKATGPHVAVAKRLAARGVKIRPGTVISYIVLKGSGRIGDRAIPFDEFDPTKHKYDAEYYIENQVLPAVERILRAFGYRKEDLRYQKTRQVGLSAWLKPKGT

SEQ ID NO: 955 - protein, 774 aa, synthetic construct
MILDTDYITEDGKPVFRIFKKENGEFKIEYDRTFEPYFYALLKDDSAIEEVKKITAERHGTVVTVKRVEKVQKKFLGRPVEVWKLYFTHYQDRPAIFDKIREHPAVIDIYEYDIPFAKRYLIDKGLVPMEGDEELKMLAFDIETLYHEGEEFAEGPILMISYADEEGARVITWKNVDLPYVDVVSTEREMIKRFLRVVKEKDPDVLITYNGDNFDFAYLKKRCEKLGINFALGRDGSEPKIQRMGDRFAVEVKGRIHFDLYPVIRRTINLPTYTLEAVYEAVFGQPKEKVYAEEITTAWETGENLERVARYSMEDAKVTYELGKEFLPMEAQLSRLIGQSLWDVSRSSTGNLVEWFLLRKAYERNELAPNKPDEKELARRRQSYEGGYVKEPERGLWENIVYLDFRSLYPSIIITHNVSPDTLNREGCKEYDVAPQVGHRFCKDFPGFIPSLLGDLLEERQKIKKKMKATIDPIERKLLDYRQRAIKILANSYYGYYGYARARWYCKECAESVTAWGREYITMTIKEIEEKYGFKVIYSDTDGFFATIPGADAETVKKKAMEFLKYINAKLPGALELEYEGFYKRGFFVTKKKYAVIDEEGKITTRGLEIVRRDWSEIAKETQARVLEALLKDGDVEKAVRIVKEVTEKLSKYEVPPEKLVIHEQITRDLKDYKATGPHVAVAKRLAARGVKIRPGTVISYIVLKGSGRIGDRAIPFDEFDPTKHKYDAEYYIENQVLPAVERILRAFGYRKEDLRYQKTRQVGLSAWLKPKGT

SEQ ID NO: 956 - protein, 774 aa, synthetic construct
MILDTDYITEDGKPVFRIFKKENGEFKIEYDRTFEPYFYALLKDDSAIEEVKKITAERHGTVVTVKRVEKVQKKFLGRPVEVWKLYFTHPQDVPAIADKIREHPAVIDIYEYDIPFAKRYLIDKGLVPMEGDEELKMLAFDIETLYHEGEEFAEGPILMISYADEEGARVITWKNVDLPYVDVVSTEREMIKRFLRVVKEKDPDVLITYNGDNFDFAYLKKRCEKLGINFALGRDGSEPKIQRMGDRFAVEVKGRIHFDLYPVIRRTINLPTYTLEAVYEAVFGQPKEKVYAEEITTAWETGENLERVARYSMEDAKVTYELGKEFLPMEAQLSRLIGQSLWDVSRSSTGNLVEWFLLRKAYERNELAPNKPDEKELARRRQSYEGGYVKEPERGLWENIVYLDFRSLYPSIIITHNVSPDTLNREGCKEYDVAPQVGHRFCKDFPGFIPSLLGDLLEERQKIKKKMKATIDPIERKLLDYRQRAIKILANSYYGYYGYARARWYCKECAESVTAWGREYITMTIKEIEEKYGFKVIYSDTDGFFATIPGADAETVKKKAMEFLKYINAKLPGALELEYEGFYKRGFFVTKKKYAVIDEEGKITTRGLEIVRRDWSEIAKETQARVLEALLKDGDVEKAVRIVKEVTEKLSKYEVPPEKLVIHEQITRDLKDYKATGPHVAVAKRLAARGVKIRPGTVISYIVLKGSGRIGDRAIPFDEFDPTKHKYDAEYYIENQVLPAVERILRAFGYRKEDLRYQKTRQVGLSAWLKPKGT

SEQ ID NO: 957 - protein, 774 aa, synthetic construct
MILDTDYITEDGKPVFRIFKKENGEFKIEYDRTFEPYFYALLKDDSAIEEVKKITAERHGTVVTVKRVEKVQKKFLGRPVEVWKLYFTHPQDVPAIADKIREHPAVIDIYEYDIPFAKMYLIDKGLVPMEGDEELKMLAFDIETLYHEGEEFAEGPILMISYADEEGARVITWKNVDLPYVDVVSTEREMIKRFLRVVKEKDPDVLITYNGDNFDFAYLKKRCEKLGINFALGRDGSEPKIQRMGDRFAVEVKGRIHFDLYPVIRRTINLPTYTLEAVYEAVFGQPKEKVYAEEITTAWETGENLERVARYSMEDAKVTYELGKEFLPMEAQLSRLIGQSLWDVSRSSTGNLVEWFLLRKAYERNELAPNKPDEKELARRRQSYEGGYVKEPERGLWENIVYLDFRSLYPSIIITHNVSPDTLNREGCKEYDVAPQVGHRFCKDFPGFIPSLLGDLLEERQKIKKKMKATIDPIERKLLDYRQRAIKILANSYYGYYGYARARWYCKECAESVTAWGREYITMTIKEIEEKYGFKVIYSDTDGFFATIPGADAETVKKKAMEFLKYINAKLPGALELEYEGFYKRGFFVTKKKYAVIDEEGKITTRGLEIVRRDWSEIAKETQARVLEALLKDGDVEKAVRIVKEVTEKLSKYEVPPEKLVIHEQITRDLKDYKATGPHVAVAKRLAARGVKIRPGTVISYIVLKGSGRIGDRAIPFDEFDPTKHKYDAEYYIENQVLPAVERILRAFGYRKEDLRYQKTRQVGLSAWLKPKGT

SEQ ID NO: 958 - protein, 774 aa, synthetic construct
MILDTDYITEDGKPVFRIFKKENGEFKIEYDRTFEPYFYALLKDDSAIEEVKKITAERHGTVVTVKRVEKVQKKFLGRPVEVWKLYFTHPQDVPAIFDKIREHPAVIDIYEYDIPFAKRYLIDKGLVPMEGDEELKMLAFDIETLYHEGEEFAEGPILMISYADEEGARVITWKNVDLPYVDVVSTEREMIKRFLRVVKEKDPDVLITYNGDNFDFAYLKKRCEKLGINFALGRDGSEPKIQRMGDRFAVEVKGRIHFDLYPVIRRTINLPTYTLEAVYEAVFGQPKEKVYAEEITTAWETGENLERVARYSMEDAKVTYELGKEFLPMEAQLSRLIGQSLWDVSRSSTGNLVEWFLLRKAYERNELAPNKPDEKELARRRQSYEGGYVKEPERGLWENIVYLDFRSLYPSIIITHNVSPDTLNREGCKEYDVAPQVGHRFCKDFPGFIPSLLGDLLEERQKIKKKMKATIDPIERKLLDYRQRAIKILANSYYGYYGYARARWYCKECAESVTAWGREYITMTIKEIEEKYGFKVIYSDTDGFFATIPGADAETVKKKAMEFLKYINAKLPGALELEYEGFYKRGFFVTKKKYAVIDEEGKITTRGLEIVRRDWSEIAKETQARVLEALLKDGDVEKAVRIVKEVTEKLSKYEVPPEKLVIHEQITRDLKDYKATGPHVAVAKRLAARGVKIRPGTVISYIVLKGSGRIGDRAIPFDEFDPTKHKYDAEYYIENQVLPAVERILRAFGYRKEDLRYQKTRQVGLSAWLKPKGT

SEQ ID NO: 959 - protein, 774 aa, synthetic construct
MILDTDYITEDGKPVFRIFKKENGEFKIEYDRTFEPYFYALLKDDSAIEEVKKITAERHGTVVTVKRVEKVQKKFLGRPVEVWKLYFTHPQDVPAIFDKIREHPAVIDIYEYDIPFAKQYLIDKGLVPMEGDEELKMLAFDIETLYHEGEEFAEGPILMISYADEEGARVITWKNVDLPYVDVVSTEREMIKRFLRVVKEKDPDVLITYNGDNFDFAYLKKRCEKLGINFALGRDGSEPKIQRMGDRFAVEVKGRIHFDLYPVIRRTINLPTYTLEAVYEAVFGQPKEKVYAEEITTAWETGENLERVARYSMEDAKVTYELGKEFLPMEAQLSRLIGQSLWDVSRSSTGNLVEWFLLRKAYERNELAPNKPDEKELARRRQSYEGGYVKEPERGLWENIVYLDFRSLYPSIIITHNVSPDTLNREGCKEYDVAPQVGHRFCKDFPGFIPSLLGDLLEERQKIKKKMKATIDPIERKLLDYRQRAIKILANSYYGYYGYARARWYCKECAESVTAWGREYITMTIKEIEEKYGFKVIYSDTDGFFATIPGADAETVKKKAMEFLKYINAKLPGALELEYEGFYKRGFFVTKKKYAVIDEEGKITTRGLEIVRRDWSEIAKETQARVLEALLKDGDVEKAVRIVKEVTEKLSKYEVPPEKLVIHEQITRDLKDYKATGPHVAVAKRLAARGVKIRPGTVISYIVLKGSGRIGDRAIPFDEFDPTKHKYDAEYYIENQVLPAVERILRAFGYRKEDLRYQKTRQVGLSAWLKPKGT

SEQ ID NO: 960 - protein, 774 aa, synthetic construct
MILDTDYITEDGKPVFRIFKKENGEFKIEYDRTFEPYFYALLKDDSAIEEVKKITAERHGTVVTVKRVEKVQKKFLGRPVEVWKLYFTHPQDVPAIHDKIREHPAVIDIYEYDIPFAKRYLIDKGLVPMEGDEELKMLAFDIETLYHEGEEFAEGPILMISYADEEGARVITWKNVDLPYVDVVSTEREMIKRFLRVVKEKDPDVLITYNGDNFDFAYLKKRCEKLGINFALGRDGSEPKIQRMGDRFAVEVKGRIHFDLYPVIRRTINLPTYTLEAVYEAVFGQPKEKVYAEEITTAWETGENLERVARYSMEDAKVTYELGKEFLPMEAQLSRLIGQSLWDVSRSSTGNLVEWFLLRKAYERNELAPNKPDEKELARRRQSYEGGYVKEPERGLWENIVYLDFRSLYPSIIITHNVSPDTLNREGCKEYDVAPQVGHRFCKDFPGFIPSLLGDLLEERQKIKKKMKATIDPIERKLLDYRQRAIKILANSYYGYYGYARARWYCKECAESVTAWGREYITMTIKEIEEKYGFKVIYSDTDGFFATIPGADAETVKKKAMEFLKYINAKLPGALELEYEGFYKRGFFVTKKKYAVIDEEGKITTRGLEIVRRDWSEIAKETQARVLEALLKDGDVEKAVRIVKEVTEKLSKYEVPPEKLVIHEQITRDLKDYKATGPHVAVAKRLAARGVKIRPGTVISYIVLKGSGRIGDRAIPFDEFDPTKHKYDAEYYIENQVLPAVERILRAFGYRKEDLRYQKTRQVGLSAWLKPKGT

SEQ ID NO: 961 - protein, 774 aa, synthetic construct
MILDTDYITEDGKPVFRIFKKENGEFKIEYDRTFEPYFYALLKDDSAIEEVKKITAERHGTVVTVKRVEKVQKKFLGRPVEVWKLYFTHPQDVPAIWDKIREHPAVIDIYEYDIPFAKRYLIDKGLVPMEGDEELKMLAFDIETLYHEGEEFAEGPILMISYADEEGARVITWKNVDLPYVDVVSTEREMIKRFLRVVKEKDPDVLITYNGDNFDFAYLKKRCEKLGINFALGRDGSEPKIQRMGDRFAVEVKGRIHFDLYPVIRRTINLPTYTLEAVYEAVFGQPKEKVYAEEITTAWETGENLERVARYSMEDAKVTYELGKEFLPMEAQLSRLIGQSLWDVSRSSTGNLVEWFLLRKAYERNELAPNKPDEKELARRRQSYEGGYVKEPERGLWENIVYLDFRSLYPSIIITHNVSPDTLNREGCKEYDVAPQVGHRFCKDFPGFIPSLLGDLLEERQKIKKKMKATIDPIERKLLDYRQRAIKILANSYYGYYGYARARWYCKECAESVTAWGREYITMTIKEIEEKYGFKVIYSDTDGFFATIPGADAETVKKKAMEFLKYINAKLPGALELEYEGFYKRGFFVTKKKYAVIDEEGKITTRGLEIVRRDWSEIAKETQARVLEALLKDGDVEKAVRIVKEVTEKLSKYEVPPEKLVIHEQITRDLKDYKATGPHVAVAKRLAARGVKIRPGTVISYIVLKGSGRIGDRAIPFDEFDPTKHKYDAEYYIENQVLPAVERILRAFGYRKEDLRYQKTRQVGLSAWLKPKGT

SEQ ID NO: 962 - protein, 774 aa, synthetic construct
MILDTDYITEDGKPVFRIFKKENGEFKIEYDRTFEPYFYALLKDDSAIEEVKKITAERHGTVVTVKRVEKVQKKFLGRPVEVWKLYFTHPQDVPAIRDKIREHPAVIDIYEYDIPFAKQYLIDKGLVPMEGDEELKMLAFDIETLYHEGEEFAEGPILMISYADEEGARVITWKNVDLPYVDVVSTEREMIKRFLRVVKEKDPDVLITYNGDNFDFAYLKKRCEKLGINFALGRDGSEPKIQRMGDRFAVEVKGRIHFDLYPVIRRTINLPTYTLEAVYEAVFGQPKEKVYAEEITTAWETGENLERVARYSMEDAKVTYELGKEFLPMEAQLSRLIGQSLWDVSRSSTGNLVEWFLLRKAYERNELAPNKPDEKELARRRQSYEGGYVKEPERGLWENIVYLDFRSLYPSIIITHNVSPDTLNREGCKEYDVAPQVGHRFCKDFPGFIPSLLGDLLEERQKIKKKMKATIDPIERKLLDYRQRAIKILANSYYGYYGYARARWYCKECAESVTAWGREYITMTIKEIEEKYGFKVIYSDTDGFFATIPGADAETVKKKAMEFLKYINAKLPGALELEYEGFYKRGFFVTKKKYAVIDEEGKITTRGLEIVRRDWSEIAKETQARVLEALLKDGDVEKAVRIVKEVTEKLSKYEVPPEKLVIHEQITRDLKDYKATGPHVAVAKRLAARGVKIRPGTVISYIVLKGSGRIGDRAIPFDEFDPTKHKYDAEYYIENQVLPAVERILRAFGYRKEDLRYQKTRQVGLSAWLKPKGT

SEQ ID NO: 963 - protein, 774 aa, synthetic construct
MILDTDYITEDGKPVFRIFKKENGEFKIEYDRTFEPYFYALLKDDSAIEEVKKITAERHGTVVTVKRVEKVQKKFLGRPVEVWKLYFTHPQDEPAIRDKIREHPAVIDIYEYDIPFAKRYLIDKGLVPMEGDEELKMLAFDIETLYHEGEEFAEGPILMISYADEEGARVITWKNVDLPYVDVVSTEREMIKRFLRVVKEKDPDVLITYNGDNFDFAYLKKRCEKLGINFALGRDGSEPKIQRMGDRFAVEVKGRIHFDLYPVIRRTINLPTYTLEAVYEAVFGQPKEKVYAEEITTAWETGENLERVARYSMEDAKVTYELGKEFLPMEAQLSRLIGQSLWDVSRSSTGNLVEWFLLRKAYERNELAPNKPDEKELARRRQSYEGGYVKEPERGLWENIVYLDFRSLYPSIIITHNVSPDTLNREGCKEYDVAPQVGHRFCKDFPGFIPSLLGDLLEERQKIKKKMKATIDPIERKLLDYRQRAIKILANSYYGYYGYARARWYCKECAESVTAWGREYITMTIKEIEEKYGFKVIYSDTDGFFATIPGADAETVKKKAMEFLKYINAKLPGALELEYEGFYKRGFFVTKKKYAVIDEEGKITTRGLEIVRRDWSEIAKETQARVLEALLKDGDVEKAVRIVKEVTEKLSKYEVPPEKLVIHEQITRDLKDYKATGPHVAVAKRLAARGVKIRPGTVISYIVLKGSGRIGDRAIPFDEFDPTKHKYDAEYYIENQVLPAVERILRAFGYRKEDLRYQKTRQVGLSAWLKPKGT

SEQ ID NO: 964 - protein, 774 aa, synthetic construct
MILDTDYITEDGKPVFRIFKKENGEFKIEYDRTFEPYFYALLKDDSAIEEVKKITAERHGTVVTVKRVEKVQKKFLGRPVEVWKLYFTHPQDEPAIADKIREHPAVIDIYEYDIPFAKRYLIDKGLVPMEGDEELKMLAFDIETLYHEGEEFAEGPILMISYADEEGARVITWKNVDLPYVDVVSTEREMIKRFLRVVKEKDPDVLITYNGDNFDFAYLKKRCEKLGINFALGRDGSEPKIQRMGDRFAVEVKGRIHFDLYPVIRRTINLPTYTLEAVYEAVFGQPKEKVYAEEITTAWETGENLERVARYSMEDAKVTYELGKEFLPMEAQLSRLIGQSLWDVSRSSTGNLVEWFLLRKAYERNELAPNKPDEKELARRRQSYEGGYVKEPERGLWENIVYLDFRSLYPSIIITHNVSPDTLNREGCKEYDVAPQVGHRFCKDFPGFIPSLLGDLLEERQKIKKKMKATIDPIERKLLDYRQRAIKILANSYYGYYGYARARWYCKECAESVTAWGREYITMTIKEIEEKYGFKVIYSDTDGFFATIPGADAETVKKKAMEFLKYINAKLPGALELEYEGFYKRGFFVTKKKYAVIDEEGKITTRGLEIVRRDWSEIAKETQARVLEALLKDGDVEKAVRIVKEVTEKLSKYEVPPEKLVIHEQITRDLKDYKATGPHVAVAKRLAARGVKIRPGTVISYIVLKGSGRIGDRAIPFDEFDPTKHKYDAEYYIENQVLPAVERILRAFGYRKEDLRYQKTRQVGLSAWLKPKGT

SEQ ID NO: 965 - protein, 774 aa, synthetic construct
MILDTDYITEDGKPVFRIFKKENGEFKIEYDRTFEPYFYALLKDDSAIEEVKKITAERHGTVVTVKRVEKVQKKFLGRPVEVWKLYFTHPQDEPAIFDKIREHPAVIDIYEYDIPFAKRYLIDKGLVPMEGDEELKMLAFDIETLYHEGEEFAEGPILMISYADEEGARVITWKNVDLPYVDVVSTEREMIKRFLRVVKEKDPDVLITYNGDNFDFAYLKKRCEKLGINFALGRDGSEPKIQRMGDRFAVEVKGRIHFDLYPVIRRTINLPTYTLEAVYEAVFGQPKEKVYAEEITTAWETGENLERVARYSMEDAKVTYELGKEFLPMEAQLSRLIGQSLWDVSRSSTGNLVEWFLLRKAYERNELAPNKPDEKELARRRQSYEGGYVKEPERGLWENIVYLDFRSLYPSIIITHNVSPDTLNREGCKEYDVAPQVGHRFCKDFPGFIPSLLGDLLEERQKIKKKMKATIDPIERKLLDYRQRAIKILANSYYGYYGYARARWYCKECAESVTAWGREYITMTIKEIEEKYGFKVIYSDTDGFFATIPGADAETVKKKAMEFLKYINAKLPGALELEYEGFYKRGFFVTKKKYAVIDEEGKITTRGLEIVRRDWSEIAKETQARVLEALLKDGDVEKAVRIVKEVTEKLSKYEVPPEKLVIHEQITRDLKDYKATGPHVAVAKRLAARGVKIRPGTVISYIVLKGSGRIGDRAIPFDEFDPTKHKYDAEYYIENQVLPAVERILRAFGYRKEDLRYQKTRQVGLSAWLKPKGT

SEQ ID NO: 966 - protein, 774 aa, synthetic construct
MILDTDYITEDGKPVFRIFKKENGEFKIEYDRTFEPYFYALLKDDSAIEEVKKITAERHGTVVTVKRVEKVQKKFLGRPVEVWKLYFTHPQDEPAIHDKIREHPAVIDIYEYDIPFAKRYLIDKGLVPMEGDEELKMLAFDIETLYHEGEEFAEGPILMISYADEEGARVITWKNVDLPYVDVVSTEREMIKRFLRVVKEKDPDVLITYNGDNFDFAYLKKRCEKLGINFALGRDGSEPKIQRMGDRFAVEVKGRIHFDLYPVIRRTINLPTYTLEAVYEAVFGQPKEKVYAEEITTAWETGENLERVARYSMEDAKVTYELGKEFLPMEAQLSRLIGQSLWDVSRSSTGNLVEWFLLRKAYERNELAPNKPDEKELARRRQSYEGGYVKEPERGLWENIVYLDFRSLYPSIIITHNVSPDTLNREGCKEYDVAPQVGHRFCKDFPGFIPSLLGDLLEERQKIKKKMKATIDPIERKLLDYRQRAIKILANSYYGYYGYARARWYCKECAESVTAWGREYITMTIKEIEEKYGFKVIYSDTDGFFATIPGADAETVKKKAMEFLKYINAKLPGALELEYEGFYKRGFFVTKKKYAVIDEEGKITTRGLEIVRRDWSEIAKETQARVLEALLKDGDVEKAVRIVKEVTEKLSKYEVPPEKLVIHEQITRDLKDYKATGPHVAVAKRLAARGVKIRPGTVISYIVLKGSGRIGDRAIPFDEFDPTKHKYDAEYYIENQVLPAVERILRAFGYRKEDLRYQKTRQVGLSAWLKPKGT

SEQ ID NO: 967 - protein, 774 aa, synthetic construct
MILDTDYITEDGKPVFRIFKKENGEFKIEYDRTFEPYFYALLKDDSAIEEVKKITAERHGTVVTVKRVEKVQKKFLGRPVEVWKLYFTHPQDIPAIRDKIREHPAVIDIYEYDIPFAKRYLIDKGLVPMEGDEELKMLAFDIETLYHEGEEFAEGPILMISYADEEGARVITWKNVDLPYVDVVSTEREMIKRFLRVVKEKDPDVLITYNGDNFDFAYLKKRCEKLGINFALGRDGSEPKIQRMGDRFAVEVKGRIHFDLYPVIRRTINLPTYTLEAVYEAVFGQPKEKVYAEEITTAWETGENLERVARYSMEDAKVTYELGKEFLPMEAQLSRLIGQSLWDVSRSSTGNLVEWFLLRKAYERNELAPNKPDEKELARRRQSYEGGYVKEPERGLWENIVYLDFRSLYPSIIITHNVSPDTLNREGCKEYDVAPQVGHRFCKDFPGFIPSLLGDLLEERQKIKKKMKATIDPIERKLLDYRQRAIKILANSYYGYYGYARARWYCKECAESVTAWGREYITMTIKEIEEKYGFKVIYSDTDGFFATIPGADAETVKKKAMEFLKYINAKLPGALELEYEGFYKRGFFVTKKKYAVIDEEGKITTRGLEIVRRDWSEIAKETQARVLEALLKDGDVEKAVRIVKEVTEKLSKYEVPPEKLVIHEQITRDLKDYKATGPHVAVAKRLAARGVKIRPGTVISYIVLKGSGRIGDRAIPFDEFDPTKHKYDAEYYIENQVLPAVERILRAFGYRKEDLRYQKTRQVGLSAWLKPKGT

SEQ ID NO: 968 - protein, 774 aa, synthetic construct
MILDTDYITEDGKPVFRIFKKENGEFKIEYDRTFEPYFYALLKDDSAIEEVKKITAERHGTVVTVKRVEKVQKKFLGRPVEVWKLYFTHPQDIPAIADKIREHPAVIDIYEYDIPFAKRYLIDKGLVPMEGDEELKMLAFDIETLYHEGEEFAEGPILMISYADEEGARVITWKNVDLPYVDVVSTEREMIKRFLRVVKEKDPDVLITYNGDNFDFAYLKKRCEKLGINFALGRDGSEPKIQRMGDRFAVEVKGRIHFDLYPVIRRTINLPTYTLEAVYEAVFGQPKEKVYAEEITTAWETGENLERVARYSMEDAKVTYELGKEFLPMEAQLSRLIGQSLWDVSRSSTGNLVEWFLLRKAYERNELAPNKPDEKELARRRQSYEGGYVKEPERGLWENIVYLDFRSLYPSIIITHNVSPDTLNREGCKEYDVAPQVGHRFCKDFPGFIPSLLGDLLEERQKIKKKMKATIDPIERKLLDYRQRAIKILANSYYGYYGYARARWYCKECAESVTAWGREYITMTIKEIEEKYGFKVIYSDTDGFFATIPGADAETVKKKAMEFLKYINAKLPGALELEYEGFYKRGFFVTKKKYAVIDEEGKITTRGLEIVRRDWSEIAKETQARVLEALLKDGDVEKAVRIVKEVTEKLSKYEVPPEKLVIHEQITRDLKDYKATGPHVAVAKRLAARGVKIRPGTVISYIVLKGSGRIGDRAIPFDEFDPTKHKYDAEYYIENQVLPAVERILRAFGYRKEDLRYQKTRQVGLSAWLKPKGT

SEQ ID NO: 969 - protein, 774 aa, synthetic construct
MILDTDYITEDGKPVFRIFKKENGEFKIEYDRTFEPYFYALLKDDSAIEEVKKITAERHGTVVTVKRVEKVQKKFLGRPVEVWKLYFTHPQDIPAIFDKIREHPAVIDIYEYDIPFAKRYLIDKGLVPMEGDEELKMLAFDIETLYHEGEEFAEGPILMISYADEEGARVITWKNVDLPYVDVVSTEREMIKRFLRVVKEKDPDVLITYNGDNFDFAYLKKRCEKLGINFALGRDGSEPKIQRMGDRFAVEVKGRIHFDLYPVIRRTINLPTYTLEAVYEAVFGQPKEKVYAEEITTAWETGENLERVARYSMEDAKVTYELGKEFLPMEAQLSRLIGQSLWDVSRSSTGNLVEWFLLRKAYERNELAPNKPDEKELARRRQSYEGGYVKEPERGLWENIVYLDFRSLYPSIIITHNVSPDTLNREGCKEYDVAPQVGHRFCKDFPGFIPSLLGDLLEERQKIKKKMKATIDPIERKLLDYRQRAIKILANSYYGYYGYARARWYCKECAESVTAWGREYITMTIKEIEEKYGFKVIYSDTDGFFATIPGADAETVKKKAMEFLKYINAKLPGALELEYEGFYKRGFFVTKKKYAVIDEEGKITTRGLEIVRRDWSEIAKETQARVLEALLKDGDVEKAVRIVKEVTEKLSKYEVPPEKLVIHEQITRDLKDYKATGPHVAVAKRLAARGVKIRPGTVISYIVLKGSGRIGDRAIPFDEFDPTKHKYDAEYYIENQVLPAVERILRAFGYRKEDLRYQKTRQVGLSAWLKPKGT

SEQ ID NO: 970 - protein, 774 aa, synthetic construct
MILDTDYITEDGKPVFRIFKKENGEFKIEYDRTFEPYFYALLKDDSAIEEVKKITAERHGTVVTVKRVEKVQKKFLGRPVEVWKLYFTHPQDIPAIFDKIREHPAVIDIYEYDIPFAKQYLIDKGLVPMEGDEELKMLAFDIETLYHEGEEFAEGPILMISYADEEGARVITWKNVDLPYVDVVSTEREMIKRFLRVVKEKDPDVLITYNGDNFDFAYLKKRCEKLGINFALGRDGSEPKIQRMGDRFAVEVKGRIHFDLYPVIRRTINLPTYTLEAVYEAVFGQPKEKVYAEEITTAWETGENLERVARYSMEDAKVTYELGKEFLPMEAQLSRLIGQSLWDVSRSSTGNLVEWFLLRKAYERNELAPNKPDEKELARRRQSYEGGYVKEPERGLWENIVYLDFRSLYPSIIITHNVSPDTLNREGCKEYDVAPQVGHRFCKDFPGFIPSLLGDLLEERQKIKKKMKATIDPIERKLLDYRQRAIKILANSYYGYYGYARARWYCKECAESVTAWGREYITMTIKEIEEKYGFKVIYSDTDGFFATIPGADAETVKKKAMEFLKYINAKLPGALELEYEGFYKRGFFVTKKKYAVIDEEGKITTRGLEIVRRDWSEIAKETQARVLEALLKDGDVEKAVRIVKEVTEKLSKYEVPPEKLVIHEQITRDLKDYKATGPHVAVAKRLAARGVKIRPGTVISYIVLKGSGRIGDRAIPFDEFDPTKHKYDAEYYIENQVLPAVERILRAFGYRKEDLRYQKTRQVGLSAWLKPKGT

SEQ ID NO: 971 - protein, 774 aa, synthetic construct
MILDTDYITEDGKPVFRIFKKENGEFKIEYDRTFEPYFYALLKDDSAIEEVKKITAERHGTVVTVKRVEKVQKKFLGRPVEVWKLYFTHPQDIPAIHDKIREHPAVIDIYEYDIPFAKRYLIDKGLVPMEGDEELKMLAFDIETLYHEGEEFAEGPILMISYADEEGARVITWKNVDLPYVDVVSTEREMIKRFLRVVKEKDPDVLITYNGDNFDFAYLKKRCEKLGINFALGRDGSEPKIQRMGDRFAVEVKGRIHFDLYPVIRRTINLPTYTLEAVYEAVFGQPKEKVYAEEITTAWETGENLERVARYSMEDAKVTYELGKEFLPMEAQLSRLIGQSLWDVSRSSTGNLVEWFLLRKAYERNELAPNKPDEKELARRRQSYEGGYVKEPERGLWENIVYLDFRSLYPSIIITHNVSPDTLNREGCKEYDVAPQVGHRFCKDFPGFIPSLLGDLLEERQKIKKKMKATIDPIERKLLDYRQRAIKILANSYYGYYGYARARWYCKECAESVTAWGREYITMTIKEIEEKYGFKVIYSDTDGFFATIPGADAETVKKKAMEFLKYINAKLPGALELEYEGFYKRGFFVTKKKYAVIDEEGKITTRGLEIVRRDWSEIAKETQARVLEALLKDGDVEKAVRIVKEVTEKLSKYEVPPEKLVIHEQITRDLKDYKATGPHVAVAKRLAARGVKIRPGTVISYIVLKGSGRIGDRAIPFDEFDPTKHKYDAEYYIENQVLPAVERILRAFGYRKEDLRYQKTRQVGLSAWLKPKGT

SEQ ID NO: 972 - protein, 774 aa, synthetic construct
MILDTDYITEDGKPVFRIFKKENGEFKIEYDRTFEPYFYALLKDDSAIEEVKKITAERHGTVVTVKRVEKVQKKFLGRPVEVWKLYFTHPQDIPAIPDKIREHPAVIDIYEYDIPFAKRYLIDKGLVPMEGDEELKMLAFDIETLYHEGEEFAEGPILMISYADEEGARVITWKNVDLPYVDVVSTEREMIKRFLRVVKEKDPDVLITYNGDNFDFAYLKKRCEKLGINFALGRDGSEPKIQRMGDRFAVEVKGRIHFDLYPVIRRTINLPTYTLEAVYEAVFGQPKEKVYAEEITTAWETGENLERVARYSMEDAKVTYELGKEFLPMEAQLSRLIGQSLWDVSRSSTGNLVEWFLLRKAYERNELAPNKPDEKELARRRQSYEGGYVKEPERGLWENIVYLDFRSLYPSIIITHNVSPDTLNREGCKEYDVAPQVGHRFCKDFPGFIPSLLGDLLEERQKIKKKMKATIDPIERKLLDYRQRAIKILANSYYGYYGYARARWYCKECAESVTAWGREYITMTIKEIEEKYGFKVIYSDTDGFFATIPGADAETVKKKAMEFLKYINAKLPGALELEYEGFYKRGFFVTKKKYAVIDEEGKITTRGLEIVRRDWSEIAKETQARVLEALLKDGDVEKAVRIVKEVTEKLSKYEVPPEKLVIHEQITRDLKDYKATGPHVAVAKRLAARGVKIRPGTVISYIVLKGSGRIGDRAIPFDEFDPTKHKYDAEYYIENQVLPAVERILRAFGYRKEDLRYQKTRQVGLSAWLKPKGT

SEQ ID NO: 973 - protein, 774 aa, synthetic construct
MILDTDYITEDGKPVFRIFKKENGEFKIEYDRTFEPYFYALLKDDSAIEEVKKITAERHGTVVTVKRVEKVQKKFLGRPVEVWKLYFTHPQDIPAIWDKIREHPAVIDIYEYDIPFAKRYLIDKGLVPMEGDEELKMLAFDIETLYHEGEEFAEGPILMISYADEEGARVITWKNVDLPYVDVVSTEREMIKRFLRVVKEKDPDVLITYNGDNFDFAYLKKRCEKLGINFALGRDGSEPKIQRMGDRFAVEVKGRIHFDLYPVIRRTINLPTYTLEAVYEAVFGQPKEKVYAEEITTAWETGENLERVARYSMEDAKVTYELGKEFLPMEAQLSRLIGQSLWDVSRSSTGNLVEWFLLRKAYERNELAPNKPDEKELARRRQSYEGGYVKEPERGLWENIVYLDFRSLYPSIIITHNVSPDTLNREGCKEYDVAPQVGHRFCKDFPGFIPSLLGDLLEERQKIKKKMKATIDPIERKLLDYRQRAIKILANSYYGYYGYARARWYCKECAESVTAWGREYITMTIKEIEEKYGFKVIYSDTDGFFATIPGADAETVKKKAMEFLKYINAKLPGALELEYEGFYKRGFFVTKKKYAVIDEEGKITTRGLEIVRRDWSEIAKETQARVLEALLKDGDVEKAVRIVKEVTEKLSKYEVPPEKLVIHEQITRDLKDYKATGPHVAVAKRLAARGVKIRPGTVISYIVLKGSGRIGDRAIPFDEFDPTKHKYDAEYYIENQVLPAVERILRAFGYRKEDLRYQKTRQVGLSAWLKPKGT

SEQ ID NO: 974 - protein, 774 aa, synthetic construct
MILDTDYITEDGKPVFRIFKKENGEFKIEYDRTFEPYFYALLKDDSAIEEVKKITAERHGTVVTVKRVEKVQKKFLGRPVEVWKLYFTHPQDIPAIRDKIREHPAVIDIYEYDIPFAKQYLIDKGLVPMEGDEELKMLAFDIETLYHEGEEFAEGPILMISYADEEGARVITWKNVDLPYVDVVSTEREMIKRFLRVVKEKDPDVLITYNGDNFDFAYLKKRCEKLGINFALGRDGSEPKIQRMGDRFAVEVKGRIHFDLYPVIRRTINLPTYTLEAVYEAVFGQPKEKVYAEEITTAWETGENLERVARYSMEDAKVTYELGKEFLPMEAQLSRLIGQSLWDVSRSSTGNLVEWFLLRKAYERNELAPNKPDEKELARRRQSYEGGYVKEPERGLWENIVYLDFRSLYPSIIITHNVSPDTLNREGCKEYDVAPQVGHRFCKDFPGFIPSLLGDLLEERQKIKKKMKATIDPIERKLLDYRQRAIKILANSYYGYYGYARARWYCKECAESVTAWGREYITMTIKEIEEKYGFKVIYSDTDGFFATIPGADAETVKKKAMEFLKYINAKLPGALELEYEGFYKRGFFVTKKKYAVIDEEGKITTRGLEIVRRDWSEIAKETQARVLEALLKDGDVEKAVRIVKEVTEKLSKYEVPPEKLVIHEQITRDLKDYKATGPHVAVAKRLAARGVKIRPGTVISYIVLKGSGRIGDRAIPFDEFDPTKHKYDAEYYIENQVLPAVERILRAFGYRKEDLRYQKTRQVGLSAWLKPKGT

SEQ ID NO: 975 - protein, 774 aa, synthetic construct
MILDTDYITEDGKPVFRIFKKENGEFKIEYDRTFEPYFYALLKDDSAIEEVKKITAERHGTVVTVKRVEKVQKKFLGRPVEVWKLYFTHPQDKPAIRDKIREHPAVIDIYEYDIPFAKRYLIDKGLVPMEGDEELKMLAFDIETLYHEGEEFAEGPILMISYADEEGARVITWKNVDLPYVDVVSTEREMIKRFLRVVKEKDPDVLITYNGDNFDFAYLKKRCEKLGINFALGRDGSEPKIQRMGDRFAVEVKGRIHFDLYPVIRRTINLPTYTLEAVYEAVFGQPKEKVYAEEITTAWETGENLERVARYSMEDAKVTYELGKEFLPMEAQLSRLIGQSLWDVSRSSTGNLVEWFLLRKAYERNELAPNKPDEKELARRRQSYEGGYVKEPERGLWENIVYLDFRSLYPSIIITHNVSPDTLNREGCKEYDVAPQVGHRFCKDFPGFIPSLLGDLLEERQKIKKKMKATIDPIERKLLDYRQRAIKILANSYYGYYGYARARWYCKECAESVTAWGREYITMTIKEIEEKYGFKVIYSDTDGFFATIPGADAETVKKKAMEFLKYINAKLPGALELEYEGFYKRGFFVTKKKYAVIDEEGKITTRGLEIVRRDWSEIAKETQARVLEALLKDGDVEKAVRIVKEVTEKLSKYEVPPEKLVIHEQITRDLKDYKATGPHVAVAKRLAARGVKIRPGTVISYIVLKGSGRIGDRAIPFDEFDPTKHKYDAEYYIENQVLPAVERILRAFGYRKEDLRYQKTRQVGLSAWLKPKGT

SEQ ID NO: 976 - protein, 774 aa, synthetic construct
MILDTDYITEDGKPVFRIFKKENGEFKIEYDRTFEPYFYALLKDDSAIEEVKKITAERHGTVVTVKRVEKVQKKFLGRPVEVWKLYFTHPQDKPAIADKIREHPAVIDIYEYDIPFAKRYLIDKGLVPMEGDEELKMLAFDIETLYHEGEEFAEGPILMISYADEEGARVITWKNVDLPYVDVVSTEREMIKRFLRVVKEKDPDVLITYNGDNFDFAYLKKRCEKLGINFALGRDGSEPKIQRMGDRFAVEVKGRIHFDLYPVIRRTINLPTYTLEAVYEAVFGQPKEKVYAEEITTAWETGENLERVARYSMEDAKVTYELGKEFLPMEAQLSRLIGQSLWDVSRSSTGNLVEWFLLRKAYERNELAPNKPDEKELARRRQSYEGGYVKEPERGLWENIVYLDFRSLYPSIIITHNVSPDTLNREGCKEYDVAPQVGHRFCKDFPGFIPSLLGDLLEERQKIKKKMKATIDPIERKLLDYRQRAIKILANSYYGYYGYARARWYCKECAESVTAWGREYITMTIKEIEEKYGFKVIYSDTDGFFATIPGADAETVKKKAMEFLKYINAKLPGALELEYEGFYKRGFFVTKKKYAVIDEEGKITTRGLEIVRRDWSEIAKETQARVLEALLKDGDVEKAVRIVKEVTEKLSKYEVPPEKLVIHEQITRDLKDYKATGPHVAVAKRLAARGVKIRPGTVISYIVLKGSGRIGDRAIPFDEFDPTKHKYDAEYYIENQVLPAVERILRAFGYRKEDLRYQKTRQVGLSAWLKPKGT

SEQ ID NO: 977 - protein, 774 aa, synthetic construct
MILDTDYITEDGKPVFRIFKKENGEFKIEYDRTFEPYFYALLKDDSAIEEVKKITAERHGTVVTVKRVEKVQKKFLGRPVEVWKLYFTHPQDKPAIFDKIREHPAVIDIYEYDIPFAKRYLIDKGLVPMEGDEELKMLAFDIETLYHEGEEFAEGPILMISYADEEGARVITWKNVDLPYVDVVSTEREMIKRFLRVVKEKDPDVLITYNGDNFDFAYLKKRCEKLGINFALGRDGSEPKIQRMGDRFAVEVKGRIHFDLYPVIRRTINLPTYTLEAVYEAVFGQPKEKVYAEEITTAWETGENLERVARYSMEDAKVTYELGKEFLPMEAQLSRLIGQSLWDVSRSSTGNLVEWFLLRKAYERNELAPNKPDEKELARRRQSYEGGYVKEPERGLWENIVYLDFRSLYPSIIITHNVSPDTLNREGCKEYDVAPQVGHRFCKDFPGFIPSLLGDLLEERQKIKKKMKATIDPIERKLLDYRQRAIKILANSYYGYYGYARARWYCKECAESVTAWGREYITMTIKEIEEKYGFKVIYSDTDGFFATIPGADAETVKKKAMEFLKYINAKLPGALELEYEGFYKRGFFVTKKKYAVIDEEGKITTRGLEIVRRDWSEIAKETQARVLEALLKDGDVEKAVRIVKEVTEKLSKYEVPPEKLVIHEQITRDLKDYKATGPHVAVAKRLAARGVKIRPGTVISYIVLKGSGRIGDRAIPFDEFDPTKHKYDAEYYIENQVLPAVERILRAFGYRKEDLRYQKTRQVGLSAWLKPKGT

SEQ ID NO: 978 - protein, 774 aa, synthetic construct
MILDTDYITEDGKPVFRIFKKENGEFKIEYDRTFEPYFYALLKDDSAIEEVKKITAERHGTVVTVKRVEKVQKKFLGRPVEVWKLYFTHPQDKPAIHDKIREHPAVIDIYEYDIPFAKRYLIDKGLVPMEGDEELKMLAFDIETLYHEGEEFAEGPILMISYADEEGARVITWKNVDLPYVDVVSTEREMIKRFLRVVKEKDPDVLITYNGDNFDFAYLKKRCEKLGINFALGRDGSEPKIQRMGDRFAVEVKGRIHFDLYPVIRRTINLPTYTLEAVYEAVFGQPKEKVYAEEITTAWETGENLERVARYSMEDAKVTYELGKEFLPMEAQLSRLIGQSLWDVSRSSTGNLVEWFLLRKAYERNELAPNKPDEKELARRRQSYEGGYVKEPERGLWENIVYLDFRSLYPSIIITHNVSPDTLNREGCKEYDVAPQVGHRFCKDFPGFIPSLLGDLLEERQKIKKKMKATIDPIERKLLDYRQRAIKILANSYYGYYGYARARWYCKECAESVTAWGREYITMTIKEIEEKYGFKVIYSDTDGFFATIPGADAETVKKKAMEFLKYINAKLPGALELEYEGFYKRGFFVTKKKYAVIDEEGKITTRGLEIVRRDWSEIAKETQARVLEALLKDGDVEKAVRIVKEVTEKLSKYEVPPEKLVIHEQITRDLKDYKATGPHVAVAKRLAARGVKIRPGTVISYIVLKGSGRIGDRAIPFDEFDPTKHKYDAEYYIENQVLPAVERILRAFGYRKEDLRYQKTRQVGLSAWLKPKGT

SEQ ID NO: 979 - protein, 774 aa, synthetic construct
MILDTDYITEDGKPVFRIFKKENGEFKIEYDRTFEPYFYALLKDDSAIEEVKKITAERHGTVVTVKRVEKVQKKFLGRPVEVWKLYFTHPQDKPAIWDKIREHPAVIDIYEYDIPFAKRYLIDKGLVPMEGDEELKMLAFDIETLYHEGEEFAEGPILMISYADEEGARVITWKNVDLPYVDVVSTEREMIKRFLRVVKEKDPDVLITYNGDNFDFAYLKKRCEKLGINFALGRDGSEPKIQRMGDRFAVEVKGRIHFDLYPVIRRTINLPTYTLEAVYEAVFGQPKEKVYAEEITTAWETGENLERVARYSMEDAKVTYELGKEFLPMEAQLSRLIGQSLWDVSRSSTGNLVEWFLLRKAYERNELAPNKPDEKELARRRQSYEGGYVKEPERGLWENIVYLDFRSLYPSIIITHNVSPDTLNREGCKEYDVAPQVGHRFCKDFPGFIPSLLGDLLEERQKIKKKMKATIDPIERKLLDYRQRAIKILANSYYGYYGYARARWYCKECAESVTAWGREYITMTIKEIEEKYGFKVIYSDTDGFFATIPGADAETVKKKAMEFLKYINAKLPGALELEYEGFYKRGFFVTKKKYAVIDEEGKITTRGLEIVRRDWSEIAKETQARVLEALLKDGDVEKAVRIVKEVTEKLSKYEVPPEKLVIHEQITRDLKDYKATGPHVAVAKRLAARGVKIRPGTVISYIVLKGSGRIGDRAIPFDEFDPTKHKYDAEYYIENQVLPAVERILRAFGYRKEDLRYQKTRQVGLSAWLKPKGT

SEQ ID NO: 980 - protein, 774 aa, synthetic construct
MILDTDYITEDGKPVFRIFKKENGEFKIEYDRTFEPYFYALLKDDSAIEEVKKITAERHGTVVTVKRVEKVQKKFLGRPVEVWKLYFTHPQDQPAIRDKIREHPAVIDIYEYDIPFAKRYLIDKGLVPMEGDEELKMLAFDIETLYHEGEEFAEGPILMISYADEEGARVITWKNVDLPYVDVVSTEREMIKRFLRVVKEKDPDVLITYNGDNFDFAYLKKRCEKLGINFALGRDGSEPKIQRMGDRFAVEVKGRIHFDLYPVIRRTINLPTYTLEAVYEAVFGQPKEKVYAEEITTAWETGENLERVARYSMEDAKVTYELGKEFLPMEAQLSRLIGQSLWDVSRSSTGNLVEWFLLRKAYERNELAPNKPDEKELARRRQSYEGGYVKEPERGLWENIVYLDFRSLYPSIIITHNVSPDTLNREGCKEYDVAPQVGHRFCKDFPGFIPSLLGDLLEERQKIKKKMKATIDPIERKLLDYRQRAIKILANSYYGYYGYARARWYCKECAESVTAWGREYITMTIKEIEEKYGFKVIYSDTDGFFATIPGADAETVKKKAMEFLKYINAKLPGALELEYEGFYKRGFFVTKKKYAVIDEEGKITTRGLEIVRRDWSEIAKETQARVLEALLKDGDVEKAVRIVKEVTEKLSKYEVPPEKLVIHEQITRDLKDYKATGPHVAVAKRLAARGVKIRPGTVISYIVLKGSGRIGDRAIPFDEFDPTKHKYDAEYYIENQVLPAVERILRAFGYRKEDLRYQKTRQVGLSAWLKPKGT

SEQ ID NO: 981 - protein, 774 aa, synthetic construct
MILDTDYITEDGKPVFRIFKKENGEFKIEYDRTFEPYFYALLKDDSAIEEVKKITAERHGTVVTVKRVEKVQKKFLGRPVEVWKLYFTHPQDQPAIADKIREHPAVIDIYEYDIPFAKRYLIDKGLVPMEGDEELKMLAFDIETLYHEGEEFAEGPILMISYADEEGARVITWKNVDLPYVDVVSTEREMIKRFLRVVKEKDPDVLITYNGDNFDFAYLKKRCEKLGINFALGRDGSEPKIQRMGDRFAVEVKGRIHFDLYPVIRRTINLPTYTLEAVYEAVFGQPKEKVYAEEITTAWETGENLERVARYSMEDAKVTYELGKEFLPMEAQLSRLIGQSLWDVSRSSTGNLVEWFLLRKAYERNELAPNKPDEKELARRRQSYEGGYVKEPERGLWENIVYLDFRSLYPSIIITHNVSPDTLNREGCKEYDVAPQVGHRFCKDFPGFIPSLLGDLLEERQKIKKKMKATIDPIERKLLDYRQRAIKILANSYYGYYGYARARWYCKECAESVTAWGREYITMTIKEIEEKYGFKVIYSDTDGFFATIPGADAETVKKKAMEFLKYINAKLPGALELEYEGFYKRGFFVTKKKYAVIDEEGKITTRGLEIVRRDWSEIAKETQARVLEALLKDGDVEKAVRIVKEVTEKLSKYEVPPEKLVIHEQITRDLKDYKATGPHVAVAKRLAARGVKIRPGTVISYIVLKGSGRIGDRAIPFDEFDPTKHKYDAEYYIENQVLPAVERILRAFGYRKEDLRYQKTRQVGLSAWLKPKGT

SEQ ID NO: 982 - protein, 774 aa, synthetic construct
MILDTDYITEDGKPVFRIFKKENGEFKIEYDRTFEPYFYALLKDDSAIEEVKKITAERHGTVVTVKRVEKVQKKFLGRPVEVWKLYFTHPQDQPAIFDKIREHPAVIDIYEYDIPFAKRYLIDKGLVPMEGDEELKMLAFDIETLYHEGEEFAEGPILMISYADEEGARVITWKNVDLPYVDVVSTEREMIKRFLRVVKEKDPDVLITYNGDNFDFAYLKKRCEKLGINFALGRDGSEPKIQRMGDRFAVEVKGRIHFDLYPVIRRTINLPTYTLEAVYEAVFGQPKEKVYAEEITTAWETGENLERVARYSMEDAKVTYELGKEFLPMEAQLSRLIGQSLWDVSRSSTGNLVEWFLLRKAYERNELAPNKPDEKELARRRQSYEGGYVKEPERGLWENIVYLDFRSLYPSIIITHNVSPDTLNREGCKEYDVAPQVGHRFCKDFPGFIPSLLGDLLEERQKIKKKMKATIDPIERKLLDYRQRAIKILANSYYGYYGYARARWYCKECAESVTAWGREYITMTIKEIEEKYGFKVIYSDTDGFFATIPGADAETVKKKAMEFLKYINAKLPGALELEYEGFYKRGFFVTKKKYAVIDEEGKITTRGLEIVRRDWSEIAKETQARVLEALLKDGDVEKAVRIVKEVTEKLSKYEVPPEKLVIHEQITRDLKDYKATGPHVAVAKRLAARGVKIRPGTVISYIVLKGSGRIGDRAIPFDEFDPTKHKYDAEYYIENQVLPAVERILRAFGYRKEDLRYQKTRQVGLSAWLKPKGT

SEQ ID NO: 983 - protein, 774 aa, synthetic construct
MILDTDYITEDGKPVFRIFKKENGEFKIEYDRTFEPYFYALLKDDSAIEEVKKITAERHGTVVTVKRVEKVQKKFLGRPVEVWKLYFTHPQDQPAIHDKIREHPAVIDIYEYDIPFAKRYLIDKGLVPMEGDEELKMLAFDIETLYHEGEEFAEGPILMISYADEEGARVITWKNVDLPYVDVVSTEREMIKRFLRVVKEKDPDVLITYNGDNFDFAYLKKRCEKLGINFALGRDGSEPKIQRMGDRFAVEVKGRIHFDLYPVIRRTINLPTYTLEAVYEAVFGQPKEKVYAEEITTAWETGENLERVARYSMEDAKVTYELGKEFLPMEAQLSRLIGQSLWDVSRSSTGNLVEWFLLRKAYERNELAPNKPDEKELARRRQSYEGGYVKEPERGLWENIVYLDFRSLYPSIIITHNVSPDTLNREGCKEYDVAPQVGHRFCKDFPGFIPSLLGDLLEERQKIKKKMKATIDPIERKLLDYRQRAIKILANSYYGYYGYARARWYCKECAESVTAWGREYITMTIKEIEEKYGFKVIYSDTDGFFATIPGADAETVKKKAMEFLKYINAKLPGALELEYEGFYKRGFFVTKKKYAVIDEEGKITTRGLEIVRRDWSEIAKETQARVLEALLKDGDVEKAVRIVKEVTEKLSKYEVPPEKLVIHEQITRDLKDYKATGPHVAVAKRLAARGVKIRPGTVISYIVLKGSGRIGDRAIPFDEFDPTKHKYDAEYYIENQVLPAVERILRAFGYRKEDLRYQKTRQVGLSAWLKPKGT

SEQ ID NO: 984 - protein, 774 aa, synthetic construct
MILDTDYITEDGKPVFRIFKKENGEFKIEYDRTFEPYFYALLKDDSAIEEVKKITAERHGTVVTVKRVEKVQKKFLGRPVEVWKLYFTHPQDQPAIWDKIREHPAVIDIYEYDIPFAKRYLIDKGLVPMEGDEELKMLAFDIETLYHEGEEFAEGPILMISYADEEGARVITWKNVDLPYVDVVSTEREMIKRFLRVVKEKDPDVLITYNGDNFDFAYLKKRCEKLGINFALGRDGSEPKIQRMGDRFAVEVKGRIHFDLYPVIRRTINLPTYTLEAVYEAVFGQPKEKVYAEEITTAWETGENLERVARYSMEDAKVTYELGKEFLPMEAQLSRLIGQSLWDVSRSSTGNLVEWFLLRKAYERNELAPNKPDEKELARRRQSYEGGYVKEPERGLWENIVYLDFRSLYPSIIITHNVSPDTLNREGCKEYDVAPQVGHRFCKDFPGFIPSLLGDLLEERQKIKKKMKATIDPIERKLLDYRQRAIKILANSYYGYYGYARARWYCKECAESVTAWGREYITMTIKEIEEKYGFKVIYSDTDGFFATIPGADAETVKKKAMEFLKYINAKLPGALELEYEGFYKRGFFVTKKKYAVIDEEGKITTRGLEIVRRDWSEIAKETQARVLEALLKDGDVEKAVRIVKEVTEKLSKYEVPPEKLVIHEQITRDLKDYKATGPHVAVAKRLAARGVKIRPGTVISYIVLKGSGRIGDRAIPFDEFDPTKHKYDAEYYIENQVLPAVERILRAFGYRKEDLRYQKTRQVGLSAWLKPKGT

SEQ ID NO: 985 - protein, 774 aa, synthetic construct
MILDTDYITEDGKPVFRIFKKENGEFKIEYDRTFEPYFYALLKDDSAIEEVKKITAERHGTVVTVKRVEKVQKKFLGRPVEVWKLYFTHPQDRPAIRDKIREHPAVIDIYEYDIPFAKRYLIDKGLVPMEGDEELKMLAFDIETLYHEGEEFAEGPILMISYADEEGARVITWKNVDLPYVDVVSTEREMIKRFLRVVKEKDPDVLITYNGDNFDFAYLKKRCEKLGINFALGRDGSEPKIQRMGDRFAVEVKGRIHFDLYPVIRRTINLPTYTLEAVYEAVFGQPKEKVYAEEITTAWETGENLERVARYSMEDAKVTYELGKEFLPMEAQLSRLIGQSLWDVSRSSTGNLVEWFLLRKAYERNELAPNKPDEKELARRRQSYEGGYVKEPERGLWENIVYLDFRSLYPSIIITHNVSPDTLNREGCKEYDVAPQVGHRFCKDFPGFIPSLLGDLLEERQKIKKKMKATIDPIERKLLDYRQRAIKILANSYYGYYGYARARWYCKECAESVTAWGREYITMTIKEIEEKYGFKVIYSDTDGFFATIPGADAETVKKKAMEFLKYINAKLPGALELEYEGFYKRGFFVTKKKYAVIDEEGKITTRGLEIVRRDWSEIAKETQARVLEALLKDGDVEKAVRIVKEVTEKLSKYEVPPEKLVIHEQITRDLKDYKATGPHVAVAKRLAARGVKIRPGTVISYIVLKGSGRIGDRAIPFDEFDPTKHKYDAEYYIENQVLPAVERILRAFGYRKEDLRYQKTRQVGLSAWLKPKGT

SEQ ID NO: 986 - protein, 774 aa, synthetic construct
MILDTDYITEDGKPVFRIFKKENGEFKIEYDRTFEPYFYALLKDDSAIEEVKKITAERHGTVVTVKRVEKVQKKFLGRPVEVWKLYFTHPQDRPAIADKIREHPAVIDIYEYDIPFAKRYLIDKGLVPMEGDEELKMLAFDIETLYHEGEEFAEGPILMISYADEEGARVITWKNVDLPYVDVVSTEREMIKRFLRVVKEKDPDVLITYNGDNFDFAYLKKRCEKLGINFALGRDGSEPKIQRMGDRFAVEVKGRIHFDLYPVIRRTINLPTYTLEAVYEAVFGQPKEKVYAEEITTAWETGENLERVARYSMEDAKVTYELGKEFLPMEAQLSRLIGQSLWDVSRSSTGNLVEWFLLRKAYERNELAPNKPDEKELARRRQSYEGGYVKEPERGLWENIVYLDFRSLYPSIIITHNVSPDTLNREGCKEYDVAPQVGHRFCKDFPGFIPSLLGDLLEERQKIKKKMKATIDPIERKLLDYRQRAIKILANSYYGYYGYARARWYCKECAESVTAWGREYITMTIKEIEEKYGFKVIYSDTDGFFATIPGADAETVKKKAMEFLKYINAKLPGALELEYEGFYKRGFFVTKKKYAVIDEEGKITTRGLEIVRRDWSEIAKETQARVLEALLKDGDVEKAVRIVKEVTEKLSKYEVPPEKLVIHEQITRDLKDYKATGPHVAVAKRLAARGVKIRPGTVISYIVLKGSGRIGDRAIPFDEFDPTKHKYDAEYYIENQVLPAVERILRAFGYRKEDLRYQKTRQVGLSAWLKPKGT

SEQ ID NO: 987 - protein, 774 aa, synthetic construct
MILDTDYITEDGKPVFRIFKKENGEFKIEYDRTFEPYFYALLKDDSAIEEVKKITAERHGTVVTVKRVEKVQKKFLGRPVEVWKLYFTHPQDRPAIADKIREHPAVIDIYEYDIPFAKMYLIDKGLVPMEGDEELKMLAFDIETLYHEGEEFAEGPILMISYADEEGARVITWKNVDLPYVDVVSTEREMIKRFLRVVKEKDPDVLITYNGDNFDFAYLKKRCEKLGINFALGRDGSEPKIQRMGDRFAVEVKGRIHFDLYPVIRRTINLPTYTLEAVYEAVFGQPKEKVYAEEITTAWETGENLERVARYSMEDAKVTYELGKEFLPMEAQLSRLIGQSLWDVSRSSTGNLVEWFLLRKAYERNELAPNKPDEKELARRRQSYEGGYVKEPERGLWENIVYLDFRSLYPSIIITHNVSPDTLNREGCKEYDVAPQVGHRFCKDFPGFIPSLLGDLLEERQKIKKKMKATIDPIERKLLDYRQRAIKILANSYYGYYGYARARWYCKECAESVTAWGREYITMTIKEIEEKYGFKVIYSDTDGFFATIPGADAETVKKKAMEFLKYINAKLPGALELEYEGFYKRGFFVTKKKYAVIDEEGKITTRGLEIVRRDWSEIAKETQARVLEALLKDGDVEKAVRIVKEVTEKLSKYEVPPEKLVIHEQITRDLKDYKATGPHVAVAKRLAARGVKIRPGTVISYIVLKGSGRIGDRAIPFDEFDPTKHKYDAEYYIENQVLPAVERILRAFGYRKEDLRYQKTRQVGLSAWLKPKGT

SEQ ID NO: 988 - protein, 774 aa, synthetic construct
MILDTDYITEDGKPVFRIFKKENGEFKIEYDRTFEPYFYALLKDDSAIEEVKKITAERHGTVVTVKRVEKVQKKFLGRPVEVWKLYFTHPQDRPAIADKIREHPAVIDIYEYDIPFAKQYLIDKGLVPMEGDEELKMLAFDIETLYHEGEEFAEGPILMISYADEEGARVITWKNVDLPYVDVVSTEREMIKRFLRVVKEKDPDVLITYNGDNFDFAYLKKRCEKLGINFALGRDGSEPKIQRMGDRFAVEVKGRIHFDLYPVIRRTINLPTYTLEAVYEAVFGQPKEKVYAEEITTAWETGENLERVARYSMEDAKVTYELGKEFLPMEAQLSRLIGQSLWDVSRSSTGNLVEWFLLRKAYERNELAPNKPDEKELARRRQSYEGGYVKEPERGLWENIVYLDFRSLYPSIIITHNVSPDTLNREGCKEYDVAPQVGHRFCKDFPGFIPSLLGDLLEERQKIKKKMKATIDPIERKLLDYRQRAIKILANSYYGYYGYARARWYCKECAESVTAWGREYITMTIKEIEEKYGFKVIYSDTDGFFATIPGADAETVKKKAMEFLKYINAKLPGALELEYEGFYKRGFFVTKKKYAVIDEEGKITTRGLEIVRRDWSEIAKETQARVLEALLKDGDVEKAVRIVKEVTEKLSKYEVPPEKLVIHEQITRDLKDYKATGPHVAVAKRLAARGVKIRPGTVISYIVLKGSGRIGDRAIPFDEFDPTKHKYDAEYYIENQVLPAVERILRAFGYRKEDLRYQKTRQVGLSAWLKPKGT

SEQ ID NO: 989 - protein, 774 aa, synthetic construct
MILDTDYITEDGKPVFRIFKKENGEFKIEYDRTFEPYFYALLKDDSAIEEVKKITAERHGTVVTVKRVEKVQKKFLGRPVEVWKLYFTHPQDRPAIADKIREHPAVIDIYEYDIPFAKYYLIDKGLVPMEGDEELKMLAFDIETLYHEGEEFAEGPILMISYADEEGARVITWKNVDLPYVDVVSTEREMIKRFLRVVKEKDPDVLITYNGDNFDFAYLKKRCEKLGINFALGRDGSEPKIQRMGDRFAVEVKGRIHFDLYPVIRRTINLPTYTLEAVYEAVFGQPKEKVYAEEITTAWETGENLERVARYSMEDAKVTYELGKEFLPMEAQLSRLIGQSLWDVSRSSTGNLVEWFLLRKAYERNELAPNKPDEKELARRRQSYEGGYVKEPERGLWENIVYLDFRSLYPSIIITHNVSPDTLNREGCKEYDVAPQVGHRFCKDFPGFIPSLLGDLLEERQKIKKKMKATIDPIERKLLDYRQRAIKILANSYYGYYGYARARWYCKECAESVTAWGREYITMTIKEIEEKYGFKVIYSDTDGFFATIPGADAETVKKKAMEFLKYINAKLPGALELEYEGFYKRGFFVTKKKYAVIDEEGKITTRGLEIVRRDWSEIAKETQARVLEALLKDGDVEKAVRIVKEVTEKLSKYEVPPEKLVIHEQITRDLKDYKATGPHVAVAKRLAARGVKIRPGTVISYIVLKGSGRIGDRAIPFDEFDPTKHKYDAEYYIENQVLPAVERILRAFGYRKEDLRYQKTRQVGLSAWLKPKGT

SEQ ID NO: 990 - protein, 774 aa, synthetic construct
MILDTDYITEDGKPVFRIFKKENGEFKIEYDRTFEPYFYALLKDDSAIEEVKKITAERHGTVVTVKRVEKVQKKFLGRPVEVWKLYFTHPQDRPAIFDKIREHPAVIDIYEYDIPFAKRYLIDKGLVPMEGDEELKMLAFDIETLYHEGEEFAEGPILMISYADEEGARVITWKNVDLPYVDVVSTEREMIKRFLRVVKEKDPDVLITYNGDNFDFAYLKKRCEKLGINFALGRDGSEPKIQRMGDRFAVEVKGRIHFDLYPVIRRTINLPTYTLEAVYEAVFGQPKEKVYAEEITTAWETGENLERVARYSMEDAKVTYELGKEFLPMEAQLSRLIGQSLWDVSRSSTGNLVEWFLLRKAYERNELAPNKPDEKELARRRQSYEGGYVKEPERGLWENIVYLDFRSLYPSIIITHNVSPDTLNREGCKEYDVAPQVGHRFCKDFPGFIPSLLGDLLEERQKIKKKMKATIDPIERKLLDYRQRAIKILANSYYGYYGYARARWYCKECAESVTAWGREYITMTIKEIEEKYGFKVIYSDTDGFFATIPGADAETVKKKAMEFLKYINAKLPGALELEYEGFYKRGFFVTKKKYAVIDEEGKITTRGLEIVRRDWSEIAKETQARVLEALLKDGDVEKAVRIVKEVTEKLSKYEVPPEKLVIHEQITRDLKDYKATGPHVAVAKRLAARGVKIRPGTVISYIVLKGSGRIGDRAIPFDEFDPTKHKYDAEYYIENQVLPAVERILRAFGYRKEDLRYQKTRQVGLSAWLKPKGT

SEQ ID NO: 991 - protein, 774 aa, synthetic construct
MILDTDYITEDGKPVFRIFKKENGEFKIEYDRTFEPYFYALLKDDSAIEEVKKITAERHGTVVTVKRVEKVQKKFLGRPVEVWKLYFTHPQDRPAIFDKIREHPAVIDIYEYDIPFAKQYLIDKGLVPMEGDEELKMLAFDIETLYHEGEEFAEGPILMISYADEEGARVITWKNVDLPYVDVVSTEREMIKRFLRVVKEKDPDVLITYNGDNFDFAYLKKRCEKLGINFALGRDGSEPKIQRMGDRFAVEVKGRIHFDLYPVIRRTINLPTYTLEAVYEAVFGQPKEKVYAEEITTAWETGENLERVARYSMEDAKVTYELGKEFLPMEAQLSRLIGQSLWDVSRSSTGNLVEWFLLRKAYERNELAPNKPDEKELARRRQSYEGGYVKEPERGLWENIVYLDFRSLYPSIIITHNVSPDTLNREGCKEYDVAPQVGHRFCKDFPGFIPSLLGDLLEERQKIKKKMKATIDPIERKLLDYRQRAIKILANSYYGYYGYARARWYCKECAESVTAWGREYITMTIKEIEEKYGFKVIYSDTDGFFATIPGADAETVKKKAMEFLKYINAKLPGALELEYEGFYKRGFFVTKKKYAVIDEEGKITTRGLEIVRRDWSEIAKETQARVLEALLKDGDVEKAVRIVKEVTEKLSKYEVPPEKLVIHEQITRDLKDYKATGPHVAVAKRLAARGVKIRPGTVISYIVLKGSGRIGDRAIPFDEFDPTKHKYDAEYYIENQVLPAVERILRAFGYRKEDLRYQKTRQVGLSAWLKPKGT

SEQ ID NO: 992 - protein, 774 aa, synthetic construct
MILDTDYITEDGKPVFRIFKKENGEFKIEYDRTFEPYFYALLKDDSAIEEVKKITAERHGTVVTVKRVEKVQKKFLGRPVEVWKLYFTHPQDRPAIHDKIREHPAVIDIYEYDIPFAKRYLIDKGLVPMEGDEELKMLAFDIETLYHEGEEFAEGPILMISYADEEGARVITWKNVDLPYVDVVSTEREMIKRFLRVVKEKDPDVLITYNGDNFDFAYLKKRCEKLGINFALGRDGSEPKIQRMGDRFAVEVKGRIHFDLYPVIRRTINLPTYTLEAVYEAVFGQPKEKVYAEEITTAWETGENLERVARYSMEDAKVTYELGKEFLPMEAQLSRLIGQSLWDVSRSSTGNLVEWFLLRKAYERNELAPNKPDEKELARRRQSYEGGYVKEPERGLWENIVYLDFRSLYPSIIITHNVSPDTLNREGCKEYDVAPQVGHRFCKDFPGFIPSLLGDLLEERQKIKKKMKATIDPIERKLLDYRQRAIKILANSYYGYYGYARARWYCKECAESVTAWGREYITMTIKEIEEKYGFKVIYSDTDGFFATIPGADAETVKKKAMEFLKYINAKLPGALELEYEGFYKRGFFVTKKKYAVIDEEGKITTRGLEIVRRDWSEIAKETQARVLEALLKDGDVEKAVRIVKEVTEKLSKYEVPPEKLVIHEQITRDLKDYKATGPHVAVAKRLAARGVKIRPGTVISYIVLKGSGRIGDRAIPFDEFDPTKHKYDAEYYIENQVLPAVERILRAFGYRKEDLRYQKTRQVGLSAWLKPKGT

SEQ ID NO: 993 - protein, 774 aa, synthetic construct
MILDTDYITEDGKPVFRIFKKENGEFKIEYDRTFEPYFYALLKDDSAIEEVKKITAERHGTVVTVKRVEKVQKKFLGRPVEVWKLYFTHPQDRPAIRDKIREHPAVIDIYEYDIPFAKMYLIDKGLVPMEGDEELKMLAFDIETLYHEGEEFAEGPILMISYADEEGARVITWKNVDLPYVDVVSTEREMIKRFLRVVKEKDPDVLITYNGDNFDFAYLKKRCEKLGINFALGRDGSEPKIQRMGDRFAVEVKGRIHFDLYPVIRRTINLPTYTLEAVYEAVFGQPKEKVYAEEITTAWETGENLERVARYSMEDAKVTYELGKEFLPMEAQLSRLIGQSLWDVSRSSTGNLVEWFLLRKAYERNELAPNKPDEKELARRRQSYEGGYVKEPERGLWENIVYLDFRSLYPSIIITHNVSPDTLNREGCKEYDVAPQVGHRFCKDFPGFIPSLLGDLLEERQKIKKKMKATIDPIERKLLDYRQRAIKILANSYYGYYGYARARWYCKECAESVTAWGREYITMTIKEIEEKYGFKVIYSDTDGFFATIPGADAETVKKKAMEFLKYINAKLPGALELEYEGFYKRGFFVTKKKYAVIDEEGKITTRGLEIVRRDWSEIAKETQARVLEALLKDGDVEKAVRIVKEVTEKLSKYEVPPEKLVIHEQITRDLKDYKATGPHVAVAKRLAARGVKIRPGTVISYIVLKGSGRIGDRAIPFDEFDPTKHKYDAEYYIENQVLPAVERILRAFGYRKEDLRYQKTRQVGLSAWLKPKGT

SEQ ID NO: 994 - protein, 774 aa, synthetic construct
MILDTDYITEDGKPVFRIFKKENGEFKIEYDRTFEPYFYALLKDDSAIEEVKKITAERHGTVVTVKRVEKVQKKFLGRPVEVWKLYFTHPQDRPAIRDKIREHPAVIDIYEYDIPFAKQYLIDKGLVPMEGDEELKMLAFDIETLYHEGEEFAEGPILMISYADEEGARVITWKNVDLPYVDVVSTEREMIKRFLRVVKEKDPDVLITYNGDNFDFAYLKKRCEKLGINFALGRDGSEPKIQRMGDRFAVEVKGRIHFDLYPVIRRTINLPTYTLEAVYEAVFGQPKEKVYAEEITTAWETGENLERVARYSMEDAKVTYELGKEFLPMEAQLSRLIGQSLWDVSRSSTGNLVEWFLLRKAYERNELAPNKPDEKELARRRQSYEGGYVKEPERGLWENIVYLDFRSLYPSIIITHNVSPDTLNREGCKEYDVAPQVGHRFCKDFPGFIPSLLGDLLEERQKIKKKMKATIDPIERKLLDYRQRAIKILANSYYGYYGYARARWYCKECAESVTAWGREYITMTIKEIEEKYGFKVIYSDTDGFFATIPGADAETVKKKAMEFLKYINAKLPGALELEYEGFYKRGFFVTKKKYAVIDEEGKITTRGLEIVRRDWSEIAKETQARVLEALLKDGDVEKAVRIVKEVTEKLSKYEVPPEKLVIHEQITRDLKDYKATGPHVAVAKRLAARGVKIRPGTVISYIVLKGSGRIGDRAIPFDEFDPTKHKYDAEYYIENQVLPAVERILRAFGYRKEDLRYQKTRQVGLSAWLKPKGT

SEQ ID NO: 995 - protein, 774 aa, synthetic construct
MILDTDYITEDGKPVHRIFKKENGEFKIEYDRTFEPYFYALLKDDSAIEEVKKITAERHGTVVTVKRVEKVQKKFLGRPVEVWKLYFTHFQDIPAIRDKIREHPAVIDIYEYDIPFAKRYLIDKGLVPMEGDEELKMLAFDIETLYHEGEEFAEGPILMISYADEEGARVITWKNVDLPYVDVVSTEREMIKRFLRVVKEKDPDVLITYNGDNFDFAYLKKRCEKLGINFALGRDGSEPKIQRMGDRFAVEVKGRIHFDLYPVIRRTINLPTYTLEAVYEAVFGQPKEKVYAEEITTAWETGENLERVARYSMEDAKVTYELGKEFLPMEAQLSRLIGQSLWDVSRSSTGNLVEWFLLRKAYERNELAPNKPDEKELARRRQSYEGGYVKEPERGLWENIVYLDFRSLYPSIIITHNVSPDTLNREGCKEYDVAPQVGHRFCKDFPGFIPSLLGDLLEERQKIKKKMKATIDPIERKLLDYRQRAIKILANSYYGYYGYARARWYCKECAESVTAWGREYITMTIKEIEEKYGFKVIYSDTDGFFATIPGADAETVKKKAMEFLKYINAKLPGALELEYEGFYKRGFFVTKKKYAVIDEEGKITTRGLEIVRRDWSEIAKETQARVLEALLKDGDVEKAVRIVKEVTEKLSKYEVPPEKLVIHEQITRDLKDYKATGPHVAVAKRLAARGVKIRPGTVISYIVLKGSGRIGDRAIPFDEFDPTKHKYDAEYYIENQVLPAVERILRAFGYRKEDLRYQKTRQVGLSAWLKPKGT

SEQ ID NO: 996 - protein, 774 aa, synthetic construct
MILDTDYITEDGKPVHRIFKKENGEFKIEYDRTFEPYFYALLKDDSAIEEVKKITAERHGTVVTVKRVEKVQKKFLGRPVEVWKLYFTHWQDIPAIRDKIREHPAVIDIYEYDIPFAKRYLIDKGLVPMEGDEELKMLAFDIETLYHEGEEFAEGPILMISYADEEGARVITWKNVDLPYVDVVSTEREMIKRFLRVVKEKDPDVLITYNGDNFDFAYLKKRCEKLGINFALGRDGSEPKIQRMGDRFAVEVKGRIHFDLYPVIRRTINLPTYTLEAVYEAVFGQPKEKVYAEEITTAWETGENLERVARYSMEDAKVTYELGKEFLPMEAQLSRLIGQSLWDVSRSSTGNLVEWFLLRKAYERNELAPNKPDEKELARRRQSYEGGYVKEPERGLWENIVYLDFRSLYPSIIITHNVSPDTLNREGCKEYDVAPQVGHRFCKDFPGFIPSLLGDLLEERQKIKKKMKATIDPIERKLLDYRQRAIKILANSYYGYYGYARARWYCKECAESVTAWGREYITMTIKEIEEKYGFKVIYSDTDGFFATIPGADAETVKKKAMEFLKYINAKLPGALELEYEGFYKRGFFVTKKKYAVIDEEGKITTRGLEIVRRDWSEIAKETQARVLEALLKDGDVEKAVRIVKEVTEKLSKYEVPPEKLVIHEQITRDLKDYKATGPHVAVAKRLAARGVKIRPGTVISYIVLKGSGRIGDRAIPFDEFDPTKHKYDAEYYIENQVLPAVERILRAFGYRKEDLRYQKTRQVGLSAWLKPKGT

SEQ ID NO: 997 - protein, 774 aa, synthetic construct
MILDTDYITEDGKPVHRIFKKENGEFKIEYDRTFEPYFYALLKDDSAIEEVKKITAERHGTVVTVKRVEKVQKKFLGRPVEVWKLYFTHPQDVPAIADKIREHPAVIDIYEYDIPFAKRYLIDKGLVPMEGDEELKMLAFDIETLYHEGEEFAEGPILMISYADEEGARVITWKNVDLPYVDVVSTEREMIKRFLRVVKEKDPDVLITYNGDNFDFAYLKKRCEKLGINFALGRDGSEPKIQRMGDRFAVEVKGRIHFDLYPVIRRTINLPTYTLEAVYEAVFGQPKEKVYAEEITTAWETGENLERVARYSMEDAKVTYELGKEFLPMEAQLSRLIGQSLWDVSRSSTGNLVEWFLLRKAYERNELAPNKPDEKELARRRQSYEGGYVKEPERGLWENIVYLDFRSLYPSIIITHNVSPDTLNREGCKEYDVAPQVGHRFCKDFPGFIPSLLGDLLEERQKIKKKMKATIDPIERKLLDYRQRAIKILANSYYGYYGYARARWYCKECAESVTAWGREYITMTIKEIEEKYGFKVIYSDTDGFFATIPGADAETVKKKAMEFLKYINAKLPGALELEYEGFYKRGFFVTKKKYAVIDEEGKITTRGLEIVRRDWSEIAKETQARVLEALLKDGDVEKAVRIVKEVTEKLSKYEVPPEKLVIHEQITRDLKDYKATGPHVAVAKRLAARGVKIRPGTVISYIVLKGSGRIGDRAIPFDEFDPTKHKYDAEYYIENQVLPAVERILRAFGYRKEDLRYQKTRQVGLSAWLKPKGT

SEQ ID NO: 998 - protein, 774 aa, synthetic construct
MILDTDYITEDGKPVHRIFKKENGEFKIEYDRTFEPYFYALLKDDSAIEEVKKITAERHGTVVTVKRVEKVQKKFLGRPVEVWKLYFTHPQDVPAIHDKIREHPAVIDIYEYDIPFAKRYLIDKGLVPMEGDEELKMLAFDIETLYHEGEEFAEGPILMISYADEEGARVITWKNVDLPYVDVVSTEREMIKRFLRVVKEKDPDVLITYNGDNFDFAYLKKRCEKLGINFALGRDGSEPKIQRMGDRFAVEVKGRIHFDLYPVIRRTINLPTYTLEAVYEAVFGQPKEKVYAEEITTAWETGENLERVARYSMEDAKVTYELGKEFLPMEAQLSRLIGQSLWDVSRSSTGNLVEWFLLRKAYERNELAPNKPDEKELARRRQSYEGGYVKEPERGLWENIVYLDFRSLYPSIIITHNVSPDTLNREGCKEYDVAPQVGHRFCKDFPGFIPSLLGDLLEERQKIKKKMKATIDPIERKLLDYRQRAIKILANSYYGYYGYARARWYCKECAESVTAWGREYITMTIKEIEEKYGFKVIYSDTDGFFATIPGADAETVKKKAMEFLKYINAKLPGALELEYEGFYKRGFFVTKKKYAVIDEEGKITTRGLEIVRRDWSEIAKETQARVLEALLKDGDVEKAVRIVKEVTEKLSKYEVPPEKLVIHEQITRDLKDYKATGPHVAVAKRLAARGVKIRPGTVISYIVLKGSGRIGDRAIPFDEFDPTKHKYDAEYYIENQVLPAVERILRAFGYRKEDLRYQKTRQVGLSAWLKPKGT

SEQ ID NO: 999 - protein, 774 aa, synthetic construct
MILDTDYITEDGKPVHRIFKKENGEFKIEYDRTFEPYFYALLKDDSAIEEVKKITAERHGTVVTVKRVEKVQKKFLGRPVEVWKLYFTHPQDIPAIADKIREHPAVIDIYEYDIPFAKRYLIDKGLVPMEGDEELKMLAFDIETLYHEGEEFAEGPILMISYADEEGARVITWKNVDLPYVDVVSTEREMIKRFLRVVKEKDPDVLITYNGDNFDFAYLKKRCEKLGINFALGRDGSEPKIQRMGDRFAVEVKGRIHFDLYPVIRRTINLPTYTLEAVYEAVFGQPKEKVYAEEITTAWETGENLERVARYSMEDAKVTYELGKEFLPMEAQLSRLIGQSLWDVSRSSTGNLVEWFLLRKAYERNELAPNKPDEKELARRRQSYEGGYVKEPERGLWENIVYLDFRSLYPSIIITHNVSPDTLNREGCKEYDVAPQVGHRFCKDFPGFIPSLLGDLLEERQKIKKKMKATIDPIERKLLDYRQRAIKILANSYYGYYGYARARWYCKECAESVTAWGREYITMTIKEIEEKYGFKVIYSDTDGFFATIPGADAETVKKKAMEFLKYINAKLPGALELEYEGFYKRGFFVTKKKYAVIDEEGKITTRGLEIVRRDWSEIAKETQARVLEALLKDGDVEKAVRIVKEVTEKLSKYEVPPEKLVIHEQITRDLKDYKATGPHVAVAKRLAARGVKIRPGTVISYIVLKGSGRIGDRAIPFDEFDPTKHKYDAEYYIENQVLPAVERILRAFGYRKEDLRYQKTRQVGLSAWLKPKGT

SEQ ID NO: 1000 - protein, 774 aa, synthetic construct
MILDTDYITEDGKPVHRIFKKENGEFKIEYDRTFEPYFYALLKDDSAIEEVKKITAERHGTVVTVKRVEKVQKKFLGRPVEVWKLYFTHPQDIPAIHDKIREHPAVIDIYEYDIPFAKRYLIDKGLVPMEGDEELKMLAFDIETLYHEGEEFAEGPILMISYADEEGARVITWKNVDLPYVDVVSTEREMIKRFLRVVKEKDPDVLITYNGDNFDFAYLKKRCEKLGINFALGRDGSEPKIQRMGDRFAVEVKGRIHFDLYPVIRRTINLPTYTLEAVYEAVFGQPKEKVYAEEITTAWETGENLERVARYSMEDAKVTYELGKEFLPMEAQLSRLIGQSLWDVSRSSTGNLVEWFLLRKAYERNELAPNKPDEKELARRRQSYEGGYVKEPERGLWENIVYLDFRSLYPSIIITHNVSPDTLNREGCKEYDVAPQVGHRFCKDFPGFIPSLLGDLLEERQKIKKKMKATIDPIERKLLDYRQRAIKILANSYYGYYGYARARWYCKECAESVTAWGREYITMTIKEIEEKYGFKVIYSDTDGFFATIPGADAETVKKKAMEFLKYINAKLPGALELEYEGFYKRGFFVTKKKYAVIDEEGKITTRGLEIVRRDWSEIAKETQARVLEALLKDGDVEKAVRIVKEVTEKLSKYEVPPEKLVIHEQITRDLKDYKATGPHVAVAKRLAARGVKIRPGTVISYIVLKGSGRIGDRAIPFDEFDPTKHKYDAEYYIENQVLPAVERILRAFGYRKEDLRYQKTRQVGLSAWLKPKGT

SEQ ID NO: 1001 - protein, 774 aa, synthetic construct
MILDTDYITEDGKPVHRIFKKENGEFKIEYDRTFEPYFYALLKDDSAIEEVKKITAERHGTVVTVKRVEKVQKKFLGRPVEVWKLYFTHPQDQPAIRDKIREHPAVIDIYEYDIPFAKRYLIDKGLVPMEGDEELKMLAFDIETLYHEGEEFAEGPILMISYADEEGARVITWKNVDLPYVDVVSTEREMIKRFLRVVKEKDPDVLITYNGDNFDFAYLKKRCEKLGINFALGRDGSEPKIQRMGDRFAVEVKGRIHFDLYPVIRRTINLPTYTLEAVYEAVFGQPKEKVYAEEITTAWETGENLERVARYSMEDAKVTYELGKEFLPMEAQLSRLIGQSLWDVSRSSTGNLVEWFLLRKAYERNELAPNKPDEKELARRRQSYEGGYVKEPERGLWENIVYLDFRSLYPSIIITHNVSPDTLNREGCKEYDVAPQVGHRFCKDFPGFIPSLLGDLLEERQKIKKKMKATIDPIERKLLDYRQRAIKILANSYYGYYGYARARWYCKECAESVTAWGREYITMTIKEIEEKYGFKVIYSDTDGFFATIPGADAETVKKKAMEFLKYINAKLPGALELEYEGFYKRGFFVTKKKYAVIDEEGKITTRGLEIVRRDWSEIAKETQARVLEALLKDGDVEKAVRIVKEVTEKLSKYEVPPEKLVIHEQITRDLKDYKATGPHVAVAKRLAARGVKIRPGTVISYIVLKGSGRIGDRAIPFDEFDPTKHKYDAEYYIENQVLPAVERILRAFGYRKEDLRYQKTRQVGLSAWLKPKGT

SEQ ID NO: 1002 - protein, 774 aa, synthetic construct
MILDTDYITEDGKPVLRIFKKENGEFKIEYDRTFEPYFYALLKDDSAIEEVKKITAERHGTVVTVKRVEKVQKKFLGRPVEVWKLYFTHPQDVPAIRDKIREHPAVIDIYEYDIPFAKRYLIDKGLVPMEGDEELKMLAFDIETLYHEGEEFAEGPILMISYADEEGARVITWKNVDLPYVDVVSTEREMIKRFLRVVKEKDPDVLITYNGDNFDFAYLKKRCEKLGINFALGRDGSEPKIQRMGDRFAVEVKGRIHFDLYPVIRRTINLPTYTLEAVYEAVFGQPKEKVYAEEITTAWETGENLERVARYSMEDAKVTYELGKEFLPMEAQLSRLIGQSLWDVSRSSTGNLVEWFLLRKAYERNELAPNKPDEKELARRRQSYEGGYVKEPERGLWENIVYLDFRSLYPSIIITHNVSPDTLNREGCKEYDVAPQVGHRFCKDFPGFIPSLLGDLLEERQKIKKKMKATIDPIERKLLDYRQRAIKILANSYYGYYGYARARWYCKECAESVTAWGREYITMTIKEIEEKYGFKVIYSDTDGFFATIPGADAETVKKKAMEFLKYINAKLPGALELEYEGFYKRGFFVTKKKYAVIDEEGKITTRGLEIVRRDWSEIAKETQARVLEALLKDGDVEKAVRIVKEVTEKLSKYEVPPEKLVIHEQITRDLKDYKATGPHVAVAKRLAARGVKIRPGTVISYIVLKGSGRIGDRAIPFDEFDPTKHKYDAEYYIENQVLPAVERILRAFGYRKEDLRYQKTRQVGLSAWLKPKGT

SEQ ID NO: 1003 - protein, 774 aa, synthetic construct
MILDTDYITEDGKPVLRIFKKENGEFKIEYDRTFEAYFYALLKDDSAIEEVKKITAERHGTVVTVKRVEKVQKKFLGRPVEVWKLYFTHFQDVPAIRDKIREHPAVIDIYEYDIPFAKRYLIDKGLVPMEGDEELKMLAFDIETLYHEGEEFAEGPILMISYADEEGARVITWKNVDLPYVDVVSTEREMIKRFLRVVKEKDPDVLITYNGDNFDFAYLKKRCEKLGINFALGRDGSEPKIQRMGDRFAVEVKGRIHFDLYPVIRRTINLPTYTLEAVYEAVFGQPKEKVYAEEITTAWETGENLERVARYSMEDAKVTYELGKEFLPMEAQLSRLIGQSLWDVSRSSTGNLVEWFLLRKAYERNELAPNKPDEKELARRRQSYEGGYVKEPERGLWENIVYLDFRSLYPSIIITHNVSPDTLNREGCKEYDVAPQVGHRFCKDFPGFIPSLLGDLLEERQKIKKKMKATIDPIERKLLDYRQRAIKILANSYYGYYGYARARWYCKECAESVTAWGREYITMTIKEIEEKYGFKVIYSDTDGFFATIPGADAETVKKKAMEFLKYINAKLPGALELEYEGFYKRGFFVTKKKYAVIDEEGKITTRGLEIVRRDWSEIAKETQARVLEALLKDGDVEKAVRIVKEVTEKLSKYEVPPEKLVIHEQITRDLKDYKATGPHVAVAKRLAARGVKIRPGTVISYIVLKGSGRIGDRAIPFDEFDPTKHKYDAEYYIENQVLPAVERILRAFGYRKEDLRYQKTRQVGLSAWLKPKGT

SEQ ID NO: 1004 - protein, 774 aa, synthetic construct
MILDTDYITEDGKPVLRIFKKENGEFKIEYDRTFEAYFYALLKDDSAIEEVKKITAERHGTVVTVKRVEKVQKKFLGRPVEVWKLYFTHFQDIPAIRDKIREHPAVIDIYEYDIPFAKRYLIDKGLVPMEGDEELKMLAFDIETLYHEGEEFAEGPILMISYADEEGARVITWKNVDLPYVDVVSTEREMIKRFLRVVKEKDPDVLITYNGDNFDFAYLKKRCEKLGINFALGRDGSEPKIQRMGDRFAVEVKGRIHFDLYPVIRRTINLPTYTLEAVYEAVFGQPKEKVYAEEITTAWETGENLERVARYSMEDAKVTYELGKEFLPMEAQLSRLIGQSLWDVSRSSTGNLVEWFLLRKAYERNELAPNKPDEKELARRRQSYEGGYVKEPERGLWENIVYLDFRSLYPSIIITHNVSPDTLNREGCKEYDVAPQVGHRFCKDFPGFIPSLLGDLLEERQKIKKKMKATIDPIERKLLDYRQRAIKILANSYYGYYGYARARWYCKECAESVTAWGREYITMTIKEIEEKYGFKVIYSDTDGFFATIPGADAETVKKKAMEFLKYINAKLPGALELEYEGFYKRGFFVTKKKYAVIDEEGKITTRGLEIVRRDWSEIAKETQARVLEALLKDGDVEKAVRIVKEVTEKLSKYEVPPEKLVIHEQITRDLKDYKATGPHVAVAKRLAARGVKIRPGTVISYIVLKGSGRIGDRAIPFDEFDPTKHKYDAEYYIENQVLPAVERILRAFGYRKEDLRYQKTRQVGLSAWLKPKGT

SEQ ID NO: 1005 - protein, 774 aa, synthetic construct
MILDTDYITEDGKPVLRIFKKENGEFKIEYDRTFEAYFYALLKDDSAIEEVKKITAERHGTVVTVKRVEKVQKKFLGRPVEVWKLYFTHFQDIPAIADKIREHPAVIDIYEYDIPFAKRYLIDKGLVPMEGDEELKMLAFDIETLYHEGEEFAEGPILMISYADEEGARVITWKNVDLPYVDVVSTEREMIKRFLRVVKEKDPDVLITYNGDNFDFAYLKKRCEKLGINFALGRDGSEPKIQRMGDRFAVEVKGRIHFDLYPVIRRTINLPTYTLEAVYEAVFGQPKEKVYAEEITTAWETGENLERVARYSMEDAKVTYELGKEFLPMEAQLSRLIGQSLWDVSRSSTGNLVEWFLLRKAYERNELAPNKPDEKELARRRQSYEGGYVKEPERGLWENIVYLDFRSLYPSIIITHNVSPDTLNREGCKEYDVAPQVGHRFCKDFPGFIPSLLGDLLEERQKIKKKMKATIDPIERKLLDYRQRAIKILANSYYGYYGYARARWYCKECAESVTAWGREYITMTIKEIEEKYGFKVIYSDTDGFFATIPGADAETVKKKAMEFLKYINAKLPGALELEYEGFYKRGFFVTKKKYAVIDEEGKITTRGLEIVRRDWSEIAKETQARVLEALLKDGDVEKAVRIVKEVTEKLSKYEVPPEKLVIHEQITRDLKDYKATGPHVAVAKRLAARGVKIRPGTVISYIVLKGSGRIGDRAIPFDEFDPTKHKYDAEYYIENQVLPAVERILRAFGYRKEDLRYQKTRQVGLSAWLKPKGT

SEQ ID NO: 1006 - protein, 774 aa, synthetic construct
MILDTDYITEDGKPVLRIFKKENGEFKIEYDRTFEAYFYALLKDDSAIEEVKKITAERHGTVVTVKRVEKVQKKFLGRPVEVWKLYFTHFQDIPAIFDKIREHPAVIDIYEYDIPFAKRYLIDKGLVPMEGDEELKMLAFDIETLYHEGEEFAEGPILMISYADEEGARVITWKNVDLPYVDVVSTEREMIKRFLRVVKEKDPDVLITYNGDNFDFAYLKKRCEKLGINFALGRDGSEPKIQRMGDRFAVEVKGRIHFDLYPVIRRTINLPTYTLEAVYEAVFGQPKEKVYAEEITTAWETGENLERVARYSMEDAKVTYELGKEFLPMEAQLSRLIGQSLWDVSRSSTGNLVEWFLLRKAYERNELAPNKPDEKELARRRQSYEGGYVKEPERGLWENIVYLDFRSLYPSIIITHNVSPDTLNREGCKEYDVAPQVGHRFCKDFPGFIPSLLGDLLEERQKIKKKMKATIDPIERKLLDYRQRAIKILANSYYGYYGYARARWYCKECAESVTAWGREYITMTIKEIEEKYGFKVIYSDTDGFFATIPGADAETVKKKAMEFLKYINAKLPGALELEYEGFYKRGFFVTKKKYAVIDEEGKITTRGLEIVRRDWSEIAKETQARVLEALLKDGDVEKAVRIVKEVTEKLSKYEVPPEKLVIHEQITRDLKDYKATGPHVAVAKRLAARGVKIRPGTVISYIVLKGSGRIGDRAIPFDEFDPTKHKYDAEYYIENQVLPAVERILRAFGYRKEDLRYQKTRQVGLSAWLKPKGT

SEQ ID NO: 1007 - protein, 774 aa, synthetic construct
MILDTDYITEDGKPVLRIFKKENGEFKIEYDRTFEAYFYALLKDDSAIEEVKKITAERHGTVVTVKRVEKVQKKFLGRPVEVWKLYFTHFQDIPAIHDKIREHPAVIDIYEYDIPFAKRYLIDKGLVPMEGDEELKMLAFDIETLYHEGEEFAEGPILMISYADEEGARVITWKNVDLPYVDVVSTEREMIKRFLRVVKEKDPDVLITYNGDNFDFAYLKKRCEKLGINFALGRDGSEPKIQRMGDRFAVEVKGRIHFDLYPVIRRTINLPTYTLEAVYEAVFGQPKEKVYAEEITTAWETGENLERVARYSMEDAKVTYELGKEFLPMEAQLSRLIGQSLWDVSRSSTGNLVEWFLLRKAYERNELAPNKPDEKELARRRQSYEGGYVKEPERGLWENIVYLDFRSLYPSIIITHNVSPDTLNREGCKEYDVAPQVGHRFCKDFPGFIPSLLGDLLEERQKIKKKMKATIDPIERKLLDYRQRAIKILANSYYGYYGYARARWYCKECAESVTAWGREYITMTIKEIEEKYGFKVIYSDTDGFFATIPGADAETVKKKAMEFLKYINAKLPGALELEYEGFYKRGFFVTKKKYAVIDEEGKITTRGLEIVRRDWSEIAKETQARVLEALLKDGDVEKAVRIVKEVTEKLSKYEVPPEKLVIHEQITRDLKDYKATGPHVAVAKRLAARGVKIRPGTVISYIVLKGSGRIGDRAIPFDEFDPTKHKYDAEYYIENQVLPAVERILRAFGYRKEDLRYQKTRQVGLSAWLKPKGT

SEQ ID NO: 1008 - protein, 774 aa, synthetic construct
MILDTDYITEDGKPVLRIFKKENGEFKIEYDRTFEAYFYALLKDDSAIEEVKKITAERHGTVVTVKRVEKVQKKFLGRPVEVWKLYFTHIQDVPAIADKIREHPAVIDIYEYDIPFAKRYLIDKGLVPMEGDEELKMLAFDIETLYHEGEEFAEGPILMISYADEEGARVITWKNVDLPYVDVVSTEREMIKRFLRVVKEKDPDVLITYNGDNFDFAYLKKRCEKLGINFALGRDGSEPKIQRMGDRFAVEVKGRIHFDLYPVIRRTINLPTYTLEAVYEAVFGQPKEKVYAEEITTAWETGENLERVARYSMEDAKVTYELGKEFLPMEAQLSRLIGQSLWDVSRSSTGNLVEWFLLRKAYERNELAPNKPDEKELARRRQSYEGGYVKEPERGLWENIVYLDFRSLYPSIIITHNVSPDTLNREGCKEYDVAPQVGHRFCKDFPGFIPSLLGDLLEERQKIKKKMKATIDPIERKLLDYRQRAIKILANSYYGYYGYARARWYCKECAESVTAWGREYITMTIKEIEEKYGFKVIYSDTDGFFATIPGADAETVKKKAMEFLKYINAKLPGALELEYEGFYKRGFFVTKKKYAVIDEEGKITTRGLEIVRRDWSEIAKETQARVLEALLKDGDVEKAVRIVKEVTEKLSKYEVPPEKLVIHEQITRDLKDYKATGPHVAVAKRLAARGVKIRPGTVISYIVLKGSGRIGDRAIPFDEFDPTKHKYDAEYYIENQVLPAVERILRAFGYRKEDLRYQKTRQVGLSAWLKPKGT

SEQ ID NO: 1009 - protein, 774 aa, synthetic construct
MILDTDYITEDGKPVLRIFKKENGEFKIEYDRTFEAYFYALLKDDSAIEEVKKITAERHGTVVTVKRVEKVQKKFLGRPVEVWKLYFTHIQDIPAIRDKIREHPAVIDIYEYDIPFAKRYLIDKGLVPMEGDEELKMLAFDIETLYHEGEEFAEGPILMISYADEEGARVITWKNVDLPYVDVVSTEREMIKRFLRVVKEKDPDVLITYNGDNFDFAYLKKRCEKLGINFALGRDGSEPKIQRMGDRFAVEVKGRIHFDLYPVIRRTINLPTYTLEAVYEAVFGQPKEKVYAEEITTAWETGENLERVARYSMEDAKVTYELGKEFLPMEAQLSRLIGQSLWDVSRSSTGNLVEWFLLRKAYERNELAPNKPDEKELARRRQSYEGGYVKEPERGLWENIVYLDFRSLYPSIIITHNVSPDTLNREGCKEYDVAPQVGHRFCKDFPGFIPSLLGDLLEERQKIKKKMKATIDPIERKLLDYRQRAIKILANSYYGYYGYARARWYCKECAESVTAWGREYITMTIKEIEEKYGFKVIYSDTDGFFATIPGADAETVKKKAMEFLKYINAKLPGALELEYEGFYKRGFFVTKKKYAVIDEEGKITTRGLEIVRRDWSEIAKETQARVLEALLKDGDVEKAVRIVKEVTEKLSKYEVPPEKLVIHEQITRDLKDYKATGPHVAVAKRLAARGVKIRPGTVISYIVLKGSGRIGDRAIPFDEFDPTKHKYDAEYYIENQVLPAVERILRAFGYRKEDLRYQKTRQVGLSAWLKPKGT

SEQ ID NO: 1010 - protein, 774 aa, synthetic construct
MILDTDYITEDGKPVLRIFKKENGEFKIEYDRTFEAYFYALLKDDSAIEEVKKITAERHGTVVTVKRVEKVQKKFLGRPVEVWKLYFTHIQDIPAIADKIREHPAVIDIYEYDIPFAKRYLIDKGLVPMEGDEELKMLAFDIETLYHEGEEFAEGPILMISYADEEGARVITWKNVDLPYVDVVSTEREMIKRFLRVVKEKDPDVLITYNGDNFDFAYLKKRCEKLGINFALGRDGSEPKIQRMGDRFAVEVKGRIHFDLYPVIRRTINLPTYTLEAVYEAVFGQPKEKVYAEEITTAWETGENLERVARYSMEDAKVTYELGKEFLPMEAQLSRLIGQSLWDVSRSSTGNLVEWFLLRKAYERNELAPNKPDEKELARRRQSYEGGYVKEPERGLWENIVYLDFRSLYPSIIITHNVSPDTLNREGCKEYDVAPQVGHRFCKDFPGFIPSLLGDLLEERQKIKKKMKATIDPIERKLLDYRQRAIKILANSYYGYYGYARARWYCKECAESVTAWGREYITMTIKEIEEKYGFKVIYSDTDGFFATIPGADAETVKKKAMEFLKYINAKLPGALELEYEGFYKRGFFVTKKKYAVIDEEGKITTRGLEIVRRDWSEIAKETQARVLEALLKDGDVEKAVRIVKEVTEKLSKYEVPPEKLVIHEQITRDLKDYKATGPHVAVAKRLAARGVKIRPGTVISYIVLKGSGRIGDRAIPFDEFDPTKHKYDAEYYIENQVLPAVERILRAFGYRKEDLRYQKTRQVGLSAWLKPKGT

SEQ ID NO: 1011 - protein, 774 aa, synthetic construct
MILDTDYITEDGKPVLRIFKKENGEFKIEYDRTFEAYFYALLKDDSAIEEVKKITAERHGTVVTVKRVEKVQKKFLGRPVEVWKLYFTHWQDVPAIRDKIREHPAVIDIYEYDIPFAKRYLIDKGLVPMEGDEELKMLAFDIETLYHEGEEFAEGPILMISYADEEGARVITWKNVDLPYVDVVSTEREMIKRFLRVVKEKDPDVLITYNGDNFDFAYLKKRCEKLGINFALGRDGSEPKIQRMGDRFAVEVKGRIHFDLYPVIRRTINLPTYTLEAVYEAVFGQPKEKVYAEEITTAWETGENLERVARYSMEDAKVTYELGKEFLPMEAQLSRLIGQSLWDVSRSSTGNLVEWFLLRKAYERNELAPNKPDEKELARRRQSYEGGYVKEPERGLWENIVYLDFRSLYPSIIITHNVSPDTLNREGCKEYDVAPQVGHRFCKDFPGFIPSLLGDLLEERQKIKKKMKATIDPIERKLLDYRQRAIKILANSYYGYYGYARARWYCKECAESVTAWGREYITMTIKEIEEKYGFKVIYSDTDGFFATIPGADAETVKKKAMEFLKYINAKLPGALELEYEGFYKRGFFVTKKKYAVIDEEGKITTRGLEIVRRDWSEIAKETQARVLEALLKDGDVEKAVRIVKEVTEKLSKYEVPPEKLVIHEQITRDLKDYKATGPHVAVAKRLAARGVKIRPGTVISYIVLKGSGRIGDRAIPFDEFDPTKHKYDAEYYIENQVLPAVERILRAFGYRKEDLRYQKTRQVGLSAWLKPKGT

SEQ ID NO: 1012 - protein, 774 aa, synthetic construct
MILDTDYITEDGKPVLRIFKKENGEFKIEYDRTFEAYFYALLKDDSAIEEVKKITAERHGTVVTVKRVEKVQKKFLGRPVEVWKLYFTHWQDIPAIRDKIREHPAVIDIYEYDIPFAKRYLIDKGLVPMEGDEELKMLAFDIETLYHEGEEFAEGPILMISYADEEGARVITWKNVDLPYVDVVSTEREMIKRFLRVVKEKDPDVLITYNGDNFDFAYLKKRCEKLGINFALGRDGSEPKIQRMGDRFAVEVKGRIHFDLYPVIRRTINLPTYTLEAVYEAVFGQPKEKVYAEEITTAWETGENLERVARYSMEDAKVTYELGKEFLPMEAQLSRLIGQSLWDVSRSSTGNLVEWFLLRKAYERNELAPNKPDEKELARRRQSYEGGYVKEPERGLWENIVYLDFRSLYPSIIITHNVSPDTLNREGCKEYDVAPQVGHRFCKDFPGFIPSLLGDLLEERQKIKKKMKATIDPIERKLLDYRQRAIKILANSYYGYYGYARARWYCKECAESVTAWGREYITMTIKEIEEKYGFKVIYSDTDGFFATIPGADAETVKKKAMEFLKYINAKLPGALELEYEGFYKRGFFVTKKKYAVIDEEGKITTRGLEIVRRDWSEIAKETQARVLEALLKDGDVEKAVRIVKEVTEKLSKYEVPPEKLVIHEQITRDLKDYKATGPHVAVAKRLAARGVKIRPGTVISYIVLKGSGRIGDRAIPFDEFDPTKHKYDAEYYIENQVLPAVERILRAFGYRKEDLRYQKTRQVGLSAWLKPKGT

SEQ ID NO: 1013 - protein, 774 aa, synthetic construct
MILDTDYITEDGKPVLRIFKKENGEFKIEYDRTFEAYFYALLKDDSAIEEVKKITAERHGTVVTVKRVEKVQKKFLGRPVEVWKLYFTHYQDIPAIRDKIREHPAVIDIYEYDIPFAKRYLIDKGLVPMEGDEELKMLAFDIETLYHEGEEFAEGPILMISYADEEGARVITWKNVDLPYVDVVSTEREMIKRFLRVVKEKDPDVLITYNGDNFDFAYLKKRCEKLGINFALGRDGSEPKIQRMGDRFAVEVKGRIHFDLYPVIRRTINLPTYTLEAVYEAVFGQPKEKVYAEEITTAWETGENLERVARYSMEDAKVTYELGKEFLPMEAQLSRLIGQSLWDVSRSSTGNLVEWFLLRKAYERNELAPNKPDEKELARRRQSYEGGYVKEPERGLWENIVYLDFRSLYPSIIITHNVSPDTLNREGCKEYDVAPQVGHRFCKDFPGFIPSLLGDLLEERQKIKKKMKATIDPIERKLLDYRQRAIKILANSYYGYYGYARARWYCKECAESVTAWGREYITMTIKEIEEKYGFKVIYSDTDGFFATIPGADAETVKKKAMEFLKYINAKLPGALELEYEGFYKRGFFVTKKKYAVIDEEGKITTRGLEIVRRDWSEIAKETQARVLEALLKDGDVEKAVRIVKEVTEKLSKYEVPPEKLVIHEQITRDLKDYKATGPHVAVAKRLAARGVKIRPGTVISYIVLKGSGRIGDRAIPFDEFDPTKHKYDAEYYIENQVLPAVERILRAFGYRKEDLRYQKTRQVGLSAWLKPKGT

SEQ ID NO: 1014 - protein, 774 aa, synthetic construct
MILDTDYITEDGKPVLRIFKKENGEFKIEYDRTFEAYFYALLKDDSAIEEVKKITAERHGTVVTVKRVEKVQKKFLGRPVEVWKLYFTHPQDVPAIADKIREHPAVIDIYEYDIPFAKRYLIDKGLVPMEGDEELKMLAFDIETLYHEGEEFAEGPILMISYADEEGARVITWKNVDLPYVDVVSTEREMIKRFLRVVKEKDPDVLITYNGDNFDFAYLKKRCEKLGINFALGRDGSEPKIQRMGDRFAVEVKGRIHFDLYPVIRRTINLPTYTLEAVYEAVFGQPKEKVYAEEITTAWETGENLERVARYSMEDAKVTYELGKEFLPMEAQLSRLIGQSLWDVSRSSTGNLVEWFLLRKAYERNELAPNKPDEKELARRRQSYEGGYVKEPERGLWENIVYLDFRSLYPSIIITHNVSPDTLNREGCKEYDVAPQVGHRFCKDFPGFIPSLLGDLLEERQKIKKKMKATIDPIERKLLDYRQRAIKILANSYYGYYGYARARWYCKECAESVTAWGREYITMTIKEIEEKYGFKVIYSDTDGFFATIPGADAETVKKKAMEFLKYINAKLPGALELEYEGFYKRGFFVTKKKYAVIDEEGKITTRGLEIVRRDWSEIAKETQARVLEALLKDGDVEKAVRIVKEVTEKLSKYEVPPEKLVIHEQITRDLKDYKATGPHVAVAKRLAARGVKIRPGTVISYIVLKGSGRIGDRAIPFDEFDPTKHKYDAEYYIENQVLPAVERILRAFGYRKEDLRYQKTRQVGLSAWLKPKGT

SEQ ID NO: 1015 - protein, 774 aa, synthetic construct
MILDTDYITEDGKPVLRIFKKENGEFKIEYDRTFEAYFYALLKDDSAIEEVKKITAERHGTVVTVKRVEKVQKKFLGRPVEVWKLYFTHPQDVPAIFDKIREHPAVIDIYEYDIPFAKRYLIDKGLVPMEGDEELKMLAFDIETLYHEGEEFAEGPILMISYADEEGARVITWKNVDLPYVDVVSTEREMIKRFLRVVKEKDPDVLITYNGDNFDFAYLKKRCEKLGINFALGRDGSEPKIQRMGDRFAVEVKGRIHFDLYPVIRRTINLPTYTLEAVYEAVFGQPKEKVYAEEITTAWETGENLERVARYSMEDAKVTYELGKEFLPMEAQLSRLIGQSLWDVSRSSTGNLVEWFLLRKAYERNELAPNKPDEKELARRRQSYEGGYVKEPERGLWENIVYLDFRSLYPSIIITHNVSPDTLNREGCKEYDVAPQVGHRFCKDFPGFIPSLLGDLLEERQKIKKKMKATIDPIERKLLDYRQRAIKILANSYYGYYGYARARWYCKECAESVTAWGREYITMTIKEIEEKYGFKVIYSDTDGFFATIPGADAETVKKKAMEFLKYINAKLPGALELEYEGFYKRGFFVTKKKYAVIDEEGKITTRGLEIVRRDWSEIAKETQARVLEALLKDGDVEKAVRIVKEVTEKLSKYEVPPEKLVIHEQITRDLKDYKATGPHVAVAKRLAARGVKIRPGTVISYIVLKGSGRIGDRAIPFDEFDPTKHKYDAEYYIENQVLPAVERILRAFGYRKEDLRYQKTRQVGLSAWLKPKGT

SEQ ID NO: 1016 - protein, 774 aa, synthetic construct
MILDTDYITEDGKPVLRIFKKENGEFKIEYDRTFEAYFYALLKDDSAIEEVKKITAERHGTVVTVKRVEKVQKKFLGRPVEVWKLYFTHPQDVPAIWDKIREHPAVIDIYEYDIPFAKRYLIDKGLVPMEGDEELKMLAFDIETLYHEGEEFAEGPILMISYADEEGARVITWKNVDLPYVDVVSTEREMIKRFLRVVKEKDPDVLITYNGDNFDFAYLKKRCEKLGINFALGRDGSEPKIQRMGDRFAVEVKGRIHFDLYPVIRRTINLPTYTLEAVYEAVFGQPKEKVYAEEITTAWETGENLERVARYSMEDAKVTYELGKEFLPMEAQLSRLIGQSLWDVSRSSTGNLVEWFLLRKAYERNELAPNKPDEKELARRRQSYEGGYVKEPERGLWENIVYLDFRSLYPSIIITHNVSPDTLNREGCKEYDVAPQVGHRFCKDFPGFIPSLLGDLLEERQKIKKKMKATIDPIERKLLDYRQRAIKILANSYYGYYGYARARWYCKECAESVTAWGREYITMTIKEIEEKYGFKVIYSDTDGFFATIPGADAETVKKKAMEFLKYINAKLPGALELEYEGFYKRGFFVTKKKYAVIDEEGKITTRGLEIVRRDWSEIAKETQARVLEALLKDGDVEKAVRIVKEVTEKLSKYEVPPEKLVIHEQITRDLKDYKATGPHVAVAKRLAARGVKIRPGTVISYIVLKGSGRIGDRAIPFDEFDPTKHKYDAEYYIENQVLPAVERILRAFGYRKEDLRYQKTRQVGLSAWLKPKGT

SEQ ID NO: 1017 - protein, 774 aa, synthetic construct
MILDTDYITEDGKPVLRIFKKENGEFKIEYDRTFEAYFYALLKDDSAIEEVKKITAERHGTVVTVKRVEKVQKKFLGRPVEVWKLYFTHPQDEPAIRDKIREHPAVIDIYEYDIPFAKRYLIDKGLVPMEGDEELKMLAFDIETLYHEGEEFAEGPILMISYADEEGARVITWKNVDLPYVDVVSTEREMIKRFLRVVKEKDPDVLITYNGDNFDFAYLKKRCEKLGINFALGRDGSEPKIQRMGDRFAVEVKGRIHFDLYPVIRRTINLPTYTLEAVYEAVFGQPKEKVYAEEITTAWETGENLERVARYSMEDAKVTYELGKEFLPMEAQLSRLIGQSLWDVSRSSTGNLVEWFLLRKAYERNELAPNKPDEKELARRRQSYEGGYVKEPERGLWENIVYLDFRSLYPSIIITHNVSPDTLNREGCKEYDVAPQVGHRFCKDFPGFIPSLLGDLLEERQKIKKKMKATIDPIERKLLDYRQRAIKILANSYYGYYGYARARWYCKECAESVTAWGREYITMTIKEIEEKYGFKVIYSDTDGFFATIPGADAETVKKKAMEFLKYINAKLPGALELEYEGFYKRGFFVTKKKYAVIDEEGKITTRGLEIVRRDWSEIAKETQARVLEALLKDGDVEKAVRIVKEVTEKLSKYEVPPEKLVIHEQITRDLKDYKATGPHVAVAKRLAARGVKIRPGTVISYIVLKGSGRIGDRAIPFDEFDPTKHKYDAEYYIENQVLPAVERILRAFGYRKEDLRYQKTRQVGLSAWLKPKGT

SEQ ID NO: 1018 - protein, 774 aa, synthetic construct
MILDTDYITEDGKPVLRIFKKENGEFKIEYDRTFEAYFYALLKDDSAIEEVKKITAERHGTVVTVKRVEKVQKKFLGRPVEVWKLYFTHPQDIPAIADKIREHPAVIDIYEYDIPFAKRYLIDKGLVPMEGDEELKMLAFDIETLYHEGEEFAEGPILMISYADEEGARVITWKNVDLPYVDVVSTEREMIKRFLRVVKEKDPDVLITYNGDNFDFAYLKKRCEKLGINFALGRDGSEPKIQRMGDRFAVEVKGRIHFDLYPVIRRTINLPTYTLEAVYEAVFGQPKEKVYAEEITTAWETGENLERVARYSMEDAKVTYELGKEFLPMEAQLSRLIGQSLWDVSRSSTGNLVEWFLLRKAYERNELAPNKPDEKELARRRQSYEGGYVKEPERGLWENIVYLDFRSLYPSIIITHNVSPDTLNREGCKEYDVAPQVGHRFCKDFPGFIPSLLGDLLEERQKIKKKMKATIDPIERKLLDYRQRAIKILANSYYGYYGYARARWYCKECAESVTAWGREYITMTIKEIEEKYGFKVIYSDTDGFFATIPGADAETVKKKAMEFLKYINAKLPGALELEYEGFYKRGFFVTKKKYAVIDEEGKITTRGLEIVRRDWSEIAKETQARVLEALLKDGDVEKAVRIVKEVTEKLSKYEVPPEKLVIHEQITRDLKDYKATGPHVAVAKRLAARGVKIRPGTVISYIVLKGSGRIGDRAIPFDEFDPTKHKYDAEYYIENQVLPAVERILRAFGYRKEDLRYQKTRQVGLSAWLKPKGT

SEQ ID NO: 1019 - protein, 774 aa, synthetic construct
MILDTDYITEDGKPVLRIFKKENGEFKIEYDRTFEAYFYALLKDDSAIEEVKKITAERHGTVVTVKRVEKVQKKFLGRPVEVWKLYFTHPQDIPAIFDKIREHPAVIDIYEYDIPFAKRYLIDKGLVPMEGDEELKMLAFDIETLYHEGEEFAEGPILMISYADEEGARVITWKNVDLPYVDVVSTEREMIKRFLRVVKEKDPDVLITYNGDNFDFAYLKKRCEKLGINFALGRDGSEPKIQRMGDRFAVEVKGRIHFDLYPVIRRTINLPTYTLEAVYEAVFGQPKEKVYAEEITTAWETGENLERVARYSMEDAKVTYELGKEFLPMEAQLSRLIGQSLWDVSRSSTGNLVEWFLLRKAYERNELAPNKPDEKELARRRQSYEGGYVKEPERGLWENIVYLDFRSLYPSIIITHNVSPDTLNREGCKEYDVAPQVGHRFCKDFPGFIPSLLGDLLEERQKIKKKMKATIDPIERKLLDYRQRAIKILANSYYGYYGYARARWYCKECAESVTAWGREYITMTIKEIEEKYGFKVIYSDTDGFFATIPGADAETVKKKAMEFLKYINAKLPGALELEYEGFYKRGFFVTKKKYAVIDEEGKITTRGLEIVRRDWSEIAKETQARVLEALLKDGDVEKAVRIVKEVTEKLSKYEVPPEKLVIHEQITRDLKDYKATGPHVAVAKRLAARGVKIRPGTVISYIVLKGSGRIGDRAIPFDEFDPTKHKYDAEYYIENQVLPAVERILRAFGYRKEDLRYQKTRQVGLSAWLKPKGT

SEQ ID NO: 1020 - protein, 774 aa, synthetic construct
MILDTDYITEDGKPVLRIFKKENGEFKIEYDRTFEAYFYALLKDDSAIEEVKKITAERHGTVVTVKRVEKVQKKFLGRPVEVWKLYFTHPQDIPAIWDKIREHPAVIDIYEYDIPFAKRYLIDKGLVPMEGDEELKMLAFDIETLYHEGEEFAEGPILMISYADEEGARVITWKNVDLPYVDVVSTEREMIKRFLRVVKEKDPDVLITYNGDNFDFAYLKKRCEKLGINFALGRDGSEPKIQRMGDRFAVEVKGRIHFDLYPVIRRTINLPTYTLEAVYEAVFGQPKEKVYAEEITTAWETGENLERVARYSMEDAKVTYELGKEFLPMEAQLSRLIGQSLWDVSRSSTGNLVEWFLLRKAYERNELAPNKPDEKELARRRQSYEGGYVKEPERGLWENIVYLDFRSLYPSIIITHNVSPDTLNREGCKEYDVAPQVGHRFCKDFPGFIPSLLGDLLEERQKIKKKMKATIDPIERKLLDYRQRAIKILANSYYGYYGYARARWYCKECAESVTAWGREYITMTIKEIEEKYGFKVIYSDTDGFFATIPGADAETVKKKAMEFLKYINAKLPGALELEYEGFYKRGFFVTKKKYAVIDEEGKITTRGLEIVRRDWSEIAKETQARVLEALLKDGDVEKAVRIVKEVTEKLSKYEVPPEKLVIHEQITRDLKDYKATGPHVAVAKRLAARGVKIRPGTVISYIVLKGSGRIGDRAIPFDEFDPTKHKYDAEYYIENQVLPAVERILRAFGYRKEDLRYQKTRQVGLSAWLKPKGT

SEQ ID NO: 1021 - protein, 774 aa, synthetic construct
MILDTDYITEDGKPVLRIFKKENGEFKIEYDRTFEAYFYALLKDDSAIEEVKKITAERHGTVVTVKRVEKVQKKFLGRPVEVWKLYFTHPQDKPAIRDKIREHPAVIDIYEYDIPFAKRYLIDKGLVPMEGDEELKMLAFDIETLYHEGEEFAEGPILMISYADEEGARVITWKNVDLPYVDVVSTEREMIKRFLRVVKEKDPDVLITYNGDNFDFAYLKKRCEKLGINFALGRDGSEPKIQRMGDRFAVEVKGRIHFDLYPVIRRTINLPTYTLEAVYEAVFGQPKEKVYAEEITTAWETGENLERVARYSMEDAKVTYELGKEFLPMEAQLSRLIGQSLWDVSRSSTGNLVEWFLLRKAYERNELAPNKPDEKELARRRQSYEGGYVKEPERGLWENIVYLDFRSLYPSIIITHNVSPDTLNREGCKEYDVAPQVGHRFCKDFPGFIPSLLGDLLEERQKIKKKMKATIDPIERKLLDYRQRAIKILANSYYGYYGYARARWYCKECAESVTAWGREYITMTIKEIEEKYGFKVIYSDTDGFFATIPGADAETVKKKAMEFLKYINAKLPGALELEYEGFYKRGFFVTKKKYAVIDEEGKITTRGLEIVRRDWSEIAKETQARVLEALLKDGDVEKAVRIVKEVTEKLSKYEVPPEKLVIHEQITRDLKDYKATGPHVAVAKRLAARGVKIRPGTVISYIVLKGSGRIGDRAIPFDEFDPTKHKYDAEYYIENQVLPAVERILRAFGYRKEDLRYQKTRQVGLSAWLKPKGT

SEQ ID NO: 1022 - protein, 774 aa, synthetic construct
MILDTDYITEDGKPVLRIFKKENGEFKIEYDRTFEAYFYALLKDDSAIEEVKKITAERHGTVVTVKRVEKVQKKFLGRPVEVWKLYFTHPQDKPAIFDKIREHPAVIDIYEYDIPFAKRYLIDKGLVPMEGDEELKMLAFDIETLYHEGEEFAEGPILMISYADEEGARVITWKNVDLPYVDVVSTEREMIKRFLRVVKEKDPDVLITYNGDNFDFAYLKKRCEKLGINFALGRDGSEPKIQRMGDRFAVEVKGRIHFDLYPVIRRTINLPTYTLEAVYEAVFGQPKEKVYAEEITTAWETGENLERVARYSMEDAKVTYELGKEFLPMEAQLSRLIGQSLWDVSRSSTGNLVEWFLLRKAYERNELAPNKPDEKELARRRQSYEGGYVKEPERGLWENIVYLDFRSLYPSIIITHNVSPDTLNREGCKEYDVAPQVGHRFCKDFPGFIPSLLGDLLEERQKIKKKMKATIDPIERKLLDYRQRAIKILANSYYGYYGYARARWYCKECAESVTAWGREYITMTIKEIEEKYGFKVIYSDTDGFFATIPGADAETVKKKAMEFLKYINAKLPGALELEYEGFYKRGFFVTKKKYAVIDEEGKITTRGLEIVRRDWSEIAKETQARVLEALLKDGDVEKAVRIVKEVTEKLSKYEVPPEKLVIHEQITRDLKDYKATGPHVAVAKRLAARGVKIRPGTVISYIVLKGSGRIGDRAIPFDEFDPTKHKYDAEYYIENQVLPAVERILRAFGYRKEDLRYQKTRQVGLSAWLKPKGT

SEQ ID NO: 1023 - protein, 774 aa, synthetic construct
MILDTDYITEDGKPVLRIFKKENGEFKIEYDRTFEAYFYALLKDDSAIEEVKKITAERHGTVVTVKRVEKVQKKFLGRPVEVWKLYFTHPQDQPAIRDKIREHPAVIDIYEYDIPFAKRYLIDKGLVPMEGDEELKMLAFDIETLYHEGEEFAEGPILMISYADEEGARVITWKNVDLPYVDVVSTEREMIKRFLRVVKEKDPDVLITYNGDNFDFAYLKKRCEKLGINFALGRDGSEPKIQRMGDRFAVEVKGRIHFDLYPVIRRTINLPTYTLEAVYEAVFGQPKEKVYAEEITTAWETGENLERVARYSMEDAKVTYELGKEFLPMEAQLSRLIGQSLWDVSRSSTGNLVEWFLLRKAYERNELAPNKPDEKELARRRQSYEGGYVKEPERGLWENIVYLDFRSLYPSIIITHNVSPDTLNREGCKEYDVAPQVGHRFCKDFPGFIPSLLGDLLEERQKIKKKMKATIDPIERKLLDYRQRAIKILANSYYGYYGYARARWYCKECAESVTAWGREYITMTIKEIEEKYGFKVIYSDTDGFFATIPGADAETVKKKAMEFLKYINAKLPGALELEYEGFYKRGFFVTKKKYAVIDEEGKITTRGLEIVRRDWSEIAKETQARVLEALLKDGDVEKAVRIVKEVTEKLSKYEVPPEKLVIHEQITRDLKDYKATGPHVAVAKRLAARGVKIRPGTVISYIVLKGSGRIGDRAIPFDEFDPTKHKYDAEYYIENQVLPAVERILRAFGYRKEDLRYQKTRQVGLSAWLKPKGT

SEQ ID NO: 1024 - protein, 774 aa, synthetic construct
MILDTDYITEDGKPVLRIFKKENGEFKIEYDRTFEAYFYALLKDDSAIEEVKKITAERHGTVVTVKRVEKVQKKFLGRPVEVWKLYFTHPQDQPAIADKIREHPAVIDIYEYDIPFAKRYLIDKGLVPMEGDEELKMLAFDIETLYHEGEEFAEGPILMISYADEEGARVITWKNVDLPYVDVVSTEREMIKRFLRVVKEKDPDVLITYNGDNFDFAYLKKRCEKLGINFALGRDGSEPKIQRMGDRFAVEVKGRIHFDLYPVIRRTINLPTYTLEAVYEAVFGQPKEKVYAEEITTAWETGENLERVARYSMEDAKVTYELGKEFLPMEAQLSRLIGQSLWDVSRSSTGNLVEWFLLRKAYERNELAPNKPDEKELARRRQSYEGGYVKEPERGLWENIVYLDFRSLYPSIIITHNVSPDTLNREGCKEYDVAPQVGHRFCKDFPGFIPSLLGDLLEERQKIKKKMKATIDPIERKLLDYRQRAIKILANSYYGYYGYARARWYCKECAESVTAWGREYITMTIKEIEEKYGFKVIYSDTDGFFATIPGADAETVKKKAMEFLKYINAKLPGALELEYEGFYKRGFFVTKKKYAVIDEEGKITTRGLEIVRRDWSEIAKETQARVLEALLKDGDVEKAVRIVKEVTEKLSKYEVPPEKLVIHEQITRDLKDYKATGPHVAVAKRLAARGVKIRPGTVISYIVLKGSGRIGDRAIPFDEFDPTKHKYDAEYYIENQVLPAVERILRAFGYRKEDLRYQKTRQVGLSAWLKPKGT

SEQ ID NO: 1025 - protein, 774 aa, synthetic construct
MILDTDYITEDGKPVLRIFKKENGEFKIEYDRTFEAYFYALLKDDSAIEEVKKITAERHGTVVTVKRVEKVQKKFLGRPVEVWKLYFTHPQDQPAIFDKIREHPAVIDIYEYDIPFAKRYLIDKGLVPMEGDEELKMLAFDIETLYHEGEEFAEGPILMISYADEEGARVITWKNVDLPYVDVVSTEREMIKRFLRVVKEKDPDVLITYNGDNFDFAYLKKRCEKLGINFALGRDGSEPKIQRMGDRFAVEVKGRIHFDLYPVIRRTINLPTYTLEAVYEAVFGQPKEKVYAEEITTAWETGENLERVARYSMEDAKVTYELGKEFLPMEAQLSRLIGQSLWDVSRSSTGNLVEWFLLRKAYERNELAPNKPDEKELARRRQSYEGGYVKEPERGLWENIVYLDFRSLYPSIIITHNVSPDTLNREGCKEYDVAPQVGHRFCKDFPGFIPSLLGDLLEERQKIKKKMKATIDPIERKLLDYRQRAIKILANSYYGYYGYARARWYCKECAESVTAWGREYITMTIKEIEEKYGFKVIYSDTDGFFATIPGADAETVKKKAMEFLKYINAKLPGALELEYEGFYKRGFFVTKKKYAVIDEEGKITTRGLEIVRRDWSEIAKETQARVLEALLKDGDVEKAVRIVKEVTEKLSKYEVPPEKLVIHEQITRDLKDYKATGPHVAVAKRLAARGVKIRPGTVISYIVLKGSGRIGDRAIPFDEFDPTKHKYDAEYYIENQVLPAVERILRAFGYRKEDLRYQKTRQVGLSAWLKPKGT

SEQ ID NO: 1026 - protein, 774 aa, synthetic construct
MILDTDYITEDGKPVLRIFKKENGEFKIEYDRTFEAYFYALLKDDSAIEEVKKITAERHGTVVTVKRVEKVQKKFLGRPVEVWKLYFTHPQDQPAIHDKIREHPAVIDIYEYDIPFAKRYLIDKGLVPMEGDEELKMLAFDIETLYHEGEEFAEGPILMISYADEEGARVITWKNVDLPYVDVVSTEREMIKRFLRVVKEKDPDVLITYNGDNFDFAYLKKRCEKLGINFALGRDGSEPKIQRMGDRFAVEVKGRIHFDLYPVIRRTINLPTYTLEAVYEAVFGQPKEKVYAEEITTAWETGENLERVARYSMEDAKVTYELGKEFLPMEAQLSRLIGQSLWDVSRSSTGNLVEWFLLRKAYERNELAPNKPDEKELARRRQSYEGGYVKEPERGLWENIVYLDFRSLYPSIIITHNVSPDTLNREGCKEYDVAPQVGHRFCKDFPGFIPSLLGDLLEERQKIKKKMKATIDPIERKLLDYRQRAIKILANSYYGYYGYARARWYCKECAESVTAWGREYITMTIKEIEEKYGFKVIYSDTDGFFATIPGADAETVKKKAMEFLKYINAKLPGALELEYEGFYKRGFFVTKKKYAVIDEEGKITTRGLEIVRRDWSEIAKETQARVLEALLKDGDVEKAVRIVKEVTEKLSKYEVPPEKLVIHEQITRDLKDYKATGPHVAVAKRLAARGVKIRPGTVISYIVLKGSGRIGDRAIPFDEFDPTKHKYDAEYYIENQVLPAVERILRAFGYRKEDLRYQKTRQVGLSAWLKPKGT

SEQ ID NO: 1027 - protein, 774 aa, synthetic construct
MILDTDYITEDGKPVLRIFKKENGEFKIEYDRTFEAYFYALLKDDSAIEEVKKITAERHGTVVTVKRVEKVQKKFLGRPVEVWKLYFTHPQDRPAIRDKIREHPAVIDIYEYDIPFAKRYLIDKGLVPMEGDEELKMLAFDIETLYHEGEEFAEGPILMISYADEEGARVITWKNVDLPYVDVVSTEREMIKRFLRVVKEKDPDVLITYNGDNFDFAYLKKRCEKLGINFALGRDGSEPKIQRMGDRFAVEVKGRIHFDLYPVIRRTINLPTYTLEAVYEAVFGQPKEKVYAEEITTAWETGENLERVARYSMEDAKVTYELGKEFLPMEAQLSRLIGQSLWDVSRSSTGNLVEWFLLRKAYERNELAPNKPDEKELARRRQSYEGGYVKEPERGLWENIVYLDFRSLYPSIIITHNVSPDTLNREGCKEYDVAPQVGHRFCKDFPGFIPSLLGDLLEERQKIKKKMKATIDPIERKLLDYRQRAIKILANSYYGYYGYARARWYCKECAESVTAWGREYITMTIKEIEEKYGFKVIYSDTDGFFATIPGADAETVKKKAMEFLKYINAKLPGALELEYEGFYKRGFFVTKKKYAVIDEEGKITTRGLEIVRRDWSEIAKETQARVLEALLKDGDVEKAVRIVKEVTEKLSKYEVPPEKLVIHEQITRDLKDYKATGPHVAVAKRLAARGVKIRPGTVISYIVLKGSGRIGDRAIPFDEFDPTKHKYDAEYYIENQVLPAVERILRAFGYRKEDLRYQKTRQVGLSAWLKPKGT

SEQ ID NO: 1028 - protein, 774 aa, synthetic construct
MILDTDYITEDGKPVLRIFKKENGEFKIEYDRTFEAYFYALLKDDSAIEEVKKITAERHGTVVTVKRVEKVQKKFLGRPVEVWKLYFTHPQDRPAIADKIREHPAVIDIYEYDIPFAKRYLIDKGLVPMEGDEELKMLAFDIETLYHEGEEFAEGPILMISYADEEGARVITWKNVDLPYVDVVSTEREMIKRFLRVVKEKDPDVLITYNGDNFDFAYLKKRCEKLGINFALGRDGSEPKIQRMGDRFAVEVKGRIHFDLYPVIRRTINLPTYTLEAVYEAVFGQPKEKVYAEEITTAWETGENLERVARYSMEDAKVTYELGKEFLPMEAQLSRLIGQSLWDVSRSSTGNLVEWFLLRKAYERNELAPNKPDEKELARRRQSYEGGYVKEPERGLWENIVYLDFRSLYPSIIITHNVSPDTLNREGCKEYDVAPQVGHRFCKDFPGFIPSLLGDLLEERQKIKKKMKATIDPIERKLLDYRQRAIKILANSYYGYYGYARARWYCKECAESVTAWGREYITMTIKEIEEKYGFKVIYSDTDGFFATIPGADAETVKKKAMEFLKYINAKLPGALELEYEGFYKRGFFVTKKKYAVIDEEGKITTRGLEIVRRDWSEIAKETQARVLEALLKDGDVEKAVRIVKEVTEKLSKYEVPPEKLVIHEQITRDLKDYKATGPHVAVAKRLAARGVKIRPGTVISYIVLKGSGRIGDRAIPFDEFDPTKHKYDAEYYIENQVLPAVERILRAFGYRKEDLRYQKTRQVGLSAWLKPKGT

SEQ ID NO: 1029 - protein, 774 aa, synthetic construct
MILDTDYITEDGKPVLRIFKKENGEFKIEYDRTFEAYFYALLKDDSAIEEVKKITAERHGTVVTVKRVEKVQKKFLGRPVEVWKLYFTHPQDRPAIADKIREHPAVIDIYEYDIPFAKQYLIDKGLVPMEGDEELKMLAFDIETLYHEGEEFAEGPILMISYADEEGARVITWKNVDLPYVDVVSTEREMIKRFLRVVKEKDPDVLITYNGDNFDFAYLKKRCEKLGINFALGRDGSEPKIQRMGDRFAVEVKGRIHFDLYPVIRRTINLPTYTLEAVYEAVFGQPKEKVYAEEITTAWETGENLERVARYSMEDAKVTYELGKEFLPMEAQLSRLIGQSLWDVSRSSTGNLVEWFLLRKAYERNELAPNKPDEKELARRRQSYEGGYVKEPERGLWENIVYLDFRSLYPSIIITHNVSPDTLNREGCKEYDVAPQVGHRFCKDFPGFIPSLLGDLLEERQKIKKKMKATIDPIERKLLDYRQRAIKILANSYYGYYGYARARWYCKECAESVTAWGREYITMTIKEIEEKYGFKVIYSDTDGFFATIPGADAETVKKKAMEFLKYINAKLPGALELEYEGFYKRGFFVTKKKYAVIDEEGKITTRGLEIVRRDWSEIAKETQARVLEALLKDGDVEKAVRIVKEVTEKLSKYEVPPEKLVIHEQITRDLKDYKATGPHVAVAKRLAARGVKIRPGTVISYIVLKGSGRIGDRAIPFDEFDPTKHKYDAEYYIENQVLPAVERILRAFGYRKEDLRYQKTRQVGLSAWLKPKGT

SEQ ID NO: 1030 - protein, 774 aa, synthetic construct
MILDTDYITEDGKPVLRIFKKENGEFKIEYDRTFEAYFYALLKDDSAIEEVKKITAERHGTVVTVKRVEKVQKKFLGRPVEVWKLYFTHPQDRPAIFDKIREHPAVIDIYEYDIPFAKRYLIDKGLVPMEGDEELKMLAFDIETLYHEGEEFAEGPILMISYADEEGARVITWKNVDLPYVDVVSTEREMIKRFLRVVKEKDPDVLITYNGDNFDFAYLKKRCEKLGINFALGRDGSEPKIQRMGDRFAVEVKGRIHFDLYPVIRRTINLPTYTLEAVYEAVFGQPKEKVYAEEITTAWETGENLERVARYSMEDAKVTYELGKEFLPMEAQLSRLIGQSLWDVSRSSTGNLVEWFLLRKAYERNELAPNKPDEKELARRRQSYEGGYVKEPERGLWENIVYLDFRSLYPSIIITHNVSPDTLNREGCKEYDVAPQVGHRFCKDFPGFIPSLLGDLLEERQKIKKKMKATIDPIERKLLDYRQRAIKILANSYYGYYGYARARWYCKECAESVTAWGREYITMTIKEIEEKYGFKVIYSDTDGFFATIPGADAETVKKKAMEFLKYINAKLPGALELEYEGFYKRGFFVTKKKYAVIDEEGKITTRGLEIVRRDWSEIAKETQARVLEALLKDGDVEKAVRIVKEVTEKLSKYEVPPEKLVIHEQITRDLKDYKATGPHVAVAKRLAARGVKIRPGTVISYIVLKGSGRIGDRAIPFDEFDPTKHKYDAEYYIENQVLPAVERILRAFGYRKEDLRYQKTRQVGLSAWLKPKGT

SEQ ID NO: 1031 - protein, 774 aa, synthetic construct
MILDTDYITEDGKPVLRIFKKENGEFKIEYDRTFEAYFYALLKDDSAIEEVKKITAERHGTVVTVKRVEKVQKKFLGRPVEVWKLYFTHPQDRPAIHDKIREHPAVIDIYEYDIPFAKRYLIDKGLVPMEGDEELKMLAFDIETLYHEGEEFAEGPILMISYADEEGARVITWKNVDLPYVDVVSTEREMIKRFLRVVKEKDPDVLITYNGDNFDFAYLKKRCEKLGINFALGRDGSEPKIQRMGDRFAVEVKGRIHFDLYPVIRRTINLPTYTLEAVYEAVFGQPKEKVYAEEITTAWETGENLERVARYSMEDAKVTYELGKEFLPMEAQLSRLIGQSLWDVSRSSTGNLVEWFLLRKAYERNELAPNKPDEKELARRRQSYEGGYVKEPERGLWENIVYLDFRSLYPSIIITHNVSPDTLNREGCKEYDVAPQVGHRFCKDFPGFIPSLLGDLLEERQKIKKKMKATIDPIERKLLDYRQRAIKILANSYYGYYGYARARWYCKECAESVTAWGREYITMTIKEIEEKYGFKVIYSDTDGFFATIPGADAETVKKKAMEFLKYINAKLPGALELEYEGFYKRGFFVTKKKYAVIDEEGKITTRGLEIVRRDWSEIAKETQARVLEALLKDGDVEKAVRIVKEVTEKLSKYEVPPEKLVIHEQITRDLKDYKATGPHVAVAKRLAARGVKIRPGTVISYIVLKGSGRIGDRAIPFDEFDPTKHKYDAEYYIENQVLPAVERILRAFGYRKEDLRYQKTRQVGLSAWLKPKGT

SEQ ID NO: 1032 - protein, 774 aa, synthetic construct
MILDTDYITEDGKPVLRIFKKENGEFKIEYDRTFEHYFYALLKDDSAIEEVKKITAERHGTVVTVKRVEKVQKKFLGRPVEVWKLYFTHPQDVPAIRDKIREHPAVIDIYEYDIPFAKRYLIDKGLVPMEGDEELKMLAFDIETLYHEGEEFAEGPILMISYADEEGARVITWKNVDLPYVDVVSTEREMIKRFLRVVKEKDPDVLITYNGDNFDFAYLKKRCEKLGINFALGRDGSEPKIQRMGDRFAVEVKGRIHFDLYPVIRRTINLPTYTLEAVYEAVFGQPKEKVYAEEITTAWETGENLERVARYSMEDAKVTYELGKEFLPMEAQLSRLIGQSLWDVSRSSTGNLVEWFLLRKAYERNELAPNKPDEKELARRRQSYEGGYVKEPERGLWENIVYLDFRSLYPSIIITHNVSPDTLNREGCKEYDVAPQVGHRFCKDFPGFIPSLLGDLLEERQKIKKKMKATIDPIERKLLDYRQRAIKILANSYYGYYGYARARWYCKECAESVTAWGREYITMTIKEIEEKYGFKVIYSDTDGFFATIPGADAETVKKKAMEFLKYINAKLPGALELEYEGFYKRGFFVTKKKYAVIDEEGKITTRGLEIVRRDWSEIAKETQARVLEALLKDGDVEKAVRIVKEVTEKLSKYEVPPEKLVIHEQITRDLKDYKATGPHVAVAKRLAARGVKIRPGTVISYIVLKGSGRIGDRAIPFDEFDPTKHKYDAEYYIENQVLPAVERILRAFGYRKEDLRYQKTRQVGLSAWLKPKGT

SEQ ID NO: 1033 - protein, 774 aa, synthetic construct
MILDTDYITEDGKPVLRIFKKENGEFKIEYDRTFEHYFYALLKDDSAIEEVKKITAERHGTVVTVKRVEKVQKKFLGRPVEVWKLYFTHFQDVPAIRDKIREHPAVIDIYEYDIPFAKRYLIDKGLVPMEGDEELKMLAFDIETLYHEGEEFAEGPILMISYADEEGARVITWKNVDLPYVDVVSTEREMIKRFLRVVKEKDPDVLITYNGDNFDFAYLKKRCEKLGINFALGRDGSEPKIQRMGDRFAVEVKGRIHFDLYPVIRRTINLPTYTLEAVYEAVFGQPKEKVYAEEITTAWETGENLERVARYSMEDAKVTYELGKEFLPMEAQLSRLIGQSLWDVSRSSTGNLVEWFLLRKAYERNELAPNKPDEKELARRRQSYEGGYVKEPERGLWENIVYLDFRSLYPSIIITHNVSPDTLNREGCKEYDVAPQVGHRFCKDFPGFIPSLLGDLLEERQKIKKKMKATIDPIERKLLDYRQRAIKILANSYYGYYGYARARWYCKECAESVTAWGREYITMTIKEIEEKYGFKVIYSDTDGFFATIPGADAETVKKKAMEFLKYINAKLPGALELEYEGFYKRGFFVTKKKYAVIDEEGKITTRGLEIVRRDWSEIAKETQARVLEALLKDGDVEKAVRIVKEVTEKLSKYEVPPEKLVIHEQITRDLKDYKATGPHVAVAKRLAARGVKIRPGTVISYIVLKGSGRIGDRAIPFDEFDPTKHKYDAEYYIENQVLPAVERILRAFGYRKEDLRYQKTRQVGLSAWLKPKGT

SEQ ID NO: 1034 - protein, 774 aa, synthetic construct
MILDTDYITEDGKPVLRIFKKENGEFKIEYDRTFEHYFYALLKDDSAIEEVKKITAERHGTVVTVKRVEKVQKKFLGRPVEVWKLYFTHIQDIPAIFDKIREHPAVIDIYEYDIPFAKRYLIDKGLVPMEGDEELKMLAFDIETLYHEGEEFAEGPILMISYADEEGARVITWKNVDLPYVDVVSTEREMIKRFLRVVKEKDPDVLITYNGDNFDFAYLKKRCEKLGINFALGRDGSEPKIQRMGDRFAVEVKGRIHFDLYPVIRRTINLPTYTLEAVYEAVFGQPKEKVYAEEITTAWETGENLERVARYSMEDAKVTYELGKEFLPMEAQLSRLIGQSLWDVSRSSTGNLVEWFLLRKAYERNELAPNKPDEKELARRRQSYEGGYVKEPERGLWENIVYLDFRSLYPSIIITHNVSPDTLNREGCKEYDVAPQVGHRFCKDFPGFIPSLLGDLLEERQKIKKKMKATIDPIERKLLDYRQRAIKILANSYYGYYGYARARWYCKECAESVTAWGREYITMTIKEIEEKYGFKVIYSDTDGFFATIPGADAETVKKKAMEFLKYINAKLPGALELEYEGFYKRGFFVTKKKYAVIDEEGKITTRGLEIVRRDWSEIAKETQARVLEALLKDGDVEKAVRIVKEVTEKLSKYEVPPEKLVIHEQITRDLKDYKATGPHVAVAKRLAARGVKIRPGTVISYIVLKGSGRIGDRAIPFDEFDPTKHKYDAEYYIENQVLPAVERILRAFGYRKEDLRYQKTRQVGLSAWLKPKGT

SEQ ID NO: 1035 - protein, 774 aa, synthetic construct
MILDTDYITEDGKPVLRIFKKENGEFKIEYDRTFEHYFYALLKDDSAIEEVKKITAERHGTVVTVKRVEKVQKKFLGRPVEVWKLYFTHWQDVPAIRDKIREHPAVIDIYEYDIPFAKRYLIDKGLVPMEGDEELKMLAFDIETLYHEGEEFAEGPILMISYADEEGARVITWKNVDLPYVDVVSTEREMIKRFLRVVKEKDPDVLITYNGDNFDFAYLKKRCEKLGINFALGRDGSEPKIQRMGDRFAVEVKGRIHFDLYPVIRRTINLPTYTLEAVYEAVFGQPKEKVYAEEITTAWETGENLERVARYSMEDAKVTYELGKEFLPMEAQLSRLIGQSLWDVSRSSTGNLVEWFLLRKAYERNELAPNKPDEKELARRRQSYEGGYVKEPERGLWENIVYLDFRSLYPSIIITHNVSPDTLNREGCKEYDVAPQVGHRFCKDFPGFIPSLLGDLLEERQKIKKKMKATIDPIERKLLDYRQRAIKILANSYYGYYGYARARWYCKECAESVTAWGREYITMTIKEIEEKYGFKVIYSDTDGFFATIPGADAETVKKKAMEFLKYINAKLPGALELEYEGFYKRGFFVTKKKYAVIDEEGKITTRGLEIVRRDWSEIAKETQARVLEALLKDGDVEKAVRIVKEVTEKLSKYEVPPEKLVIHEQITRDLKDYKATGPHVAVAKRLAARGVKIRPGTVISYIVLKGSGRIGDRAIPFDEFDPTKHKYDAEYYIENQVLPAVERILRAFGYRKEDLRYQKTRQVGLSAWLKPKGT

SEQ ID NO: 1036 - protein, 774 aa, synthetic construct
MILDTDYITEDGKPVLRIFKKENGEFKIEYDRTFEHYFYALLKDDSAIEEVKKITAERHGTVVTVKRVEKVQKKFLGRPVEVWKLYFTHWQDIPAIRDKIREHPAVIDIYEYDIPFAKRYLIDKGLVPMEGDEELKMLAFDIETLYHEGEEFAEGPILMISYADEEGARVITWKNVDLPYVDVVSTEREMIKRFLRVVKEKDPDVLITYNGDNFDFAYLKKRCEKLGINFALGRDGSEPKIQRMGDRFAVEVKGRIHFDLYPVIRRTINLPTYTLEAVYEAVFGQPKEKVYAEEITTAWETGENLERVARYSMEDAKVTYELGKEFLPMEAQLSRLIGQSLWDVSRSSTGNLVEWFLLRKAYERNELAPNKPDEKELARRRQSYEGGYVKEPERGLWENIVYLDFRSLYPSIIITHNVSPDTLNREGCKEYDVAPQVGHRFCKDFPGFIPSLLGDLLEERQKIKKKMKATIDPIERKLLDYRQRAIKILANSYYGYYGYARARWYCKECAESVTAWGREYITMTIKEIEEKYGFKVIYSDTDGFFATIPGADAETVKKKAMEFLKYINAKLPGALELEYEGFYKRGFFVTKKKYAVIDEEGKITTRGLEIVRRDWSEIAKETQARVLEALLKDGDVEKAVRIVKEVTEKLSKYEVPPEKLVIHEQITRDLKDYKATGPHVAVAKRLAARGVKIRPGTVISYIVLKGSGRIGDRAIPFDEFDPTKHKYDAEYYIENQVLPAVERILRAFGYRKEDLRYQKTRQVGLSAWLKPKGT

SEQ ID NO: 1037 - protein, 774 aa, synthetic construct
MILDTDYITEDGKPVLRIFKKENGEFKIEYDRTFEHYFYALLKDDSAIEEVKKITAERHGTVVTVKRVEKVQKKFLGRPVEVWKLYFTHYQDIPAIADKIREHPAVIDIYEYDIPFAKRYLIDKGLVPMEGDEELKMLAFDIETLYHEGEEFAEGPILMISYADEEGARVITWKNVDLPYVDVVSTEREMIKRFLRVVKEKDPDVLITYNGDNFDFAYLKKRCEKLGINFALGRDGSEPKIQRMGDRFAVEVKGRIHFDLYPVIRRTINLPTYTLEAVYEAVFGQPKEKVYAEEITTAWETGENLERVARYSMEDAKVTYELGKEFLPMEAQLSRLIGQSLWDVSRSSTGNLVEWFLLRKAYERNELAPNKPDEKELARRRQSYEGGYVKEPERGLWENIVYLDFRSLYPSIIITHNVSPDTLNREGCKEYDVAPQVGHRFCKDFPGFIPSLLGDLLEERQKIKKKMKATIDPIERKLLDYRQRAIKILANSYYGYYGYARARWYCKECAESVTAWGREYITMTIKEIEEKYGFKVIYSDTDGFFATIPGADAETVKKKAMEFLKYINAKLPGALELEYEGFYKRGFFVTKKKYAVIDEEGKITTRGLEIVRRDWSEIAKETQARVLEALLKDGDVEKAVRIVKEVTEKLSKYEVPPEKLVIHEQITRDLKDYKATGPHVAVAKRLAARGVKIRPGTVISYIVLKGSGRIGDRAIPFDEFDPTKHKYDAEYYIENQVLPAVERILRAFGYRKEDLRYQKTRQVGLSAWLKPKGT

SEQ ID NO: 1038 - protein, 774 aa, synthetic construct
MILDTDYITEDGKPVLRIFKKENGEFKIEYDRTFEHYFYALLKDDSAIEEVKKITAERHGTVVTVKRVEKVQKKFLGRPVEVWKLYFTHPQDVPAIFDKIREHPAVIDIYEYDIPFAKRYLIDKGLVPMEGDEELKMLAFDIETLYHEGEEFAEGPILMISYADEEGARVITWKNVDLPYVDVVSTEREMIKRFLRVVKEKDPDVLITYNGDNFDFAYLKKRCEKLGINFALGRDGSEPKIQRMGDRFAVEVKGRIHFDLYPVIRRTINLPTYTLEAVYEAVFGQPKEKVYAEEITTAWETGENLERVARYSMEDAKVTYELGKEFLPMEAQLSRLIGQSLWDVSRSSTGNLVEWFLLRKAYERNELAPNKPDEKELARRRQSYEGGYVKEPERGLWENIVYLDFRSLYPSIIITHNVSPDTLNREGCKEYDVAPQVGHRFCKDFPGFIPSLLGDLLEERQKIKKKMKATIDPIERKLLDYRQRAIKILANSYYGYYGYARARWYCKECAESVTAWGREYITMTIKEIEEKYGFKVIYSDTDGFFATIPGADAETVKKKAMEFLKYINAKLPGALELEYEGFYKRGFFVTKKKYAVIDEEGKITTRGLEIVRRDWSEIAKETQARVLEALLKDGDVEKAVRIVKEVTEKLSKYEVPPEKLVIHEQITRDLKDYKATGPHVAVAKRLAARGVKIRPGTVISYIVLKGSGRIGDRAIPFDEFDPTKHKYDAEYYIENQVLPAVERILRAFGYRKEDLRYQKTRQVGLSAWLKPKGT

SEQ ID NO: 1039 - protein, 774 aa, synthetic construct
MILDTDYITEDGKPVLRIFKKENGEFKIEYDRTFEHYFYALLKDDSAIEEVKKITAERHGTVVTVKRVEKVQKKFLGRPVEVWKLYFTHPQDVPAIHDKIREHPAVIDIYEYDIPFAKRYLIDKGLVPMEGDEELKMLAFDIETLYHEGEEFAEGPILMISYADEEGARVITWKNVDLPYVDVVSTEREMIKRFLRVVKEKDPDVLITYNGDNFDFAYLKKRCEKLGINFALGRDGSEPKIQRMGDRFAVEVKGRIHFDLYPVIRRTINLPTYTLEAVYEAVFGQPKEKVYAEEITTAWETGENLERVARYSMEDAKVTYELGKEFLPMEAQLSRLIGQSLWDVSRSSTGNLVEWFLLRKAYERNELAPNKPDEKELARRRQSYEGGYVKEPERGLWENIVYLDFRSLYPSIIITHNVSPDTLNREGCKEYDVAPQVGHRFCKDFPGFIPSLLGDLLEERQKIKKKMKATIDPIERKLLDYRQRAIKILANSYYGYYGYARARWYCKECAESVTAWGREYITMTIKEIEEKYGFKVIYSDTDGFFATIPGADAETVKKKAMEFLKYINAKLPGALELEYEGFYKRGFFVTKKKYAVIDEEGKITTRGLEIVRRDWSEIAKETQARVLEALLKDGDVEKAVRIVKEVTEKLSKYEVPPEKLVIHEQITRDLKDYKATGPHVAVAKRLAARGVKIRPGTVISYIVLKGSGRIGDRAIPFDEFDPTKHKYDAEYYIENQVLPAVERILRAFGYRKEDLRYQKTRQVGLSAWLKPKGT

SEQ ID NO: 1040 - protein, 774 aa, synthetic construct
MILDTDYITEDGKPVLRIFKKENGEFKIEYDRTFEHYFYALLKDDSAIEEVKKITAERHGTVVTVKRVEKVQKKFLGRPVEVWKLYFTHPQDIPAIRDKIREHPAVIDIYEYDIPFAKRYLIDKGLVPMEGDEELKMLAFDIETLYHEGEEFAEGPILMISYADEEGARVITWKNVDLPYVDVVSTEREMIKRFLRVVKEKDPDVLITYNGDNFDFAYLKKRCEKLGINFALGRDGSEPKIQRMGDRFAVEVKGRIHFDLYPVIRRTINLPTYTLEAVYEAVFGQPKEKVYAEEITTAWETGENLERVARYSMEDAKVTYELGKEFLPMEAQLSRLIGQSLWDVSRSSTGNLVEWFLLRKAYERNELAPNKPDEKELARRRQSYEGGYVKEPERGLWENIVYLDFRSLYPSIIITHNVSPDTLNREGCKEYDVAPQVGHRFCKDFPGFIPSLLGDLLEERQKIKKKMKATIDPIERKLLDYRQRAIKILANSYYGYYGYARARWYCKECAESVTAWGREYITMTIKEIEEKYGFKVIYSDTDGFFATIPGADAETVKKKAMEFLKYINAKLPGALELEYEGFYKRGFFVTKKKYAVIDEEGKITTRGLEIVRRDWSEIAKETQARVLEALLKDGDVEKAVRIVKEVTEKLSKYEVPPEKLVIHEQITRDLKDYKATGPHVAVAKRLAARGVKIRPGTVISYIVLKGSGRIGDRAIPFDEFDPTKHKYDAEYYIENQVLPAVERILRAFGYRKEDLRYQKTRQVGLSAWLKPKGT

SEQ ID NO: 1041 - protein, 774 aa, synthetic construct
MILDTDYITEDGKPVLRIFKKENGEFKIEYDRTFEHYFYALLKDDSAIEEVKKITAERHGTVVTVKRVEKVQKKFLGRPVEVWKLYFTHPQDIPAIADKIREHPAVIDIYEYDIPFAKRYLIDKGLVPMEGDEELKMLAFDIETLYHEGEEFAEGPILMISYADEEGARVITWKNVDLPYVDVVSTEREMIKRFLRVVKEKDPDVLITYNGDNFDFAYLKKRCEKLGINFALGRDGSEPKIQRMGDRFAVEVKGRIHFDLYPVIRRTINLPTYTLEAVYEAVFGQPKEKVYAEEITTAWETGENLERVARYSMEDAKVTYELGKEFLPMEAQLSRLIGQSLWDVSRSSTGNLVEWFLLRKAYERNELAPNKPDEKELARRRQSYEGGYVKEPERGLWENIVYLDFRSLYPSIIITHNVSPDTLNREGCKEYDVAPQVGHRFCKDFPGFIPSLLGDLLEERQKIKKKMKATIDPIERKLLDYRQRAIKILANSYYGYYGYARARWYCKECAESVTAWGREYITMTIKEIEEKYGFKVIYSDTDGFFATIPGADAETVKKKAMEFLKYINAKLPGALELEYEGFYKRGFFVTKKKYAVIDEEGKITTRGLEIVRRDWSEIAKETQARVLEALLKDGDVEKAVRIVKEVTEKLSKYEVPPEKLVIHEQITRDLKDYKATGPHVAVAKRLAARGVKIRPGTVISYIVLKGSGRIGDRAIPFDEFDPTKHKYDAEYYIENQVLPAVERILRAFGYRKEDLRYQKTRQVGLSAWLKPKGT

SEQ ID NO: 1042 - protein, 774 aa, synthetic construct
MILDTDYITEDGKPVLRIFKKENGEFKIEYDRTFEHYFYALLKDDSAIEEVKKITAERHGTVVTVKRVEKVQKKFLGRPVEVWKLYFTHPQDIPAIFDKIREHPAVIDIYEYDIPFAKRYLIDKGLVPMEGDEELKMLAFDIETLYHEGEEFAEGPILMISYADEEGARVITWKNVDLPYVDVVSTEREMIKRFLRVVKEKDPDVLITYNGDNFDFAYLKKRCEKLGINFALGRDGSEPKIQRMGDRFAVEVKGRIHFDLYPVIRRTINLPTYTLEAVYEAVFGQPKEKVYAEEITTAWETGENLERVARYSMEDAKVTYELGKEFLPMEAQLSRLIGQSLWDVSRSSTGNLVEWFLLRKAYERNELAPNKPDEKELARRRQSYEGGYVKEPERGLWENIVYLDFRSLYPSIIITHNVSPDTLNREGCKEYDVAPQVGHRFCKDFPGFIPSLLGDLLEERQKIKKKMKATIDPIERKLLDYRQRAIKILANSYYGYYGYARARWYCKECAESVTAWGREYITMTIKEIEEKYGFKVIYSDTDGFFATIPGADAETVKKKAMEFLKYINAKLPGALELEYEGFYKRGFFVTKKKYAVIDEEGKITTRGLEIVRRDWSEIAKETQARVLEALLKDGDVEKAVRIVKEVTEKLSKYEVPPEKLVIHEQITRDLKDYKATGPHVAVAKRLAARGVKIRPGTVISYIVLKGSGRIGDRAIPFDEFDPTKHKYDAEYYIENQVLPAVERILRAFGYRKEDLRYQKTRQVGLSAWLKPKGT

SEQ ID NO: 1043 - protein, 774 aa, synthetic construct
MILDTDYITEDGKPVLRIFKKENGEFKIEYDRTFEHYFYALLKDDSAIEEVKKITAERHGTVVTVKRVEKVQKKFLGRPVEVWKLYFTHPQDIPAIHDKIREHPAVIDIYEYDIPFAKRYLIDKGLVPMEGDEELKMLAFDIETLYHEGEEFAEGPILMISYADEEGARVITWKNVDLPYVDVVSTEREMIKRFLRVVKEKDPDVLITYNGDNFDFAYLKKRCEKLGINFALGRDGSEPKIQRMGDRFAVEVKGRIHFDLYPVIRRTINLPTYTLEAVYEAVFGQPKEKVYAEEITTAWETGENLERVARYSMEDAKVTYELGKEFLPMEAQLSRLIGQSLWDVSRSSTGNLVEWFLLRKAYERNELAPNKPDEKELARRRQSYEGGYVKEPERGLWENIVYLDFRSLYPSIIITHNVSPDTLNREGCKEYDVAPQVGHRFCKDFPGFIPSLLGDLLEERQKIKKKMKATIDPIERKLLDYRQRAIKILANSYYGYYGYARARWYCKECAESVTAWGREYITMTIKEIEEKYGFKVIYSDTDGFFATIPGADAETVKKKAMEFLKYINAKLPGALELEYEGFYKRGFFVTKKKYAVIDEEGKITTRGLEIVRRDWSEIAKETQARVLEALLKDGDVEKAVRIVKEVTEKLSKYEVPPEKLVIHEQITRDLKDYKATGPHVAVAKRLAARGVKIRPGTVISYIVLKGSGRIGDRAIPFDEFDPTKHKYDAEYYIENQVLPAVERILRAFGYRKEDLRYQKTRQVGLSAWLKPKGT

SEQ ID NO: 1044 - protein, 774 aa, synthetic construct
MILDTDYITEDGKPVLRIFKKENGEFKIEYDRTFEHYFYALLKDDSAIEEVKKITAERHGTVVTVKRVEKVQKKFLGRPVEVWKLYFTHPQDIPAIWDKIREHPAVIDIYEYDIPFAKRYLIDKGLVPMEGDEELKMLAFDIETLYHEGEEFAEGPILMISYADEEGARVITWKNVDLPYVDVVSTEREMIKRFLRVVKEKDPDVLITYNGDNFDFAYLKKRCEKLGINFALGRDGSEPKIQRMGDRFAVEVKGRIHFDLYPVIRRTINLPTYTLEAVYEAVFGQPKEKVYAEEITTAWETGENLERVARYSMEDAKVTYELGKEFLPMEAQLSRLIGQSLWDVSRSSTGNLVEWFLLRKAYERNELAPNKPDEKELARRRQSYEGGYVKEPERGLWENIVYLDFRSLYPSIIITHNVSPDTLNREGCKEYDVAPQVGHRFCKDFPGFIPSLLGDLLEERQKIKKKMKATIDPIERKLLDYRQRAIKILANSYYGYYGYARARWYCKECAESVTAWGREYITMTIKEIEEKYGFKVIYSDTDGFFATIPGADAETVKKKAMEFLKYINAKLPGALELEYEGFYKRGFFVTKKKYAVIDEEGKITTRGLEIVRRDWSEIAKETQARVLEALLKDGDVEKAVRIVKEVTEKLSKYEVPPEKLVIHEQITRDLKDYKATGPHVAVAKRLAARGVKIRPGTVISYIVLKGSGRIGDRAIPFDEFDPTKHKYDAEYYIENQVLPAVERILRAFGYRKEDLRYQKTRQVGLSAWLKPKGT

SEQ ID NO: 1045 - protein, 774 aa, synthetic construct
MILDTDYITEDGKPVLRIFKKENGEFKIEYDRTFEHYFYALLKDDSAIEEVKKITAERHGTVVTVKRVEKVQKKFLGRPVEVWKLYFTHPQDQPAIRDKIREHPAVIDIYEYDIPFAKRYLIDKGLVPMEGDEELKMLAFDIETLYHEGEEFAEGPILMISYADEEGARVITWKNVDLPYVDVVSTEREMIKRFLRVVKEKDPDVLITYNGDNFDFAYLKKRCEKLGINFALGRDGSEPKIQRMGDRFAVEVKGRIHFDLYPVIRRTINLPTYTLEAVYEAVFGQPKEKVYAEEITTAWETGENLERVARYSMEDAKVTYELGKEFLPMEAQLSRLIGQSLWDVSRSSTGNLVEWFLLRKAYERNELAPNKPDEKELARRRQSYEGGYVKEPERGLWENIVYLDFRSLYPSIIITHNVSPDTLNREGCKEYDVAPQVGHRFCKDFPGFIPSLLGDLLEERQKIKKKMKATIDPIERKLLDYRQRAIKILANSYYGYYGYARARWYCKECAESVTAWGREYITMTIKEIEEKYGFKVIYSDTDGFFATIPGADAETVKKKAMEFLKYINAKLPGALELEYEGFYKRGFFVTKKKYAVIDEEGKITTRGLEIVRRDWSEIAKETQARVLEALLKDGDVEKAVRIVKEVTEKLSKYEVPPEKLVIHEQITRDLKDYKATGPHVAVAKRLAARGVKIRPGTVISYIVLKGSGRIGDRAIPFDEFDPTKHKYDAEYYIENQVLPAVERILRAFGYRKEDLRYQKTRQVGLSAWLKPKGT

SEQ ID NO: 1046 - protein, 774 aa, synthetic construct
MILDTDYITEDGKPVLRIFKKENGEFKIEYDRTFEHYFYALLKDDSAIEEVKKITAERHGTVVTVKRVEKVQKKFLGRPVEVWKLYFTHPQDQPAIFDKIREHPAVIDIYEYDIPFAKRYLIDKGLVPMEGDEELKMLAFDIETLYHEGEEFAEGPILMISYADEEGARVITWKNVDLPYVDVVSTEREMIKRFLRVVKEKDPDVLITYNGDNFDFAYLKKRCEKLGINFALGRDGSEPKIQRMGDRFAVEVKGRIHFDLYPVIRRTINLPTYTLEAVYEAVFGQPKEKVYAEEITTAWETGENLERVARYSMEDAKVTYELGKEFLPMEAQLSRLIGQSLWDVSRSSTGNLVEWFLLRKAYERNELAPNKPDEKELARRRQSYEGGYVKEPERGLWENIVYLDFRSLYPSIIITHNVSPDTLNREGCKEYDVAPQVGHRFCKDFPGFIPSLLGDLLEERQKIKKKMKATIDPIERKLLDYRQRAIKILANSYYGYYGYARARWYCKECAESVTAWGREYITMTIKEIEEKYGFKVIYSDTDGFFATIPGADAETVKKKAMEFLKYINAKLPGALELEYEGFYKRGFFVTKKKYAVIDEEGKITTRGLEIVRRDWSEIAKETQARVLEALLKDGDVEKAVRIVKEVTEKLSKYEVPPEKLVIHEQITRDLKDYKATGPHVAVAKRLAARGVKIRPGTVISYIVLKGSGRIGDRAIPFDEFDPTKHKYDAEYYIENQVLPAVERILRAFGYRKEDLRYQKTRQVGLSAWLKPKGT

SEQ ID NO: 1047 - protein, 774 aa, synthetic construct
MILDTDYITEDGKPVLRIFKKENGEFKIEYDRTFEHYFYALLKDDSAIEEVKKITAERHGTVVTVKRVEKVQKKFLGRPVEVWKLYFTHPQDQPAIWDKIREHPAVIDIYEYDIPFAKRYLIDKGLVPMEGDEELKMLAFDIETLYHEGEEFAEGPILMISYADEEGARVITWKNVDLPYVDVVSTEREMIKRFLRVVKEKDPDVLITYNGDNFDFAYLKKRCEKLGINFALGRDGSEPKIQRMGDRFAVEVKGRIHFDLYPVIRRTINLPTYTLEAVYEAVFGQPKEKVYAEEITTAWETGENLERVARYSMEDAKVTYELGKEFLPMEAQLSRLIGQSLWDVSRSSTGNLVEWFLLRKAYERNELAPNKPDEKELARRRQSYEGGYVKEPERGLWENIVYLDFRSLYPSIIITHNVSPDTLNREGCKEYDVAPQVGHRFCKDFPGFIPSLLGDLLEERQKIKKKMKATIDPIERKLLDYRQRAIKILANSYYGYYGYARARWYCKECAESVTAWGREYITMTIKEIEEKYGFKVIYSDTDGFFATIPGADAETVKKKAMEFLKYINAKLPGALELEYEGFYKRGFFVTKKKYAVIDEEGKITTRGLEIVRRDWSEIAKETQARVLEALLKDGDVEKAVRIVKEVTEKLSKYEVPPEKLVIHEQITRDLKDYKATGPHVAVAKRLAARGVKIRPGTVISYIVLKGSGRIGDRAIPFDEFDPTKHKYDAEYYIENQVLPAVERILRAFGYRKEDLRYQKTRQVGLSAWLKPKGT

SEQ ID NO: 1048 - protein, 774 aa, synthetic construct
MILDTDYITEDGKPVLRIFKKENGEFKIEYDRTFEHYFYALLKDDSAIEEVKKITAERHGTVVTVKRVEKVQKKFLGRPVEVWKLYFTHPQDRPAIRDKIREHPAVIDIYEYDIPFAKRYLIDKGLVPMEGDEELKMLAFDIETLYHEGEEFAEGPILMISYADEEGARVITWKNVDLPYVDVVSTEREMIKRFLRVVKEKDPDVLITYNGDNFDFAYLKKRCEKLGINFALGRDGSEPKIQRMGDRFAVEVKGRIHFDLYPVIRRTINLPTYTLEAVYEAVFGQPKEKVYAEEITTAWETGENLERVARYSMEDAKVTYELGKEFLPMEAQLSRLIGQSLWDVSRSSTGNLVEWFLLRKAYERNELAPNKPDEKELARRRQSYEGGYVKEPERGLWENIVYLDFRSLYPSIIITHNVSPDTLNREGCKEYDVAPQVGHRFCKDFPGFIPSLLGDLLEERQKIKKKMKATIDPIERKLLDYRQRAIKILANSYYGYYGYARARWYCKECAESVTAWGREYITMTIKEIEEKYGFKVIYSDTDGFFATIPGADAETVKKKAMEFLKYINAKLPGALELEYEGFYKRGFFVTKKKYAVIDEEGKITTRGLEIVRRDWSEIAKETQARVLEALLKDGDVEKAVRIVKEVTEKLSKYEVPPEKLVIHEQITRDLKDYKATGPHVAVAKRLAARGVKIRPGTVISYIVLKGSGRIGDRAIPFDEFDPTKHKYDAEYYIENQVLPAVERILRAFGYRKEDLRYQKTRQVGLSAWLKPKGT

SEQ ID NO: 1049 - protein, 774 aa, synthetic construct
MILDTDYITEDGKPVLRIFKKENGEFKIEYDRTFEHYFYALLKDDSAIEEVKKITAERHGTVVTVKRVEKVQKKFLGRPVEVWKLYFTHPQDRPAIADKIREHPAVIDIYEYDIPFAKRYLIDKGLVPMEGDEELKMLAFDIETLYHEGEEFAEGPILMISYADEEGARVITWKNVDLPYVDVVSTEREMIKRFLRVVKEKDPDVLITYNGDNFDFAYLKKRCEKLGINFALGRDGSEPKIQRMGDRFAVEVKGRIHFDLYPVIRRTINLPTYTLEAVYEAVFGQPKEKVYAEEITTAWETGENLERVARYSMEDAKVTYELGKEFLPMEAQLSRLIGQSLWDVSRSSTGNLVEWFLLRKAYERNELAPNKPDEKELARRRQSYEGGYVKEPERGLWENIVYLDFRSLYPSIIITHNVSPDTLNREGCKEYDVAPQVGHRFCKDFPGFIPSLLGDLLEERQKIKKKMKATIDPIERKLLDYRQRAIKILANSYYGYYGYARARWYCKECAESVTAWGREYITMTIKEIEEKYGFKVIYSDTDGFFATIPGADAETVKKKAMEFLKYINAKLPGALELEYEGFYKRGFFVTKKKYAVIDEEGKITTRGLEIVRRDWSEIAKETQARVLEALLKDGDVEKAVRIVKEVTEKLSKYEVPPEKLVIHEQITRDLKDYKATGPHVAVAKRLAARGVKIRPGTVISYIVLKGSGRIGDRAIPFDEFDPTKHKYDAEYYIENQVLPAVERILRAFGYRKEDLRYQKTRQVGLSAWLKPKGT

SEQ ID NO: 1050 - protein, 774 aa, synthetic construct
MILDTDYITEDGKPVLRIFKKENGEFKIEYDRTFERYFYALLKDDSAIEEVKKITAERHGTVVTVKRVEKVQKKFLGRPVEVWKLYFTHPQDVPAIRDKIREHPAVIDIYEYDIPFAKRYLIDKGLVPMEGDEELKMLAFDIETLYHEGEEFAEGPILMISYADEEGARVITWKNVDLPYVDVVSTEREMIKRFLRVVKEKDPDVLITYNGDNFDFAYLKKRCEKLGINFALGRDGSEPKIQRMGDRFAVEVKGRIHFDLYPVIRRTINLPTYTLEAVYEAVFGQPKEKVYAEEITTAWETGENLERVARYSMEDAKVTYELGKEFLPMEAQLSRLIGQSLWDVSRSSTGNLVEWFLLRKAYERNELAPNKPDEKELARRRQSYEGGYVKEPERGLWENIVYLDFRSLYPSIIITHNVSPDTLNREGCKEYDVAPQVGHRFCKDFPGFIPSLLGDLLEERQKIKKKMKATIDPIERKLLDYRQRAIKILANSYYGYYGYARARWYCKECAESVTAWGREYITMTIKEIEEKYGFKVIYSDTDGFFATIPGADAETVKKKAMEFLKYINAKLPGALELEYEGFYKRGFFVTKKKYAVIDEEGKITTRGLEIVRRDWSEIAKETQARVLEALLKDGDVEKAVRIVKEVTEKLSKYEVPPEKLVIHEQITRDLKDYKATGPHVAVAKRLAARGVKIRPGTVISYIVLKGSGRIGDRAIPFDEFDPTKHKYDAEYYIENQVLPAVERILRAFGYRKEDLRYQKTRQVGLSAWLKPKGT

SEQ ID NO: 1051 - protein, 774 aa, synthetic construct
MILDTDYITEDGKPVLRIFKKENGEFKIEYDRTFERYFYALLKDDSAIEEVKKITAERHGTVVTVKRVEKVQKKFLGRPVEVWKLYFTHPQDVPAIADKIREHPAVIDIYEYDIPFAKRYLIDKGLVPMEGDEELKMLAFDIETLYHEGEEFAEGPILMISYADEEGARVITWKNVDLPYVDVVSTEREMIKRFLRVVKEKDPDVLITYNGDNFDFAYLKKRCEKLGINFALGRDGSEPKIQRMGDRFAVEVKGRIHFDLYPVIRRTINLPTYTLEAVYEAVFGQPKEKVYAEEITTAWETGENLERVARYSMEDAKVTYELGKEFLPMEAQLSRLIGQSLWDVSRSSTGNLVEWFLLRKAYERNELAPNKPDEKELARRRQSYEGGYVKEPERGLWENIVYLDFRSLYPSIIITHNVSPDTLNREGCKEYDVAPQVGHRFCKDFPGFIPSLLGDLLEERQKIKKKMKATIDPIERKLLDYRQRAIKILANSYYGYYGYARARWYCKECAESVTAWGREYITMTIKEIEEKYGFKVIYSDTDGFFATIPGADAETVKKKAMEFLKYINAKLPGALELEYEGFYKRGFFVTKKKYAVIDEEGKITTRGLEIVRRDWSEIAKETQARVLEALLKDGDVEKAVRIVKEVTEKLSKYEVPPEKLVIHEQITRDLKDYKATGPHVAVAKRLAARGVKIRPGTVISYIVLKGSGRIGDRAIPFDEFDPTKHKYDAEYYIENQVLPAVERILRAFGYRKEDLRYQKTRQVGLSAWLKPKGT

SEQ ID NO: 1052 - protein, 774 aa, synthetic construct
MILDTDYITEDGKPVLRIFKKENGEFKIEYDRTFERYFYALLKDDSAIEEVKKITAERHGTVVTVKRVEKVQKKFLGRPVEVWKLYFTHPQDVPAIWDKIREHPAVIDIYEYDIPFAKRYLIDKGLVPMEGDEELKMLAFDIETLYHEGEEFAEGPILMISYADEEGARVITWKNVDLPYVDVVSTEREMIKRFLRVVKEKDPDVLITYNGDNFDFAYLKKRCEKLGINFALGRDGSEPKIQRMGDRFAVEVKGRIHFDLYPVIRRTINLPTYTLEAVYEAVFGQPKEKVYAEEITTAWETGENLERVARYSMEDAKVTYELGKEFLPMEAQLSRLIGQSLWDVSRSSTGNLVEWFLLRKAYERNELAPNKPDEKELARRRQSYEGGYVKEPERGLWENIVYLDFRSLYPSIIITHNVSPDTLNREGCKEYDVAPQVGHRFCKDFPGFIPSLLGDLLEERQKIKKKMKATIDPIERKLLDYRQRAIKILANSYYGYYGYARARWYCKECAESVTAWGREYITMTIKEIEEKYGFKVIYSDTDGFFATIPGADAETVKKKAMEFLKYINAKLPGALELEYEGFYKRGFFVTKKKYAVIDEEGKITTRGLEIVRRDWSEIAKETQARVLEALLKDGDVEKAVRIVKEVTEKLSKYEVPPEKLVIHEQITRDLKDYKATGPHVAVAKRLAARGVKIRPGTVISYIVLKGSGRIGDRAIPFDEFDPTKHKYDAEYYIENQVLPAVERILRAFGYRKEDLRYQKTRQVGLSAWLKPKGT

SEQ ID NO: 1053 - protein, 774 aa, synthetic construct
MILDTDYITEDGKPVLRIFKKENGEFKIEYDRTFERYFYALLKDDSAIEEVKKITAERHGTVVTVKRVEKVQKKFLGRPVEVWKLYFTHPQDIPAIRDKIREHPAVIDIYEYDIPFAKRYLIDKGLVPMEGDEELKMLAFDIETLYHEGEEFAEGPILMISYADEEGARVITWKNVDLPYVDVVSTEREMIKRFLRVVKEKDPDVLITYNGDNFDFAYLKKRCEKLGINFALGRDGSEPKIQRMGDRFAVEVKGRIHFDLYPVIRRTINLPTYTLEAVYEAVFGQPKEKVYAEEITTAWETGENLERVARYSMEDAKVTYELGKEFLPMEAQLSRLIGQSLWDVSRSSTGNLVEWFLLRKAYERNELAPNKPDEKELARRRQSYEGGYVKEPERGLWENIVYLDFRSLYPSIIITHNVSPDTLNREGCKEYDVAPQVGHRFCKDFPGFIPSLLGDLLEERQKIKKKMKATIDPIERKLLDYRQRAIKILANSYYGYYGYARARWYCKECAESVTAWGREYITMTIKEIEEKYGFKVIYSDTDGFFATIPGADAETVKKKAMEFLKYINAKLPGALELEYEGFYKRGFFVTKKKYAVIDEEGKITTRGLEIVRRDWSEIAKETQARVLEALLKDGDVEKAVRIVKEVTEKLSKYEVPPEKLVIHEQITRDLKDYKATGPHVAVAKRLAARGVKIRPGTVISYIVLKGSGRIGDRAIPFDEFDPTKHKYDAEYYIENQVLPAVERILRAFGYRKEDLRYQKTRQVGLSAWLKPKGT

SEQ ID NO: 1054 - protein, 774 aa, synthetic construct
MILDTDYITEDGKPVLRIFKKENGEFKIEYDRTFERYFYALLKDDSAIEEVKKITAERHGTVVTVKRVEKVQKKFLGRPVEVWKLYFTHPQDIPAIHDKIREHPAVIDIYEYDIPFAKRYLIDKGLVPMEGDEELKMLAFDIETLYHEGEEFAEGPILMISYADEEGARVITWKNVDLPYVDVVSTEREMIKRFLRVVKEKDPDVLITYNGDNFDFAYLKKRCEKLGINFALGRDGSEPKIQRMGDRFAVEVKGRIHFDLYPVIRRTINLPTYTLEAVYEAVFGQPKEKVYAEEITTAWETGENLERVARYSMEDAKVTYELGKEFLPMEAQLSRLIGQSLWDVSRSSTGNLVEWFLLRKAYERNELAPNKPDEKELARRRQSYEGGYVKEPERGLWENIVYLDFRSLYPSIIITHNVSPDTLNREGCKEYDVAPQVGHRFCKDFPGFIPSLLGDLLEERQKIKKKMKATIDPIERKLLDYRQRAIKILANSYYGYYGYARARWYCKECAESVTAWGREYITMTIKEIEEKYGFKVIYSDTDGFFATIPGADAETVKKKAMEFLKYINAKLPGALELEYEGFYKRGFFVTKKKYAVIDEEGKITTRGLEIVRRDWSEIAKETQARVLEALLKDGDVEKAVRIVKEVTEKLSKYEVPPEKLVIHEQITRDLKDYKATGPHVAVAKRLAARGVKIRPGTVISYIVLKGSGRIGDRAIPFDEFDPTKHKYDAEYYIENQVLPAVERILRAFGYRKEDLRYQKTRQVGLSAWLKPKGT

SEQ ID NO: 1055 - protein, 774 aa, synthetic construct
MILDTDYITEDGKPVLRIFKKENGEFKIEYDRTFERYFYALLKDDSAIEEVKKITAERHGTVVTVKRVEKVQKKFLGRPVEVWKLYFTHPQDKPAIRDKIREHPAVIDIYEYDIPFAKRYLIDKGLVPMEGDEELKMLAFDIETLYHEGEEFAEGPILMISYADEEGARVITWKNVDLPYVDVVSTEREMIKRFLRVVKEKDPDVLITYNGDNFDFAYLKKRCEKLGINFALGRDGSEPKIQRMGDRFAVEVKGRIHFDLYPVIRRTINLPTYTLEAVYEAVFGQPKEKVYAEEITTAWETGENLERVARYSMEDAKVTYELGKEFLPMEAQLSRLIGQSLWDVSRSSTGNLVEWFLLRKAYERNELAPNKPDEKELARRRQSYEGGYVKEPERGLWENIVYLDFRSLYPSIIITHNVSPDTLNREGCKEYDVAPQVGHRFCKDFPGFIPSLLGDLLEERQKIKKKMKATIDPIERKLLDYRQRAIKILANSYYGYYGYARARWYCKECAESVTAWGREYITMTIKEIEEKYGFKVIYSDTDGFFATIPGADAETVKKKAMEFLKYINAKLPGALELEYEGFYKRGFFVTKKKYAVIDEEGKITTRGLEIVRRDWSEIAKETQARVLEALLKDGDVEKAVRIVKEVTEKLSKYEVPPEKLVIHEQITRDLKDYKATGPHVAVAKRLAARGVKIRPGTVISYIVLKGSGRIGDRAIPFDEFDPTKHKYDAEYYIENQVLPAVERILRAFGYRKEDLRYQKTRQVGLSAWLKPKGT

SEQ ID NO: 1056 - protein, 774 aa, synthetic construct
MILDTDYITEDGKPVLRIFKKENGEFKIEYDRTFESYFYALLKDDSAIEEVKKITAERHGTVVTVKRVEKVQKKFLGRPVEVWKLYFTHFQDIPAIRDKIREHPAVIDIYEYDIPFAKRYLIDKGLVPMEGDEELKMLAFDIETLYHEGEEFAEGPILMISYADEEGARVITWKNVDLPYVDVVSTEREMIKRFLRVVKEKDPDVLITYNGDNFDFAYLKKRCEKLGINFALGRDGSEPKIQRMGDRFAVEVKGRIHFDLYPVIRRTINLPTYTLEAVYEAVFGQPKEKVYAEEITTAWETGENLERVARYSMEDAKVTYELGKEFLPMEAQLSRLIGQSLWDVSRSSTGNLVEWFLLRKAYERNELAPNKPDEKELARRRQSYEGGYVKEPERGLWENIVYLDFRSLYPSIIITHNVSPDTLNREGCKEYDVAPQVGHRFCKDFPGFIPSLLGDLLEERQKIKKKMKATIDPIERKLLDYRQRAIKILANSYYGYYGYARARWYCKECAESVTAWGREYITMTIKEIEEKYGFKVIYSDTDGFFATIPGADAETVKKKAMEFLKYINAKLPGALELEYEGFYKRGFFVTKKKYAVIDEEGKITTRGLEIVRRDWSEIAKETQARVLEALLKDGDVEKAVRIVKEVTEKLSKYEVPPEKLVIHEQITRDLKDYKATGPHVAVAKRLAARGVKIRPGTVISYIVLKGSGRIGDRAIPFDEFDPTKHKYDAEYYIENQVLPAVERILRAFGYRKEDLRYQKTRQVGLSAWLKPKGT

SEQ ID NO: 1057 - protein, 774 aa, synthetic construct
MILDTDYITEDGKPVLRIFKKENGEFKIEYDRTFESYFYALLKDDSAIEEVKKITAERHGTVVTVKRVEKVQKKFLGRPVEVWKLYFTHFQDIPAIADKIREHPAVIDIYEYDIPFAKRYLIDKGLVPMEGDEELKMLAFDIETLYHEGEEFAEGPILMISYADEEGARVITWKNVDLPYVDVVSTEREMIKRFLRVVKEKDPDVLITYNGDNFDFAYLKKRCEKLGINFALGRDGSEPKIQRMGDRFAVEVKGRIHFDLYPVIRRTINLPTYTLEAVYEAVFGQPKEKVYAEEITTAWETGENLERVARYSMEDAKVTYELGKEFLPMEAQLSRLIGQSLWDVSRSSTGNLVEWFLLRKAYERNELAPNKPDEKELARRRQSYEGGYVKEPERGLWENIVYLDFRSLYPSIIITHNVSPDTLNREGCKEYDVAPQVGHRFCKDFPGFIPSLLGDLLEERQKIKKKMKATIDPIERKLLDYRQRAIKILANSYYGYYGYARARWYCKECAESVTAWGREYITMTIKEIEEKYGFKVIYSDTDGFFATIPGADAETVKKKAMEFLKYINAKLPGALELEYEGFYKRGFFVTKKKYAVIDEEGKITTRGLEIVRRDWSEIAKETQARVLEALLKDGDVEKAVRIVKEVTEKLSKYEVPPEKLVIHEQITRDLKDYKATGPHVAVAKRLAARGVKIRPGTVISYIVLKGSGRIGDRAIPFDEFDPTKHKYDAEYYIENQVLPAVERILRAFGYRKEDLRYQKTRQVGLSAWLKPKGT

SEQ ID NO: 1058 - protein, 774 aa, synthetic construct
MILDTDYITEDGKPVLRIFKKENGEFKIEYDRTFESYFYALLKDDSAIEEVKKITAERHGTVVTVKRVEKVQKKFLGRPVEVWKLYFTHPQDEPAIRDKIREHPAVIDIYEYDIPFAKRYLIDKGLVPMEGDEELKMLAFDIETLYHEGEEFAEGPILMISYADEEGARVITWKNVDLPYVDVVSTEREMIKRFLRVVKEKDPDVLITYNGDNFDFAYLKKRCEKLGINFALGRDGSEPKIQRMGDRFAVEVKGRIHFDLYPVIRRTINLPTYTLEAVYEAVFGQPKEKVYAEEITTAWETGENLERVARYSMEDAKVTYELGKEFLPMEAQLSRLIGQSLWDVSRSSTGNLVEWFLLRKAYERNELAPNKPDEKELARRRQSYEGGYVKEPERGLWENIVYLDFRSLYPSIIITHNVSPDTLNREGCKEYDVAPQVGHRFCKDFPGFIPSLLGDLLEERQKIKKKMKATIDPIERKLLDYRQRAIKILANSYYGYYGYARARWYCKECAESVTAWGREYITMTIKEIEEKYGFKVIYSDTDGFFATIPGADAETVKKKAMEFLKYINAKLPGALELEYEGFYKRGFFVTKKKYAVIDEEGKITTRGLEIVRRDWSEIAKETQARVLEALLKDGDVEKAVRIVKEVTEKLSKYEVPPEKLVIHEQITRDLKDYKATGPHVAVAKRLAARGVKIRPGTVISYIVLKGSGRIGDRAIPFDEFDPTKHKYDAEYYIENQVLPAVERILRAFGYRKEDLRYQKTRQVGLSAWLKPKGT

SEQ ID NO: 1059 - protein, 774 aa, synthetic construct
MILDTDYITEDGKPVLRIFKKENGEFKIEYDRTFESYFYALLKDDSAIEEVKKITAERHGTVVTVKRVEKVQKKFLGRPVEVWKLYFTHPQDIPAIFDKIREHPAVIDIYEYDIPFAKRYLIDKGLVPMEGDEELKMLAFDIETLYHEGEEFAEGPILMISYADEEGARVITWKNVDLPYVDVVSTEREMIKRFLRVVKEKDPDVLITYNGDNFDFAYLKKRCEKLGINFALGRDGSEPKIQRMGDRFAVEVKGRIHFDLYPVIRRTINLPTYTLEAVYEAVFGQPKEKVYAEEITTAWETGENLERVARYSMEDAKVTYELGKEFLPMEAQLSRLIGQSLWDVSRSSTGNLVEWFLLRKAYERNELAPNKPDEKELARRRQSYEGGYVKEPERGLWENIVYLDFRSLYPSIIITHNVSPDTLNREGCKEYDVAPQVGHRFCKDFPGFIPSLLGDLLEERQKIKKKMKATIDPIERKLLDYRQRAIKILANSYYGYYGYARARWYCKECAESVTAWGREYITMTIKEIEEKYGFKVIYSDTDGFFATIPGADAETVKKKAMEFLKYINAKLPGALELEYEGFYKRGFFVTKKKYAVIDEEGKITTRGLEIVRRDWSEIAKETQARVLEALLKDGDVEKAVRIVKEVTEKLSKYEVPPEKLVIHEQITRDLKDYKATGPHVAVAKRLAARGVKIRPGTVISYIVLKGSGRIGDRAIPFDEFDPTKHKYDAEYYIENQVLPAVERILRAFGYRKEDLRYQKTRQVGLSAWLKPKGT

SEQ ID NO: 1060 - protein, 774 aa, synthetic construct
MILDTDYITEDGKPVLRIFKKENGEFKIEYDRTFESYFYALLKDDSAIEEVKKITAERHGTVVTVKRVEKVQKKFLGRPVEVWKLYFTHPQDIPAIHDKIREHPAVIDIYEYDIPFAKRYLIDKGLVPMEGDEELKMLAFDIETLYHEGEEFAEGPILMISYADEEGARVITWKNVDLPYVDVVSTEREMIKRFLRVVKEKDPDVLITYNGDNFDFAYLKKRCEKLGINFALGRDGSEPKIQRMGDRFAVEVKGRIHFDLYPVIRRTINLPTYTLEAVYEAVFGQPKEKVYAEEITTAWETGENLERVARYSMEDAKVTYELGKEFLPMEAQLSRLIGQSLWDVSRSSTGNLVEWFLLRKAYERNELAPNKPDEKELARRRQSYEGGYVKEPERGLWENIVYLDFRSLYPSIIITHNVSPDTLNREGCKEYDVAPQVGHRFCKDFPGFIPSLLGDLLEERQKIKKKMKATIDPIERKLLDYRQRAIKILANSYYGYYGYARARWYCKECAESVTAWGREYITMTIKEIEEKYGFKVIYSDTDGFFATIPGADAETVKKKAMEFLKYINAKLPGALELEYEGFYKRGFFVTKKKYAVIDEEGKITTRGLEIVRRDWSEIAKETQARVLEALLKDGDVEKAVRIVKEVTEKLSKYEVPPEKLVIHEQITRDLKDYKATGPHVAVAKRLAARGVKIRPGTVISYIVLKGSGRIGDRAIPFDEFDPTKHKYDAEYYIENQVLPAVERILRAFGYRKEDLRYQKTRQVGLSAWLKPKGT

SEQ ID NO: 1061 - protein, 774 aa, synthetic construct
MILDTDYITEDGKPVLRIFKKENGEFKIEYDRTFESYFYALLKDDSAIEEVKKITAERHGTVVTVKRVEKVQKKFLGRPVEVWKLYFTHPQDKPAIADKIREHPAVIDIYEYDIPFAKRYLIDKGLVPMEGDEELKMLAFDIETLYHEGEEFAEGPILMISYADEEGARVITWKNVDLPYVDVVSTEREMIKRFLRVVKEKDPDVLITYNGDNFDFAYLKKRCEKLGINFALGRDGSEPKIQRMGDRFAVEVKGRIHFDLYPVIRRTINLPTYTLEAVYEAVFGQPKEKVYAEEITTAWETGENLERVARYSMEDAKVTYELGKEFLPMEAQLSRLIGQSLWDVSRSSTGNLVEWFLLRKAYERNELAPNKPDEKELARRRQSYEGGYVKEPERGLWENIVYLDFRSLYPSIIITHNVSPDTLNREGCKEYDVAPQVGHRFCKDFPGFIPSLLGDLLEERQKIKKKMKATIDPIERKLLDYRQRAIKILANSYYGYYGYARARWYCKECAESVTAWGREYITMTIKEIEEKYGFKVIYSDTDGFFATIPGADAETVKKKAMEFLKYINAKLPGALELEYEGFYKRGFFVTKKKYAVIDEEGKITTRGLEIVRRDWSEIAKETQARVLEALLKDGDVEKAVRIVKEVTEKLSKYEVPPEKLVIHEQITRDLKDYKATGPHVAVAKRLAARGVKIRPGTVISYIVLKGSGRIGDRAIPFDEFDPTKHKYDAEYYIENQVLPAVERILRAFGYRKEDLRYQKTRQVGLSAWLKPKGT

SEQ ID NO: 1062 - protein, 774 aa, synthetic construct
MILDTDYITEDGKPVLRIFKKENGEFKIEYDRTFESYFYALLKDDSAIEEVKKITAERHGTVVTVKRVEKVQKKFLGRPVEVWKLYFTHPQDQPAIADKIREHPAVIDIYEYDIPFAKRYLIDKGLVPMEGDEELKMLAFDIETLYHEGEEFAEGPILMISYADEEGARVITWKNVDLPYVDVVSTEREMIKRFLRVVKEKDPDVLITYNGDNFDFAYLKKRCEKLGINFALGRDGSEPKIQRMGDRFAVEVKGRIHFDLYPVIRRTINLPTYTLEAVYEAVFGQPKEKVYAEEITTAWETGENLERVARYSMEDAKVTYELGKEFLPMEAQLSRLIGQSLWDVSRSSTGNLVEWFLLRKAYERNELAPNKPDEKELARRRQSYEGGYVKEPERGLWENIVYLDFRSLYPSIIITHNVSPDTLNREGCKEYDVAPQVGHRFCKDFPGFIPSLLGDLLEERQKIKKKMKATIDPIERKLLDYRQRAIKILANSYYGYYGYARARWYCKECAESVTAWGREYITMTIKEIEEKYGFKVIYSDTDGFFATIPGADAETVKKKAMEFLKYINAKLPGALELEYEGFYKRGFFVTKKKYAVIDEEGKITTRGLEIVRRDWSEIAKETQARVLEALLKDGDVEKAVRIVKEVTEKLSKYEVPPEKLVIHEQITRDLKDYKATGPHVAVAKRLAARGVKIRPGTVISYIVLKGSGRIGDRAIPFDEFDPTKHKYDAEYYIENQVLPAVERILRAFGYRKEDLRYQKTRQVGLSAWLKPKGT

SEQ ID NO: 1063 - protein, 774 aa, synthetic construct
MILDTDYITEDGKPVLRIFKKENGEFKIEYDRTFESYFYALLKDDSAIEEVKKITAERHGTVVTVKRVEKVQKKFLGRPVEVWKLYFTHPQDRPAIRDKIREHPAVIDIYEYDIPFAKRYLIDKGLVPMEGDEELKMLAFDIETLYHEGEEFAEGPILMISYADEEGARVITWKNVDLPYVDVVSTEREMIKRFLRVVKEKDPDVLITYNGDNFDFAYLKKRCEKLGINFALGRDGSEPKIQRMGDRFAVEVKGRIHFDLYPVIRRTINLPTYTLEAVYEAVFGQPKEKVYAEEITTAWETGENLERVARYSMEDAKVTYELGKEFLPMEAQLSRLIGQSLWDVSRSSTGNLVEWFLLRKAYERNELAPNKPDEKELARRRQSYEGGYVKEPERGLWENIVYLDFRSLYPSIIITHNVSPDTLNREGCKEYDVAPQVGHRFCKDFPGFIPSLLGDLLEERQKIKKKMKATIDPIERKLLDYRQRAIKILANSYYGYYGYARARWYCKECAESVTAWGREYITMTIKEIEEKYGFKVIYSDTDGFFATIPGADAETVKKKAMEFLKYINAKLPGALELEYEGFYKRGFFVTKKKYAVIDEEGKITTRGLEIVRRDWSEIAKETQARVLEALLKDGDVEKAVRIVKEVTEKLSKYEVPPEKLVIHEQITRDLKDYKATGPHVAVAKRLAARGVKIRPGTVISYIVLKGSGRIGDRAIPFDEFDPTKHKYDAEYYIENQVLPAVERILRAFGYRKEDLRYQKTRQVGLSAWLKPKGT

SEQ ID NO: 1064 - protein, 774 aa, synthetic construct
MILDTDYITEDGKPVLRIFKKENGEFKIEYDRTFESYFYALLKDDSAIEEVKKITAERHGTVVTVKRVEKVQKKFLGRPVEVWKLYFTHPQDRPAIWDKIREHPAVIDIYEYDIPFAKRYLIDKGLVPMEGDEELKMLAFDIETLYHEGEEFAEGPILMISYADEEGARVITWKNVDLPYVDVVSTEREMIKRFLRVVKEKDPDVLITYNGDNFDFAYLKKRCEKLGINFALGRDGSEPKIQRMGDRFAVEVKGRIHFDLYPVIRRTINLPTYTLEAVYEAVFGQPKEKVYAEEITTAWETGENLERVARYSMEDAKVTYELGKEFLPMEAQLSRLIGQSLWDVSRSSTGNLVEWFLLRKAYERNELAPNKPDEKELARRRQSYEGGYVKEPERGLWENIVYLDFRSLYPSIIITHNVSPDTLNREGCKEYDVAPQVGHRFCKDFPGFIPSLLGDLLEERQKIKKKMKATIDPIERKLLDYRQRAIKILANSYYGYYGYARARWYCKECAESVTAWGREYITMTIKEIEEKYGFKVIYSDTDGFFATIPGADAETVKKKAMEFLKYINAKLPGALELEYEGFYKRGFFVTKKKYAVIDEEGKITTRGLEIVRRDWSEIAKETQARVLEALLKDGDVEKAVRIVKEVTEKLSKYEVPPEKLVIHEQITRDLKDYKATGPHVAVAKRLAARGVKIRPGTVISYIVLKGSGRIGDRAIPFDEFDPTKHKYDAEYYIENQVLPAVERILRAFGYRKEDLRYQKTRQVGLSAWLKPKGT

SEQ ID NO: 1065 - protein, 774 aa, synthetic construct
MILDTDYITEDGKPVLRIFKKENGEFKIEYDRTFEWYFYALLKDDSAIEEVKKITAERHGTVVTVKRVEKVQKKFLGRPVEVWKLYFTHPQDVPAIRDKIREHPAVIDIYEYDIPFAKRYLIDKGLVPMEGDEELKMLAFDIETLYHEGEEFAEGPILMISYADEEGARVITWKNVDLPYVDVVSTEREMIKRFLRVVKEKDPDVLITYNGDNFDFAYLKKRCEKLGINFALGRDGSEPKIQRMGDRFAVEVKGRIHFDLYPVIRRTINLPTYTLEAVYEAVFGQPKEKVYAEEITTAWETGENLERVARYSMEDAKVTYELGKEFLPMEAQLSRLIGQSLWDVSRSSTGNLVEWFLLRKAYERNELAPNKPDEKELARRRQSYEGGYVKEPERGLWENIVYLDFRSLYPSIIITHNVSPDTLNREGCKEYDVAPQVGHRFCKDFPGFIPSLLGDLLEERQKIKKKMKATIDPIERKLLDYRQRAIKILANSYYGYYGYARARWYCKECAESVTAWGREYITMTIKEIEEKYGFKVIYSDTDGFFATIPGADAETVKKKAMEFLKYINAKLPGALELEYEGFYKRGFFVTKKKYAVIDEEGKITTRGLEIVRRDWSEIAKETQARVLEALLKDGDVEKAVRIVKEVTEKLSKYEVPPEKLVIHEQITRDLKDYKATGPHVAVAKRLAARGVKIRPGTVISYIVLKGSGRIGDRAIPFDEFDPTKHKYDAEYYIENQVLPAVERILRAFGYRKEDLRYQKTRQVGLSAWLKPKGT

SEQ ID NO: 1066 - protein, 774 aa, synthetic construct
MILDTDYITEDGKPVLRIFKKENGEFKIEYDRTFEWYFYALLKDDSAIEEVKKITAERHGTVVTVKRVEKVQKKFLGRPVEVWKLYFTHFQDVPAIRDKIREHPAVIDIYEYDIPFAKRYLIDKGLVPMEGDEELKMLAFDIETLYHEGEEFAEGPILMISYADEEGARVITWKNVDLPYVDVVSTEREMIKRFLRVVKEKDPDVLITYNGDNFDFAYLKKRCEKLGINFALGRDGSEPKIQRMGDRFAVEVKGRIHFDLYPVIRRTINLPTYTLEAVYEAVFGQPKEKVYAEEITTAWETGENLERVARYSMEDAKVTYELGKEFLPMEAQLSRLIGQSLWDVSRSSTGNLVEWFLLRKAYERNELAPNKPDEKELARRRQSYEGGYVKEPERGLWENIVYLDFRSLYPSIIITHNVSPDTLNREGCKEYDVAPQVGHRFCKDFPGFIPSLLGDLLEERQKIKKKMKATIDPIERKLLDYRQRAIKILANSYYGYYGYARARWYCKECAESVTAWGREYITMTIKEIEEKYGFKVIYSDTDGFFATIPGADAETVKKKAMEFLKYINAKLPGALELEYEGFYKRGFFVTKKKYAVIDEEGKITTRGLEIVRRDWSEIAKETQARVLEALLKDGDVEKAVRIVKEVTEKLSKYEVPPEKLVIHEQITRDLKDYKATGPHVAVAKRLAARGVKIRPGTVISYIVLKGSGRIGDRAIPFDEFDPTKHKYDAEYYIENQVLPAVERILRAFGYRKEDLRYQKTRQVGLSAWLKPKGT

SEQ ID NO: 1067 - protein, 774 aa, synthetic construct
MILDTDYITEDGKPVLRIFKKENGEFKIEYDRTFEWYFYALLKDDSAIEEVKKITAERHGTVVTVKRVEKVQKKFLGRPVEVWKLYFTHFQDVPAIADKIREHPAVIDIYEYDIPFAKRYLIDKGLVPMEGDEELKMLAFDIETLYHEGEEFAEGPILMISYADEEGARVITWKNVDLPYVDVVSTEREMIKRFLRVVKEKDPDVLITYNGDNFDFAYLKKRCEKLGINFALGRDGSEPKIQRMGDRFAVEVKGRIHFDLYPVIRRTINLPTYTLEAVYEAVFGQPKEKVYAEEITTAWETGENLERVARYSMEDAKVTYELGKEFLPMEAQLSRLIGQSLWDVSRSSTGNLVEWFLLRKAYERNELAPNKPDEKELARRRQSYEGGYVKEPERGLWENIVYLDFRSLYPSIIITHNVSPDTLNREGCKEYDVAPQVGHRFCKDFPGFIPSLLGDLLEERQKIKKKMKATIDPIERKLLDYRQRAIKILANSYYGYYGYARARWYCKECAESVTAWGREYITMTIKEIEEKYGFKVIYSDTDGFFATIPGADAETVKKKAMEFLKYINAKLPGALELEYEGFYKRGFFVTKKKYAVIDEEGKITTRGLEIVRRDWSEIAKETQARVLEALLKDGDVEKAVRIVKEVTEKLSKYEVPPEKLVIHEQITRDLKDYKATGPHVAVAKRLAARGVKIRPGTVISYIVLKGSGRIGDRAIPFDEFDPTKHKYDAEYYIENQVLPAVERILRAFGYRKEDLRYQKTRQVGLSAWLKPKGT

SEQ ID NO: 1068 - protein, 774 aa, synthetic construct
MILDTDYITEDGKPVLRIFKKENGEFKIEYDRTFEWYFYALLKDDSAIEEVKKITAERHGTVVTVKRVEKVQKKFLGRPVEVWKLYFTHFQDIPAIRDKIREHPAVIDIYEYDIPFAKRYLIDKGLVPMEGDEELKMLAFDIETLYHEGEEFAEGPILMISYADEEGARVITWKNVDLPYVDVVSTEREMIKRFLRVVKEKDPDVLITYNGDNFDFAYLKKRCEKLGINFALGRDGSEPKIQRMGDRFAVEVKGRIHFDLYPVIRRTINLPTYTLEAVYEAVFGQPKEKVYAEEITTAWETGENLERVARYSMEDAKVTYELGKEFLPMEAQLSRLIGQSLWDVSRSSTGNLVEWFLLRKAYERNELAPNKPDEKELARRRQSYEGGYVKEPERGLWENIVYLDFRSLYPSIIITHNVSPDTLNREGCKEYDVAPQVGHRFCKDFPGFIPSLLGDLLEERQKIKKKMKATIDPIERKLLDYRQRAIKILANSYYGYYGYARARWYCKECAESVTAWGREYITMTIKEIEEKYGFKVIYSDTDGFFATIPGADAETVKKKAMEFLKYINAKLPGALELEYEGFYKRGFFVTKKKYAVIDEEGKITTRGLEIVRRDWSEIAKETQARVLEALLKDGDVEKAVRIVKEVTEKLSKYEVPPEKLVIHEQITRDLKDYKATGPHVAVAKRLAARGVKIRPGTVISYIVLKGSGRIGDRAIPFDEFDPTKHKYDAEYYIENQVLPAVERILRAFGYRKEDLRYQKTRQVGLSAWLKPKGT

SEQ ID NO: 1069 - protein, 774 aa, synthetic construct
MILDTDYITEDGKPVLRIFKKENGEFKIEYDRTFEWYFYALLKDDSAIEEVKKITAERHGTVVTVKRVEKVQKKFLGRPVEVWKLYFTHFQDIPAIADKIREHPAVIDIYEYDIPFAKRYLIDKGLVPMEGDEELKMLAFDIETLYHEGEEFAEGPILMISYADEEGARVITWKNVDLPYVDVVSTEREMIKRFLRVVKEKDPDVLITYNGDNFDFAYLKKRCEKLGINFALGRDGSEPKIQRMGDRFAVEVKGRIHFDLYPVIRRTINLPTYTLEAVYEAVFGQPKEKVYAEEITTAWETGENLERVARYSMEDAKVTYELGKEFLPMEAQLSRLIGQSLWDVSRSSTGNLVEWFLLRKAYERNELAPNKPDEKELARRRQSYEGGYVKEPERGLWENIVYLDFRSLYPSIIITHNVSPDTLNREGCKEYDVAPQVGHRFCKDFPGFIPSLLGDLLEERQKIKKKMKATIDPIERKLLDYRQRAIKILANSYYGYYGYARARWYCKECAESVTAWGREYITMTIKEIEEKYGFKVIYSDTDGFFATIPGADAETVKKKAMEFLKYINAKLPGALELEYEGFYKRGFFVTKKKYAVIDEEGKITTRGLEIVRRDWSEIAKETQARVLEALLKDGDVEKAVRIVKEVTEKLSKYEVPPEKLVIHEQITRDLKDYKATGPHVAVAKRLAARGVKIRPGTVISYIVLKGSGRIGDRAIPFDEFDPTKHKYDAEYYIENQVLPAVERILRAFGYRKEDLRYQKTRQVGLSAWLKPKGT

SEQ ID NO: 1070 - protein, 774 aa, synthetic construct
MILDTDYITEDGKPVLRIFKKENGEFKIEYDRTFEWYFYALLKDDSAIEEVKKITAERHGTVVTVKRVEKVQKKFLGRPVEVWKLYFTHFQDIPAIFDKIREHPAVIDIYEYDIPFAKRYLIDKGLVPMEGDEELKMLAFDIETLYHEGEEFAEGPILMISYADEEGARVITWKNVDLPYVDVVSTEREMIKRFLRVVKEKDPDVLITYNGDNFDFAYLKKRCEKLGINFALGRDGSEPKIQRMGDRFAVEVKGRIHFDLYPVIRRTINLPTYTLEAVYEAVFGQPKEKVYAEEITTAWETGENLERVARYSMEDAKVTYELGKEFLPMEAQLSRLIGQSLWDVSRSSTGNLVEWFLLRKAYERNELAPNKPDEKELARRRQSYEGGYVKEPERGLWENIVYLDFRSLYPSIIITHNVSPDTLNREGCKEYDVAPQVGHRFCKDFPGFIPSLLGDLLEERQKIKKKMKATIDPIERKLLDYRQRAIKILANSYYGYYGYARARWYCKECAESVTAWGREYITMTIKEIEEKYGFKVIYSDTDGFFATIPGADAETVKKKAMEFLKYINAKLPGALELEYEGFYKRGFFVTKKKYAVIDEEGKITTRGLEIVRRDWSEIAKETQARVLEALLKDGDVEKAVRIVKEVTEKLSKYEVPPEKLVIHEQITRDLKDYKATGPHVAVAKRLAARGVKIRPGTVISYIVLKGSGRIGDRAIPFDEFDPTKHKYDAEYYIENQVLPAVERILRAFGYRKEDLRYQKTRQVGLSAWLKPKGT

SEQ ID NO: 1071 - protein, 774 aa, synthetic construct
MILDTDYITEDGKPVLRIFKKENGEFKIEYDRTFEWYFYALLKDDSAIEEVKKITAERHGTVVTVKRVEKVQKKFLGRPVEVWKLYFTHFQDIPAIHDKIREHPAVIDIYEYDIPFAKRYLIDKGLVPMEGDEELKMLAFDIETLYHEGEEFAEGPILMISYADEEGARVITWKNVDLPYVDVVSTEREMIKRFLRVVKEKDPDVLITYNGDNFDFAYLKKRCEKLGINFALGRDGSEPKIQRMGDRFAVEVKGRIHFDLYPVIRRTINLPTYTLEAVYEAVFGQPKEKVYAEEITTAWETGENLERVARYSMEDAKVTYELGKEFLPMEAQLSRLIGQSLWDVSRSSTGNLVEWFLLRKAYERNELAPNKPDEKELARRRQSYEGGYVKEPERGLWENIVYLDFRSLYPSIIITHNVSPDTLNREGCKEYDVAPQVGHRFCKDFPGFIPSLLGDLLEERQKIKKKMKATIDPIERKLLDYRQRAIKILANSYYGYYGYARARWYCKECAESVTAWGREYITMTIKEIEEKYGFKVIYSDTDGFFATIPGADAETVKKKAMEFLKYINAKLPGALELEYEGFYKRGFFVTKKKYAVIDEEGKITTRGLEIVRRDWSEIAKETQARVLEALLKDGDVEKAVRIVKEVTEKLSKYEVPPEKLVIHEQITRDLKDYKATGPHVAVAKRLAARGVKIRPGTVISYIVLKGSGRIGDRAIPFDEFDPTKHKYDAEYYIENQVLPAVERILRAFGYRKEDLRYQKTRQVGLSAWLKPKGT

SEQ ID NO: 1072 - protein, 774 aa, synthetic construct
MILDTDYITEDGKPVLRIFKKENGEFKIEYDRTFEWYFYALLKDDSAIEEVKKITAERHGTVVTVKRVEKVQKKFLGRPVEVWKLYFTHFQDIPAIWDKIREHPAVIDIYEYDIPFAKRYLIDKGLVPMEGDEELKMLAFDIETLYHEGEEFAEGPILMISYADEEGARVITWKNVDLPYVDVVSTEREMIKRFLRVVKEKDPDVLITYNGDNFDFAYLKKRCEKLGINFALGRDGSEPKIQRMGDRFAVEVKGRIHFDLYPVIRRTINLPTYTLEAVYEAVFGQPKEKVYAEEITTAWETGENLERVARYSMEDAKVTYELGKEFLPMEAQLSRLIGQSLWDVSRSSTGNLVEWFLLRKAYERNELAPNKPDEKELARRRQSYEGGYVKEPERGLWENIVYLDFRSLYPSIIITHNVSPDTLNREGCKEYDVAPQVGHRFCKDFPGFIPSLLGDLLEERQKIKKKMKATIDPIERKLLDYRQRAIKILANSYYGYYGYARARWYCKECAESVTAWGREYITMTIKEIEEKYGFKVIYSDTDGFFATIPGADAETVKKKAMEFLKYINAKLPGALELEYEGFYKRGFFVTKKKYAVIDEEGKITTRGLEIVRRDWSEIAKETQARVLEALLKDGDVEKAVRIVKEVTEKLSKYEVPPEKLVIHEQITRDLKDYKATGPHVAVAKRLAARGVKIRPGTVISYIVLKGSGRIGDRAIPFDEFDPTKHKYDAEYYIENQVLPAVERILRAFGYRKEDLRYQKTRQVGLSAWLKPKGT

SEQ ID NO: 1073 - protein, 774 aa, synthetic construct
MILDTDYITEDGKPVLRIFKKENGEFKIEYDRTFEWYFYALLKDDSAIEEVKKITAERHGTVVTVKRVEKVQKKFLGRPVEVWKLYFTHFQDRPAIADKIREHPAVIDIYEYDIPFAKRYLIDKGLVPMEGDEELKMLAFDIETLYHEGEEFAEGPILMISYADEEGARVITWKNVDLPYVDVVSTEREMIKRFLRVVKEKDPDVLITYNGDNFDFAYLKKRCEKLGINFALGRDGSEPKIQRMGDRFAVEVKGRIHFDLYPVIRRTINLPTYTLEAVYEAVFGQPKEKVYAEEITTAWETGENLERVARYSMEDAKVTYELGKEFLPMEAQLSRLIGQSLWDVSRSSTGNLVEWFLLRKAYERNELAPNKPDEKELARRRQSYEGGYVKEPERGLWENIVYLDFRSLYPSIIITHNVSPDTLNREGCKEYDVAPQVGHRFCKDFPGFIPSLLGDLLEERQKIKKKMKATIDPIERKLLDYRQRAIKILANSYYGYYGYARARWYCKECAESVTAWGREYITMTIKEIEEKYGFKVIYSDTDGFFATIPGADAETVKKKAMEFLKYINAKLPGALELEYEGFYKRGFFVTKKKYAVIDEEGKITTRGLEIVRRDWSEIAKETQARVLEALLKDGDVEKAVRIVKEVTEKLSKYEVPPEKLVIHEQITRDLKDYKATGPHVAVAKRLAARGVKIRPGTVISYIVLKGSGRIGDRAIPFDEFDPTKHKYDAEYYIENQVLPAVERILRAFGYRKEDLRYQKTRQVGLSAWLKPKGT

SEQ ID NO: 1074 - protein, 774 aa, synthetic construct
MILDTDYITEDGKPVLRIFKKENGEFKIEYDRTFEWYFYALLKDDSAIEEVKKITAERHGTVVTVKRVEKVQKKFLGRPVEVWKLYFTHIQDVPAIRDKIREHPAVIDIYEYDIPFAKRYLIDKGLVPMEGDEELKMLAFDIETLYHEGEEFAEGPILMISYADEEGARVITWKNVDLPYVDVVSTEREMIKRFLRVVKEKDPDVLITYNGDNFDFAYLKKRCEKLGINFALGRDGSEPKIQRMGDRFAVEVKGRIHFDLYPVIRRTINLPTYTLEAVYEAVFGQPKEKVYAEEITTAWETGENLERVARYSMEDAKVTYELGKEFLPMEAQLSRLIGQSLWDVSRSSTGNLVEWFLLRKAYERNELAPNKPDEKELARRRQSYEGGYVKEPERGLWENIVYLDFRSLYPSIIITHNVSPDTLNREGCKEYDVAPQVGHRFCKDFPGFIPSLLGDLLEERQKIKKKMKATIDPIERKLLDYRQRAIKILANSYYGYYGYARARWYCKECAESVTAWGREYITMTIKEIEEKYGFKVIYSDTDGFFATIPGADAETVKKKAMEFLKYINAKLPGALELEYEGFYKRGFFVTKKKYAVIDEEGKITTRGLEIVRRDWSEIAKETQARVLEALLKDGDVEKAVRIVKEVTEKLSKYEVPPEKLVIHEQITRDLKDYKATGPHVAVAKRLAARGVKIRPGTVISYIVLKGSGRIGDRAIPFDEFDPTKHKYDAEYYIENQVLPAVERILRAFGYRKEDLRYQKTRQVGLSAWLKPKGT

SEQ ID NO: 1075 - protein, 774 aa, synthetic construct
MILDTDYITEDGKPVLRIFKKENGEFKIEYDRTFEWYFYALLKDDSAIEEVKKITAERHGTVVTVKRVEKVQKKFLGRPVEVWKLYFTHIQDIPAIRDKIREHPAVIDIYEYDIPFAKRYLIDKGLVPMEGDEELKMLAFDIETLYHEGEEFAEGPILMISYADEEGARVITWKNVDLPYVDVVSTEREMIKRFLRVVKEKDPDVLITYNGDNFDFAYLKKRCEKLGINFALGRDGSEPKIQRMGDRFAVEVKGRIHFDLYPVIRRTINLPTYTLEAVYEAVFGQPKEKVYAEEITTAWETGENLERVARYSMEDAKVTYELGKEFLPMEAQLSRLIGQSLWDVSRSSTGNLVEWFLLRKAYERNELAPNKPDEKELARRRQSYEGGYVKEPERGLWENIVYLDFRSLYPSIIITHNVSPDTLNREGCKEYDVAPQVGHRFCKDFPGFIPSLLGDLLEERQKIKKKMKATIDPIERKLLDYRQRAIKILANSYYGYYGYARARWYCKECAESVTAWGREYITMTIKEIEEKYGFKVIYSDTDGFFATIPGADAETVKKKAMEFLKYINAKLPGALELEYEGFYKRGFFVTKKKYAVIDEEGKITTRGLEIVRRDWSEIAKETQARVLEALLKDGDVEKAVRIVKEVTEKLSKYEVPPEKLVIHEQITRDLKDYKATGPHVAVAKRLAARGVKIRPGTVISYIVLKGSGRIGDRAIPFDEFDPTKHKYDAEYYIENQVLPAVERILRAFGYRKEDLRYQKTRQVGLSAWLKPKGT

SEQ ID NO: 1076 - protein, 774 aa, synthetic construct
MILDTDYITEDGKPVLRIFKKENGEFKIEYDRTFEWYFYALLKDDSAIEEVKKITAERHGTVVTVKRVEKVQKKFLGRPVEVWKLYFTHIQDIPAIADKIREHPAVIDIYEYDIPFAKRYLIDKGLVPMEGDEELKMLAFDIETLYHEGEEFAEGPILMISYADEEGARVITWKNVDLPYVDVVSTEREMIKRFLRVVKEKDPDVLITYNGDNFDFAYLKKRCEKLGINFALGRDGSEPKIQRMGDRFAVEVKGRIHFDLYPVIRRTINLPTYTLEAVYEAVFGQPKEKVYAEEITTAWETGENLERVARYSMEDAKVTYELGKEFLPMEAQLSRLIGQSLWDVSRSSTGNLVEWFLLRKAYERNELAPNKPDEKELARRRQSYEGGYVKEPERGLWENIVYLDFRSLYPSIIITHNVSPDTLNREGCKEYDVAPQVGHRFCKDFPGFIPSLLGDLLEERQKIKKKMKATIDPIERKLLDYRQRAIKILANSYYGYYGYARARWYCKECAESVTAWGREYITMTIKEIEEKYGFKVIYSDTDGFFATIPGADAETVKKKAMEFLKYINAKLPGALELEYEGFYKRGFFVTKKKYAVIDEEGKITTRGLEIVRRDWSEIAKETQARVLEALLKDGDVEKAVRIVKEVTEKLSKYEVPPEKLVIHEQITRDLKDYKATGPHVAVAKRLAARGVKIRPGTVISYIVLKGSGRIGDRAIPFDEFDPTKHKYDAEYYIENQVLPAVERILRAFGYRKEDLRYQKTRQVGLSAWLKPKGT

SEQ ID NO: 1077 - protein, 774 aa, synthetic construct
MILDTDYITEDGKPVLRIFKKENGEFKIEYDRTFEWYFYALLKDDSAIEEVKKITAERHGTVVTVKRVEKVQKKFLGRPVEVWKLYFTHWQDVPAIRDKIREHPAVIDIYEYDIPFAKRYLIDKGLVPMEGDEELKMLAFDIETLYHEGEEFAEGPILMISYADEEGARVITWKNVDLPYVDVVSTEREMIKRFLRVVKEKDPDVLITYNGDNFDFAYLKKRCEKLGINFALGRDGSEPKIQRMGDRFAVEVKGRIHFDLYPVIRRTINLPTYTLEAVYEAVFGQPKEKVYAEEITTAWETGENLERVARYSMEDAKVTYELGKEFLPMEAQLSRLIGQSLWDVSRSSTGNLVEWFLLRKAYERNELAPNKPDEKELARRRQSYEGGYVKEPERGLWENIVYLDFRSLYPSIIITHNVSPDTLNREGCKEYDVAPQVGHRFCKDFPGFIPSLLGDLLEERQKIKKKMKATIDPIERKLLDYRQRAIKILANSYYGYYGYARARWYCKECAESVTAWGREYITMTIKEIEEKYGFKVIYSDTDGFFATIPGADAETVKKKAMEFLKYINAKLPGALELEYEGFYKRGFFVTKKKYAVIDEEGKITTRGLEIVRRDWSEIAKETQARVLEALLKDGDVEKAVRIVKEVTEKLSKYEVPPEKLVIHEQITRDLKDYKATGPHVAVAKRLAARGVKIRPGTVISYIVLKGSGRIGDRAIPFDEFDPTKHKYDAEYYIENQVLPAVERILRAFGYRKEDLRYQKTRQVGLSAWLKPKGT

SEQ ID NO: 1078 - protein, 774 aa, synthetic construct
MILDTDYITEDGKPVLRIFKKENGEFKIEYDRTFEWYFYALLKDDSAIEEVKKITAERHGTVVTVKRVEKVQKKFLGRPVEVWKLYFTHWQDVPAIADKIREHPAVIDIYEYDIPFAKRYLIDKGLVPMEGDEELKMLAFDIETLYHEGEEFAEGPILMISYADEEGARVITWKNVDLPYVDVVSTEREMIKRFLRVVKEKDPDVLITYNGDNFDFAYLKKRCEKLGINFALGRDGSEPKIQRMGDRFAVEVKGRIHFDLYPVIRRTINLPTYTLEAVYEAVFGQPKEKVYAEEITTAWETGENLERVARYSMEDAKVTYELGKEFLPMEAQLSRLIGQSLWDVSRSSTGNLVEWFLLRKAYERNELAPNKPDEKELARRRQSYEGGYVKEPERGLWENIVYLDFRSLYPSIIITHNVSPDTLNREGCKEYDVAPQVGHRFCKDFPGFIPSLLGDLLEERQKIKKKMKATIDPIERKLLDYRQRAIKILANSYYGYYGYARARWYCKECAESVTAWGREYITMTIKEIEEKYGFKVIYSDTDGFFATIPGADAETVKKKAMEFLKYINAKLPGALELEYEGFYKRGFFVTKKKYAVIDEEGKITTRGLEIVRRDWSEIAKETQARVLEALLKDGDVEKAVRIVKEVTEKLSKYEVPPEKLVIHEQITRDLKDYKATGPHVAVAKRLAARGVKIRPGTVISYIVLKGSGRIGDRAIPFDEFDPTKHKYDAEYYIENQVLPAVERILRAFGYRKEDLRYQKTRQVGLSAWLKPKGT

SEQ ID NO: 1079 - protein, 774 aa, synthetic construct
MILDTDYITEDGKPVLRIFKKENGEFKIEYDRTFEWYFYALLKDDSAIEEVKKITAERHGTVVTVKRVEKVQKKFLGRPVEVWKLYFTHWQDIPAIRDKIREHPAVIDIYEYDIPFAKRYLIDKGLVPMEGDEELKMLAFDIETLYHEGEEFAEGPILMISYADEEGARVITWKNVDLPYVDVVSTEREMIKRFLRVVKEKDPDVLITYNGDNFDFAYLKKRCEKLGINFALGRDGSEPKIQRMGDRFAVEVKGRIHFDLYPVIRRTINLPTYTLEAVYEAVFGQPKEKVYAEEITTAWETGENLERVARYSMEDAKVTYELGKEFLPMEAQLSRLIGQSLWDVSRSSTGNLVEWFLLRKAYERNELAPNKPDEKELARRRQSYEGGYVKEPERGLWENIVYLDFRSLYPSIIITHNVSPDTLNREGCKEYDVAPQVGHRFCKDFPGFIPSLLGDLLEERQKIKKKMKATIDPIERKLLDYRQRAIKILANSYYGYYGYARARWYCKECAESVTAWGREYITMTIKEIEEKYGFKVIYSDTDGFFATIPGADAETVKKKAMEFLKYINAKLPGALELEYEGFYKRGFFVTKKKYAVIDEEGKITTRGLEIVRRDWSEIAKETQARVLEALLKDGDVEKAVRIVKEVTEKLSKYEVPPEKLVIHEQITRDLKDYKATGPHVAVAKRLAARGVKIRPGTVISYIVLKGSGRIGDRAIPFDEFDPTKHKYDAEYYIENQVLPAVERILRAFGYRKEDLRYQKTRQVGLSAWLKPKGT

SEQ ID NO: 1080 - protein, 774 aa, synthetic construct
MILDTDYITEDGKPVLRIFKKENGEFKIEYDRTFEWYFYALLKDDSAIEEVKKITAERHGTVVTVKRVEKVQKKFLGRPVEVWKLYFTHWQDIPAIADKIREHPAVIDIYEYDIPFAKRYLIDKGLVPMEGDEELKMLAFDIETLYHEGEEFAEGPILMISYADEEGARVITWKNVDLPYVDVVSTEREMIKRFLRVVKEKDPDVLITYNGDNFDFAYLKKRCEKLGINFALGRDGSEPKIQRMGDRFAVEVKGRIHFDLYPVIRRTINLPTYTLEAVYEAVFGQPKEKVYAEEITTAWETGENLERVARYSMEDAKVTYELGKEFLPMEAQLSRLIGQSLWDVSRSSTGNLVEWFLLRKAYERNELAPNKPDEKELARRRQSYEGGYVKEPERGLWENIVYLDFRSLYPSIIITHNVSPDTLNREGCKEYDVAPQVGHRFCKDFPGFIPSLLGDLLEERQKIKKKMKATIDPIERKLLDYRQRAIKILANSYYGYYGYARARWYCKECAESVTAWGREYITMTIKEIEEKYGFKVIYSDTDGFFATIPGADAETVKKKAMEFLKYINAKLPGALELEYEGFYKRGFFVTKKKYAVIDEEGKITTRGLEIVRRDWSEIAKETQARVLEALLKDGDVEKAVRIVKEVTEKLSKYEVPPEKLVIHEQITRDLKDYKATGPHVAVAKRLAARGVKIRPGTVISYIVLKGSGRIGDRAIPFDEFDPTKHKYDAEYYIENQVLPAVERILRAFGYRKEDLRYQKTRQVGLSAWLKPKGT

SEQ ID NO: 1081 - protein, 774 aa, synthetic construct
MILDTDYITEDGKPVLRIFKKENGEFKIEYDRTFEWYFYALLKDDSAIEEVKKITAERHGTVVTVKRVEKVQKKFLGRPVEVWKLYFTHYQDRPAIADKIREHPAVIDIYEYDIPFAKRYLIDKGLVPMEGDEELKMLAFDIETLYHEGEEFAEGPILMISYADEEGARVITWKNVDLPYVDVVSTEREMIKRFLRVVKEKDPDVLITYNGDNFDFAYLKKRCEKLGINFALGRDGSEPKIQRMGDRFAVEVKGRIHFDLYPVIRRTINLPTYTLEAVYEAVFGQPKEKVYAEEITTAWETGENLERVARYSMEDAKVTYELGKEFLPMEAQLSRLIGQSLWDVSRSSTGNLVEWFLLRKAYERNELAPNKPDEKELARRRQSYEGGYVKEPERGLWENIVYLDFRSLYPSIIITHNVSPDTLNREGCKEYDVAPQVGHRFCKDFPGFIPSLLGDLLEERQKIKKKMKATIDPIERKLLDYRQRAIKILANSYYGYYGYARARWYCKECAESVTAWGREYITMTIKEIEEKYGFKVIYSDTDGFFATIPGADAETVKKKAMEFLKYINAKLPGALELEYEGFYKRGFFVTKKKYAVIDEEGKITTRGLEIVRRDWSEIAKETQARVLEALLKDGDVEKAVRIVKEVTEKLSKYEVPPEKLVIHEQITRDLKDYKATGPHVAVAKRLAARGVKIRPGTVISYIVLKGSGRIGDRAIPFDEFDPTKHKYDAEYYIENQVLPAVERILRAFGYRKEDLRYQKTRQVGLSAWLKPKGT

SEQ ID NO: 1082 - protein, 774 aa, synthetic construct
MILDTDYITEDGKPVLRIFKKENGEFKIEYDRTFEWYFYALLKDDSAIEEVKKITAERHGTVVTVKRVEKVQKKFLGRPVEVWKLYFTHPQDVPAIADKIREHPAVIDIYEYDIPFAKRYLIDKGLVPMEGDEELKMLAFDIETLYHEGEEFAEGPILMISYADEEGARVITWKNVDLPYVDVVSTEREMIKRFLRVVKEKDPDVLITYNGDNFDFAYLKKRCEKLGINFALGRDGSEPKIQRMGDRFAVEVKGRIHFDLYPVIRRTINLPTYTLEAVYEAVFGQPKEKVYAEEITTAWETGENLERVARYSMEDAKVTYELGKEFLPMEAQLSRLIGQSLWDVSRSSTGNLVEWFLLRKAYERNELAPNKPDEKELARRRQSYEGGYVKEPERGLWENIVYLDFRSLYPSIIITHNVSPDTLNREGCKEYDVAPQVGHRFCKDFPGFIPSLLGDLLEERQKIKKKMKATIDPIERKLLDYRQRAIKILANSYYGYYGYARARWYCKECAESVTAWGREYITMTIKEIEEKYGFKVIYSDTDGFFATIPGADAETVKKKAMEFLKYINAKLPGALELEYEGFYKRGFFVTKKKYAVIDEEGKITTRGLEIVRRDWSEIAKETQARVLEALLKDGDVEKAVRIVKEVTEKLSKYEVPPEKLVIHEQITRDLKDYKATGPHVAVAKRLAARGVKIRPGTVISYIVLKGSGRIGDRAIPFDEFDPTKHKYDAEYYIENQVLPAVERILRAFGYRKEDLRYQKTRQVGLSAWLKPKGT

SEQ ID NO: 1083 - protein, 774 aa, synthetic construct
MILDTDYITEDGKPVLRIFKKENGEFKIEYDRTFEWYFYALLKDDSAIEEVKKITAERHGTVVTVKRVEKVQKKFLGRPVEVWKLYFTHPQDVPAIWDKIREHPAVIDIYEYDIPFAKRYLIDKGLVPMEGDEELKMLAFDIETLYHEGEEFAEGPILMISYADEEGARVITWKNVDLPYVDVVSTEREMIKRFLRVVKEKDPDVLITYNGDNFDFAYLKKRCEKLGINFALGRDGSEPKIQRMGDRFAVEVKGRIHFDLYPVIRRTINLPTYTLEAVYEAVFGQPKEKVYAEEITTAWETGENLERVARYSMEDAKVTYELGKEFLPMEAQLSRLIGQSLWDVSRSSTGNLVEWFLLRKAYERNELAPNKPDEKELARRRQSYEGGYVKEPERGLWENIVYLDFRSLYPSIIITHNVSPDTLNREGCKEYDVAPQVGHRFCKDFPGFIPSLLGDLLEERQKIKKKMKATIDPIERKLLDYRQRAIKILANSYYGYYGYARARWYCKECAESVTAWGREYITMTIKEIEEKYGFKVIYSDTDGFFATIPGADAETVKKKAMEFLKYINAKLPGALELEYEGFYKRGFFVTKKKYAVIDEEGKITTRGLEIVRRDWSEIAKETQARVLEALLKDGDVEKAVRIVKEVTEKLSKYEVPPEKLVIHEQITRDLKDYKATGPHVAVAKRLAARGVKIRPGTVISYIVLKGSGRIGDRAIPFDEFDPTKHKYDAEYYIENQVLPAVERILRAFGYRKEDLRYQKTRQVGLSAWLKPKGT

SEQ ID NO: 1084 - protein, 774 aa, synthetic construct
MILDTDYITEDGKPVLRIFKKENGEFKIEYDRTFEWYFYALLKDDSAIEEVKKITAERHGTVVTVKRVEKVQKKFLGRPVEVWKLYFTHPQDIPAIRDKIREHPAVIDIYEYDIPFAKRYLIDKGLVPMEGDEELKMLAFDIETLYHEGEEFAEGPILMISYADEEGARVITWKNVDLPYVDVVSTEREMIKRFLRVVKEKDPDVLITYNGDNFDFAYLKKRCEKLGINFALGRDGSEPKIQRMGDRFAVEVKGRIHFDLYPVIRRTINLPTYTLEAVYEAVFGQPKEKVYAEEITTAWETGENLERVARYSMEDAKVTYELGKEFLPMEAQLSRLIGQSLWDVSRSSTGNLVEWFLLRKAYERNELAPNKPDEKELARRRQSYEGGYVKEPERGLWENIVYLDFRSLYPSIIITHNVSPDTLNREGCKEYDVAPQVGHRFCKDFPGFIPSLLGDLLEERQKIKKKMKATIDPIERKLLDYRQRAIKILANSYYGYYGYARARWYCKECAESVTAWGREYITMTIKEIEEKYGFKVIYSDTDGFFATIPGADAETVKKKAMEFLKYINAKLPGALELEYEGFYKRGFFVTKKKYAVIDEEGKITTRGLEIVRRDWSEIAKETQARVLEALLKDGDVEKAVRIVKEVTEKLSKYEVPPEKLVIHEQITRDLKDYKATGPHVAVAKRLAARGVKIRPGTVISYIVLKGSGRIGDRAIPFDEFDPTKHKYDAEYYIENQVLPAVERILRAFGYRKEDLRYQKTRQVGLSAWLKPKGT

SEQ ID NO: 1085 - protein, 774 aa, synthetic construct
MILDTDYITEDGKPVLRIFKKENGEFKIEYDRTFEWYFYALLKDDSAIEEVKKITAERHGTVVTVKRVEKVQKKFLGRPVEVWKLYFTHPQDIPAIADKIREHPAVIDIYEYDIPFAKRYLIDKGLVPMEGDEELKMLAFDIETLYHEGEEFAEGPILMISYADEEGARVITWKNVDLPYVDVVSTEREMIKRFLRVVKEKDPDVLITYNGDNFDFAYLKKRCEKLGINFALGRDGSEPKIQRMGDRFAVEVKGRIHFDLYPVIRRTINLPTYTLEAVYEAVFGQPKEKVYAEEITTAWETGENLERVARYSMEDAKVTYELGKEFLPMEAQLSRLIGQSLWDVSRSSTGNLVEWFLLRKAYERNELAPNKPDEKELARRRQSYEGGYVKEPERGLWENIVYLDFRSLYPSIIITHNVSPDTLNREGCKEYDVAPQVGHRFCKDFPGFIPSLLGDLLEERQKIKKKMKATIDPIERKLLDYRQRAIKILANSYYGYYGYARARWYCKECAESVTAWGREYITMTIKEIEEKYGFKVIYSDTDGFFATIPGADAETVKKKAMEFLKYINAKLPGALELEYEGFYKRGFFVTKKKYAVIDEEGKITTRGLEIVRRDWSEIAKETQARVLEALLKDGDVEKAVRIVKEVTEKLSKYEVPPEKLVIHEQITRDLKDYKATGPHVAVAKRLAARGVKIRPGTVISYIVLKGSGRIGDRAIPFDEFDPTKHKYDAEYYIENQVLPAVERILRAFGYRKEDLRYQKTRQVGLSAWLKPKGT

SEQ ID NO: 1086 - protein, 774 aa, synthetic construct
MILDTDYITEDGKPVLRIFKKENGEFKIEYDRTFEWYFYALLKDDSAIEEVKKITAERHGTVVTVKRVEKVQKKFLGRPVEVWKLYFTHPQDIPAIFDKIREHPAVIDIYEYDIPFAKRYLIDKGLVPMEGDEELKMLAFDIETLYHEGEEFAEGPILMISYADEEGARVITWKNVDLPYVDVVSTEREMIKRFLRVVKEKDPDVLITYNGDNFDFAYLKKRCEKLGINFALGRDGSEPKIQRMGDRFAVEVKGRIHFDLYPVIRRTINLPTYTLEAVYEAVFGQPKEKVYAEEITTAWETGENLERVARYSMEDAKVTYELGKEFLPMEAQLSRLIGQSLWDVSRSSTGNLVEWFLLRKAYERNELAPNKPDEKELARRRQSYEGGYVKEPERGLWENIVYLDFRSLYPSIIITHNVSPDTLNREGCKEYDVAPQVGHRFCKDFPGFIPSLLGDLLEERQKIKKKMKATIDPIERKLLDYRQRAIKILANSYYGYYGYARARWYCKECAESVTAWGREYITMTIKEIEEKYGFKVIYSDTDGFFATIPGADAETVKKKAMEFLKYINAKLPGALELEYEGFYKRGFFVTKKKYAVIDEEGKITTRGLEIVRRDWSEIAKETQARVLEALLKDGDVEKAVRIVKEVTEKLSKYEVPPEKLVIHEQITRDLKDYKATGPHVAVAKRLAARGVKIRPGTVISYIVLKGSGRIGDRAIPFDEFDPTKHKYDAEYYIENQVLPAVERILRAFGYRKEDLRYQKTRQVGLSAWLKPKGT

SEQ ID NO: 1087 - protein, 774 aa, synthetic construct
MILDTDYITEDGKPVLRIFKKENGEFKIEYDRTFEWYFYALLKDDSAIEEVKKITAERHGTVVTVKRVEKVQKKFLGRPVEVWKLYFTHPQDIPAIHDKIREHPAVIDIYEYDIPFAKRYLIDKGLVPMEGDEELKMLAFDIETLYHEGEEFAEGPILMISYADEEGARVITWKNVDLPYVDVVSTEREMIKRFLRVVKEKDPDVLITYNGDNFDFAYLKKRCEKLGINFALGRDGSEPKIQRMGDRFAVEVKGRIHFDLYPVIRRTINLPTYTLEAVYEAVFGQPKEKVYAEEITTAWETGENLERVARYSMEDAKVTYELGKEFLPMEAQLSRLIGQSLWDVSRSSTGNLVEWFLLRKAYERNELAPNKPDEKELARRRQSYEGGYVKEPERGLWENIVYLDFRSLYPSIIITHNVSPDTLNREGCKEYDVAPQVGHRFCKDFPGFIPSLLGDLLEERQKIKKKMKATIDPIERKLLDYRQRAIKILANSYYGYYGYARARWYCKECAESVTAWGREYITMTIKEIEEKYGFKVIYSDTDGFFATIPGADAETVKKKAMEFLKYINAKLPGALELEYEGFYKRGFFVTKKKYAVIDEEGKITTRGLEIVRRDWSEIAKETQARVLEALLKDGDVEKAVRIVKEVTEKLSKYEVPPEKLVIHEQITRDLKDYKATGPHVAVAKRLAARGVKIRPGTVISYIVLKGSGRIGDRAIPFDEFDPTKHKYDAEYYIENQVLPAVERILRAFGYRKEDLRYQKTRQVGLSAWLKPKGT

SEQ ID NO: 1088 - protein, 774 aa, synthetic construct
MILDTDYITEDGKPVLRIFKKENGEFKIEYDRTFEWYFYALLKDDSAIEEVKKITAERHGTVVTVKRVEKVQKKFLGRPVEVWKLYFTHPQDIPAIWDKIREHPAVIDIYEYDIPFAKRYLIDKGLVPMEGDEELKMLAFDIETLYHEGEEFAEGPILMISYADEEGARVITWKNVDLPYVDVVSTEREMIKRFLRVVKEKDPDVLITYNGDNFDFAYLKKRCEKLGINFALGRDGSEPKIQRMGDRFAVEVKGRIHFDLYPVIRRTINLPTYTLEAVYEAVFGQPKEKVYAEEITTAWETGENLERVARYSMEDAKVTYELGKEFLPMEAQLSRLIGQSLWDVSRSSTGNLVEWFLLRKAYERNELAPNKPDEKELARRRQSYEGGYVKEPERGLWENIVYLDFRSLYPSIIITHNVSPDTLNREGCKEYDVAPQVGHRFCKDFPGFIPSLLGDLLEERQKIKKKMKATIDPIERKLLDYRQRAIKILANSYYGYYGYARARWYCKECAESVTAWGREYITMTIKEIEEKYGFKVIYSDTDGFFATIPGADAETVKKKAMEFLKYINAKLPGALELEYEGFYKRGFFVTKKKYAVIDEEGKITTRGLEIVRRDWSEIAKETQARVLEALLKDGDVEKAVRIVKEVTEKLSKYEVPPEKLVIHEQITRDLKDYKATGPHVAVAKRLAARGVKIRPGTVISYIVLKGSGRIGDRAIPFDEFDPTKHKYDAEYYIENQVLPAVERILRAFGYRKEDLRYQKTRQVGLSAWLKPKGT

SEQ ID NO: 1089 - protein, 774 aa, synthetic construct
MILDTDYITEDGKPVLRIFKKENGEFKIEYDRTFEWYFYALLKDDSAIEEVKKITAERHGTVVTVKRVEKVQKKFLGRPVEVWKLYFTHPQDQPAIRDKIREHPAVIDIYEYDIPFAKRYLIDKGLVPMEGDEELKMLAFDIETLYHEGEEFAEGPILMISYADEEGARVITWKNVDLPYVDVVSTEREMIKRFLRVVKEKDPDVLITYNGDNFDFAYLKKRCEKLGINFALGRDGSEPKIQRMGDRFAVEVKGRIHFDLYPVIRRTINLPTYTLEAVYEAVFGQPKEKVYAEEITTAWETGENLERVARYSMEDAKVTYELGKEFLPMEAQLSRLIGQSLWDVSRSSTGNLVEWFLLRKAYERNELAPNKPDEKELARRRQSYEGGYVKEPERGLWENIVYLDFRSLYPSIIITHNVSPDTLNREGCKEYDVAPQVGHRFCKDFPGFIPSLLGDLLEERQKIKKKMKATIDPIERKLLDYRQRAIKILANSYYGYYGYARARWYCKECAESVTAWGREYITMTIKEIEEKYGFKVIYSDTDGFFATIPGADAETVKKKAMEFLKYINAKLPGALELEYEGFYKRGFFVTKKKYAVIDEEGKITTRGLEIVRRDWSEIAKETQARVLEALLKDGDVEKAVRIVKEVTEKLSKYEVPPEKLVIHEQITRDLKDYKATGPHVAVAKRLAARGVKIRPGTVISYIVLKGSGRIGDRAIPFDEFDPTKHKYDAEYYIENQVLPAVERILRAFGYRKEDLRYQKTRQVGLSAWLKPKGT

SEQ ID NO: 1090 - protein, 774 aa, synthetic construct
MILDTDYITEDGKPVLRIFKKENGEFKIEYDRTFEWYFYALLKDDSAIEEVKKITAERHGTVVTVKRVEKVQKKFLGRPVEVWKLYFTHPQDRPAIADKIREHPAVIDIYEYDIPFAKRYLIDKGLVPMEGDEELKMLAFDIETLYHEGEEFAEGPILMISYADEEGARVITWKNVDLPYVDVVSTEREMIKRFLRVVKEKDPDVLITYNGDNFDFAYLKKRCEKLGINFALGRDGSEPKIQRMGDRFAVEVKGRIHFDLYPVIRRTINLPTYTLEAVYEAVFGQPKEKVYAEEITTAWETGENLERVARYSMEDAKVTYELGKEFLPMEAQLSRLIGQSLWDVSRSSTGNLVEWFLLRKAYERNELAPNKPDEKELARRRQSYEGGYVKEPERGLWENIVYLDFRSLYPSIIITHNVSPDTLNREGCKEYDVAPQVGHRFCKDFPGFIPSLLGDLLEERQKIKKKMKATIDPIERKLLDYRQRAIKILANSYYGYYGYARARWYCKECAESVTAWGREYITMTIKEIEEKYGFKVIYSDTDGFFATIPGADAETVKKKAMEFLKYINAKLPGALELEYEGFYKRGFFVTKKKYAVIDEEGKITTRGLEIVRRDWSEIAKETQARVLEALLKDGDVEKAVRIVKEVTEKLSKYEVPPEKLVIHEQITRDLKDYKATGPHVAVAKRLAARGVKIRPGTVISYIVLKGSGRIGDRAIPFDEFDPTKHKYDAEYYIENQVLPAVERILRAFGYRKEDLRYQKTRQVGLSAWLKPKGT

SEQ ID NO: 1091 - protein, 774 aa, synthetic construct
MILDTDYITEDGKPVLRIFKKENGEFKIEYDRTFEPYFYALLKDDSAIEEVKKITAERHGTVVTVKRVEKVQKKFLGRPVEVWKLYFTHFQDVPAIRDKIREHPAVIDIYEYDIPFAKRYLIDKGLVPMEGDEELKMLAFDIETLYHEGEEFAEGPILMISYADEEGARVITWKNVDLPYVDVVSTEREMIKRFLRVVKEKDPDVLITYNGDNFDFAYLKKRCEKLGINFALGRDGSEPKIQRMGDRFAVEVKGRIHFDLYPVIRRTINLPTYTLEAVYEAVFGQPKEKVYAEEITTAWETGENLERVARYSMEDAKVTYELGKEFLPMEAQLSRLIGQSLWDVSRSSTGNLVEWFLLRKAYERNELAPNKPDEKELARRRQSYEGGYVKEPERGLWENIVYLDFRSLYPSIIITHNVSPDTLNREGCKEYDVAPQVGHRFCKDFPGFIPSLLGDLLEERQKIKKKMKATIDPIERKLLDYRQRAIKILANSYYGYYGYARARWYCKECAESVTAWGREYITMTIKEIEEKYGFKVIYSDTDGFFATIPGADAETVKKKAMEFLKYINAKLPGALELEYEGFYKRGFFVTKKKYAVIDEEGKITTRGLEIVRRDWSEIAKETQARVLEALLKDGDVEKAVRIVKEVTEKLSKYEVPPEKLVIHEQITRDLKDYKATGPHVAVAKRLAARGVKIRPGTVISYIVLKGSGRIGDRAIPFDEFDPTKHKYDAEYYIENQVLPAVERILRAFGYRKEDLRYQKTRQVGLSAWLKPKGT

SEQ ID NO: 1092 - protein, 774 aa, synthetic construct
MILDTDYITEDGKPVLRIFKKENGEFKIEYDRTFEPYFYALLKDDSAIEEVKKITAERHGTVVTVKRVEKVQKKFLGRPVEVWKLYFTHFQDVPAIADKIREHPAVIDIYEYDIPFAKRYLIDKGLVPMEGDEELKMLAFDIETLYHEGEEFAEGPILMISYADEEGARVITWKNVDLPYVDVVSTEREMIKRFLRVVKEKDPDVLITYNGDNFDFAYLKKRCEKLGINFALGRDGSEPKIQRMGDRFAVEVKGRIHFDLYPVIRRTINLPTYTLEAVYEAVFGQPKEKVYAEEITTAWETGENLERVARYSMEDAKVTYELGKEFLPMEAQLSRLIGQSLWDVSRSSTGNLVEWFLLRKAYERNELAPNKPDEKELARRRQSYEGGYVKEPERGLWENIVYLDFRSLYPSIIITHNVSPDTLNREGCKEYDVAPQVGHRFCKDFPGFIPSLLGDLLEERQKIKKKMKATIDPIERKLLDYRQRAIKILANSYYGYYGYARARWYCKECAESVTAWGREYITMTIKEIEEKYGFKVIYSDTDGFFATIPGADAETVKKKAMEFLKYINAKLPGALELEYEGFYKRGFFVTKKKYAVIDEEGKITTRGLEIVRRDWSEIAKETQARVLEALLKDGDVEKAVRIVKEVTEKLSKYEVPPEKLVIHEQITRDLKDYKATGPHVAVAKRLAARGVKIRPGTVISYIVLKGSGRIGDRAIPFDEFDPTKHKYDAEYYIENQVLPAVERILRAFGYRKEDLRYQKTRQVGLSAWLKPKGT

SEQ ID NO: 1093 - protein, 774 aa, synthetic construct
MILDTDYITEDGKPVLRIFKKENGEFKIEYDRTFEPYFYALLKDDSAIEEVKKITAERHGTVVTVKRVEKVQKKFLGRPVEVWKLYFTHFQDVPAIFDKIREHPAVIDIYEYDIPFAKRYLIDKGLVPMEGDEELKMLAFDIETLYHEGEEFAEGPILMISYADEEGARVITWKNVDLPYVDVVSTEREMIKRFLRVVKEKDPDVLITYNGDNFDFAYLKKRCEKLGINFALGRDGSEPKIQRMGDRFAVEVKGRIHFDLYPVIRRTINLPTYTLEAVYEAVFGQPKEKVYAEEITTAWETGENLERVARYSMEDAKVTYELGKEFLPMEAQLSRLIGQSLWDVSRSSTGNLVEWFLLRKAYERNELAPNKPDEKELARRRQSYEGGYVKEPERGLWENIVYLDFRSLYPSIIITHNVSPDTLNREGCKEYDVAPQVGHRFCKDFPGFIPSLLGDLLEERQKIKKKMKATIDPIERKLLDYRQRAIKILANSYYGYYGYARARWYCKECAESVTAWGREYITMTIKEIEEKYGFKVIYSDTDGFFATIPGADAETVKKKAMEFLKYINAKLPGALELEYEGFYKRGFFVTKKKYAVIDEEGKITTRGLEIVRRDWSEIAKETQARVLEALLKDGDVEKAVRIVKEVTEKLSKYEVPPEKLVIHEQITRDLKDYKATGPHVAVAKRLAARGVKIRPGTVISYIVLKGSGRIGDRAIPFDEFDPTKHKYDAEYYIENQVLPAVERILRAFGYRKEDLRYQKTRQVGLSAWLKPKGT

SEQ ID NO: 1094 - protein, 774 aa, synthetic construct
MILDTDYITEDGKPVLRIFKKENGEFKIEYDRTFEPYFYALLKDDSAIEEVKKITAERHGTVVTVKRVEKVQKKFLGRPVEVWKLYFTHFQDVPAIHDKIREHPAVIDIYEYDIPFAKRYLIDKGLVPMEGDEELKMLAFDIETLYHEGEEFAEGPILMISYADEEGARVITWKNVDLPYVDVVSTEREMIKRFLRVVKEKDPDVLITYNGDNFDFAYLKKRCEKLGINFALGRDGSEPKIQRMGDRFAVEVKGRIHFDLYPVIRRTINLPTYTLEAVYEAVFGQPKEKVYAEEITTAWETGENLERVARYSMEDAKVTYELGKEFLPMEAQLSRLIGQSLWDVSRSSTGNLVEWFLLRKAYERNELAPNKPDEKELARRRQSYEGGYVKEPERGLWENIVYLDFRSLYPSIIITHNVSPDTLNREGCKEYDVAPQVGHRFCKDFPGFIPSLLGDLLEERQKIKKKMKATIDPIERKLLDYRQRAIKILANSYYGYYGYARARWYCKECAESVTAWGREYITMTIKEIEEKYGFKVIYSDTDGFFATIPGADAETVKKKAMEFLKYINAKLPGALELEYEGFYKRGFFVTKKKYAVIDEEGKITTRGLEIVRRDWSEIAKETQARVLEALLKDGDVEKAVRIVKEVTEKLSKYEVPPEKLVIHEQITRDLKDYKATGPHVAVAKRLAARGVKIRPGTVISYIVLKGSGRIGDRAIPFDEFDPTKHKYDAEYYIENQVLPAVERILRAFGYRKEDLRYQKTRQVGLSAWLKPKGT

SEQ ID NO: 1095 - protein, 774 aa, synthetic construct
MILDTDYITEDGKPVLRIFKKENGEFKIEYDRTFEPYFYALLKDDSAIEEVKKITAERHGTVVTVKRVEKVQKKFLGRPVEVWKLYFTHFQDVPAIWDKIREHPAVIDIYEYDIPFAKRYLIDKGLVPMEGDEELKMLAFDIETLYHEGEEFAEGPILMISYADEEGARVITWKNVDLPYVDVVSTEREMIKRFLRVVKEKDPDVLITYNGDNFDFAYLKKRCEKLGINFALGRDGSEPKIQRMGDRFAVEVKGRIHFDLYPVIRRTINLPTYTLEAVYEAVFGQPKEKVYAEEITTAWETGENLERVARYSMEDAKVTYELGKEFLPMEAQLSRLIGQSLWDVSRSSTGNLVEWFLLRKAYERNELAPNKPDEKELARRRQSYEGGYVKEPERGLWENIVYLDFRSLYPSIIITHNVSPDTLNREGCKEYDVAPQVGHRFCKDFPGFIPSLLGDLLEERQKIKKKMKATIDPIERKLLDYRQRAIKILANSYYGYYGYARARWYCKECAESVTAWGREYITMTIKEIEEKYGFKVIYSDTDGFFATIPGADAETVKKKAMEFLKYINAKLPGALELEYEGFYKRGFFVTKKKYAVIDEEGKITTRGLEIVRRDWSEIAKETQARVLEALLKDGDVEKAVRIVKEVTEKLSKYEVPPEKLVIHEQITRDLKDYKATGPHVAVAKRLAARGVKIRPGTVISYIVLKGSGRIGDRAIPFDEFDPTKHKYDAEYYIENQVLPAVERILRAFGYRKEDLRYQKTRQVGLSAWLKPKGT

SEQ ID NO: 1096 - protein, 774 aa, synthetic construct
MILDTDYITEDGKPVLRIFKKENGEFKIEYDRTFEPYFYALLKDDSAIEEVKKITAERHGTVVTVKRVEKVQKKFLGRPVEVWKLYFTHFQDVPAIRDKIREHPAVIDIYEYDIPFAKQYLIDKGLVPMEGDEELKMLAFDIETLYHEGEEFAEGPILMISYADEEGARVITWKNVDLPYVDVVSTEREMIKRFLRVVKEKDPDVLITYNGDNFDFAYLKKRCEKLGINFALGRDGSEPKIQRMGDRFAVEVKGRIHFDLYPVIRRTINLPTYTLEAVYEAVFGQPKEKVYAEEITTAWETGENLERVARYSMEDAKVTYELGKEFLPMEAQLSRLIGQSLWDVSRSSTGNLVEWFLLRKAYERNELAPNKPDEKELARRRQSYEGGYVKEPERGLWENIVYLDFRSLYPSIIITHNVSPDTLNREGCKEYDVAPQVGHRFCKDFPGFIPSLLGDLLEERQKIKKKMKATIDPIERKLLDYRQRAIKILANSYYGYYGYARARWYCKECAESVTAWGREYITMTIKEIEEKYGFKVIYSDTDGFFATIPGADAETVKKKAMEFLKYINAKLPGALELEYEGFYKRGFFVTKKKYAVIDEEGKITTRGLEIVRRDWSEIAKETQARVLEALLKDGDVEKAVRIVKEVTEKLSKYEVPPEKLVIHEQITRDLKDYKATGPHVAVAKRLAARGVKIRPGTVISYIVLKGSGRIGDRAIPFDEFDPTKHKYDAEYYIENQVLPAVERILRAFGYRKEDLRYQKTRQVGLSAWLKPKGT

SEQ ID NO: 1097 - protein, 774 aa, synthetic construct
MILDTDYITEDGKPVLRIFKKENGEFKIEYDRTFEPYFYALLKDDSAIEEVKKITAERHGTVVTVKRVEKVQKKFLGRPVEVWKLYFTHFQDIPAIRDKIREHPAVIDIYEYDIPFAKRYLIDKGLVPMEGDEELKMLAFDIETLYHEGEEFAEGPILMISYADEEGARVITWKNVDLPYVDVVSTEREMIKRFLRVVKEKDPDVLITYNGDNFDFAYLKKRCEKLGINFALGRDGSEPKIQRMGDRFAVEVKGRIHFDLYPVIRRTINLPTYTLEAVYEAVFGQPKEKVYAEEITTAWETGENLERVARYSMEDAKVTYELGKEFLPMEAQLSRLIGQSLWDVSRSSTGNLVEWFLLRKAYERNELAPNKPDEKELARRRQSYEGGYVKEPERGLWENIVYLDFRSLYPSIIITHNVSPDTLNREGCKEYDVAPQVGHRFCKDFPGFIPSLLGDLLEERQKIKKKMKATIDPIERKLLDYRQRAIKILANSYYGYYGYARARWYCKECAESVTAWGREYITMTIKEIEEKYGFKVIYSDTDGFFATIPGADAETVKKKAMEFLKYINAKLPGALELEYEGFYKRGFFVTKKKYAVIDEEGKITTRGLEIVRRDWSEIAKETQARVLEALLKDGDVEKAVRIVKEVTEKLSKYEVPPEKLVIHEQITRDLKDYKATGPHVAVAKRLAARGVKIRPGTVISYIVLKGSGRIGDRAIPFDEFDPTKHKYDAEYYIENQVLPAVERILRAFGYRKEDLRYQKTRQVGLSAWLKPKGT

SEQ ID NO: 1098 - protein, 774 aa, synthetic construct
MILDTDYITEDGKPVLRIFKKENGEFKIEYDRTFEPYFYALLKDDSAIEEVKKITAERHGTVVTVKRVEKVQKKFLGRPVEVWKLYFTHFQDIPAIADKIREHPAVIDIYEYDIPFAKRYLIDKGLVPMEGDEELKMLAFDIETLYHEGEEFAEGPILMISYADEEGARVITWKNVDLPYVDVVSTEREMIKRFLRVVKEKDPDVLITYNGDNFDFAYLKKRCEKLGINFALGRDGSEPKIQRMGDRFAVEVKGRIHFDLYPVIRRTINLPTYTLEAVYEAVFGQPKEKVYAEEITTAWETGENLERVARYSMEDAKVTYELGKEFLPMEAQLSRLIGQSLWDVSRSSTGNLVEWFLLRKAYERNELAPNKPDEKELARRRQSYEGGYVKEPERGLWENIVYLDFRSLYPSIIITHNVSPDTLNREGCKEYDVAPQVGHRFCKDFPGFIPSLLGDLLEERQKIKKKMKATIDPIERKLLDYRQRAIKILANSYYGYYGYARARWYCKECAESVTAWGREYITMTIKEIEEKYGFKVIYSDTDGFFATIPGADAETVKKKAMEFLKYINAKLPGALELEYEGFYKRGFFVTKKKYAVIDEEGKITTRGLEIVRRDWSEIAKETQARVLEALLKDGDVEKAVRIVKEVTEKLSKYEVPPEKLVIHEQITRDLKDYKATGPHVAVAKRLAARGVKIRPGTVISYIVLKGSGRIGDRAIPFDEFDPTKHKYDAEYYIENQVLPAVERILRAFGYRKEDLRYQKTRQVGLSAWLKPKGT

SEQ ID NO: 1099 - protein, 774 aa, synthetic construct
MILDTDYITEDGKPVLRIFKKENGEFKIEYDRTFEPYFYALLKDDSAIEEVKKITAERHGTVVTVKRVEKVQKKFLGRPVEVWKLYFTHFQDIPAIFDKIREHPAVIDIYEYDIPFAKRYLIDKGLVPMEGDEELKMLAFDIETLYHEGEEFAEGPILMISYADEEGARVITWKNVDLPYVDVVSTEREMIKRFLRVVKEKDPDVLITYNGDNFDFAYLKKRCEKLGINFALGRDGSEPKIQRMGDRFAVEVKGRIHFDLYPVIRRTINLPTYTLEAVYEAVFGQPKEKVYAEEITTAWETGENLERVARYSMEDAKVTYELGKEFLPMEAQLSRLIGQSLWDVSRSSTGNLVEWFLLRKAYERNELAPNKPDEKELARRRQSYEGGYVKEPERGLWENIVYLDFRSLYPSIIITHNVSPDTLNREGCKEYDVAPQVGHRFCKDFPGFIPSLLGDLLEERQKIKKKMKATIDPIERKLLDYRQRAIKILANSYYGYYGYARARWYCKECAESVTAWGREYITMTIKEIEEKYGFKVIYSDTDGFFATIPGADAETVKKKAMEFLKYINAKLPGALELEYEGFYKRGFFVTKKKYAVIDEEGKITTRGLEIVRRDWSEIAKETQARVLEALLKDGDVEKAVRIVKEVTEKLSKYEVPPEKLVIHEQITRDLKDYKATGPHVAVAKRLAARGVKIRPGTVISYIVLKGSGRIGDRAIPFDEFDPTKHKYDAEYYIENQVLPAVERILRAFGYRKEDLRYQKTRQVGLSAWLKPKGT

SEQ ID NO: 1100 - protein, 774 aa, synthetic construct
MILDTDYITEDGKPVLRIFKKENGEFKIEYDRTFEPYFYALLKDDSAIEEVKKITAERHGTVVTVKRVEKVQKKFLGRPVEVWKLYFTHFQDIPAIHDKIREHPAVIDIYEYDIPFAKRYLIDKGLVPMEGDEELKMLAFDIETLYHEGEEFAEGPILMISYADEEGARVITWKNVDLPYVDVVSTEREMIKRFLRVVKEKDPDVLITYNGDNFDFAYLKKRCEKLGINFALGRDGSEPKIQRMGDRFAVEVKGRIHFDLYPVIRRTINLPTYTLEAVYEAVFGQPKEKVYAEEITTAWETGENLERVARYSMEDAKVTYELGKEFLPMEAQLSRLIGQSLWDVSRSSTGNLVEWFLLRKAYERNELAPNKPDEKELARRRQSYEGGYVKEPERGLWENIVYLDFRSLYPSIIITHNVSPDTLNREGCKEYDVAPQVGHRFCKDFPGFIPSLLGDLLEERQKIKKKMKATIDPIERKLLDYRQRAIKILANSYYGYYGYARARWYCKECAESVTAWGREYITMTIKEIEEKYGFKVIYSDTDGFFATIPGADAETVKKKAMEFLKYINAKLPGALELEYEGFYKRGFFVTKKKYAVIDEEGKITTRGLEIVRRDWSEIAKETQARVLEALLKDGDVEKAVRIVKEVTEKLSKYEVPPEKLVIHEQITRDLKDYKATGPHVAVAKRLAARGVKIRPGTVISYIVLKGSGRIGDRAIPFDEFDPTKHKYDAEYYIENQVLPAVERILRAFGYRKEDLRYQKTRQVGLSAWLKPKGT

SEQ ID NO: 1101 - protein, 774 aa, synthetic construct
MILDTDYITEDGKPVLRIFKKENGEFKIEYDRTFEPYFYALLKDDSAIEEVKKITAERHGTVVTVKRVEKVQKKFLGRPVEVWKLYFTHFQDIPAIWDKIREHPAVIDIYEYDIPFAKRYLIDKGLVPMEGDEELKMLAFDIETLYHEGEEFAEGPILMISYADEEGARVITWKNVDLPYVDVVSTEREMIKRFLRVVKEKDPDVLITYNGDNFDFAYLKKRCEKLGINFALGRDGSEPKIQRMGDRFAVEVKGRIHFDLYPVIRRTINLPTYTLEAVYEAVFGQPKEKVYAEEITTAWETGENLERVARYSMEDAKVTYELGKEFLPMEAQLSRLIGQSLWDVSRSSTGNLVEWFLLRKAYERNELAPNKPDEKELARRRQSYEGGYVKEPERGLWENIVYLDFRSLYPSIIITHNVSPDTLNREGCKEYDVAPQVGHRFCKDFPGFIPSLLGDLLEERQKIKKKMKATIDPIERKLLDYRQRAIKILANSYYGYYGYARARWYCKECAESVTAWGREYITMTIKEIEEKYGFKVIYSDTDGFFATIPGADAETVKKKAMEFLKYINAKLPGALELEYEGFYKRGFFVTKKKYAVIDEEGKITTRGLEIVRRDWSEIAKETQARVLEALLKDGDVEKAVRIVKEVTEKLSKYEVPPEKLVIHEQITRDLKDYKATGPHVAVAKRLAARGVKIRPGTVISYIVLKGSGRIGDRAIPFDEFDPTKHKYDAEYYIENQVLPAVERILRAFGYRKEDLRYQKTRQVGLSAWLKPKGT

SEQ ID NO: 1102 - protein, 774 aa, synthetic construct
MILDTDYITEDGKPVLRIFKKENGEFKIEYDRTFEPYFYALLKDDSAIEEVKKITAERHGTVVTVKRVEKVQKKFLGRPVEVWKLYFTHFQDQPAIRDKIREHPAVIDIYEYDIPFAKRYLIDKGLVPMEGDEELKMLAFDIETLYHEGEEFAEGPILMISYADEEGARVITWKNVDLPYVDVVSTEREMIKRFLRVVKEKDPDVLITYNGDNFDFAYLKKRCEKLGINFALGRDGSEPKIQRMGDRFAVEVKGRIHFDLYPVIRRTINLPTYTLEAVYEAVFGQPKEKVYAEEITTAWETGENLERVARYSMEDAKVTYELGKEFLPMEAQLSRLIGQSLWDVSRSSTGNLVEWFLLRKAYERNELAPNKPDEKELARRRQSYEGGYVKEPERGLWENIVYLDFRSLYPSIIITHNVSPDTLNREGCKEYDVAPQVGHRFCKDFPGFIPSLLGDLLEERQKIKKKMKATIDPIERKLLDYRQRAIKILANSYYGYYGYARARWYCKECAESVTAWGREYITMTIKEIEEKYGFKVIYSDTDGFFATIPGADAETVKKKAMEFLKYINAKLPGALELEYEGFYKRGFFVTKKKYAVIDEEGKITTRGLEIVRRDWSEIAKETQARVLEALLKDGDVEKAVRIVKEVTEKLSKYEVPPEKLVIHEQITRDLKDYKATGPHVAVAKRLAARGVKIRPGTVISYIVLKGSGRIGDRAIPFDEFDPTKHKYDAEYYIENQVLPAVERILRAFGYRKEDLRYQKTRQVGLSAWLKPKGT

SEQ ID NO: 1103 - protein, 774 aa, synthetic construct
MILDTDYITEDGKPVLRIFKKENGEFKIEYDRTFEPYFYALLKDDSAIEEVKKITAERHGTVVTVKRVEKVQKKFLGRPVEVWKLYFTHFQDQPAIADKIREHPAVIDIYEYDIPFAKRYLIDKGLVPMEGDEELKMLAFDIETLYHEGEEFAEGPILMISYADEEGARVITWKNVDLPYVDVVSTEREMIKRFLRVVKEKDPDVLITYNGDNFDFAYLKKRCEKLGINFALGRDGSEPKIQRMGDRFAVEVKGRIHFDLYPVIRRTINLPTYTLEAVYEAVFGQPKEKVYAEEITTAWETGENLERVARYSMEDAKVTYELGKEFLPMEAQLSRLIGQSLWDVSRSSTGNLVEWFLLRKAYERNELAPNKPDEKELARRRQSYEGGYVKEPERGLWENIVYLDFRSLYPSIIITHNVSPDTLNREGCKEYDVAPQVGHRFCKDFPGFIPSLLGDLLEERQKIKKKMKATIDPIERKLLDYRQRAIKILANSYYGYYGYARARWYCKECAESVTAWGREYITMTIKEIEEKYGFKVIYSDTDGFFATIPGADAETVKKKAMEFLKYINAKLPGALELEYEGFYKRGFFVTKKKYAVIDEEGKITTRGLEIVRRDWSEIAKETQARVLEALLKDGDVEKAVRIVKEVTEKLSKYEVPPEKLVIHEQITRDLKDYKATGPHVAVAKRLAARGVKIRPGTVISYIVLKGSGRIGDRAIPFDEFDPTKHKYDAEYYIENQVLPAVERILRAFGYRKEDLRYQKTRQVGLSAWLKPKGT

SEQ ID NO: 1104 - protein, 774 aa, synthetic construct
MILDTDYITEDGKPVLRIFKKENGEFKIEYDRTFEPYFYALLKDDSAIEEVKKITAERHGTVVTVKRVEKVQKKFLGRPVEVWKLYFTHFQDQPAIFDKIREHPAVIDIYEYDIPFAKRYLIDKGLVPMEGDEELKMLAFDIETLYHEGEEFAEGPILMISYADEEGARVITWKNVDLPYVDVVSTEREMIKRFLRVVKEKDPDVLITYNGDNFDFAYLKKRCEKLGINFALGRDGSEPKIQRMGDRFAVEVKGRIHFDLYPVIRRTINLPTYTLEAVYEAVFGQPKEKVYAEEITTAWETGENLERVARYSMEDAKVTYELGKEFLPMEAQLSRLIGQSLWDVSRSSTGNLVEWFLLRKAYERNELAPNKPDEKELARRRQSYEGGYVKEPERGLWENIVYLDFRSLYPSIIITHNVSPDTLNREGCKEYDVAPQVGHRFCKDFPGFIPSLLGDLLEERQKIKKKMKATIDPIERKLLDYRQRAIKILANSYYGYYGYARARWYCKECAESVTAWGREYITMTIKEIEEKYGFKVIYSDTDGFFATIPGADAETVKKKAMEFLKYINAKLPGALELEYEGFYKRGFFVTKKKYAVIDEEGKITTRGLEIVRRDWSEIAKETQARVLEALLKDGDVEKAVRIVKEVTEKLSKYEVPPEKLVIHEQITRDLKDYKATGPHVAVAKRLAARGVKIRPGTVISYIVLKGSGRIGDRAIPFDEFDPTKHKYDAEYYIENQVLPAVERILRAFGYRKEDLRYQKTRQVGLSAWLKPKGT

SEQ ID NO: 1105 - protein, 774 aa, synthetic construct
MILDTDYITEDGKPVLRIFKKENGEFKIEYDRTFEPYFYALLKDDSAIEEVKKITAERHGTVVTVKRVEKVQKKFLGRPVEVWKLYFTHFQDRPAIRDKIREHPAVIDIYEYDIPFAKRYLIDKGLVPMEGDEELKMLAFDIETLYHEGEEFAEGPILMISYADEEGARVITWKNVDLPYVDVVSTEREMIKRFLRVVKEKDPDVLITYNGDNFDFAYLKKRCEKLGINFALGRDGSEPKIQRMGDRFAVEVKGRIHFDLYPVIRRTINLPTYTLEAVYEAVFGQPKEKVYAEEITTAWETGENLERVARYSMEDAKVTYELGKEFLPMEAQLSRLIGQSLWDVSRSSTGNLVEWFLLRKAYERNELAPNKPDEKELARRRQSYEGGYVKEPERGLWENIVYLDFRSLYPSIIITHNVSPDTLNREGCKEYDVAPQVGHRFCKDFPGFIPSLLGDLLEERQKIKKKMKATIDPIERKLLDYRQRAIKILANSYYGYYGYARARWYCKECAESVTAWGREYITMTIKEIEEKYGFKVIYSDTDGFFATIPGADAETVKKKAMEFLKYINAKLPGALELEYEGFYKRGFFVTKKKYAVIDEEGKITTRGLEIVRRDWSEIAKETQARVLEALLKDGDVEKAVRIVKEVTEKLSKYEVPPEKLVIHEQITRDLKDYKATGPHVAVAKRLAARGVKIRPGTVISYIVLKGSGRIGDRAIPFDEFDPTKHKYDAEYYIENQVLPAVERILRAFGYRKEDLRYQKTRQVGLSAWLKPKGT

SEQ ID NO: 1106 - protein, 774 aa, synthetic construct
MILDTDYITEDGKPVLRIFKKENGEFKIEYDRTFEPYFYALLKDDSAIEEVKKITAERHGTVVTVKRVEKVQKKFLGRPVEVWKLYFTHFQDRPAIFDKIREHPAVIDIYEYDIPFAKRYLIDKGLVPMEGDEELKMLAFDIETLYHEGEEFAEGPILMISYADEEGARVITWKNVDLPYVDVVSTEREMIKRFLRVVKEKDPDVLITYNGDNFDFAYLKKRCEKLGINFALGRDGSEPKIQRMGDRFAVEVKGRIHFDLYPVIRRTINLPTYTLEAVYEAVFGQPKEKVYAEEITTAWETGENLERVARYSMEDAKVTYELGKEFLPMEAQLSRLIGQSLWDVSRSSTGNLVEWFLLRKAYERNELAPNKPDEKELARRRQSYEGGYVKEPERGLWENIVYLDFRSLYPSIIITHNVSPDTLNREGCKEYDVAPQVGHRFCKDFPGFIPSLLGDLLEERQKIKKKMKATIDPIERKLLDYRQRAIKILANSYYGYYGYARARWYCKECAESVTAWGREYITMTIKEIEEKYGFKVIYSDTDGFFATIPGADAETVKKKAMEFLKYINAKLPGALELEYEGFYKRGFFVTKKKYAVIDEEGKITTRGLEIVRRDWSEIAKETQARVLEALLKDGDVEKAVRIVKEVTEKLSKYEVPPEKLVIHEQITRDLKDYKATGPHVAVAKRLAARGVKIRPGTVISYIVLKGSGRIGDRAIPFDEFDPTKHKYDAEYYIENQVLPAVERILRAFGYRKEDLRYQKTRQVGLSAWLKPKGT

SEQ ID NO: 1107 - protein, 774 aa, synthetic construct
MILDTDYITEDGKPVLRIFKKENGEFKIEYDRTFEPYFYALLKDDSAIEEVKKITAERHGTVVTVKRVEKVQKKFLGRPVEVWKLYFTHIQDVPAIRDKIREHPAVIDIYEYDIPFAKRYLIDKGLVPMEGDEELKMLAFDIETLYHEGEEFAEGPILMISYADEEGARVITWKNVDLPYVDVVSTEREMIKRFLRVVKEKDPDVLITYNGDNFDFAYLKKRCEKLGINFALGRDGSEPKIQRMGDRFAVEVKGRIHFDLYPVIRRTINLPTYTLEAVYEAVFGQPKEKVYAEEITTAWETGENLERVARYSMEDAKVTYELGKEFLPMEAQLSRLIGQSLWDVSRSSTGNLVEWFLLRKAYERNELAPNKPDEKELARRRQSYEGGYVKEPERGLWENIVYLDFRSLYPSIIITHNVSPDTLNREGCKEYDVAPQVGHRFCKDFPGFIPSLLGDLLEERQKIKKKMKATIDPIERKLLDYRQRAIKILANSYYGYYGYARARWYCKECAESVTAWGREYITMTIKEIEEKYGFKVIYSDTDGFFATIPGADAETVKKKAMEFLKYINAKLPGALELEYEGFYKRGFFVTKKKYAVIDEEGKITTRGLEIVRRDWSEIAKETQARVLEALLKDGDVEKAVRIVKEVTEKLSKYEVPPEKLVIHEQITRDLKDYKATGPHVAVAKRLAARGVKIRPGTVISYIVLKGSGRIGDRAIPFDEFDPTKHKYDAEYYIENQVLPAVERILRAFGYRKEDLRYQKTRQVGLSAWLKPKGT

SEQ ID NO: 1108 - protein, 774 aa, synthetic construct
MILDTDYITEDGKPVLRIFKKENGEFKIEYDRTFEPYFYALLKDDSAIEEVKKITAERHGTVVTVKRVEKVQKKFLGRPVEVWKLYFTHIQDVPAIADKIREHPAVIDIYEYDIPFAKRYLIDKGLVPMEGDEELKMLAFDIETLYHEGEEFAEGPILMISYADEEGARVITWKNVDLPYVDVVSTEREMIKRFLRVVKEKDPDVLITYNGDNFDFAYLKKRCEKLGINFALGRDGSEPKIQRMGDRFAVEVKGRIHFDLYPVIRRTINLPTYTLEAVYEAVFGQPKEKVYAEEITTAWETGENLERVARYSMEDAKVTYELGKEFLPMEAQLSRLIGQSLWDVSRSSTGNLVEWFLLRKAYERNELAPNKPDEKELARRRQSYEGGYVKEPERGLWENIVYLDFRSLYPSIIITHNVSPDTLNREGCKEYDVAPQVGHRFCKDFPGFIPSLLGDLLEERQKIKKKMKATIDPIERKLLDYRQRAIKILANSYYGYYGYARARWYCKECAESVTAWGREYITMTIKEIEEKYGFKVIYSDTDGFFATIPGADAETVKKKAMEFLKYINAKLPGALELEYEGFYKRGFFVTKKKYAVIDEEGKITTRGLEIVRRDWSEIAKETQARVLEALLKDGDVEKAVRIVKEVTEKLSKYEVPPEKLVIHEQITRDLKDYKATGPHVAVAKRLAARGVKIRPGTVISYIVLKGSGRIGDRAIPFDEFDPTKHKYDAEYYIENQVLPAVERILRAFGYRKEDLRYQKTRQVGLSAWLKPKGT

SEQ ID NO: 1109 - protein, 774 aa, synthetic construct
MILDTDYITEDGKPVLRIFKKENGEFKIEYDRTFEPYFYALLKDDSAIEEVKKITAERHGTVVTVKRVEKVQKKFLGRPVEVWKLYFTHIQDVPAIFDKIREHPAVIDIYEYDIPFAKRYLIDKGLVPMEGDEELKMLAFDIETLYHEGEEFAEGPILMISYADEEGARVITWKNVDLPYVDVVSTEREMIKRFLRVVKEKDPDVLITYNGDNFDFAYLKKRCEKLGINFALGRDGSEPKIQRMGDRFAVEVKGRIHFDLYPVIRRTINLPTYTLEAVYEAVFGQPKEKVYAEEITTAWETGENLERVARYSMEDAKVTYELGKEFLPMEAQLSRLIGQSLWDVSRSSTGNLVEWFLLRKAYERNELAPNKPDEKELARRRQSYEGGYVKEPERGLWENIVYLDFRSLYPSIIITHNVSPDTLNREGCKEYDVAPQVGHRFCKDFPGFIPSLLGDLLEERQKIKKKMKATIDPIERKLLDYRQRAIKILANSYYGYYGYARARWYCKECAESVTAWGREYITMTIKEIEEKYGFKVIYSDTDGFFATIPGADAETVKKKAMEFLKYINAKLPGALELEYEGFYKRGFFVTKKKYAVIDEEGKITTRGLEIVRRDWSEIAKETQARVLEALLKDGDVEKAVRIVKEVTEKLSKYEVPPEKLVIHEQITRDLKDYKATGPHVAVAKRLAARGVKIRPGTVISYIVLKGSGRIGDRAIPFDEFDPTKHKYDAEYYIENQVLPAVERILRAFGYRKEDLRYQKTRQVGLSAWLKPKGT

SEQ ID NO: 1110 - protein, 774 aa, synthetic construct
MILDTDYITEDGKPVLRIFKKENGEFKIEYDRTFEPYFYALLKDDSAIEEVKKITAERHGTVVTVKRVEKVQKKFLGRPVEVWKLYFTHIQDVPAIHDKIREHPAVIDIYEYDIPFAKRYLIDKGLVPMEGDEELKMLAFDIETLYHEGEEFAEGPILMISYADEEGARVITWKNVDLPYVDVVSTEREMIKRFLRVVKEKDPDVLITYNGDNFDFAYLKKRCEKLGINFALGRDGSEPKIQRMGDRFAVEVKGRIHFDLYPVIRRTINLPTYTLEAVYEAVFGQPKEKVYAEEITTAWETGENLERVARYSMEDAKVTYELGKEFLPMEAQLSRLIGQSLWDVSRSSTGNLVEWFLLRKAYERNELAPNKPDEKELARRRQSYEGGYVKEPERGLWENIVYLDFRSLYPSIIITHNVSPDTLNREGCKEYDVAPQVGHRFCKDFPGFIPSLLGDLLEERQKIKKKMKATIDPIERKLLDYRQRAIKILANSYYGYYGYARARWYCKECAESVTAWGREYITMTIKEIEEKYGFKVIYSDTDGFFATIPGADAETVKKKAMEFLKYINAKLPGALELEYEGFYKRGFFVTKKKYAVIDEEGKITTRGLEIVRRDWSEIAKETQARVLEALLKDGDVEKAVRIVKEVTEKLSKYEVPPEKLVIHEQITRDLKDYKATGPHVAVAKRLAARGVKIRPGTVISYIVLKGSGRIGDRAIPFDEFDPTKHKYDAEYYIENQVLPAVERILRAFGYRKEDLRYQKTRQVGLSAWLKPKGT

SEQ ID NO: 1111 - protein, 774 aa, synthetic construct
MILDTDYITEDGKPVLRIFKKENGEFKIEYDRTFEPYFYALLKDDSAIEEVKKITAERHGTVVTVKRVEKVQKKFLGRPVEVWKLYFTHIQDVPAIWDKIREHPAVIDIYEYDIPFAKRYLIDKGLVPMEGDEELKMLAFDIETLYHEGEEFAEGPILMISYADEEGARVITWKNVDLPYVDVVSTEREMIKRFLRVVKEKDPDVLITYNGDNFDFAYLKKRCEKLGINFALGRDGSEPKIQRMGDRFAVEVKGRIHFDLYPVIRRTINLPTYTLEAVYEAVFGQPKEKVYAEEITTAWETGENLERVARYSMEDAKVTYELGKEFLPMEAQLSRLIGQSLWDVSRSSTGNLVEWFLLRKAYERNELAPNKPDEKELARRRQSYEGGYVKEPERGLWENIVYLDFRSLYPSIIITHNVSPDTLNREGCKEYDVAPQVGHRFCKDFPGFIPSLLGDLLEERQKIKKKMKATIDPIERKLLDYRQRAIKILANSYYGYYGYARARWYCKECAESVTAWGREYITMTIKEIEEKYGFKVIYSDTDGFFATIPGADAETVKKKAMEFLKYINAKLPGALELEYEGFYKRGFFVTKKKYAVIDEEGKITTRGLEIVRRDWSEIAKETQARVLEALLKDGDVEKAVRIVKEVTEKLSKYEVPPEKLVIHEQITRDLKDYKATGPHVAVAKRLAARGVKIRPGTVISYIVLKGSGRIGDRAIPFDEFDPTKHKYDAEYYIENQVLPAVERILRAFGYRKEDLRYQKTRQVGLSAWLKPKGT

SEQ ID NO: 1112 - protein, 774 aa, synthetic construct
MILDTDYITEDGKPVLRIFKKENGEFKIEYDRTFEPYFYALLKDDSAIEEVKKITAERHGTVVTVKRVEKVQKKFLGRPVEVWKLYFTHIQDIPAIRDKIREHPAVIDIYEYDIPFAKRYLIDKGLVPMEGDEELKMLAFDIETLYHEGEEFAEGPILMISYADEEGARVITWKNVDLPYVDVVSTEREMIKRFLRVVKEKDPDVLITYNGDNFDFAYLKKRCEKLGINFALGRDGSEPKIQRMGDRFAVEVKGRIHFDLYPVIRRTINLPTYTLEAVYEAVFGQPKEKVYAEEITTAWETGENLERVARYSMEDAKVTYELGKEFLPMEAQLSRLIGQSLWDVSRSSTGNLVEWFLLRKAYERNELAPNKPDEKELARRRQSYEGGYVKEPERGLWENIVYLDFRSLYPSIIITHNVSPDTLNREGCKEYDVAPQVGHRFCKDFPGFIPSLLGDLLEERQKIKKKMKATIDPIERKLLDYRQRAIKILANSYYGYYGYARARWYCKECAESVTAWGREYITMTIKEIEEKYGFKVIYSDTDGFFATIPGADAETVKKKAMEFLKYINAKLPGALELEYEGFYKRGFFVTKKKYAVIDEEGKITTRGLEIVRRDWSEIAKETQARVLEALLKDGDVEKAVRIVKEVTEKLSKYEVPPEKLVIHEQITRDLKDYKATGPHVAVAKRLAARGVKIRPGTVISYIVLKGSGRIGDRAIPFDEFDPTKHKYDAEYYIENQVLPAVERILRAFGYRKEDLRYQKTRQVGLSAWLKPKGT

SEQ ID NO: 1113 - protein, 774 aa, synthetic construct
MILDTDYITEDGKPVLRIFKKENGEFKIEYDRTFEPYFYALLKDDSAIEEVKKITAERHGTVVTVKRVEKVQKKFLGRPVEVWKLYFTHIQDIPAIADKIREHPAVIDIYEYDIPFAKRYLIDKGLVPMEGDEELKMLAFDIETLYHEGEEFAEGPILMISYADEEGARVITWKNVDLPYVDVVSTEREMIKRFLRVVKEKDPDVLITYNGDNFDFAYLKKRCEKLGINFALGRDGSEPKIQRMGDRFAVEVKGRIHFDLYPVIRRTINLPTYTLEAVYEAVFGQPKEKVYAEEITTAWETGENLERVARYSMEDAKVTYELGKEFLPMEAQLSRLIGQSLWDVSRSSTGNLVEWFLLRKAYERNELAPNKPDEKELARRRQSYEGGYVKEPERGLWENIVYLDFRSLYPSIIITHNVSPDTLNREGCKEYDVAPQVGHRFCKDFPGFIPSLLGDLLEERQKIKKKMKATIDPIERKLLDYRQRAIKILANSYYGYYGYARARWYCKECAESVTAWGREYITMTIKEIEEKYGFKVIYSDTDGFFATIPGADAETVKKKAMEFLKYINAKLPGALELEYEGFYKRGFFVTKKKYAVIDEEGKITTRGLEIVRRDWSEIAKETQARVLEALLKDGDVEKAVRIVKEVTEKLSKYEVPPEKLVIHEQITRDLKDYKATGPHVAVAKRLAARGVKIRPGTVISYIVLKGSGRIGDRAIPFDEFDPTKHKYDAEYYIENQVLPAVERILRAFGYRKEDLRYQKTRQVGLSAWLKPKGT

SEQ ID NO: 1114 - protein, 774 aa, synthetic construct
MILDTDYITEDGKPVLRIFKKENGEFKIEYDRTFEPYFYALLKDDSAIEEVKKITAERHGTVVTVKRVEKVQKKFLGRPVEVWKLYFTHIQDIPAIFDKIREHPAVIDIYEYDIPFAKRYLIDKGLVPMEGDEELKMLAFDIETLYHEGEEFAEGPILMISYADEEGARVITWKNVDLPYVDVVSTEREMIKRFLRVVKEKDPDVLITYNGDNFDFAYLKKRCEKLGINFALGRDGSEPKIQRMGDRFAVEVKGRIHFDLYPVIRRTINLPTYTLEAVYEAVFGQPKEKVYAEEITTAWETGENLERVARYSMEDAKVTYELGKEFLPMEAQLSRLIGQSLWDVSRSSTGNLVEWFLLRKAYERNELAPNKPDEKELARRRQSYEGGYVKEPERGLWENIVYLDFRSLYPSIIITHNVSPDTLNREGCKEYDVAPQVGHRFCKDFPGFIPSLLGDLLEERQKIKKKMKATIDPIERKLLDYRQRAIKILANSYYGYYGYARARWYCKECAESVTAWGREYITMTIKEIEEKYGFKVIYSDTDGFFATIPGADAETVKKKAMEFLKYINAKLPGALELEYEGFYKRGFFVTKKKYAVIDEEGKITTRGLEIVRRDWSEIAKETQARVLEALLKDGDVEKAVRIVKEVTEKLSKYEVPPEKLVIHEQITRDLKDYKATGPHVAVAKRLAARGVKIRPGTVISYIVLKGSGRIGDRAIPFDEFDPTKHKYDAEYYIENQVLPAVERILRAFGYRKEDLRYQKTRQVGLSAWLKPKGT

SEQ ID NO: 1115 - protein, 774 aa, synthetic construct
MILDTDYITEDGKPVLRIFKKENGEFKIEYDRTFEPYFYALLKDDSAIEEVKKITAERHGTVVTVKRVEKVQKKFLGRPVEVWKLYFTHIQDIPAIHDKIREHPAVIDIYEYDIPFAKRYLIDKGLVPMEGDEELKMLAFDIETLYHEGEEFAEGPILMISYADEEGARVITWKNVDLPYVDVVSTEREMIKRFLRVVKEKDPDVLITYNGDNFDFAYLKKRCEKLGINFALGRDGSEPKIQRMGDRFAVEVKGRIHFDLYPVIRRTINLPTYTLEAVYEAVFGQPKEKVYAEEITTAWETGENLERVARYSMEDAKVTYELGKEFLPMEAQLSRLIGQSLWDVSRSSTGNLVEWFLLRKAYERNELAPNKPDEKELARRRQSYEGGYVKEPERGLWENIVYLDFRSLYPSIIITHNVSPDTLNREGCKEYDVAPQVGHRFCKDFPGFIPSLLGDLLEERQKIKKKMKATIDPIERKLLDYRQRAIKILANSYYGYYGYARARWYCKECAESVTAWGREYITMTIKEIEEKYGFKVIYSDTDGFFATIPGADAETVKKKAMEFLKYINAKLPGALELEYEGFYKRGFFVTKKKYAVIDEEGKITTRGLEIVRRDWSEIAKETQARVLEALLKDGDVEKAVRIVKEVTEKLSKYEVPPEKLVIHEQITRDLKDYKATGPHVAVAKRLAARGVKIRPGTVISYIVLKGSGRIGDRAIPFDEFDPTKHKYDAEYYIENQVLPAVERILRAFGYRKEDLRYQKTRQVGLSAWLKPKGT

SEQ ID NO: 1116 - protein, 774 aa, synthetic construct
MILDTDYITEDGKPVLRIFKKENGEFKIEYDRTFEPYFYALLKDDSAIEEVKKITAERHGTVVTVKRVEKVQKKFLGRPVEVWKLYFTHIQDIPAIWDKIREHPAVIDIYEYDIPFAKRYLIDKGLVPMEGDEELKMLAFDIETLYHEGEEFAEGPILMISYADEEGARVITWKNVDLPYVDVVSTEREMIKRFLRVVKEKDPDVLITYNGDNFDFAYLKKRCEKLGINFALGRDGSEPKIQRMGDRFAVEVKGRIHFDLYPVIRRTINLPTYTLEAVYEAVFGQPKEKVYAEEITTAWETGENLERVARYSMEDAKVTYELGKEFLPMEAQLSRLIGQSLWDVSRSSTGNLVEWFLLRKAYERNELAPNKPDEKELARRRQSYEGGYVKEPERGLWENIVYLDFRSLYPSIIITHNVSPDTLNREGCKEYDVAPQVGHRFCKDFPGFIPSLLGDLLEERQKIKKKMKATIDPIERKLLDYRQRAIKILANSYYGYYGYARARWYCKECAESVTAWGREYITMTIKEIEEKYGFKVIYSDTDGFFATIPGADAETVKKKAMEFLKYINAKLPGALELEYEGFYKRGFFVTKKKYAVIDEEGKITTRGLEIVRRDWSEIAKETQARVLEALLKDGDVEKAVRIVKEVTEKLSKYEVPPEKLVIHEQITRDLKDYKATGPHVAVAKRLAARGVKIRPGTVISYIVLKGSGRIGDRAIPFDEFDPTKHKYDAEYYIENQVLPAVERILRAFGYRKEDLRYQKTRQVGLSAWLKPKGT

SEQ ID NO: 1117 - protein, 774 aa, synthetic construct
MILDTDYITEDGKPVLRIFKKENGEFKIEYDRTFEPYFYALLKDDSAIEEVKKITAERHGTVVTVKRVEKVQKKFLGRPVEVWKLYFTHIQDKPAIRDKIREHPAVIDIYEYDIPFAKRYLIDKGLVPMEGDEELKMLAFDIETLYHEGEEFAEGPILMISYADEEGARVITWKNVDLPYVDVVSTEREMIKRFLRVVKEKDPDVLITYNGDNFDFAYLKKRCEKLGINFALGRDGSEPKIQRMGDRFAVEVKGRIHFDLYPVIRRTINLPTYTLEAVYEAVFGQPKEKVYAEEITTAWETGENLERVARYSMEDAKVTYELGKEFLPMEAQLSRLIGQSLWDVSRSSTGNLVEWFLLRKAYERNELAPNKPDEKELARRRQSYEGGYVKEPERGLWENIVYLDFRSLYPSIIITHNVSPDTLNREGCKEYDVAPQVGHRFCKDFPGFIPSLLGDLLEERQKIKKKMKATIDPIERKLLDYRQRAIKILANSYYGYYGYARARWYCKECAESVTAWGREYITMTIKEIEEKYGFKVIYSDTDGFFATIPGADAETVKKKAMEFLKYINAKLPGALELEYEGFYKRGFFVTKKKYAVIDEEGKITTRGLEIVRRDWSEIAKETQARVLEALLKDGDVEKAVRIVKEVTEKLSKYEVPPEKLVIHEQITRDLKDYKATGPHVAVAKRLAARGVKIRPGTVISYIVLKGSGRIGDRAIPFDEFDPTKHKYDAEYYIENQVLPAVERILRAFGYRKEDLRYQKTRQVGLSAWLKPKGT

SEQ ID NO: 1118 - protein, 774 aa, synthetic construct
MILDTDYITEDGKPVLRIFKKENGEFKIEYDRTFEPYFYALLKDDSAIEEVKKITAERHGTVVTVKRVEKVQKKFLGRPVEVWKLYFTHIQDKPAIFDKIREHPAVIDIYEYDIPFAKRYLIDKGLVPMEGDEELKMLAFDIETLYHEGEEFAEGPILMISYADEEGARVITWKNVDLPYVDVVSTEREMIKRFLRVVKEKDPDVLITYNGDNFDFAYLKKRCEKLGINFALGRDGSEPKIQRMGDRFAVEVKGRIHFDLYPVIRRTINLPTYTLEAVYEAVFGQPKEKVYAEEITTAWETGENLERVARYSMEDAKVTYELGKEFLPMEAQLSRLIGQSLWDVSRSSTGNLVEWFLLRKAYERNELAPNKPDEKELARRRQSYEGGYVKEPERGLWENIVYLDFRSLYPSIIITHNVSPDTLNREGCKEYDVAPQVGHRFCKDFPGFIPSLLGDLLEERQKIKKKMKATIDPIERKLLDYRQRAIKILANSYYGYYGYARARWYCKECAESVTAWGREYITMTIKEIEEKYGFKVIYSDTDGFFATIPGADAETVKKKAMEFLKYINAKLPGALELEYEGFYKRGFFVTKKKYAVIDEEGKITTRGLEIVRRDWSEIAKETQARVLEALLKDGDVEKAVRIVKEVTEKLSKYEVPPEKLVIHEQITRDLKDYKATGPHVAVAKRLAARGVKIRPGTVISYIVLKGSGRIGDRAIPFDEFDPTKHKYDAEYYIENQVLPAVERILRAFGYRKEDLRYQKTRQVGLSAWLKPKGT

SEQ ID NO: 1119 - protein, 774 aa, synthetic construct
MILDTDYITEDGKPVLRIFKKENGEFKIEYDRTFEPYFYALLKDDSAIEEVKKITAERHGTVVTVKRVEKVQKKFLGRPVEVWKLYFTHIQDKPAIWDKIREHPAVIDIYEYDIPFAKRYLIDKGLVPMEGDEELKMLAFDIETLYHEGEEFAEGPILMISYADEEGARVITWKNVDLPYVDVVSTEREMIKRFLRVVKEKDPDVLITYNGDNFDFAYLKKRCEKLGINFALGRDGSEPKIQRMGDRFAVEVKGRIHFDLYPVIRRTINLPTYTLEAVYEAVFGQPKEKVYAEEITTAWETGENLERVARYSMEDAKVTYELGKEFLPMEAQLSRLIGQSLWDVSRSSTGNLVEWFLLRKAYERNELAPNKPDEKELARRRQSYEGGYVKEPERGLWENIVYLDFRSLYPSIIITHNVSPDTLNREGCKEYDVAPQVGHRFCKDFPGFIPSLLGDLLEERQKIKKKMKATIDPIERKLLDYRQRAIKILANSYYGYYGYARARWYCKECAESVTAWGREYITMTIKEIEEKYGFKVIYSDTDGFFATIPGADAETVKKKAMEFLKYINAKLPGALELEYEGFYKRGFFVTKKKYAVIDEEGKITTRGLEIVRRDWSEIAKETQARVLEALLKDGDVEKAVRIVKEVTEKLSKYEVPPEKLVIHEQITRDLKDYKATGPHVAVAKRLAARGVKIRPGTVISYIVLKGSGRIGDRAIPFDEFDPTKHKYDAEYYIENQVLPAVERILRAFGYRKEDLRYQKTRQVGLSAWLKPKGT

SEQ ID NO: 1120 - protein, 774 aa, synthetic construct
MILDTDYITEDGKPVLRIFKKENGEFKIEYDRTFEPYFYALLKDDSAIEEVKKITAERHGTVVTVKRVEKVQKKFLGRPVEVWKLYFTHIQDQPAIRDKIREHPAVIDIYEYDIPFAKRYLIDKGLVPMEGDEELKMLAFDIETLYHEGEEFAEGPILMISYADEEGARVITWKNVDLPYVDVVSTEREMIKRFLRVVKEKDPDVLITYNGDNFDFAYLKKRCEKLGINFALGRDGSEPKIQRMGDRFAVEVKGRIHFDLYPVIRRTINLPTYTLEAVYEAVFGQPKEKVYAEEITTAWETGENLERVARYSMEDAKVTYELGKEFLPMEAQLSRLIGQSLWDVSRSSTGNLVEWFLLRKAYERNELAPNKPDEKELARRRQSYEGGYVKEPERGLWENIVYLDFRSLYPSIIITHNVSPDTLNREGCKEYDVAPQVGHRFCKDFPGFIPSLLGDLLEERQKIKKKMKATIDPIERKLLDYRQRAIKILANSYYGYYGYARARWYCKECAESVTAWGREYITMTIKEIEEKYGFKVIYSDTDGFFATIPGADAETVKKKAMEFLKYINAKLPGALELEYEGFYKRGFFVTKKKYAVIDEEGKITTRGLEIVRRDWSEIAKETQARVLEALLKDGDVEKAVRIVKEVTEKLSKYEVPPEKLVIHEQITRDLKDYKATGPHVAVAKRLAARGVKIRPGTVISYIVLKGSGRIGDRAIPFDEFDPTKHKYDAEYYIENQVLPAVERILRAFGYRKEDLRYQKTRQVGLSAWLKPKGT

SEQ ID NO: 1121 - protein, 774 aa, synthetic construct
MILDTDYITEDGKPVLRIFKKENGEFKIEYDRTFEPYFYALLKDDSAIEEVKKITAERHGTVVTVKRVEKVQKKFLGRPVEVWKLYFTHIQDQPAIADKIREHPAVIDIYEYDIPFAKRYLIDKGLVPMEGDEELKMLAFDIETLYHEGEEFAEGPILMISYADEEGARVITWKNVDLPYVDVVSTEREMIKRFLRVVKEKDPDVLITYNGDNFDFAYLKKRCEKLGINFALGRDGSEPKIQRMGDRFAVEVKGRIHFDLYPVIRRTINLPTYTLEAVYEAVFGQPKEKVYAEEITTAWETGENLERVARYSMEDAKVTYELGKEFLPMEAQLSRLIGQSLWDVSRSSTGNLVEWFLLRKAYERNELAPNKPDEKELARRRQSYEGGYVKEPERGLWENIVYLDFRSLYPSIIITHNVSPDTLNREGCKEYDVAPQVGHRFCKDFPGFIPSLLGDLLEERQKIKKKMKATIDPIERKLLDYRQRAIKILANSYYGYYGYARARWYCKECAESVTAWGREYITMTIKEIEEKYGFKVIYSDTDGFFATIPGADAETVKKKAMEFLKYINAKLPGALELEYEGFYKRGFFVTKKKYAVIDEEGKITTRGLEIVRRDWSEIAKETQARVLEALLKDGDVEKAVRIVKEVTEKLSKYEVPPEKLVIHEQITRDLKDYKATGPHVAVAKRLAARGVKIRPGTVISYIVLKGSGRIGDRAIPFDEFDPTKHKYDAEYYIENQVLPAVERILRAFGYRKEDLRYQKTRQVGLSAWLKPKGT

SEQ ID NO: 1122 - protein, 774 aa, synthetic construct
MILDTDYITEDGKPVLRIFKKENGEFKIEYDRTFEPYFYALLKDDSAIEEVKKITAERHGTVVTVKRVEKVQKKFLGRPVEVWKLYFTHIQDQPAIFDKIREHPAVIDIYEYDIPFAKRYLIDKGLVPMEGDEELKMLAFDIETLYHEGEEFAEGPILMISYADEEGARVITWKNVDLPYVDVVSTEREMIKRFLRVVKEKDPDVLITYNGDNFDFAYLKKRCEKLGINFALGRDGSEPKIQRMGDRFAVEVKGRIHFDLYPVIRRTINLPTYTLEAVYEAVFGQPKEKVYAEEITTAWETGENLERVARYSMEDAKVTYELGKEFLPMEAQLSRLIGQSLWDVSRSSTGNLVEWFLLRKAYERNELAPNKPDEKELARRRQSYEGGYVKEPERGLWENIVYLDFRSLYPSIIITHNVSPDTLNREGCKEYDVAPQVGHRFCKDFPGFIPSLLGDLLEERQKIKKKMKATIDPIERKLLDYRQRAIKILANSYYGYYGYARARWYCKECAESVTAWGREYITMTIKEIEEKYGFKVIYSDTDGFFATIPGADAETVKKKAMEFLKYINAKLPGALELEYEGFYKRGFFVTKKKYAVIDEEGKITTRGLEIVRRDWSEIAKETQARVLEALLKDGDVEKAVRIVKEVTEKLSKYEVPPEKLVIHEQITRDLKDYKATGPHVAVAKRLAARGVKIRPGTVISYIVLKGSGRIGDRAIPFDEFDPTKHKYDAEYYIENQVLPAVERILRAFGYRKEDLRYQKTRQVGLSAWLKPKGT

SEQ ID NO: 1123 - protein, 774 aa, synthetic construct
MILDTDYITEDGKPVLRIFKKENGEFKIEYDRTFEPYFYALLKDDSAIEEVKKITAERHGTVVTVKRVEKVQKKFLGRPVEVWKLYFTHIQDRPAIRDKIREHPAVIDIYEYDIPFAKRYLIDKGLVPMEGDEELKMLAFDIETLYHEGEEFAEGPILMISYADEEGARVITWKNVDLPYVDVVSTEREMIKRFLRVVKEKDPDVLITYNGDNFDFAYLKKRCEKLGINFALGRDGSEPKIQRMGDRFAVEVKGRIHFDLYPVIRRTINLPTYTLEAVYEAVFGQPKEKVYAEEITTAWETGENLERVARYSMEDAKVTYELGKEFLPMEAQLSRLIGQSLWDVSRSSTGNLVEWFLLRKAYERNELAPNKPDEKELARRRQSYEGGYVKEPERGLWENIVYLDFRSLYPSIIITHNVSPDTLNREGCKEYDVAPQVGHRFCKDFPGFIPSLLGDLLEERQKIKKKMKATIDPIERKLLDYRQRAIKILANSYYGYYGYARARWYCKECAESVTAWGREYITMTIKEIEEKYGFKVIYSDTDGFFATIPGADAETVKKKAMEFLKYINAKLPGALELEYEGFYKRGFFVTKKKYAVIDEEGKITTRGLEIVRRDWSEIAKETQARVLEALLKDGDVEKAVRIVKEVTEKLSKYEVPPEKLVIHEQITRDLKDYKATGPHVAVAKRLAARGVKIRPGTVISYIVLKGSGRIGDRAIPFDEFDPTKHKYDAEYYIENQVLPAVERILRAFGYRKEDLRYQKTRQVGLSAWLKPKGT

SEQ ID NO: 1124 - protein, 774 aa, synthetic construct
MILDTDYITEDGKPVLRIFKKENGEFKIEYDRTFEPYFYALLKDDSAIEEVKKITAERHGTVVTVKRVEKVQKKFLGRPVEVWKLYFTHIQDRPAIADKIREHPAVIDIYEYDIPFAKRYLIDKGLVPMEGDEELKMLAFDIETLYHEGEEFAEGPILMISYADEEGARVITWKNVDLPYVDVVSTEREMIKRFLRVVKEKDPDVLITYNGDNFDFAYLKKRCEKLGINFALGRDGSEPKIQRMGDRFAVEVKGRIHFDLYPVIRRTINLPTYTLEAVYEAVFGQPKEKVYAEEITTAWETGENLERVARYSMEDAKVTYELGKEFLPMEAQLSRLIGQSLWDVSRSSTGNLVEWFLLRKAYERNELAPNKPDEKELARRRQSYEGGYVKEPERGLWENIVYLDFRSLYPSIIITHNVSPDTLNREGCKEYDVAPQVGHRFCKDFPGFIPSLLGDLLEERQKIKKKMKATIDPIERKLLDYRQRAIKILANSYYGYYGYARARWYCKECAESVTAWGREYITMTIKEIEEKYGFKVIYSDTDGFFATIPGADAETVKKKAMEFLKYINAKLPGALELEYEGFYKRGFFVTKKKYAVIDEEGKITTRGLEIVRRDWSEIAKETQARVLEALLKDGDVEKAVRIVKEVTEKLSKYEVPPEKLVIHEQITRDLKDYKATGPHVAVAKRLAARGVKIRPGTVISYIVLKGSGRIGDRAIPFDEFDPTKHKYDAEYYIENQVLPAVERILRAFGYRKEDLRYQKTRQVGLSAWLKPKGT

SEQ ID NO: 1125 - protein, 774 aa, synthetic construct
MILDTDYITEDGKPVLRIFKKENGEFKIEYDRTFEPYFYALLKDDSAIEEVKKITAERHGTVVTVKRVEKVQKKFLGRPVEVWKLYFTHIQDRPAIFDKIREHPAVIDIYEYDIPFAKRYLIDKGLVPMEGDEELKMLAFDIETLYHEGEEFAEGPILMISYADEEGARVITWKNVDLPYVDVVSTEREMIKRFLRVVKEKDPDVLITYNGDNFDFAYLKKRCEKLGINFALGRDGSEPKIQRMGDRFAVEVKGRIHFDLYPVIRRTINLPTYTLEAVYEAVFGQPKEKVYAEEITTAWETGENLERVARYSMEDAKVTYELGKEFLPMEAQLSRLIGQSLWDVSRSSTGNLVEWFLLRKAYERNELAPNKPDEKELARRRQSYEGGYVKEPERGLWENIVYLDFRSLYPSIIITHNVSPDTLNREGCKEYDVAPQVGHRFCKDFPGFIPSLLGDLLEERQKIKKKMKATIDPIERKLLDYRQRAIKILANSYYGYYGYARARWYCKECAESVTAWGREYITMTIKEIEEKYGFKVIYSDTDGFFATIPGADAETVKKKAMEFLKYINAKLPGALELEYEGFYKRGFFVTKKKYAVIDEEGKITTRGLEIVRRDWSEIAKETQARVLEALLKDGDVEKAVRIVKEVTEKLSKYEVPPEKLVIHEQITRDLKDYKATGPHVAVAKRLAARGVKIRPGTVISYIVLKGSGRIGDRAIPFDEFDPTKHKYDAEYYIENQVLPAVERILRAFGYRKEDLRYQKTRQVGLSAWLKPKGT

SEQ ID NO: 1126 - protein, 774 aa, synthetic construct
MILDTDYITEDGKPVLRIFKKENGEFKIEYDRTFEPYFYALLKDDSAIEEVKKITAERHGTVVTVKRVEKVQKKFLGRPVEVWKLYFTHSQDVPAIRDKIREHPAVIDIYEYDIPFAKRYLIDKGLVPMEGDEELKMLAFDIETLYHEGEEFAEGPILMISYADEEGARVITWKNVDLPYVDVVSTEREMIKRFLRVVKEKDPDVLITYNGDNFDFAYLKKRCEKLGINFALGRDGSEPKIQRMGDRFAVEVKGRIHFDLYPVIRRTINLPTYTLEAVYEAVFGQPKEKVYAEEITTAWETGENLERVARYSMEDAKVTYELGKEFLPMEAQLSRLIGQSLWDVSRSSTGNLVEWFLLRKAYERNELAPNKPDEKELARRRQSYEGGYVKEPERGLWENIVYLDFRSLYPSIIITHNVSPDTLNREGCKEYDVAPQVGHRFCKDFPGFIPSLLGDLLEERQKIKKKMKATIDPIERKLLDYRQRAIKILANSYYGYYGYARARWYCKECAESVTAWGREYITMTIKEIEEKYGFKVIYSDTDGFFATIPGADAETVKKKAMEFLKYINAKLPGALELEYEGFYKRGFFVTKKKYAVIDEEGKITTRGLEIVRRDWSEIAKETQARVLEALLKDGDVEKAVRIVKEVTEKLSKYEVPPEKLVIHEQITRDLKDYKATGPHVAVAKRLAARGVKIRPGTVISYIVLKGSGRIGDRAIPFDEFDPTKHKYDAEYYIENQVLPAVERILRAFGYRKEDLRYQKTRQVGLSAWLKPKGT

SEQ ID NO: 1127 - protein, 774 aa, synthetic construct
MILDTDYITEDGKPVLRIFKKENGEFKIEYDRTFEPYFYALLKDDSAIEEVKKITAERHGTVVTVKRVEKVQKKFLGRPVEVWKLYFTHSQDIPAIHDKIREHPAVIDIYEYDIPFAKRYLIDKGLVPMEGDEELKMLAFDIETLYHEGEEFAEGPILMISYADEEGARVITWKNVDLPYVDVVSTEREMIKRFLRVVKEKDPDVLITYNGDNFDFAYLKKRCEKLGINFALGRDGSEPKIQRMGDRFAVEVKGRIHFDLYPVIRRTINLPTYTLEAVYEAVFGQPKEKVYAEEITTAWETGENLERVARYSMEDAKVTYELGKEFLPMEAQLSRLIGQSLWDVSRSSTGNLVEWFLLRKAYERNELAPNKPDEKELARRRQSYEGGYVKEPERGLWENIVYLDFRSLYPSIIITHNVSPDTLNREGCKEYDVAPQVGHRFCKDFPGFIPSLLGDLLEERQKIKKKMKATIDPIERKLLDYRQRAIKILANSYYGYYGYARARWYCKECAESVTAWGREYITMTIKEIEEKYGFKVIYSDTDGFFATIPGADAETVKKKAMEFLKYINAKLPGALELEYEGFYKRGFFVTKKKYAVIDEEGKITTRGLEIVRRDWSEIAKETQARVLEALLKDGDVEKAVRIVKEVTEKLSKYEVPPEKLVIHEQITRDLKDYKATGPHVAVAKRLAARGVKIRPGTVISYIVLKGSGRIGDRAIPFDEFDPTKHKYDAEYYIENQVLPAVERILRAFGYRKEDLRYQKTRQVGLSAWLKPKGT

SEQ ID NO: 1128 - protein, 774 aa, synthetic construct
MILDTDYITEDGKPVLRIFKKENGEFKIEYDRTFEPYFYALLKDDSAIEEVKKITAERHGTVVTVKRVEKVQKKFLGRPVEVWKLYFTHSQDIPAIWDKIREHPAVIDIYEYDIPFAKRYLIDKGLVPMEGDEELKMLAFDIETLYHEGEEFAEGPILMISYADEEGARVITWKNVDLPYVDVVSTEREMIKRFLRVVKEKDPDVLITYNGDNFDFAYLKKRCEKLGINFALGRDGSEPKIQRMGDRFAVEVKGRIHFDLYPVIRRTINLPTYTLEAVYEAVFGQPKEKVYAEEITTAWETGENLERVARYSMEDAKVTYELGKEFLPMEAQLSRLIGQSLWDVSRSSTGNLVEWFLLRKAYERNELAPNKPDEKELARRRQSYEGGYVKEPERGLWENIVYLDFRSLYPSIIITHNVSPDTLNREGCKEYDVAPQVGHRFCKDFPGFIPSLLGDLLEERQKIKKKMKATIDPIERKLLDYRQRAIKILANSYYGYYGYARARWYCKECAESVTAWGREYITMTIKEIEEKYGFKVIYSDTDGFFATIPGADAETVKKKAMEFLKYINAKLPGALELEYEGFYKRGFFVTKKKYAVIDEEGKITTRGLEIVRRDWSEIAKETQARVLEALLKDGDVEKAVRIVKEVTEKLSKYEVPPEKLVIHEQITRDLKDYKATGPHVAVAKRLAARGVKIRPGTVISYIVLKGSGRIGDRAIPFDEFDPTKHKYDAEYYIENQVLPAVERILRAFGYRKEDLRYQKTRQVGLSAWLKPKGT

SEQ ID NO: 1129 - protein, 774 aa, synthetic construct
MILDTDYITEDGKPVLRIFKKENGEFKIEYDRTFEPYFYALLKDDSAIEEVKKITAERHGTVVTVKRVEKVQKKFLGRPVEVWKLYFTHSQDQPAIRDKIREHPAVIDIYEYDIPFAKRYLIDKGLVPMEGDEELKMLAFDIETLYHEGEEFAEGPILMISYADEEGARVITWKNVDLPYVDVVSTEREMIKRFLRVVKEKDPDVLITYNGDNFDFAYLKKRCEKLGINFALGRDGSEPKIQRMGDRFAVEVKGRIHFDLYPVIRRTINLPTYTLEAVYEAVFGQPKEKVYAEEITTAWETGENLERVARYSMEDAKVTYELGKEFLPMEAQLSRLIGQSLWDVSRSSTGNLVEWFLLRKAYERNELAPNKPDEKELARRRQSYEGGYVKEPERGLWENIVYLDFRSLYPSIIITHNVSPDTLNREGCKEYDVAPQVGHRFCKDFPGFIPSLLGDLLEERQKIKKKMKATIDPIERKLLDYRQRAIKILANSYYGYYGYARARWYCKECAESVTAWGREYITMTIKEIEEKYGFKVIYSDTDGFFATIPGADAETVKKKAMEFLKYINAKLPGALELEYEGFYKRGFFVTKKKYAVIDEEGKITTRGLEIVRRDWSEIAKETQARVLEALLKDGDVEKAVRIVKEVTEKLSKYEVPPEKLVIHEQITRDLKDYKATGPHVAVAKRLAARGVKIRPGTVISYIVLKGSGRIGDRAIPFDEFDPTKHKYDAEYYIENQVLPAVERILRAFGYRKEDLRYQKTRQVGLSAWLKPKGT

SEQ ID NO: 1130 - protein, 774 aa, synthetic construct
MILDTDYITEDGKPVLRIFKKENGEFKIEYDRTFEPYFYALLKDDSAIEEVKKITAERHGTVVTVKRVEKVQKKFLGRPVEVWKLYFTHSQDRPAIRDKIREHPAVIDIYEYDIPFAKRYLIDKGLVPMEGDEELKMLAFDIETLYHEGEEFAEGPILMISYADEEGARVITWKNVDLPYVDVVSTEREMIKRFLRVVKEKDPDVLITYNGDNFDFAYLKKRCEKLGINFALGRDGSEPKIQRMGDRFAVEVKGRIHFDLYPVIRRTINLPTYTLEAVYEAVFGQPKEKVYAEEITTAWETGENLERVARYSMEDAKVTYELGKEFLPMEAQLSRLIGQSLWDVSRSSTGNLVEWFLLRKAYERNELAPNKPDEKELARRRQSYEGGYVKEPERGLWENIVYLDFRSLYPSIIITHNVSPDTLNREGCKEYDVAPQVGHRFCKDFPGFIPSLLGDLLEERQKIKKKMKATIDPIERKLLDYRQRAIKILANSYYGYYGYARARWYCKECAESVTAWGREYITMTIKEIEEKYGFKVIYSDTDGFFATIPGADAETVKKKAMEFLKYINAKLPGALELEYEGFYKRGFFVTKKKYAVIDEEGKITTRGLEIVRRDWSEIAKETQARVLEALLKDGDVEKAVRIVKEVTEKLSKYEVPPEKLVIHEQITRDLKDYKATGPHVAVAKRLAARGVKIRPGTVISYIVLKGSGRIGDRAIPFDEFDPTKHKYDAEYYIENQVLPAVERILRAFGYRKEDLRYQKTRQVGLSAWLKPKGT

SEQ ID NO: 1131 - protein, 774 aa, synthetic construct
MILDTDYITEDGKPVLRIFKKENGEFKIEYDRTFEPYFYALLKDDSAIEEVKKITAERHGTVVTVKRVEKVQKKFLGRPVEVWKLYFTHWQDVPAIRDKIREHPAVIDIYEYDIPFAKRYLIDKGLVPMEGDEELKMLAFDIETLYHEGEEFAEGPILMISYADEEGARVITWKNVDLPYVDVVSTEREMIKRFLRVVKEKDPDVLITYNGDNFDFAYLKKRCEKLGINFALGRDGSEPKIQRMGDRFAVEVKGRIHFDLYPVIRRTINLPTYTLEAVYEAVFGQPKEKVYAEEITTAWETGENLERVARYSMEDAKVTYELGKEFLPMEAQLSRLIGQSLWDVSRSSTGNLVEWFLLRKAYERNELAPNKPDEKELARRRQSYEGGYVKEPERGLWENIVYLDFRSLYPSIIITHNVSPDTLNREGCKEYDVAPQVGHRFCKDFPGFIPSLLGDLLEERQKIKKKMKATIDPIERKLLDYRQRAIKILANSYYGYYGYARARWYCKECAESVTAWGREYITMTIKEIEEKYGFKVIYSDTDGFFATIPGADAETVKKKAMEFLKYINAKLPGALELEYEGFYKRGFFVTKKKYAVIDEEGKITTRGLEIVRRDWSEIAKETQARVLEALLKDGDVEKAVRIVKEVTEKLSKYEVPPEKLVIHEQITRDLKDYKATGPHVAVAKRLAARGVKIRPGTVISYIVLKGSGRIGDRAIPFDEFDPTKHKYDAEYYIENQVLPAVERILRAFGYRKEDLRYQKTRQVGLSAWLKPKGT

SEQ ID NO: 1132 - protein, 774 aa, synthetic construct
MILDTDYITEDGKPVLRIFKKENGEFKIEYDRTFEPYFYALLKDDSAIEEVKKITAERHGTVVTVKRVEKVQKKFLGRPVEVWKLYFTHWQDVPAIADKIREHPAVIDIYEYDIPFAKRYLIDKGLVPMEGDEELKMLAFDIETLYHEGEEFAEGPILMISYADEEGARVITWKNVDLPYVDVVSTEREMIKRFLRVVKEKDPDVLITYNGDNFDFAYLKKRCEKLGINFALGRDGSEPKIQRMGDRFAVEVKGRIHFDLYPVIRRTINLPTYTLEAVYEAVFGQPKEKVYAEEITTAWETGENLERVARYSMEDAKVTYELGKEFLPMEAQLSRLIGQSLWDVSRSSTGNLVEWFLLRKAYERNELAPNKPDEKELARRRQSYEGGYVKEPERGLWENIVYLDFRSLYPSIIITHNVSPDTLNREGCKEYDVAPQVGHRFCKDFPGFIPSLLGDLLEERQKIKKKMKATIDPIERKLLDYRQRAIKILANSYYGYYGYARARWYCKECAESVTAWGREYITMTIKEIEEKYGFKVIYSDTDGFFATIPGADAETVKKKAMEFLKYINAKLPGALELEYEGFYKRGFFVTKKKYAVIDEEGKITTRGLEIVRRDWSEIAKETQARVLEALLKDGDVEKAVRIVKEVTEKLSKYEVPPEKLVIHEQITRDLKDYKATGPHVAVAKRLAARGVKIRPGTVISYIVLKGSGRIGDRAIPFDEFDPTKHKYDAEYYIENQVLPAVERILRAFGYRKEDLRYQKTRQVGLSAWLKPKGT

SEQ ID NO: 1133 - protein, 774 aa, synthetic construct
MILDTDYITEDGKPVLRIFKKENGEFKIEYDRTFEPYFYALLKDDSAIEEVKKITAERHGTVVTVKRVEKVQKKFLGRPVEVWKLYFTHWQDVPAIFDKIREHPAVIDIYEYDIPFAKRYLIDKGLVPMEGDEELKMLAFDIETLYHEGEEFAEGPILMISYADEEGARVITWKNVDLPYVDVVSTEREMIKRFLRVVKEKDPDVLITYNGDNFDFAYLKKRCEKLGINFALGRDGSEPKIQRMGDRFAVEVKGRIHFDLYPVIRRTINLPTYTLEAVYEAVFGQPKEKVYAEEITTAWETGENLERVARYSMEDAKVTYELGKEFLPMEAQLSRLIGQSLWDVSRSSTGNLVEWFLLRKAYERNELAPNKPDEKELARRRQSYEGGYVKEPERGLWENIVYLDFRSLYPSIIITHNVSPDTLNREGCKEYDVAPQVGHRFCKDFPGFIPSLLGDLLEERQKIKKKMKATIDPIERKLLDYRQRAIKILANSYYGYYGYARARWYCKECAESVTAWGREYITMTIKEIEEKYGFKVIYSDTDGFFATIPGADAETVKKKAMEFLKYINAKLPGALELEYEGFYKRGFFVTKKKYAVIDEEGKITTRGLEIVRRDWSEIAKETQARVLEALLKDGDVEKAVRIVKEVTEKLSKYEVPPEKLVIHEQITRDLKDYKATGPHVAVAKRLAARGVKIRPGTVISYIVLKGSGRIGDRAIPFDEFDPTKHKYDAEYYIENQVLPAVERILRAFGYRKEDLRYQKTRQVGLSAWLKPKGT

SEQ ID NO: 1134 - protein, 774 aa, synthetic construct
MILDTDYITEDGKPVLRIFKKENGEFKIEYDRTFEPYFYALLKDDSAIEEVKKITAERHGTVVTVKRVEKVQKKFLGRPVEVWKLYFTHWQDVPAIHDKIREHPAVIDIYEYDIPFAKRYLIDKGLVPMEGDEELKMLAFDIETLYHEGEEFAEGPILMISYADEEGARVITWKNVDLPYVDVVSTEREMIKRFLRVVKEKDPDVLITYNGDNFDFAYLKKRCEKLGINFALGRDGSEPKIQRMGDRFAVEVKGRIHFDLYPVIRRTINLPTYTLEAVYEAVFGQPKEKVYAEEITTAWETGENLERVARYSMEDAKVTYELGKEFLPMEAQLSRLIGQSLWDVSRSSTGNLVEWFLLRKAYERNELAPNKPDEKELARRRQSYEGGYVKEPERGLWENIVYLDFRSLYPSIIITHNVSPDTLNREGCKEYDVAPQVGHRFCKDFPGFIPSLLGDLLEERQKIKKKMKATIDPIERKLLDYRQRAIKILANSYYGYYGYARARWYCKECAESVTAWGREYITMTIKEIEEKYGFKVIYSDTDGFFATIPGADAETVKKKAMEFLKYINAKLPGALELEYEGFYKRGFFVTKKKYAVIDEEGKITTRGLEIVRRDWSEIAKETQARVLEALLKDGDVEKAVRIVKEVTEKLSKYEVPPEKLVIHEQITRDLKDYKATGPHVAVAKRLAARGVKIRPGTVISYIVLKGSGRIGDRAIPFDEFDPTKHKYDAEYYIENQVLPAVERILRAFGYRKEDLRYQKTRQVGLSAWLKPKGT

SEQ ID NO: 1135 - protein, 774 aa, synthetic construct
MILDTDYITEDGKPVLRIFKKENGEFKIEYDRTFEPYFYALLKDDSAIEEVKKITAERHGTVVTVKRVEKVQKKFLGRPVEVWKLYFTHWQDEPAIHDKIREHPAVIDIYEYDIPFAKRYLIDKGLVPMEGDEELKMLAFDIETLYHEGEEFAEGPILMISYADEEGARVITWKNVDLPYVDVVSTEREMIKRFLRVVKEKDPDVLITYNGDNFDFAYLKKRCEKLGINFALGRDGSEPKIQRMGDRFAVEVKGRIHFDLYPVIRRTINLPTYTLEAVYEAVFGQPKEKVYAEEITTAWETGENLERVARYSMEDAKVTYELGKEFLPMEAQLSRLIGQSLWDVSRSSTGNLVEWFLLRKAYERNELAPNKPDEKELARRRQSYEGGYVKEPERGLWENIVYLDFRSLYPSIIITHNVSPDTLNREGCKEYDVAPQVGHRFCKDFPGFIPSLLGDLLEERQKIKKKMKATIDPIERKLLDYRQRAIKILANSYYGYYGYARARWYCKECAESVTAWGREYITMTIKEIEEKYGFKVIYSDTDGFFATIPGADAETVKKKAMEFLKYINAKLPGALELEYEGFYKRGFFVTKKKYAVIDEEGKITTRGLEIVRRDWSEIAKETQARVLEALLKDGDVEKAVRIVKEVTEKLSKYEVPPEKLVIHEQITRDLKDYKATGPHVAVAKRLAARGVKIRPGTVISYIVLKGSGRIGDRAIPFDEFDPTKHKYDAEYYIENQVLPAVERILRAFGYRKEDLRYQKTRQVGLSAWLKPKGT

SEQ ID NO: 1136 - protein, 774 aa, synthetic construct
MILDTDYITEDGKPVLRIFKKENGEFKIEYDRTFEPYFYALLKDDSAIEEVKKITAERHGTVVTVKRVEKVQKKFLGRPVEVWKLYFTHWQDIPAIRDKIREHPAVIDIYEYDIPFAKRYLIDKGLVPMEGDEELKMLAFDIETLYHEGEEFAEGPILMISYADEEGARVITWKNVDLPYVDVVSTEREMIKRFLRVVKEKDPDVLITYNGDNFDFAYLKKRCEKLGINFALGRDGSEPKIQRMGDRFAVEVKGRIHFDLYPVIRRTINLPTYTLEAVYEAVFGQPKEKVYAEEITTAWETGENLERVARYSMEDAKVTYELGKEFLPMEAQLSRLIGQSLWDVSRSSTGNLVEWFLLRKAYERNELAPNKPDEKELARRRQSYEGGYVKEPERGLWENIVYLDFRSLYPSIIITHNVSPDTLNREGCKEYDVAPQVGHRFCKDFPGFIPSLLGDLLEERQKIKKKMKATIDPIERKLLDYRQRAIKILANSYYGYYGYARARWYCKECAESVTAWGREYITMTIKEIEEKYGFKVIYSDTDGFFATIPGADAETVKKKAMEFLKYINAKLPGALELEYEGFYKRGFFVTKKKYAVIDEEGKITTRGLEIVRRDWSEIAKETQARVLEALLKDGDVEKAVRIVKEVTEKLSKYEVPPEKLVIHEQITRDLKDYKATGPHVAVAKRLAARGVKIRPGTVISYIVLKGSGRIGDRAIPFDEFDPTKHKYDAEYYIENQVLPAVERILRAFGYRKEDLRYQKTRQVGLSAWLKPKGT

SEQ ID NO: 1137 - protein, 774 aa, synthetic construct
MILDTDYITEDGKPVLRIFKKENGEFKIEYDRTFEPYFYALLKDDSAIEEVKKITAERHGTVVTVKRVEKVQKKFLGRPVEVWKLYFTHWQDIPAIADKIREHPAVIDIYEYDIPFAKRYLIDKGLVPMEGDEELKMLAFDIETLYHEGEEFAEGPILMISYADEEGARVITWKNVDLPYVDVVSTEREMIKRFLRVVKEKDPDVLITYNGDNFDFAYLKKRCEKLGINFALGRDGSEPKIQRMGDRFAVEVKGRIHFDLYPVIRRTINLPTYTLEAVYEAVFGQPKEKVYAEEITTAWETGENLERVARYSMEDAKVTYELGKEFLPMEAQLSRLIGQSLWDVSRSSTGNLVEWFLLRKAYERNELAPNKPDEKELARRRQSYEGGYVKEPERGLWENIVYLDFRSLYPSIIITHNVSPDTLNREGCKEYDVAPQVGHRFCKDFPGFIPSLLGDLLEERQKIKKKMKATIDPIERKLLDYRQRAIKILANSYYGYYGYARARWYCKECAESVTAWGREYITMTIKEIEEKYGFKVIYSDTDGFFATIPGADAETVKKKAMEFLKYINAKLPGALELEYEGFYKRGFFVTKKKYAVIDEEGKITTRGLEIVRRDWSEIAKETQARVLEALLKDGDVEKAVRIVKEVTEKLSKYEVPPEKLVIHEQITRDLKDYKATGPHVAVAKRLAARGVKIRPGTVISYIVLKGSGRIGDRAIPFDEFDPTKHKYDAEYYIENQVLPAVERILRAFGYRKEDLRYQKTRQVGLSAWLKPKGT

SEQ ID NO: 1138 - protein, 774 aa, synthetic construct
MILDTDYITEDGKPVLRIFKKENGEFKIEYDRTFEPYFYALLKDDSAIEEVKKITAERHGTVVTVKRVEKVQKKFLGRPVEVWKLYFTHWQDIPAIFDKIREHPAVIDIYEYDIPFAKRYLIDKGLVPMEGDEELKMLAFDIETLYHEGEEFAEGPILMISYADEEGARVITWKNVDLPYVDVVSTEREMIKRFLRVVKEKDPDVLITYNGDNFDFAYLKKRCEKLGINFALGRDGSEPKIQRMGDRFAVEVKGRIHFDLYPVIRRTINLPTYTLEAVYEAVFGQPKEKVYAEEITTAWETGENLERVARYSMEDAKVTYELGKEFLPMEAQLSRLIGQSLWDVSRSSTGNLVEWFLLRKAYERNELAPNKPDEKELARRRQSYEGGYVKEPERGLWENIVYLDFRSLYPSIIITHNVSPDTLNREGCKEYDVAPQVGHRFCKDFPGFIPSLLGDLLEERQKIKKKMKATIDPIERKLLDYRQRAIKILANSYYGYYGYARARWYCKECAESVTAWGREYITMTIKEIEEKYGFKVIYSDTDGFFATIPGADAETVKKKAMEFLKYINAKLPGALELEYEGFYKRGFFVTKKKYAVIDEEGKITTRGLEIVRRDWSEIAKETQARVLEALLKDGDVEKAVRIVKEVTEKLSKYEVPPEKLVIHEQITRDLKDYKATGPHVAVAKRLAARGVKIRPGTVISYIVLKGSGRIGDRAIPFDEFDPTKHKYDAEYYIENQVLPAVERILRAFGYRKEDLRYQKTRQVGLSAWLKPKGT

SEQ ID NO: 1139 - protein, 774 aa, synthetic construct
MILDTDYITEDGKPVLRIFKKENGEFKIEYDRTFEPYFYALLKDDSAIEEVKKITAERHGTVVTVKRVEKVQKKFLGRPVEVWKLYFTHWQDIPAIHDKIREHPAVIDIYEYDIPFAKRYLIDKGLVPMEGDEELKMLAFDIETLYHEGEEFAEGPILMISYADEEGARVITWKNVDLPYVDVVSTEREMIKRFLRVVKEKDPDVLITYNGDNFDFAYLKKRCEKLGINFALGRDGSEPKIQRMGDRFAVEVKGRIHFDLYPVIRRTINLPTYTLEAVYEAVFGQPKEKVYAEEITTAWETGENLERVARYSMEDAKVTYELGKEFLPMEAQLSRLIGQSLWDVSRSSTGNLVEWFLLRKAYERNELAPNKPDEKELARRRQSYEGGYVKEPERGLWENIVYLDFRSLYPSIIITHNVSPDTLNREGCKEYDVAPQVGHRFCKDFPGFIPSLLGDLLEERQKIKKKMKATIDPIERKLLDYRQRAIKILANSYYGYYGYARARWYCKECAESVTAWGREYITMTIKEIEEKYGFKVIYSDTDGFFATIPGADAETVKKKAMEFLKYINAKLPGALELEYEGFYKRGFFVTKKKYAVIDEEGKITTRGLEIVRRDWSEIAKETQARVLEALLKDGDVEKAVRIVKEVTEKLSKYEVPPEKLVIHEQITRDLKDYKATGPHVAVAKRLAARGVKIRPGTVISYIVLKGSGRIGDRAIPFDEFDPTKHKYDAEYYIENQVLPAVERILRAFGYRKEDLRYQKTRQVGLSAWLKPKGT

SEQ ID NO: 1140 - protein, 774 aa, synthetic construct
MILDTDYITEDGKPVLRIFKKENGEFKIEYDRTFEPYFYALLKDDSAIEEVKKITAERHGTVVTVKRVEKVQKKFLGRPVEVWKLYFTHWQDIPAIWDKIREHPAVIDIYEYDIPFAKRYLIDKGLVPMEGDEELKMLAFDIETLYHEGEEFAEGPILMISYADEEGARVITWKNVDLPYVDVVSTEREMIKRFLRVVKEKDPDVLITYNGDNFDFAYLKKRCEKLGINFALGRDGSEPKIQRMGDRFAVEVKGRIHFDLYPVIRRTINLPTYTLEAVYEAVFGQPKEKVYAEEITTAWETGENLERVARYSMEDAKVTYELGKEFLPMEAQLSRLIGQSLWDVSRSSTGNLVEWFLLRKAYERNELAPNKPDEKELARRRQSYEGGYVKEPERGLWENIVYLDFRSLYPSIIITHNVSPDTLNREGCKEYDVAPQVGHRFCKDFPGFIPSLLGDLLEERQKIKKKMKATIDPIERKLLDYRQRAIKILANSYYGYYGYARARWYCKECAESVTAWGREYITMTIKEIEEKYGFKVIYSDTDGFFATIPGADAETVKKKAMEFLKYINAKLPGALELEYEGFYKRGFFVTKKKYAVIDEEGKITTRGLEIVRRDWSEIAKETQARVLEALLKDGDVEKAVRIVKEVTEKLSKYEVPPEKLVIHEQITRDLKDYKATGPHVAVAKRLAARGVKIRPGTVISYIVLKGSGRIGDRAIPFDEFDPTKHKYDAEYYIENQVLPAVERILRAFGYRKEDLRYQKTRQVGLSAWLKPKGT

SEQ ID NO: 1141 - protein, 774 aa, synthetic construct
MILDTDYITEDGKPVLRIFKKENGEFKIEYDRTFEPYFYALLKDDSAIEEVKKITAERHGTVVTVKRVEKVQKKFLGRPVEVWKLYFTHWQDQPAIRDKIREHPAVIDIYEYDIPFAKRYLIDKGLVPMEGDEELKMLAFDIETLYHEGEEFAEGPILMISYADEEGARVITWKNVDLPYVDVVSTEREMIKRFLRVVKEKDPDVLITYNGDNFDFAYLKKRCEKLGINFALGRDGSEPKIQRMGDRFAVEVKGRIHFDLYPVIRRTINLPTYTLEAVYEAVFGQPKEKVYAEEITTAWETGENLERVARYSMEDAKVTYELGKEFLPMEAQLSRLIGQSLWDVSRSSTGNLVEWFLLRKAYERNELAPNKPDEKELARRRQSYEGGYVKEPERGLWENIVYLDFRSLYPSIIITHNVSPDTLNREGCKEYDVAPQVGHRFCKDFPGFIPSLLGDLLEERQKIKKKMKATIDPIERKLLDYRQRAIKILANSYYGYYGYARARWYCKECAESVTAWGREYITMTIKEIEEKYGFKVIYSDTDGFFATIPGADAETVKKKAMEFLKYINAKLPGALELEYEGFYKRGFFVTKKKYAVIDEEGKITTRGLEIVRRDWSEIAKETQARVLEALLKDGDVEKAVRIVKEVTEKLSKYEVPPEKLVIHEQITRDLKDYKATGPHVAVAKRLAARGVKIRPGTVISYIVLKGSGRIGDRAIPFDEFDPTKHKYDAEYYIENQVLPAVERILRAFGYRKEDLRYQKTRQVGLSAWLKPKGT

SEQ ID NO: 1142 - protein, 774 aa, synthetic construct
MILDTDYITEDGKPVLRIFKKENGEFKIEYDRTFEPYFYALLKDDSAIEEVKKITAERHGTVVTVKRVEKVQKKFLGRPVEVWKLYFTHWQDQPAIADKIREHPAVIDIYEYDIPFAKRYLIDKGLVPMEGDEELKMLAFDIETLYHEGEEFAEGPILMISYADEEGARVITWKNVDLPYVDVVSTEREMIKRFLRVVKEKDPDVLITYNGDNFDFAYLKKRCEKLGINFALGRDGSEPKIQRMGDRFAVEVKGRIHFDLYPVIRRTINLPTYTLEAVYEAVFGQPKEKVYAEEITTAWETGENLERVARYSMEDAKVTYELGKEFLPMEAQLSRLIGQSLWDVSRSSTGNLVEWFLLRKAYERNELAPNKPDEKELARRRQSYEGGYVKEPERGLWENIVYLDFRSLYPSIIITHNVSPDTLNREGCKEYDVAPQVGHRFCKDFPGFIPSLLGDLLEERQKIKKKMKATIDPIERKLLDYRQRAIKILANSYYGYYGYARARWYCKECAESVTAWGREYITMTIKEIEEKYGFKVIYSDTDGFFATIPGADAETVKKKAMEFLKYINAKLPGALELEYEGFYKRGFFVTKKKYAVIDEEGKITTRGLEIVRRDWSEIAKETQARVLEALLKDGDVEKAVRIVKEVTEKLSKYEVPPEKLVIHEQITRDLKDYKATGPHVAVAKRLAARGVKIRPGTVISYIVLKGSGRIGDRAIPFDEFDPTKHKYDAEYYIENQVLPAVERILRAFGYRKEDLRYQKTRQVGLSAWLKPKGT

SEQ ID NO: 1143 - protein, 774 aa, synthetic construct
MILDTDYITEDGKPVLRIFKKENGEFKIEYDRTFEPYFYALLKDDSAIEEVKKITAERHGTVVTVKRVEKVQKKFLGRPVEVWKLYFTHWQDQPAIFDKIREHPAVIDIYEYDIPFAKRYLIDKGLVPMEGDEELKMLAFDIETLYHEGEEFAEGPILMISYADEEGARVITWKNVDLPYVDVVSTEREMIKRFLRVVKEKDPDVLITYNGDNFDFAYLKKRCEKLGINFALGRDGSEPKIQRMGDRFAVEVKGRIHFDLYPVIRRTINLPTYTLEAVYEAVFGQPKEKVYAEEITTAWETGENLERVARYSMEDAKVTYELGKEFLPMEAQLSRLIGQSLWDVSRSSTGNLVEWFLLRKAYERNELAPNKPDEKELARRRQSYEGGYVKEPERGLWENIVYLDFRSLYPSIIITHNVSPDTLNREGCKEYDVAPQVGHRFCKDFPGFIPSLLGDLLEERQKIKKKMKATIDPIERKLLDYRQRAIKILANSYYGYYGYARARWYCKECAESVTAWGREYITMTIKEIEEKYGFKVIYSDTDGFFATIPGADAETVKKKAMEFLKYINAKLPGALELEYEGFYKRGFFVTKKKYAVIDEEGKITTRGLEIVRRDWSEIAKETQARVLEALLKDGDVEKAVRIVKEVTEKLSKYEVPPEKLVIHEQITRDLKDYKATGPHVAVAKRLAARGVKIRPGTVISYIVLKGSGRIGDRAIPFDEFDPTKHKYDAEYYIENQVLPAVERILRAFGYRKEDLRYQKTRQVGLSAWLKPKGT

SEQ ID NO: 1144 - protein, 774 aa, synthetic construct
MILDTDYITEDGKPVLRIFKKENGEFKIEYDRTFEPYFYALLKDDSAIEEVKKITAERHGTVVTVKRVEKVQKKFLGRPVEVWKLYFTHWQDQPAIHDKIREHPAVIDIYEYDIPFAKRYLIDKGLVPMEGDEELKMLAFDIETLYHEGEEFAEGPILMISYADEEGARVITWKNVDLPYVDVVSTEREMIKRFLRVVKEKDPDVLITYNGDNFDFAYLKKRCEKLGINFALGRDGSEPKIQRMGDRFAVEVKGRIHFDLYPVIRRTINLPTYTLEAVYEAVFGQPKEKVYAEEITTAWETGENLERVARYSMEDAKVTYELGKEFLPMEAQLSRLIGQSLWDVSRSSTGNLVEWFLLRKAYERNELAPNKPDEKELARRRQSYEGGYVKEPERGLWENIVYLDFRSLYPSIIITHNVSPDTLNREGCKEYDVAPQVGHRFCKDFPGFIPSLLGDLLEERQKIKKKMKATIDPIERKLLDYRQRAIKILANSYYGYYGYARARWYCKECAESVTAWGREYITMTIKEIEEKYGFKVIYSDTDGFFATIPGADAETVKKKAMEFLKYINAKLPGALELEYEGFYKRGFFVTKKKYAVIDEEGKITTRGLEIVRRDWSEIAKETQARVLEALLKDGDVEKAVRIVKEVTEKLSKYEVPPEKLVIHEQITRDLKDYKATGPHVAVAKRLAARGVKIRPGTVISYIVLKGSGRIGDRAIPFDEFDPTKHKYDAEYYIENQVLPAVERILRAFGYRKEDLRYQKTRQVGLSAWLKPKGT

SEQ ID NO: 1145 - protein, 774 aa, synthetic construct
MILDTDYITEDGKPVLRIFKKENGEFKIEYDRTFEPYFYALLKDDSAIEEVKKITAERHGTVVTVKRVEKVQKKFLGRPVEVWKLYFTHWQDRPAIADKIREHPAVIDIYEYDIPFAKRYLIDKGLVPMEGDEELKMLAFDIETLYHEGEEFAEGPILMISYADEEGARVITWKNVDLPYVDVVSTEREMIKRFLRVVKEKDPDVLITYNGDNFDFAYLKKRCEKLGINFALGRDGSEPKIQRMGDRFAVEVKGRIHFDLYPVIRRTINLPTYTLEAVYEAVFGQPKEKVYAEEITTAWETGENLERVARYSMEDAKVTYELGKEFLPMEAQLSRLIGQSLWDVSRSSTGNLVEWFLLRKAYERNELAPNKPDEKELARRRQSYEGGYVKEPERGLWENIVYLDFRSLYPSIIITHNVSPDTLNREGCKEYDVAPQVGHRFCKDFPGFIPSLLGDLLEERQKIKKKMKATIDPIERKLLDYRQRAIKILANSYYGYYGYARARWYCKECAESVTAWGREYITMTIKEIEEKYGFKVIYSDTDGFFATIPGADAETVKKKAMEFLKYINAKLPGALELEYEGFYKRGFFVTKKKYAVIDEEGKITTRGLEIVRRDWSEIAKETQARVLEALLKDGDVEKAVRIVKEVTEKLSKYEVPPEKLVIHEQITRDLKDYKATGPHVAVAKRLAARGVKIRPGTVISYIVLKGSGRIGDRAIPFDEFDPTKHKYDAEYYIENQVLPAVERILRAFGYRKEDLRYQKTRQVGLSAWLKPKGT

SEQ ID NO: 1146 - protein, 774 aa, synthetic construct
MILDTDYITEDGKPVLRIFKKENGEFKIEYDRTFEPYFYALLKDDSAIEEVKKITAERHGTVVTVKRVEKVQKKFLGRPVEVWKLYFTHYQDVPAIRDKIREHPAVIDIYEYDIPFAKRYLIDKGLVPMEGDEELKMLAFDIETLYHEGEEFAEGPILMISYADEEGARVITWKNVDLPYVDVVSTEREMIKRFLRVVKEKDPDVLITYNGDNFDFAYLKKRCEKLGINFALGRDGSEPKIQRMGDRFAVEVKGRIHFDLYPVIRRTINLPTYTLEAVYEAVFGQPKEKVYAEEITTAWETGENLERVARYSMEDAKVTYELGKEFLPMEAQLSRLIGQSLWDVSRSSTGNLVEWFLLRKAYERNELAPNKPDEKELARRRQSYEGGYVKEPERGLWENIVYLDFRSLYPSIIITHNVSPDTLNREGCKEYDVAPQVGHRFCKDFPGFIPSLLGDLLEERQKIKKKMKATIDPIERKLLDYRQRAIKILANSYYGYYGYARARWYCKECAESVTAWGREYITMTIKEIEEKYGFKVIYSDTDGFFATIPGADAETVKKKAMEFLKYINAKLPGALELEYEGFYKRGFFVTKKKYAVIDEEGKITTRGLEIVRRDWSEIAKETQARVLEALLKDGDVEKAVRIVKEVTEKLSKYEVPPEKLVIHEQITRDLKDYKATGPHVAVAKRLAARGVKIRPGTVISYIVLKGSGRIGDRAIPFDEFDPTKHKYDAEYYIENQVLPAVERILRAFGYRKEDLRYQKTRQVGLSAWLKPKGT

SEQ ID NO: 1147 - protein, 774 aa, synthetic construct
MILDTDYITEDGKPVLRIFKKENGEFKIEYDRTFEPYFYALLKDDSAIEEVKKITAERHGTVVTVKRVEKVQKKFLGRPVEVWKLYFTHYQDVPAIADKIREHPAVIDIYEYDIPFAKRYLIDKGLVPMEGDEELKMLAFDIETLYHEGEEFAEGPILMISYADEEGARVITWKNVDLPYVDVVSTEREMIKRFLRVVKEKDPDVLITYNGDNFDFAYLKKRCEKLGINFALGRDGSEPKIQRMGDRFAVEVKGRIHFDLYPVIRRTINLPTYTLEAVYEAVFGQPKEKVYAEEITTAWETGENLERVARYSMEDAKVTYELGKEFLPMEAQLSRLIGQSLWDVSRSSTGNLVEWFLLRKAYERNELAPNKPDEKELARRRQSYEGGYVKEPERGLWENIVYLDFRSLYPSIIITHNVSPDTLNREGCKEYDVAPQVGHRFCKDFPGFIPSLLGDLLEERQKIKKKMKATIDPIERKLLDYRQRAIKILANSYYGYYGYARARWYCKECAESVTAWGREYITMTIKEIEEKYGFKVIYSDTDGFFATIPGADAETVKKKAMEFLKYINAKLPGALELEYEGFYKRGFFVTKKKYAVIDEEGKITTRGLEIVRRDWSEIAKETQARVLEALLKDGDVEKAVRIVKEVTEKLSKYEVPPEKLVIHEQITRDLKDYKATGPHVAVAKRLAARGVKIRPGTVISYIVLKGSGRIGDRAIPFDEFDPTKHKYDAEYYIENQVLPAVERILRAFGYRKEDLRYQKTRQVGLSAWLKPKGT

SEQ ID NO: 1148 - protein, 774 aa, synthetic construct
MILDTDYITEDGKPVLRIFKKENGEFKIEYDRTFEPYFYALLKDDSAIEEVKKITAERHGTVVTVKRVEKVQKKFLGRPVEVWKLYFTHYQDVPAIFDKIREHPAVIDIYEYDIPFAKRYLIDKGLVPMEGDEELKMLAFDIETLYHEGEEFAEGPILMISYADEEGARVITWKNVDLPYVDVVSTEREMIKRFLRVVKEKDPDVLITYNGDNFDFAYLKKRCEKLGINFALGRDGSEPKIQRMGDRFAVEVKGRIHFDLYPVIRRTINLPTYTLEAVYEAVFGQPKEKVYAEEITTAWETGENLERVARYSMEDAKVTYELGKEFLPMEAQLSRLIGQSLWDVSRSSTGNLVEWFLLRKAYERNELAPNKPDEKELARRRQSYEGGYVKEPERGLWENIVYLDFRSLYPSIIITHNVSPDTLNREGCKEYDVAPQVGHRFCKDFPGFIPSLLGDLLEERQKIKKKMKATIDPIERKLLDYRQRAIKILANSYYGYYGYARARWYCKECAESVTAWGREYITMTIKEIEEKYGFKVIYSDTDGFFATIPGADAETVKKKAMEFLKYINAKLPGALELEYEGFYKRGFFVTKKKYAVIDEEGKITTRGLEIVRRDWSEIAKETQARVLEALLKDGDVEKAVRIVKEVTEKLSKYEVPPEKLVIHEQITRDLKDYKATGPHVAVAKRLAARGVKIRPGTVISYIVLKGSGRIGDRAIPFDEFDPTKHKYDAEYYIENQVLPAVERILRAFGYRKEDLRYQKTRQVGLSAWLKPKGT

SEQ ID NO: 1149 - protein, 774 aa, synthetic construct
MILDTDYITEDGKPVLRIFKKENGEFKIEYDRTFEPYFYALLKDDSAIEEVKKITAERHGTVVTVKRVEKVQKKFLGRPVEVWKLYFTHYQDVPAIHDKIREHPAVIDIYEYDIPFAKRYLIDKGLVPMEGDEELKMLAFDIETLYHEGEEFAEGPILMISYADEEGARVITWKNVDLPYVDVVSTEREMIKRFLRVVKEKDPDVLITYNGDNFDFAYLKKRCEKLGINFALGRDGSEPKIQRMGDRFAVEVKGRIHFDLYPVIRRTINLPTYTLEAVYEAVFGQPKEKVYAEEITTAWETGENLERVARYSMEDAKVTYELGKEFLPMEAQLSRLIGQSLWDVSRSSTGNLVEWFLLRKAYERNELAPNKPDEKELARRRQSYEGGYVKEPERGLWENIVYLDFRSLYPSIIITHNVSPDTLNREGCKEYDVAPQVGHRFCKDFPGFIPSLLGDLLEERQKIKKKMKATIDPIERKLLDYRQRAIKILANSYYGYYGYARARWYCKECAESVTAWGREYITMTIKEIEEKYGFKVIYSDTDGFFATIPGADAETVKKKAMEFLKYINAKLPGALELEYEGFYKRGFFVTKKKYAVIDEEGKITTRGLEIVRRDWSEIAKETQARVLEALLKDGDVEKAVRIVKEVTEKLSKYEVPPEKLVIHEQITRDLKDYKATGPHVAVAKRLAARGVKIRPGTVISYIVLKGSGRIGDRAIPFDEFDPTKHKYDAEYYIENQVLPAVERILRAFGYRKEDLRYQKTRQVGLSAWLKPKGT

SEQ ID NO: 1150 - protein, 774 aa, synthetic construct
MILDTDYITEDGKPVLRIFKKENGEFKIEYDRTFEPYFYALLKDDSAIEEVKKITAERHGTVVTVKRVEKVQKKFLGRPVEVWKLYFTHYQDVPAIWDKIREHPAVIDIYEYDIPFAKRYLIDKGLVPMEGDEELKMLAFDIETLYHEGEEFAEGPILMISYADEEGARVITWKNVDLPYVDVVSTEREMIKRFLRVVKEKDPDVLITYNGDNFDFAYLKKRCEKLGINFALGRDGSEPKIQRMGDRFAVEVKGRIHFDLYPVIRRTINLPTYTLEAVYEAVFGQPKEKVYAEEITTAWETGENLERVARYSMEDAKVTYELGKEFLPMEAQLSRLIGQSLWDVSRSSTGNLVEWFLLRKAYERNELAPNKPDEKELARRRQSYEGGYVKEPERGLWENIVYLDFRSLYPSIIITHNVSPDTLNREGCKEYDVAPQVGHRFCKDFPGFIPSLLGDLLEERQKIKKKMKATIDPIERKLLDYRQRAIKILANSYYGYYGYARARWYCKECAESVTAWGREYITMTIKEIEEKYGFKVIYSDTDGFFATIPGADAETVKKKAMEFLKYINAKLPGALELEYEGFYKRGFFVTKKKYAVIDEEGKITTRGLEIVRRDWSEIAKETQARVLEALLKDGDVEKAVRIVKEVTEKLSKYEVPPEKLVIHEQITRDLKDYKATGPHVAVAKRLAARGVKIRPGTVISYIVLKGSGRIGDRAIPFDEFDPTKHKYDAEYYIENQVLPAVERILRAFGYRKEDLRYQKTRQVGLSAWLKPKGT

SEQ ID NO: 1151 - protein, 774 aa, synthetic construct
MILDTDYITEDGKPVLRIFKKENGEFKIEYDRTFEPYFYALLKDDSAIEEVKKITAERHGTVVTVKRVEKVQKKFLGRPVEVWKLYFTHYQDIPAIRDKIREHPAVIDIYEYDIPFAKRYLIDKGLVPMEGDEELKMLAFDIETLYHEGEEFAEGPILMISYADEEGARVITWKNVDLPYVDVVSTEREMIKRFLRVVKEKDPDVLITYNGDNFDFAYLKKRCEKLGINFALGRDGSEPKIQRMGDRFAVEVKGRIHFDLYPVIRRTINLPTYTLEAVYEAVFGQPKEKVYAEEITTAWETGENLERVARYSMEDAKVTYELGKEFLPMEAQLSRLIGQSLWDVSRSSTGNLVEWFLLRKAYERNELAPNKPDEKELARRRQSYEGGYVKEPERGLWENIVYLDFRSLYPSIIITHNVSPDTLNREGCKEYDVAPQVGHRFCKDFPGFIPSLLGDLLEERQKIKKKMKATIDPIERKLLDYRQRAIKILANSYYGYYGYARARWYCKECAESVTAWGREYITMTIKEIEEKYGFKVIYSDTDGFFATIPGADAETVKKKAMEFLKYINAKLPGALELEYEGFYKRGFFVTKKKYAVIDEEGKITTRGLEIVRRDWSEIAKETQARVLEALLKDGDVEKAVRIVKEVTEKLSKYEVPPEKLVIHEQITRDLKDYKATGPHVAVAKRLAARGVKIRPGTVISYIVLKGSGRIGDRAIPFDEFDPTKHKYDAEYYIENQVLPAVERILRAFGYRKEDLRYQKTRQVGLSAWLKPKGT

SEQ ID NO: 1152 - protein, 774 aa, synthetic construct
MILDTDYITEDGKPVLRIFKKENGEFKIEYDRTFEPYFYALLKDDSAIEEVKKITAERHGTVVTVKRVEKVQKKFLGRPVEVWKLYFTHYQDIPAIADKIREHPAVIDIYEYDIPFAKRYLIDKGLVPMEGDEELKMLAFDIETLYHEGEEFAEGPILMISYADEEGARVITWKNVDLPYVDVVSTEREMIKRFLRVVKEKDPDVLITYNGDNFDFAYLKKRCEKLGINFALGRDGSEPKIQRMGDRFAVEVKGRIHFDLYPVIRRTINLPTYTLEAVYEAVFGQPKEKVYAEEITTAWETGENLERVARYSMEDAKVTYELGKEFLPMEAQLSRLIGQSLWDVSRSSTGNLVEWFLLRKAYERNELAPNKPDEKELARRRQSYEGGYVKEPERGLWENIVYLDFRSLYPSIIITHNVSPDTLNREGCKEYDVAPQVGHRFCKDFPGFIPSLLGDLLEERQKIKKKMKATIDPIERKLLDYRQRAIKILANSYYGYYGYARARWYCKECAESVTAWGREYITMTIKEIEEKYGFKVIYSDTDGFFATIPGADAETVKKKAMEFLKYINAKLPGALELEYEGFYKRGFFVTKKKYAVIDEEGKITTRGLEIVRRDWSEIAKETQARVLEALLKDGDVEKAVRIVKEVTEKLSKYEVPPEKLVIHEQITRDLKDYKATGPHVAVAKRLAARGVKIRPGTVISYIVLKGSGRIGDRAIPFDEFDPTKHKYDAEYYIENQVLPAVERILRAFGYRKEDLRYQKTRQVGLSAWLKPKGT

SEQ ID NO: 1153 - protein, 774 aa, synthetic construct
MILDTDYITEDGKPVLRIFKKENGEFKIEYDRTFEPYFYALLKDDSAIEEVKKITAERHGTVVTVKRVEKVQKKFLGRPVEVWKLYFTHYQDIPAIFDKIREHPAVIDIYEYDIPFAKRYLIDKGLVPMEGDEELKMLAFDIETLYHEGEEFAEGPILMISYADEEGARVITWKNVDLPYVDVVSTEREMIKRFLRVVKEKDPDVLITYNGDNFDFAYLKKRCEKLGINFALGRDGSEPKIQRMGDRFAVEVKGRIHFDLYPVIRRTINLPTYTLEAVYEAVFGQPKEKVYAEEITTAWETGENLERVARYSMEDAKVTYELGKEFLPMEAQLSRLIGQSLWDVSRSSTGNLVEWFLLRKAYERNELAPNKPDEKELARRRQSYEGGYVKEPERGLWENIVYLDFRSLYPSIIITHNVSPDTLNREGCKEYDVAPQVGHRFCKDFPGFIPSLLGDLLEERQKIKKKMKATIDPIERKLLDYRQRAIKILANSYYGYYGYARARWYCKECAESVTAWGREYITMTIKEIEEKYGFKVIYSDTDGFFATIPGADAETVKKKAMEFLKYINAKLPGALELEYEGFYKRGFFVTKKKYAVIDEEGKITTRGLEIVRRDWSEIAKETQARVLEALLKDGDVEKAVRIVKEVTEKLSKYEVPPEKLVIHEQITRDLKDYKATGPHVAVAKRLAARGVKIRPGTVISYIVLKGSGRIGDRAIPFDEFDPTKHKYDAEYYIENQVLPAVERILRAFGYRKEDLRYQKTRQVGLSAWLKPKGT

SEQ ID NO: 1154 - protein, 774 aa, synthetic construct
MILDTDYITEDGKPVLRIFKKENGEFKIEYDRTFEPYFYALLKDDSAIEEVKKITAERHGTVVTVKRVEKVQKKFLGRPVEVWKLYFTHYQDIPAIHDKIREHPAVIDIYEYDIPFAKRYLIDKGLVPMEGDEELKMLAFDIETLYHEGEEFAEGPILMISYADEEGARVITWKNVDLPYVDVVSTEREMIKRFLRVVKEKDPDVLITYNGDNFDFAYLKKRCEKLGINFALGRDGSEPKIQRMGDRFAVEVKGRIHFDLYPVIRRTINLPTYTLEAVYEAVFGQPKEKVYAEEITTAWETGENLERVARYSMEDAKVTYELGKEFLPMEAQLSRLIGQSLWDVSRSSTGNLVEWFLLRKAYERNELAPNKPDEKELARRRQSYEGGYVKEPERGLWENIVYLDFRSLYPSIIITHNVSPDTLNREGCKEYDVAPQVGHRFCKDFPGFIPSLLGDLLEERQKIKKKMKATIDPIERKLLDYRQRAIKILANSYYGYYGYARARWYCKECAESVTAWGREYITMTIKEIEEKYGFKVIYSDTDGFFATIPGADAETVKKKAMEFLKYINAKLPGALELEYEGFYKRGFFVTKKKYAVIDEEGKITTRGLEIVRRDWSEIAKETQARVLEALLKDGDVEKAVRIVKEVTEKLSKYEVPPEKLVIHEQITRDLKDYKATGPHVAVAKRLAARGVKIRPGTVISYIVLKGSGRIGDRAIPFDEFDPTKHKYDAEYYIENQVLPAVERILRAFGYRKEDLRYQKTRQVGLSAWLKPKGT

SEQ ID NO: 1155 - protein, 774 aa, synthetic construct
MILDTDYITEDGKPVLRIFKKENGEFKIEYDRTFEPYFYALLKDDSAIEEVKKITAERHGTVVTVKRVEKVQKKFLGRPVEVWKLYFTHYQDIPAIWDKIREHPAVIDIYEYDIPFAKRYLIDKGLVPMEGDEELKMLAFDIETLYHEGEEFAEGPILMISYADEEGARVITWKNVDLPYVDVVSTEREMIKRFLRVVKEKDPDVLITYNGDNFDFAYLKKRCEKLGINFALGRDGSEPKIQRMGDRFAVEVKGRIHFDLYPVIRRTINLPTYTLEAVYEAVFGQPKEKVYAEEITTAWETGENLERVARYSMEDAKVTYELGKEFLPMEAQLSRLIGQSLWDVSRSSTGNLVEWFLLRKAYERNELAPNKPDEKELARRRQSYEGGYVKEPERGLWENIVYLDFRSLYPSIIITHNVSPDTLNREGCKEYDVAPQVGHRFCKDFPGFIPSLLGDLLEERQKIKKKMKATIDPIERKLLDYRQRAIKILANSYYGYYGYARARWYCKECAESVTAWGREYITMTIKEIEEKYGFKVIYSDTDGFFATIPGADAETVKKKAMEFLKYINAKLPGALELEYEGFYKRGFFVTKKKYAVIDEEGKITTRGLEIVRRDWSEIAKETQARVLEALLKDGDVEKAVRIVKEVTEKLSKYEVPPEKLVIHEQITRDLKDYKATGPHVAVAKRLAARGVKIRPGTVISYIVLKGSGRIGDRAIPFDEFDPTKHKYDAEYYIENQVLPAVERILRAFGYRKEDLRYQKTRQVGLSAWLKPKGT

SEQ ID NO: 1156 - protein, 774 aa, synthetic construct
MILDTDYITEDGKPVLRIFKKENGEFKIEYDRTFEPYFYALLKDDSAIEEVKKITAERHGTVVTVKRVEKVQKKFLGRPVEVWKLYFTHYQDKPAIADKIREHPAVIDIYEYDIPFAKRYLIDKGLVPMEGDEELKMLAFDIETLYHEGEEFAEGPILMISYADEEGARVITWKNVDLPYVDVVSTEREMIKRFLRVVKEKDPDVLITYNGDNFDFAYLKKRCEKLGINFALGRDGSEPKIQRMGDRFAVEVKGRIHFDLYPVIRRTINLPTYTLEAVYEAVFGQPKEKVYAEEITTAWETGENLERVARYSMEDAKVTYELGKEFLPMEAQLSRLIGQSLWDVSRSSTGNLVEWFLLRKAYERNELAPNKPDEKELARRRQSYEGGYVKEPERGLWENIVYLDFRSLYPSIIITHNVSPDTLNREGCKEYDVAPQVGHRFCKDFPGFIPSLLGDLLEERQKIKKKMKATIDPIERKLLDYRQRAIKILANSYYGYYGYARARWYCKECAESVTAWGREYITMTIKEIEEKYGFKVIYSDTDGFFATIPGADAETVKKKAMEFLKYINAKLPGALELEYEGFYKRGFFVTKKKYAVIDEEGKITTRGLEIVRRDWSEIAKETQARVLEALLKDGDVEKAVRIVKEVTEKLSKYEVPPEKLVIHEQITRDLKDYKATGPHVAVAKRLAARGVKIRPGTVISYIVLKGSGRIGDRAIPFDEFDPTKHKYDAEYYIENQVLPAVERILRAFGYRKEDLRYQKTRQVGLSAWLKPKGT

SEQ ID NO: 1157 - protein, 774 aa, synthetic construct
MILDTDYITEDGKPVLRIFKKENGEFKIEYDRTFEPYFYALLKDDSAIEEVKKITAERHGTVVTVKRVEKVQKKFLGRPVEVWKLYFTHYQDKPAIFDKIREHPAVIDIYEYDIPFAKRYLIDKGLVPMEGDEELKMLAFDIETLYHEGEEFAEGPILMISYADEEGARVITWKNVDLPYVDVVSTEREMIKRFLRVVKEKDPDVLITYNGDNFDFAYLKKRCEKLGINFALGRDGSEPKIQRMGDRFAVEVKGRIHFDLYPVIRRTINLPTYTLEAVYEAVFGQPKEKVYAEEITTAWETGENLERVARYSMEDAKVTYELGKEFLPMEAQLSRLIGQSLWDVSRSSTGNLVEWFLLRKAYERNELAPNKPDEKELARRRQSYEGGYVKEPERGLWENIVYLDFRSLYPSIIITHNVSPDTLNREGCKEYDVAPQVGHRFCKDFPGFIPSLLGDLLEERQKIKKKMKATIDPIERKLLDYRQRAIKILANSYYGYYGYARARWYCKECAESVTAWGREYITMTIKEIEEKYGFKVIYSDTDGFFATIPGADAETVKKKAMEFLKYINAKLPGALELEYEGFYKRGFFVTKKKYAVIDEEGKITTRGLEIVRRDWSEIAKETQARVLEALLKDGDVEKAVRIVKEVTEKLSKYEVPPEKLVIHEQITRDLKDYKATGPHVAVAKRLAARGVKIRPGTVISYIVLKGSGRIGDRAIPFDEFDPTKHKYDAEYYIENQVLPAVERILRAFGYRKEDLRYQKTRQVGLSAWLKPKGT

SEQ ID NO: 1158 - protein, 774 aa, synthetic construct
MILDTDYITEDGKPVLRIFKKENGEFKIEYDRTFEPYFYALLKDDSAIEEVKKITAERHGTVVTVKRVEKVQKKFLGRPVEVWKLYFTHYQDQPAIRDKIREHPAVIDIYEYDIPFAKRYLIDKGLVPMEGDEELKMLAFDIETLYHEGEEFAEGPILMISYADEEGARVITWKNVDLPYVDVVSTEREMIKRFLRVVKEKDPDVLITYNGDNFDFAYLKKRCEKLGINFALGRDGSEPKIQRMGDRFAVEVKGRIHFDLYPVIRRTINLPTYTLEAVYEAVFGQPKEKVYAEEITTAWETGENLERVARYSMEDAKVTYELGKEFLPMEAQLSRLIGQSLWDVSRSSTGNLVEWFLLRKAYERNELAPNKPDEKELARRRQSYEGGYVKEPERGLWENIVYLDFRSLYPSIIITHNVSPDTLNREGCKEYDVAPQVGHRFCKDFPGFIPSLLGDLLEERQKIKKKMKATIDPIERKLLDYRQRAIKILANSYYGYYGYARARWYCKECAESVTAWGREYITMTIKEIEEKYGFKVIYSDTDGFFATIPGADAETVKKKAMEFLKYINAKLPGALELEYEGFYKRGFFVTKKKYAVIDEEGKITTRGLEIVRRDWSEIAKETQARVLEALLKDGDVEKAVRIVKEVTEKLSKYEVPPEKLVIHEQITRDLKDYKATGPHVAVAKRLAARGVKIRPGTVISYIVLKGSGRIGDRAIPFDEFDPTKHKYDAEYYIENQVLPAVERILRAFGYRKEDLRYQKTRQVGLSAWLKPKGT

SEQ ID NO: 1159 - protein, 774 aa, synthetic construct
MILDTDYITEDGKPVLRIFKKENGEFKIEYDRTFEPYFYALLKDDSAIEEVKKITAERHGTVVTVKRVEKVQKKFLGRPVEVWKLYFTHYQDRPAIADKIREHPAVIDIYEYDIPFAKRYLIDKGLVPMEGDEELKMLAFDIETLYHEGEEFAEGPILMISYADEEGARVITWKNVDLPYVDVVSTEREMIKRFLRVVKEKDPDVLITYNGDNFDFAYLKKRCEKLGINFALGRDGSEPKIQRMGDRFAVEVKGRIHFDLYPVIRRTINLPTYTLEAVYEAVFGQPKEKVYAEEITTAWETGENLERVARYSMEDAKVTYELGKEFLPMEAQLSRLIGQSLWDVSRSSTGNLVEWFLLRKAYERNELAPNKPDEKELARRRQSYEGGYVKEPERGLWENIVYLDFRSLYPSIIITHNVSPDTLNREGCKEYDVAPQVGHRFCKDFPGFIPSLLGDLLEERQKIKKKMKATIDPIERKLLDYRQRAIKILANSYYGYYGYARARWYCKECAESVTAWGREYITMTIKEIEEKYGFKVIYSDTDGFFATIPGADAETVKKKAMEFLKYINAKLPGALELEYEGFYKRGFFVTKKKYAVIDEEGKITTRGLEIVRRDWSEIAKETQARVLEALLKDGDVEKAVRIVKEVTEKLSKYEVPPEKLVIHEQITRDLKDYKATGPHVAVAKRLAARGVKIRPGTVISYIVLKGSGRIGDRAIPFDEFDPTKHKYDAEYYIENQVLPAVERILRAFGYRKEDLRYQKTRQVGLSAWLKPKGT

SEQ ID NO: 1160 - protein, 774 aa, synthetic construct
MILDTDYITEDGKPVLRIFKKENGEFKIEYDRTFEPYFYALLKDDSAIEEVKKITAERHGTVVTVKRVEKVQKKFLGRPVEVWKLYFTHPQDVPAIADKIREHPAVIDIYEYDIPFAKRYLIDKGLVPMEGDEELKMLAFDIETLYHEGEEFAEGPILMISYADEEGARVITWKNVDLPYVDVVSTEREMIKRFLRVVKEKDPDVLITYNGDNFDFAYLKKRCEKLGINFALGRDGSEPKIQRMGDRFAVEVKGRIHFDLYPVIRRTINLPTYTLEAVYEAVFGQPKEKVYAEEITTAWETGENLERVARYSMEDAKVTYELGKEFLPMEAQLSRLIGQSLWDVSRSSTGNLVEWFLLRKAYERNELAPNKPDEKELARRRQSYEGGYVKEPERGLWENIVYLDFRSLYPSIIITHNVSPDTLNREGCKEYDVAPQVGHRFCKDFPGFIPSLLGDLLEERQKIKKKMKATIDPIERKLLDYRQRAIKILANSYYGYYGYARARWYCKECAESVTAWGREYITMTIKEIEEKYGFKVIYSDTDGFFATIPGADAETVKKKAMEFLKYINAKLPGALELEYEGFYKRGFFVTKKKYAVIDEEGKITTRGLEIVRRDWSEIAKETQARVLEALLKDGDVEKAVRIVKEVTEKLSKYEVPPEKLVIHEQITRDLKDYKATGPHVAVAKRLAARGVKIRPGTVISYIVLKGSGRIGDRAIPFDEFDPTKHKYDAEYYIENQVLPAVERILRAFGYRKEDLRYQKTRQVGLSAWLKPKGT

SEQ ID NO: 1161 - protein, 774 aa, synthetic construct
MILDTDYITEDGKPVLRIFKKENGEFKIEYDRTFEPYFYALLKDDSAIEEVKKITAERHGTVVTVKRVEKVQKKFLGRPVEVWKLYFTHPQDVPAIFDKIREHPAVIDIYEYDIPFAKRYLIDKGLVPMEGDEELKMLAFDIETLYHEGEEFAEGPILMISYADEEGARVITWKNVDLPYVDVVSTEREMIKRFLRVVKEKDPDVLITYNGDNFDFAYLKKRCEKLGINFALGRDGSEPKIQRMGDRFAVEVKGRIHFDLYPVIRRTINLPTYTLEAVYEAVFGQPKEKVYAEEITTAWETGENLERVARYSMEDAKVTYELGKEFLPMEAQLSRLIGQSLWDVSRSSTGNLVEWFLLRKAYERNELAPNKPDEKELARRRQSYEGGYVKEPERGLWENIVYLDFRSLYPSIIITHNVSPDTLNREGCKEYDVAPQVGHRFCKDFPGFIPSLLGDLLEERQKIKKKMKATIDPIERKLLDYRQRAIKILANSYYGYYGYARARWYCKECAESVTAWGREYITMTIKEIEEKYGFKVIYSDTDGFFATIPGADAETVKKKAMEFLKYINAKLPGALELEYEGFYKRGFFVTKKKYAVIDEEGKITTRGLEIVRRDWSEIAKETQARVLEALLKDGDVEKAVRIVKEVTEKLSKYEVPPEKLVIHEQITRDLKDYKATGPHVAVAKRLAARGVKIRPGTVISYIVLKGSGRIGDRAIPFDEFDPTKHKYDAEYYIENQVLPAVERILRAFGYRKEDLRYQKTRQVGLSAWLKPKGT

SEQ ID NO: 1162 - protein, 774 aa, synthetic construct
MILDTDYITEDGKPVLRIFKKENGEFKIEYDRTFEPYFYALLKDDSAIEEVKKITAERHGTVVTVKRVEKVQKKFLGRPVEVWKLYFTHPQDVPAIFDKIREHPAVIDIYEYDIPFAKQYLIDKGLVPMEGDEELKMLAFDIETLYHEGEEFAEGPILMISYADEEGARVITWKNVDLPYVDVVSTEREMIKRFLRVVKEKDPDVLITYNGDNFDFAYLKKRCEKLGINFALGRDGSEPKIQRMGDRFAVEVKGRIHFDLYPVIRRTINLPTYTLEAVYEAVFGQPKEKVYAEEITTAWETGENLERVARYSMEDAKVTYELGKEFLPMEAQLSRLIGQSLWDVSRSSTGNLVEWFLLRKAYERNELAPNKPDEKELARRRQSYEGGYVKEPERGLWENIVYLDFRSLYPSIIITHNVSPDTLNREGCKEYDVAPQVGHRFCKDFPGFIPSLLGDLLEERQKIKKKMKATIDPIERKLLDYRQRAIKILANSYYGYYGYARARWYCKECAESVTAWGREYITMTIKEIEEKYGFKVIYSDTDGFFATIPGADAETVKKKAMEFLKYINAKLPGALELEYEGFYKRGFFVTKKKYAVIDEEGKITTRGLEIVRRDWSEIAKETQARVLEALLKDGDVEKAVRIVKEVTEKLSKYEVPPEKLVIHEQITRDLKDYKATGPHVAVAKRLAARGVKIRPGTVISYIVLKGSGRIGDRAIPFDEFDPTKHKYDAEYYIENQVLPAVERILRAFGYRKEDLRYQKTRQVGLSAWLKPKGT

SEQ ID NO: 1163 - protein, 774 aa, synthetic construct
MILDTDYITEDGKPVLRIFKKENGEFKIEYDRTFEPYFYALLKDDSAIEEVKKITAERHGTVVTVKRVEKVQKKFLGRPVEVWKLYFTHPQDVPAIHDKIREHPAVIDIYEYDIPFAKRYLIDKGLVPMEGDEELKMLAFDIETLYHEGEEFAEGPILMISYADEEGARVITWKNVDLPYVDVVSTEREMIKRFLRVVKEKDPDVLITYNGDNFDFAYLKKRCEKLGINFALGRDGSEPKIQRMGDRFAVEVKGRIHFDLYPVIRRTINLPTYTLEAVYEAVFGQPKEKVYAEEITTAWETGENLERVARYSMEDAKVTYELGKEFLPMEAQLSRLIGQSLWDVSRSSTGNLVEWFLLRKAYERNELAPNKPDEKELARRRQSYEGGYVKEPERGLWENIVYLDFRSLYPSIIITHNVSPDTLNREGCKEYDVAPQVGHRFCKDFPGFIPSLLGDLLEERQKIKKKMKATIDPIERKLLDYRQRAIKILANSYYGYYGYARARWYCKECAESVTAWGREYITMTIKEIEEKYGFKVIYSDTDGFFATIPGADAETVKKKAMEFLKYINAKLPGALELEYEGFYKRGFFVTKKKYAVIDEEGKITTRGLEIVRRDWSEIAKETQARVLEALLKDGDVEKAVRIVKEVTEKLSKYEVPPEKLVIHEQITRDLKDYKATGPHVAVAKRLAARGVKIRPGTVISYIVLKGSGRIGDRAIPFDEFDPTKHKYDAEYYIENQVLPAVERILRAFGYRKEDLRYQKTRQVGLSAWLKPKGT

SEQ ID NO: 1164 - protein, 774 aa, synthetic construct
MILDTDYITEDGKPVLRIFKKENGEFKIEYDRTFEPYFYALLKDDSAIEEVKKITAERHGTVVTVKRVEKVQKKFLGRPVEVWKLYFTHPQDVPAIWDKIREHPAVIDIYEYDIPFAKRYLIDKGLVPMEGDEELKMLAFDIETLYHEGEEFAEGPILMISYADEEGARVITWKNVDLPYVDVVSTEREMIKRFLRVVKEKDPDVLITYNGDNFDFAYLKKRCEKLGINFALGRDGSEPKIQRMGDRFAVEVKGRIHFDLYPVIRRTINLPTYTLEAVYEAVFGQPKEKVYAEEITTAWETGENLERVARYSMEDAKVTYELGKEFLPMEAQLSRLIGQSLWDVSRSSTGNLVEWFLLRKAYERNELAPNKPDEKELARRRQSYEGGYVKEPERGLWENIVYLDFRSLYPSIIITHNVSPDTLNREGCKEYDVAPQVGHRFCKDFPGFIPSLLGDLLEERQKIKKKMKATIDPIERKLLDYRQRAIKILANSYYGYYGYARARWYCKECAESVTAWGREYITMTIKEIEEKYGFKVIYSDTDGFFATIPGADAETVKKKAMEFLKYINAKLPGALELEYEGFYKRGFFVTKKKYAVIDEEGKITTRGLEIVRRDWSEIAKETQARVLEALLKDGDVEKAVRIVKEVTEKLSKYEVPPEKLVIHEQITRDLKDYKATGPHVAVAKRLAARGVKIRPGTVISYIVLKGSGRIGDRAIPFDEFDPTKHKYDAEYYIENQVLPAVERILRAFGYRKEDLRYQKTRQVGLSAWLKPKGT

SEQ ID NO: 1165 - protein, 774 aa, synthetic construct
MILDTDYITEDGKPVLRIFKKENGEFKIEYDRTFEPYFYALLKDDSAIEEVKKITAERHGTVVTVKRVEKVQKKFLGRPVEVWKLYFTHPQDEPAIRDKIREHPAVIDIYEYDIPFAKRYLIDKGLVPMEGDEELKMLAFDIETLYHEGEEFAEGPILMISYADEEGARVITWKNVDLPYVDVVSTEREMIKRFLRVVKEKDPDVLITYNGDNFDFAYLKKRCEKLGINFALGRDGSEPKIQRMGDRFAVEVKGRIHFDLYPVIRRTINLPTYTLEAVYEAVFGQPKEKVYAEEITTAWETGENLERVARYSMEDAKVTYELGKEFLPMEAQLSRLIGQSLWDVSRSSTGNLVEWFLLRKAYERNELAPNKPDEKELARRRQSYEGGYVKEPERGLWENIVYLDFRSLYPSIIITHNVSPDTLNREGCKEYDVAPQVGHRFCKDFPGFIPSLLGDLLEERQKIKKKMKATIDPIERKLLDYRQRAIKILANSYYGYYGYARARWYCKECAESVTAWGREYITMTIKEIEEKYGFKVIYSDTDGFFATIPGADAETVKKKAMEFLKYINAKLPGALELEYEGFYKRGFFVTKKKYAVIDEEGKITTRGLEIVRRDWSEIAKETQARVLEALLKDGDVEKAVRIVKEVTEKLSKYEVPPEKLVIHEQITRDLKDYKATGPHVAVAKRLAARGVKIRPGTVISYIVLKGSGRIGDRAIPFDEFDPTKHKYDAEYYIENQVLPAVERILRAFGYRKEDLRYQKTRQVGLSAWLKPKGT

SEQ ID NO: 1166 - protein, 774 aa, synthetic construct
MILDTDYITEDGKPVLRIFKKENGEFKIEYDRTFEPYFYALLKDDSAIEEVKKITAERHGTVVTVKRVEKVQKKFLGRPVEVWKLYFTHPQDEPAIFDKIREHPAVIDIYEYDIPFAKRYLIDKGLVPMEGDEELKMLAFDIETLYHEGEEFAEGPILMISYADEEGARVITWKNVDLPYVDVVSTEREMIKRFLRVVKEKDPDVLITYNGDNFDFAYLKKRCEKLGINFALGRDGSEPKIQRMGDRFAVEVKGRIHFDLYPVIRRTINLPTYTLEAVYEAVFGQPKEKVYAEEITTAWETGENLERVARYSMEDAKVTYELGKEFLPMEAQLSRLIGQSLWDVSRSSTGNLVEWFLLRKAYERNELAPNKPDEKELARRRQSYEGGYVKEPERGLWENIVYLDFRSLYPSIIITHNVSPDTLNREGCKEYDVAPQVGHRFCKDFPGFIPSLLGDLLEERQKIKKKMKATIDPIERKLLDYRQRAIKILANSYYGYYGYARARWYCKECAESVTAWGREYITMTIKEIEEKYGFKVIYSDTDGFFATIPGADAETVKKKAMEFLKYINAKLPGALELEYEGFYKRGFFVTKKKYAVIDEEGKITTRGLEIVRRDWSEIAKETQARVLEALLKDGDVEKAVRIVKEVTEKLSKYEVPPEKLVIHEQITRDLKDYKATGPHVAVAKRLAARGVKIRPGTVISYIVLKGSGRIGDRAIPFDEFDPTKHKYDAEYYIENQVLPAVERILRAFGYRKEDLRYQKTRQVGLSAWLKPKGT

SEQ ID NO: 1167 - protein, 774 aa, synthetic construct
MILDTDYITEDGKPVLRIFKKENGEFKIEYDRTFEPYFYALLKDDSAIEEVKKITAERHGTVVTVKRVEKVQKKFLGRPVEVWKLYFTHPQDEPAIHDKIREHPAVIDIYEYDIPFAKRYLIDKGLVPMEGDEELKMLAFDIETLYHEGEEFAEGPILMISYADEEGARVITWKNVDLPYVDVVSTEREMIKRFLRVVKEKDPDVLITYNGDNFDFAYLKKRCEKLGINFALGRDGSEPKIQRMGDRFAVEVKGRIHFDLYPVIRRTINLPTYTLEAVYEAVFGQPKEKVYAEEITTAWETGENLERVARYSMEDAKVTYELGKEFLPMEAQLSRLIGQSLWDVSRSSTGNLVEWFLLRKAYERNELAPNKPDEKELARRRQSYEGGYVKEPERGLWENIVYLDFRSLYPSIIITHNVSPDTLNREGCKEYDVAPQVGHRFCKDFPGFIPSLLGDLLEERQKIKKKMKATIDPIERKLLDYRQRAIKILANSYYGYYGYARARWYCKECAESVTAWGREYITMTIKEIEEKYGFKVIYSDTDGFFATIPGADAETVKKKAMEFLKYINAKLPGALELEYEGFYKRGFFVTKKKYAVIDEEGKITTRGLEIVRRDWSEIAKETQARVLEALLKDGDVEKAVRIVKEVTEKLSKYEVPPEKLVIHEQITRDLKDYKATGPHVAVAKRLAARGVKIRPGTVISYIVLKGSGRIGDRAIPFDEFDPTKHKYDAEYYIENQVLPAVERILRAFGYRKEDLRYQKTRQVGLSAWLKPKGT

SEQ ID NO: 1168 - protein, 774 aa, synthetic construct
MILDTDYITEDGKPVLRIFKKENGEFKIEYDRTFEPYFYALLKDDSAIEEVKKITAERHGTVVTVKRVEKVQKKFLGRPVEVWKLYFTHPQDIPAIRDKIREHPAVIDIYEYDIPFAKRYLIDKGLVPMEGDEELKMLAFDIETLYHEGEEFAEGPILMISYADEEGARVITWKNVDLPYVDVVSTEREMIKRFLRVVKEKDPDVLITYNGDNFDFAYLKKRCEKLGINFALGRDGSEPKIQRMGDRFAVEVKGRIHFDLYPVIRRTINLPTYTLEAVYEAVFGQPKEKVYAEEITTAWETGENLERVARYSMEDAKVTYELGKEFLPMEAQLSRLIGQSLWDVSRSSTGNLVEWFLLRKAYERNELAPNKPDEKELARRRQSYEGGYVKEPERGLWENIVYLDFRSLYPSIIITHNVSPDTLNREGCKEYDVAPQVGHRFCKDFPGFIPSLLGDLLEERQKIKKKMKATIDPIERKLLDYRQRAIKILANSYYGYYGYARARWYCKECAESVTAWGREYITMTIKEIEEKYGFKVIYSDTDGFFATIPGADAETVKKKAMEFLKYINAKLPGALELEYEGFYKRGFFVTKKKYAVIDEEGKITTRGLEIVRRDWSEIAKETQARVLEALLKDGDVEKAVRIVKEVTEKLSKYEVPPEKLVIHEQITRDLKDYKATGPHVAVAKRLAARGVKIRPGTVISYIVLKGSGRIGDRAIPFDEFDPTKHKYDAEYYIENQVLPAVERILRAFGYRKEDLRYQKTRQVGLSAWLKPKGT

SEQ ID NO: 1169 - protein, 774 aa, synthetic construct
MILDTDYITEDGKPVLRIFKKENGEFKIEYDRTFEPYFYALLKDDSAIEEVKKITAERHGTVVTVKRVEKVQKKFLGRPVEVWKLYFTHPQDIPAIADKIREHPAVIDIYEYDIPFAKRYLIDKGLVPMEGDEELKMLAFDIETLYHEGEEFAEGPILMISYADEEGARVITWKNVDLPYVDVVSTEREMIKRFLRVVKEKDPDVLITYNGDNFDFAYLKKRCEKLGINFALGRDGSEPKIQRMGDRFAVEVKGRIHFDLYPVIRRTINLPTYTLEAVYEAVFGQPKEKVYAEEITTAWETGENLERVARYSMEDAKVTYELGKEFLPMEAQLSRLIGQSLWDVSRSSTGNLVEWFLLRKAYERNELAPNKPDEKELARRRQSYEGGYVKEPERGLWENIVYLDFRSLYPSIIITHNVSPDTLNREGCKEYDVAPQVGHRFCKDFPGFIPSLLGDLLEERQKIKKKMKATIDPIERKLLDYRQRAIKILANSYYGYYGYARARWYCKECAESVTAWGREYITMTIKEIEEKYGFKVIYSDTDGFFATIPGADAETVKKKAMEFLKYINAKLPGALELEYEGFYKRGFFVTKKKYAVIDEEGKITTRGLEIVRRDWSEIAKETQARVLEALLKDGDVEKAVRIVKEVTEKLSKYEVPPEKLVIHEQITRDLKDYKATGPHVAVAKRLAARGVKIRPGTVISYIVLKGSGRIGDRAIPFDEFDPTKHKYDAEYYIENQVLPAVERILRAFGYRKEDLRYQKTRQVGLSAWLKPKGT

SEQ ID NO: 1170 - protein, 774 aa, synthetic construct
MILDTDYITEDGKPVLRIFKKENGEFKIEYDRTFEPYFYALLKDDSAIEEVKKITAERHGTVVTVKRVEKVQKKFLGRPVEVWKLYFTHPQDIPAIADKIREHPAVIDIYEYDIPFAKQYLIDKGLVPMEGDEELKMLAFDIETLYHEGEEFAEGPILMISYADEEGARVITWKNVDLPYVDVVSTEREMIKRFLRVVKEKDPDVLITYNGDNFDFAYLKKRCEKLGINFALGRDGSEPKIQRMGDRFAVEVKGRIHFDLYPVIRRTINLPTYTLEAVYEAVFGQPKEKVYAEEITTAWETGENLERVARYSMEDAKVTYELGKEFLPMEAQLSRLIGQSLWDVSRSSTGNLVEWFLLRKAYERNELAPNKPDEKELARRRQSYEGGYVKEPERGLWENIVYLDFRSLYPSIIITHNVSPDTLNREGCKEYDVAPQVGHRFCKDFPGFIPSLLGDLLEERQKIKKKMKATIDPIERKLLDYRQRAIKILANSYYGYYGYARARWYCKECAESVTAWGREYITMTIKEIEEKYGFKVIYSDTDGFFATIPGADAETVKKKAMEFLKYINAKLPGALELEYEGFYKRGFFVTKKKYAVIDEEGKITTRGLEIVRRDWSEIAKETQARVLEALLKDGDVEKAVRIVKEVTEKLSKYEVPPEKLVIHEQITRDLKDYKATGPHVAVAKRLAARGVKIRPGTVISYIVLKGSGRIGDRAIPFDEFDPTKHKYDAEYYIENQVLPAVERILRAFGYRKEDLRYQKTRQVGLSAWLKPKGT

SEQ ID NO: 1171 - protein, 774 aa, synthetic construct
MILDTDYITEDGKPVLRIFKKENGEFKIEYDRTFEPYFYALLKDDSAIEEVKKITAERHGTVVTVKRVEKVQKKFLGRPVEVWKLYFTHPQDIPAIFDKIREHPAVIDIYEYDIPFAKRYLIDKGLVPMEGDEELKMLAFDIETLYHEGEEFAEGPILMISYADEEGARVITWKNVDLPYVDVVSTEREMIKRFLRVVKEKDPDVLITYNGDNFDFAYLKKRCEKLGINFALGRDGSEPKIQRMGDRFAVEVKGRIHFDLYPVIRRTINLPTYTLEAVYEAVFGQPKEKVYAEEITTAWETGENLERVARYSMEDAKVTYELGKEFLPMEAQLSRLIGQSLWDVSRSSTGNLVEWFLLRKAYERNELAPNKPDEKELARRRQSYEGGYVKEPERGLWENIVYLDFRSLYPSIIITHNVSPDTLNREGCKEYDVAPQVGHRFCKDFPGFIPSLLGDLLEERQKIKKKMKATIDPIERKLLDYRQRAIKILANSYYGYYGYARARWYCKECAESVTAWGREYITMTIKEIEEKYGFKVIYSDTDGFFATIPGADAETVKKKAMEFLKYINAKLPGALELEYEGFYKRGFFVTKKKYAVIDEEGKITTRGLEIVRRDWSEIAKETQARVLEALLKDGDVEKAVRIVKEVTEKLSKYEVPPEKLVIHEQITRDLKDYKATGPHVAVAKRLAARGVKIRPGTVISYIVLKGSGRIGDRAIPFDEFDPTKHKYDAEYYIENQVLPAVERILRAFGYRKEDLRYQKTRQVGLSAWLKPKGT

SEQ ID NO: 1172 - protein, 774 aa, synthetic construct
MILDTDYITEDGKPVLRIFKKENGEFKIEYDRTFEPYFYALLKDDSAIEEVKKITAERHGTVVTVKRVEKVQKKFLGRPVEVWKLYFTHPQDIPAIFDKIREHPAVIDIYEYDIPFAKQYLIDKGLVPMEGDEELKMLAFDIETLYHEGEEFAEGPILMISYADEEGARVITWKNVDLPYVDVVSTEREMIKRFLRVVKEKDPDVLITYNGDNFDFAYLKKRCEKLGINFALGRDGSEPKIQRMGDRFAVEVKGRIHFDLYPVIRRTINLPTYTLEAVYEAVFGQPKEKVYAEEITTAWETGENLERVARYSMEDAKVTYELGKEFLPMEAQLSRLIGQSLWDVSRSSTGNLVEWFLLRKAYERNELAPNKPDEKELARRRQSYEGGYVKEPERGLWENIVYLDFRSLYPSIIITHNVSPDTLNREGCKEYDVAPQVGHRFCKDFPGFIPSLLGDLLEERQKIKKKMKATIDPIERKLLDYRQRAIKILANSYYGYYGYARARWYCKECAESVTAWGREYITMTIKEIEEKYGFKVIYSDTDGFFATIPGADAETVKKKAMEFLKYINAKLPGALELEYEGFYKRGFFVTKKKYAVIDEEGKITTRGLEIVRRDWSEIAKETQARVLEALLKDGDVEKAVRIVKEVTEKLSKYEVPPEKLVIHEQITRDLKDYKATGPHVAVAKRLAARGVKIRPGTVISYIVLKGSGRIGDRAIPFDEFDPTKHKYDAEYYIENQVLPAVERILRAFGYRKEDLRYQKTRQVGLSAWLKPKGT

SEQ ID NO: 1173 - protein, 774 aa, synthetic construct
MILDTDYITEDGKPVLRIFKKENGEFKIEYDRTFEPYFYALLKDDSAIEEVKKITAERHGTVVTVKRVEKVQKKFLGRPVEVWKLYFTHPQDIPAIWDKIREHPAVIDIYEYDIPFAKRYLIDKGLVPMEGDEELKMLAFDIETLYHEGEEFAEGPILMISYADEEGARVITWKNVDLPYVDVVSTEREMIKRFLRVVKEKDPDVLITYNGDNFDFAYLKKRCEKLGINFALGRDGSEPKIQRMGDRFAVEVKGRIHFDLYPVIRRTINLPTYTLEAVYEAVFGQPKEKVYAEEITTAWETGENLERVARYSMEDAKVTYELGKEFLPMEAQLSRLIGQSLWDVSRSSTGNLVEWFLLRKAYERNELAPNKPDEKELARRRQSYEGGYVKEPERGLWENIVYLDFRSLYPSIIITHNVSPDTLNREGCKEYDVAPQVGHRFCKDFPGFIPSLLGDLLEERQKIKKKMKATIDPIERKLLDYRQRAIKILANSYYGYYGYARARWYCKECAESVTAWGREYITMTIKEIEEKYGFKVIYSDTDGFFATIPGADAETVKKKAMEFLKYINAKLPGALELEYEGFYKRGFFVTKKKYAVIDEEGKITTRGLEIVRRDWSEIAKETQARVLEALLKDGDVEKAVRIVKEVTEKLSKYEVPPEKLVIHEQITRDLKDYKATGPHVAVAKRLAARGVKIRPGTVISYIVLKGSGRIGDRAIPFDEFDPTKHKYDAEYYIENQVLPAVERILRAFGYRKEDLRYQKTRQVGLSAWLKPKGT

SEQ ID NO: 1174 - protein, 774 aa, synthetic construct
MILDTDYITEDGKPVLRIFKKENGEFKIEYDRTFEPYFYALLKDDSAIEEVKKITAERHGTVVTVKRVEKVQKKFLGRPVEVWKLYFTHPQDIPAIRDKIREHPAVIDIYEYDIPFAKQYLIDKGLVPMEGDEELKMLAFDIETLYHEGEEFAEGPILMISYADEEGARVITWKNVDLPYVDVVSTEREMIKRFLRVVKEKDPDVLITYNGDNFDFAYLKKRCEKLGINFALGRDGSEPKIQRMGDRFAVEVKGRIHFDLYPVIRRTINLPTYTLEAVYEAVFGQPKEKVYAEEITTAWETGENLERVARYSMEDAKVTYELGKEFLPMEAQLSRLIGQSLWDVSRSSTGNLVEWFLLRKAYERNELAPNKPDEKELARRRQSYEGGYVKEPERGLWENIVYLDFRSLYPSIIITHNVSPDTLNREGCKEYDVAPQVGHRFCKDFPGFIPSLLGDLLEERQKIKKKMKATIDPIERKLLDYRQRAIKILANSYYGYYGYARARWYCKECAESVTAWGREYITMTIKEIEEKYGFKVIYSDTDGFFATIPGADAETVKKKAMEFLKYINAKLPGALELEYEGFYKRGFFVTKKKYAVIDEEGKITTRGLEIVRRDWSEIAKETQARVLEALLKDGDVEKAVRIVKEVTEKLSKYEVPPEKLVIHEQITRDLKDYKATGPHVAVAKRLAARGVKIRPGTVISYIVLKGSGRIGDRAIPFDEFDPTKHKYDAEYYIENQVLPAVERILRAFGYRKEDLRYQKTRQVGLSAWLKPKGT

SEQ ID NO: 1175 - protein, 774 aa, synthetic construct
MILDTDYITEDGKPVLRIFKKENGEFKIEYDRTFEPYFYALLKDDSAIEEVKKITAERHGTVVTVKRVEKVQKKFLGRPVEVWKLYFTHPQDKPAIRDKIREHPAVIDIYEYDIPFAKRYLIDKGLVPMEGDEELKMLAFDIETLYHEGEEFAEGPILMISYADEEGARVITWKNVDLPYVDVVSTEREMIKRFLRVVKEKDPDVLITYNGDNFDFAYLKKRCEKLGINFALGRDGSEPKIQRMGDRFAVEVKGRIHFDLYPVIRRTINLPTYTLEAVYEAVFGQPKEKVYAEEITTAWETGENLERVARYSMEDAKVTYELGKEFLPMEAQLSRLIGQSLWDVSRSSTGNLVEWFLLRKAYERNELAPNKPDEKELARRRQSYEGGYVKEPERGLWENIVYLDFRSLYPSIIITHNVSPDTLNREGCKEYDVAPQVGHRFCKDFPGFIPSLLGDLLEERQKIKKKMKATIDPIERKLLDYRQRAIKILANSYYGYYGYARARWYCKECAESVTAWGREYITMTIKEIEEKYGFKVIYSDTDGFFATIPGADAETVKKKAMEFLKYINAKLPGALELEYEGFYKRGFFVTKKKYAVIDEEGKITTRGLEIVRRDWSEIAKETQARVLEALLKDGDVEKAVRIVKEVTEKLSKYEVPPEKLVIHEQITRDLKDYKATGPHVAVAKRLAARGVKIRPGTVISYIVLKGSGRIGDRAIPFDEFDPTKHKYDAEYYIENQVLPAVERILRAFGYRKEDLRYQKTRQVGLSAWLKPKGT

SEQ ID NO: 1176 - protein, 774 aa, synthetic construct
MILDTDYITEDGKPVLRIFKKENGEFKIEYDRTFEPYFYALLKDDSAIEEVKKITAERHGTVVTVKRVEKVQKKFLGRPVEVWKLYFTHPQDKPAIADKIREHPAVIDIYEYDIPFAKRYLIDKGLVPMEGDEELKMLAFDIETLYHEGEEFAEGPILMISYADEEGARVITWKNVDLPYVDVVSTEREMIKRFLRVVKEKDPDVLITYNGDNFDFAYLKKRCEKLGINFALGRDGSEPKIQRMGDRFAVEVKGRIHFDLYPVIRRTINLPTYTLEAVYEAVFGQPKEKVYAEEITTAWETGENLERVARYSMEDAKVTYELGKEFLPMEAQLSRLIGQSLWDVSRSSTGNLVEWFLLRKAYERNELAPNKPDEKELARRRQSYEGGYVKEPERGLWENIVYLDFRSLYPSIIITHNVSPDTLNREGCKEYDVAPQVGHRFCKDFPGFIPSLLGDLLEERQKIKKKMKATIDPIERKLLDYRQRAIKILANSYYGYYGYARARWYCKECAESVTAWGREYITMTIKEIEEKYGFKVIYSDTDGFFATIPGADAETVKKKAMEFLKYINAKLPGALELEYEGFYKRGFFVTKKKYAVIDEEGKITTRGLEIVRRDWSEIAKETQARVLEALLKDGDVEKAVRIVKEVTEKLSKYEVPPEKLVIHEQITRDLKDYKATGPHVAVAKRLAARGVKIRPGTVISYIVLKGSGRIGDRAIPFDEFDPTKHKYDAEYYIENQVLPAVERILRAFGYRKEDLRYQKTRQVGLSAWLKPKGT

SEQ ID NO: 1177 - protein, 774 aa, synthetic construct
MILDTDYITEDGKPVLRIFKKENGEFKIEYDRTFEPYFYALLKDDSAIEEVKKITAERHGTVVTVKRVEKVQKKFLGRPVEVWKLYFTHPQDKPAIFDKIREHPAVIDIYEYDIPFAKRYLIDKGLVPMEGDEELKMLAFDIETLYHEGEEFAEGPILMISYADEEGARVITWKNVDLPYVDVVSTEREMIKRFLRVVKEKDPDVLITYNGDNFDFAYLKKRCEKLGINFALGRDGSEPKIQRMGDRFAVEVKGRIHFDLYPVIRRTINLPTYTLEAVYEAVFGQPKEKVYAEEITTAWETGENLERVARYSMEDAKVTYELGKEFLPMEAQLSRLIGQSLWDVSRSSTGNLVEWFLLRKAYERNELAPNKPDEKELARRRQSYEGGYVKEPERGLWENIVYLDFRSLYPSIIITHNVSPDTLNREGCKEYDVAPQVGHRFCKDFPGFIPSLLGDLLEERQKIKKKMKATIDPIERKLLDYRQRAIKILANSYYGYYGYARARWYCKECAESVTAWGREYITMTIKEIEEKYGFKVIYSDTDGFFATIPGADAETVKKKAMEFLKYINAKLPGALELEYEGFYKRGFFVTKKKYAVIDEEGKITTRGLEIVRRDWSEIAKETQARVLEALLKDGDVEKAVRIVKEVTEKLSKYEVPPEKLVIHEQITRDLKDYKATGPHVAVAKRLAARGVKIRPGTVISYIVLKGSGRIGDRAIPFDEFDPTKHKYDAEYYIENQVLPAVERILRAFGYRKEDLRYQKTRQVGLSAWLKPKGT

SEQ ID NO: 1178 - protein, 774 aa, synthetic construct
MILDTDYITEDGKPVLRIFKKENGEFKIEYDRTFEPYFYALLKDDSAIEEVKKITAERHGTVVTVKRVEKVQKKFLGRPVEVWKLYFTHPQDKPAIHDKIREHPAVIDIYEYDIPFAKRYLIDKGLVPMEGDEELKMLAFDIETLYHEGEEFAEGPILMISYADEEGARVITWKNVDLPYVDVVSTEREMIKRFLRVVKEKDPDVLITYNGDNFDFAYLKKRCEKLGINFALGRDGSEPKIQRMGDRFAVEVKGRIHFDLYPVIRRTINLPTYTLEAVYEAVFGQPKEKVYAEEITTAWETGENLERVARYSMEDAKVTYELGKEFLPMEAQLSRLIGQSLWDVSRSSTGNLVEWFLLRKAYERNELAPNKPDEKELARRRQSYEGGYVKEPERGLWENIVYLDFRSLYPSIIITHNVSPDTLNREGCKEYDVAPQVGHRFCKDFPGFIPSLLGDLLEERQKIKKKMKATIDPIERKLLDYRQRAIKILANSYYGYYGYARARWYCKECAESVTAWGREYITMTIKEIEEKYGFKVIYSDTDGFFATIPGADAETVKKKAMEFLKYINAKLPGALELEYEGFYKRGFFVTKKKYAVIDEEGKITTRGLEIVRRDWSEIAKETQARVLEALLKDGDVEKAVRIVKEVTEKLSKYEVPPEKLVIHEQITRDLKDYKATGPHVAVAKRLAARGVKIRPGTVISYIVLKGSGRIGDRAIPFDEFDPTKHKYDAEYYIENQVLPAVERILRAFGYRKEDLRYQKTRQVGLSAWLKPKGT

SEQ ID NO: 1179 - protein, 774 aa, synthetic construct
MILDTDYITEDGKPVLRIFKKENGEFKIEYDRTFEPYFYALLKDDSAIEEVKKITAERHGTVVTVKRVEKVQKKFLGRPVEVWKLYFTHPQDKPAIPDKIREHPAVIDIYEYDIPFAKRYLIDKGLVPMEGDEELKMLAFDIETLYHEGEEFAEGPILMISYADEEGARVITWKNVDLPYVDVVSTEREMIKRFLRVVKEKDPDVLITYNGDNFDFAYLKKRCEKLGINFALGRDGSEPKIQRMGDRFAVEVKGRIHFDLYPVIRRTINLPTYTLEAVYEAVFGQPKEKVYAEEITTAWETGENLERVARYSMEDAKVTYELGKEFLPMEAQLSRLIGQSLWDVSRSSTGNLVEWFLLRKAYERNELAPNKPDEKELARRRQSYEGGYVKEPERGLWENIVYLDFRSLYPSIIITHNVSPDTLNREGCKEYDVAPQVGHRFCKDFPGFIPSLLGDLLEERQKIKKKMKATIDPIERKLLDYRQRAIKILANSYYGYYGYARARWYCKECAESVTAWGREYITMTIKEIEEKYGFKVIYSDTDGFFATIPGADAETVKKKAMEFLKYINAKLPGALELEYEGFYKRGFFVTKKKYAVIDEEGKITTRGLEIVRRDWSEIAKETQARVLEALLKDGDVEKAVRIVKEVTEKLSKYEVPPEKLVIHEQITRDLKDYKATGPHVAVAKRLAARGVKIRPGTVISYIVLKGSGRIGDRAIPFDEFDPTKHKYDAEYYIENQVLPAVERILRAFGYRKEDLRYQKTRQVGLSAWLKPKGT

SEQ ID NO: 1180 - protein, 774 aa, synthetic construct
MILDTDYITEDGKPVLRIFKKENGEFKIEYDRTFEPYFYALLKDDSAIEEVKKITAERHGTVVTVKRVEKVQKKFLGRPVEVWKLYFTHPQDKPAIWDKIREHPAVIDIYEYDIPFAKRYLIDKGLVPMEGDEELKMLAFDIETLYHEGEEFAEGPILMISYADEEGARVITWKNVDLPYVDVVSTEREMIKRFLRVVKEKDPDVLITYNGDNFDFAYLKKRCEKLGINFALGRDGSEPKIQRMGDRFAVEVKGRIHFDLYPVIRRTINLPTYTLEAVYEAVFGQPKEKVYAEEITTAWETGENLERVARYSMEDAKVTYELGKEFLPMEAQLSRLIGQSLWDVSRSSTGNLVEWFLLRKAYERNELAPNKPDEKELARRRQSYEGGYVKEPERGLWENIVYLDFRSLYPSIIITHNVSPDTLNREGCKEYDVAPQVGHRFCKDFPGFIPSLLGDLLEERQKIKKKMKATIDPIERKLLDYRQRAIKILANSYYGYYGYARARWYCKECAESVTAWGREYITMTIKEIEEKYGFKVIYSDTDGFFATIPGADAETVKKKAMEFLKYINAKLPGALELEYEGFYKRGFFVTKKKYAVIDEEGKITTRGLEIVRRDWSEIAKETQARVLEALLKDGDVEKAVRIVKEVTEKLSKYEVPPEKLVIHEQITRDLKDYKATGPHVAVAKRLAARGVKIRPGTVISYIVLKGSGRIGDRAIPFDEFDPTKHKYDAEYYIENQVLPAVERILRAFGYRKEDLRYQKTRQVGLSAWLKPKGT

SEQ ID NO: 1181 - protein, 774 aa, synthetic construct
MILDTDYITEDGKPVLRIFKKENGEFKIEYDRTFEPYFYALLKDDSAIEEVKKITAERHGTVVTVKRVEKVQKKFLGRPVEVWKLYFTHPQDKPAIRDKIREHPAVIDIYEYDIPFAKQYLIDKGLVPMEGDEELKMLAFDIETLYHEGEEFAEGPILMISYADEEGARVITWKNVDLPYVDVVSTEREMIKRFLRVVKEKDPDVLITYNGDNFDFAYLKKRCEKLGINFALGRDGSEPKIQRMGDRFAVEVKGRIHFDLYPVIRRTINLPTYTLEAVYEAVFGQPKEKVYAEEITTAWETGENLERVARYSMEDAKVTYELGKEFLPMEAQLSRLIGQSLWDVSRSSTGNLVEWFLLRKAYERNELAPNKPDEKELARRRQSYEGGYVKEPERGLWENIVYLDFRSLYPSIIITHNVSPDTLNREGCKEYDVAPQVGHRFCKDFPGFIPSLLGDLLEERQKIKKKMKATIDPIERKLLDYRQRAIKILANSYYGYYGYARARWYCKECAESVTAWGREYITMTIKEIEEKYGFKVIYSDTDGFFATIPGADAETVKKKAMEFLKYINAKLPGALELEYEGFYKRGFFVTKKKYAVIDEEGKITTRGLEIVRRDWSEIAKETQARVLEALLKDGDVEKAVRIVKEVTEKLSKYEVPPEKLVIHEQITRDLKDYKATGPHVAVAKRLAARGVKIRPGTVISYIVLKGSGRIGDRAIPFDEFDPTKHKYDAEYYIENQVLPAVERILRAFGYRKEDLRYQKTRQVGLSAWLKPKGT

SEQ ID NO: 1182 - protein, 774 aa, synthetic construct
MILDTDYITEDGKPVLRIFKKENGEFKIEYDRTFEPYFYALLKDDSAIEEVKKITAERHGTVVTVKRVEKVQKKFLGRPVEVWKLYFTHPQDQPAIRDKIREHPAVIDIYEYDIPFAKRYLIDKGLVPMEGDEELKMLAFDIETLYHEGEEFAEGPILMISYADEEGARVITWKNVDLPYVDVVSTEREMIKRFLRVVKEKDPDVLITYNGDNFDFAYLKKRCEKLGINFALGRDGSEPKIQRMGDRFAVEVKGRIHFDLYPVIRRTINLPTYTLEAVYEAVFGQPKEKVYAEEITTAWETGENLERVARYSMEDAKVTYELGKEFLPMEAQLSRLIGQSLWDVSRSSTGNLVEWFLLRKAYERNELAPNKPDEKELARRRQSYEGGYVKEPERGLWENIVYLDFRSLYPSIIITHNVSPDTLNREGCKEYDVAPQVGHRFCKDFPGFIPSLLGDLLEERQKIKKKMKATIDPIERKLLDYRQRAIKILANSYYGYYGYARARWYCKECAESVTAWGREYITMTIKEIEEKYGFKVIYSDTDGFFATIPGADAETVKKKAMEFLKYINAKLPGALELEYEGFYKRGFFVTKKKYAVIDEEGKITTRGLEIVRRDWSEIAKETQARVLEALLKDGDVEKAVRIVKEVTEKLSKYEVPPEKLVIHEQITRDLKDYKATGPHVAVAKRLAARGVKIRPGTVISYIVLKGSGRIGDRAIPFDEFDPTKHKYDAEYYIENQVLPAVERILRAFGYRKEDLRYQKTRQVGLSAWLKPKGT

SEQ ID NO: 1183 - protein, 774 aa, synthetic construct
MILDTDYITEDGKPVLRIFKKENGEFKIEYDRTFEPYFYALLKDDSAIEEVKKITAERHGTVVTVKRVEKVQKKFLGRPVEVWKLYFTHPQDQPAIADKIREHPAVIDIYEYDIPFAKRYLIDKGLVPMEGDEELKMLAFDIETLYHEGEEFAEGPILMISYADEEGARVITWKNVDLPYVDVVSTEREMIKRFLRVVKEKDPDVLITYNGDNFDFAYLKKRCEKLGINFALGRDGSEPKIQRMGDRFAVEVKGRIHFDLYPVIRRTINLPTYTLEAVYEAVFGQPKEKVYAEEITTAWETGENLERVARYSMEDAKVTYELGKEFLPMEAQLSRLIGQSLWDVSRSSTGNLVEWFLLRKAYERNELAPNKPDEKELARRRQSYEGGYVKEPERGLWENIVYLDFRSLYPSIIITHNVSPDTLNREGCKEYDVAPQVGHRFCKDFPGFIPSLLGDLLEERQKIKKKMKATIDPIERKLLDYRQRAIKILANSYYGYYGYARARWYCKECAESVTAWGREYITMTIKEIEEKYGFKVIYSDTDGFFATIPGADAETVKKKAMEFLKYINAKLPGALELEYEGFYKRGFFVTKKKYAVIDEEGKITTRGLEIVRRDWSEIAKETQARVLEALLKDGDVEKAVRIVKEVTEKLSKYEVPPEKLVIHEQITRDLKDYKATGPHVAVAKRLAARGVKIRPGTVISYIVLKGSGRIGDRAIPFDEFDPTKHKYDAEYYIENQVLPAVERILRAFGYRKEDLRYQKTRQVGLSAWLKPKGT

SEQ ID NO: 1184 - protein, 774 aa, synthetic construct
MILDTDYITEDGKPVLRIFKKENGEFKIEYDRTFEPYFYALLKDDSAIEEVKKITAERHGTVVTVKRVEKVQKKFLGRPVEVWKLYFTHPQDQPAIFDKIREHPAVIDIYEYDIPFAKRYLIDKGLVPMEGDEELKMLAFDIETLYHEGEEFAEGPILMISYADEEGARVITWKNVDLPYVDVVSTEREMIKRFLRVVKEKDPDVLITYNGDNFDFAYLKKRCEKLGINFALGRDGSEPKIQRMGDRFAVEVKGRIHFDLYPVIRRTINLPTYTLEAVYEAVFGQPKEKVYAEEITTAWETGENLERVARYSMEDAKVTYELGKEFLPMEAQLSRLIGQSLWDVSRSSTGNLVEWFLLRKAYERNELAPNKPDEKELARRRQSYEGGYVKEPERGLWENIVYLDFRSLYPSIIITHNVSPDTLNREGCKEYDVAPQVGHRFCKDFPGFIPSLLGDLLEERQKIKKKMKATIDPIERKLLDYRQRAIKILANSYYGYYGYARARWYCKECAESVTAWGREYITMTIKEIEEKYGFKVIYSDTDGFFATIPGADAETVKKKAMEFLKYINAKLPGALELEYEGFYKRGFFVTKKKYAVIDEEGKITTRGLEIVRRDWSEIAKETQARVLEALLKDGDVEKAVRIVKEVTEKLSKYEVPPEKLVIHEQITRDLKDYKATGPHVAVAKRLAARGVKIRPGTVISYIVLKGSGRIGDRAIPFDEFDPTKHKYDAEYYIENQVLPAVERILRAFGYRKEDLRYQKTRQVGLSAWLKPKGT

SEQ ID NO: 1185 - protein, 774 aa, synthetic construct
MILDTDYITEDGKPVLRIFKKENGEFKIEYDRTFEPYFYALLKDDSAIEEVKKITAERHGTVVTVKRVEKVQKKFLGRPVEVWKLYFTHPQDQPAIHDKIREHPAVIDIYEYDIPFAKRYLIDKGLVPMEGDEELKMLAFDIETLYHEGEEFAEGPILMISYADEEGARVITWKNVDLPYVDVVSTEREMIKRFLRVVKEKDPDVLITYNGDNFDFAYLKKRCEKLGINFALGRDGSEPKIQRMGDRFAVEVKGRIHFDLYPVIRRTINLPTYTLEAVYEAVFGQPKEKVYAEEITTAWETGENLERVARYSMEDAKVTYELGKEFLPMEAQLSRLIGQSLWDVSRSSTGNLVEWFLLRKAYERNELAPNKPDEKELARRRQSYEGGYVKEPERGLWENIVYLDFRSLYPSIIITHNVSPDTLNREGCKEYDVAPQVGHRFCKDFPGFIPSLLGDLLEERQKIKKKMKATIDPIERKLLDYRQRAIKILANSYYGYYGYARARWYCKECAESVTAWGREYITMTIKEIEEKYGFKVIYSDTDGFFATIPGADAETVKKKAMEFLKYINAKLPGALELEYEGFYKRGFFVTKKKYAVIDEEGKITTRGLEIVRRDWSEIAKETQARVLEALLKDGDVEKAVRIVKEVTEKLSKYEVPPEKLVIHEQITRDLKDYKATGPHVAVAKRLAARGVKIRPGTVISYIVLKGSGRIGDRAIPFDEFDPTKHKYDAEYYIENQVLPAVERILRAFGYRKEDLRYQKTRQVGLSAWLKPKGT

SEQ ID NO: 1186 - protein, 774 aa, synthetic construct
MILDTDYITEDGKPVLRIFKKENGEFKIEYDRTFEPYFYALLKDDSAIEEVKKITAERHGTVVTVKRVEKVQKKFLGRPVEVWKLYFTHPQDQPAIWDKIREHPAVIDIYEYDIPFAKRYLIDKGLVPMEGDEELKMLAFDIETLYHEGEEFAEGPILMISYADEEGARVITWKNVDLPYVDVVSTEREMIKRFLRVVKEKDPDVLITYNGDNFDFAYLKKRCEKLGINFALGRDGSEPKIQRMGDRFAVEVKGRIHFDLYPVIRRTINLPTYTLEAVYEAVFGQPKEKVYAEEITTAWETGENLERVARYSMEDAKVTYELGKEFLPMEAQLSRLIGQSLWDVSRSSTGNLVEWFLLRKAYERNELAPNKPDEKELARRRQSYEGGYVKEPERGLWENIVYLDFRSLYPSIIITHNVSPDTLNREGCKEYDVAPQVGHRFCKDFPGFIPSLLGDLLEERQKIKKKMKATIDPIERKLLDYRQRAIKILANSYYGYYGYARARWYCKECAESVTAWGREYITMTIKEIEEKYGFKVIYSDTDGFFATIPGADAETVKKKAMEFLKYINAKLPGALELEYEGFYKRGFFVTKKKYAVIDEEGKITTRGLEIVRRDWSEIAKETQARVLEALLKDGDVEKAVRIVKEVTEKLSKYEVPPEKLVIHEQITRDLKDYKATGPHVAVAKRLAARGVKIRPGTVISYIVLKGSGRIGDRAIPFDEFDPTKHKYDAEYYIENQVLPAVERILRAFGYRKEDLRYQKTRQVGLSAWLKPKGT

SEQ ID NO: 1187 - protein, 774 aa, synthetic construct
MILDTDYITEDGKPVLRIFKKENGEFKIEYDRTFEPYFYALLKDDSAIEEVKKITAERHGTVVTVKRVEKVQKKFLGRPVEVWKLYFTHPQDRPAIRDKIREHPAVIDIYEYDIPFAKRYLIDKGLVPMEGDEELKMLAFDIETLYHEGEEFAEGPILMISYADEEGARVITWKNVDLPYVDVVSTEREMIKRFLRVVKEKDPDVLITYNGDNFDFAYLKKRCEKLGINFALGRDGSEPKIQRMGDRFAVEVKGRIHFDLYPVIRRTINLPTYTLEAVYEAVFGQPKEKVYAEEITTAWETGENLERVARYSMEDAKVTYELGKEFLPMEAQLSRLIGQSLWDVSRSSTGNLVEWFLLRKAYERNELAPNKPDEKELARRRQSYEGGYVKEPERGLWENIVYLDFRSLYPSIIITHNVSPDTLNREGCKEYDVAPQVGHRFCKDFPGFIPSLLGDLLEERQKIKKKMKATIDPIERKLLDYRQRAIKILANSYYGYYGYARARWYCKECAESVTAWGREYITMTIKEIEEKYGFKVIYSDTDGFFATIPGADAETVKKKAMEFLKYINAKLPGALELEYEGFYKRGFFVTKKKYAVIDEEGKITTRGLEIVRRDWSEIAKETQARVLEALLKDGDVEKAVRIVKEVTEKLSKYEVPPEKLVIHEQITRDLKDYKATGPHVAVAKRLAARGVKIRPGTVISYIVLKGSGRIGDRAIPFDEFDPTKHKYDAEYYIENQVLPAVERILRAFGYRKEDLRYQKTRQVGLSAWLKPKGT

SEQ ID NO: 1188 - protein, 774 aa, synthetic construct
MILDTDYITEDGKPVLRIFKKENGEFKIEYDRTFEPYFYALLKDDSAIEEVKKITAERHGTVVTVKRVEKVQKKFLGRPVEVWKLYFTHPQDRPAIADKIREHPAVIDIYEYDIPFAKRYLIDKGLVPMEGDEELKMLAFDIETLYHEGEEFAEGPILMISYADEEGARVITWKNVDLPYVDVVSTEREMIKRFLRVVKEKDPDVLITYNGDNFDFAYLKKRCEKLGINFALGRDGSEPKIQRMGDRFAVEVKGRIHFDLYPVIRRTINLPTYTLEAVYEAVFGQPKEKVYAEEITTAWETGENLERVARYSMEDAKVTYELGKEFLPMEAQLSRLIGQSLWDVSRSSTGNLVEWFLLRKAYERNELAPNKPDEKELARRRQSYEGGYVKEPERGLWENIVYLDFRSLYPSIIITHNVSPDTLNREGCKEYDVAPQVGHRFCKDFPGFIPSLLGDLLEERQKIKKKMKATIDPIERKLLDYRQRAIKILANSYYGYYGYARARWYCKECAESVTAWGREYITMTIKEIEEKYGFKVIYSDTDGFFATIPGADAETVKKKAMEFLKYINAKLPGALELEYEGFYKRGFFVTKKKYAVIDEEGKITTRGLEIVRRDWSEIAKETQARVLEALLKDGDVEKAVRIVKEVTEKLSKYEVPPEKLVIHEQITRDLKDYKATGPHVAVAKRLAARGVKIRPGTVISYIVLKGSGRIGDRAIPFDEFDPTKHKYDAEYYIENQVLPAVERILRAFGYRKEDLRYQKTRQVGLSAWLKPKGT

SEQ ID NO: 1189 - protein, 774 aa, synthetic construct
MILDTDYITEDGKPVLRIFKKENGEFKIEYDRTFEPYFYALLKDDSAIEEVKKITAERHGTVVTVKRVEKVQKKFLGRPVEVWKLYFTHPQDRPAIADKIREHPAVIDIYEYDIPFAKMYLIDKGLVPMEGDEELKMLAFDIETLYHEGEEFAEGPILMISYADEEGARVITWKNVDLPYVDVVSTEREMIKRFLRVVKEKDPDVLITYNGDNFDFAYLKKRCEKLGINFALGRDGSEPKIQRMGDRFAVEVKGRIHFDLYPVIRRTINLPTYTLEAVYEAVFGQPKEKVYAEEITTAWETGENLERVARYSMEDAKVTYELGKEFLPMEAQLSRLIGQSLWDVSRSSTGNLVEWFLLRKAYERNELAPNKPDEKELARRRQSYEGGYVKEPERGLWENIVYLDFRSLYPSIIITHNVSPDTLNREGCKEYDVAPQVGHRFCKDFPGFIPSLLGDLLEERQKIKKKMKATIDPIERKLLDYRQRAIKILANSYYGYYGYARARWYCKECAESVTAWGREYITMTIKEIEEKYGFKVIYSDTDGFFATIPGADAETVKKKAMEFLKYINAKLPGALELEYEGFYKRGFFVTKKKYAVIDEEGKITTRGLEIVRRDWSEIAKETQARVLEALLKDGDVEKAVRIVKEVTEKLSKYEVPPEKLVIHEQITRDLKDYKATGPHVAVAKRLAARGVKIRPGTVISYIVLKGSGRIGDRAIPFDEFDPTKHKYDAEYYIENQVLPAVERILRAFGYRKEDLRYQKTRQVGLSAWLKPKGT

SEQ ID NO: 1190 - protein, 774 aa, synthetic construct
MILDTDYITEDGKPVLRIFKKENGEFKIEYDRTFEPYFYALLKDDSAIEEVKKITAERHGTVVTVKRVEKVQKKFLGRPVEVWKLYFTHPQDRPAIADKIREHPAVIDIYEYDIPFAKQYLIDKGLVPMEGDEELKMLAFDIETLYHEGEEFAEGPILMISYADEEGARVITWKNVDLPYVDVVSTEREMIKRFLRVVKEKDPDVLITYNGDNFDFAYLKKRCEKLGINFALGRDGSEPKIQRMGDRFAVEVKGRIHFDLYPVIRRTINLPTYTLEAVYEAVFGQPKEKVYAEEITTAWETGENLERVARYSMEDAKVTYELGKEFLPMEAQLSRLIGQSLWDVSRSSTGNLVEWFLLRKAYERNELAPNKPDEKELARRRQSYEGGYVKEPERGLWENIVYLDFRSLYPSIIITHNVSPDTLNREGCKEYDVAPQVGHRFCKDFPGFIPSLLGDLLEERQKIKKKMKATIDPIERKLLDYRQRAIKILANSYYGYYGYARARWYCKECAESVTAWGREYITMTIKEIEEKYGFKVIYSDTDGFFATIPGADAETVKKKAMEFLKYINAKLPGALELEYEGFYKRGFFVTKKKYAVIDEEGKITTRGLEIVRRDWSEIAKETQARVLEALLKDGDVEKAVRIVKEVTEKLSKYEVPPEKLVIHEQITRDLKDYKATGPHVAVAKRLAARGVKIRPGTVISYIVLKGSGRIGDRAIPFDEFDPTKHKYDAEYYIENQVLPAVERILRAFGYRKEDLRYQKTRQVGLSAWLKPKGT

SEQ ID NO: 1191 - protein, 774 aa, synthetic construct
MILDTDYITEDGKPVLRIFKKENGEFKIEYDRTFEPYFYALLKDDSAIEEVKKITAERHGTVVTVKRVEKVQKKFLGRPVEVWKLYFTHPQDRPAIFDKIREHPAVIDIYEYDIPFAKRYLIDKGLVPMEGDEELKMLAFDIETLYHEGEEFAEGPILMISYADEEGARVITWKNVDLPYVDVVSTEREMIKRFLRVVKEKDPDVLITYNGDNFDFAYLKKRCEKLGINFALGRDGSEPKIQRMGDRFAVEVKGRIHFDLYPVIRRTINLPTYTLEAVYEAVFGQPKEKVYAEEITTAWETGENLERVARYSMEDAKVTYELGKEFLPMEAQLSRLIGQSLWDVSRSSTGNLVEWFLLRKAYERNELAPNKPDEKELARRRQSYEGGYVKEPERGLWENIVYLDFRSLYPSIIITHNVSPDTLNREGCKEYDVAPQVGHRFCKDFPGFIPSLLGDLLEERQKIKKKMKATIDPIERKLLDYRQRAIKILANSYYGYYGYARARWYCKECAESVTAWGREYITMTIKEIEEKYGFKVIYSDTDGFFATIPGADAETVKKKAMEFLKYINAKLPGALELEYEGFYKRGFFVTKKKYAVIDEEGKITTRGLEIVRRDWSEIAKETQARVLEALLKDGDVEKAVRIVKEVTEKLSKYEVPPEKLVIHEQITRDLKDYKATGPHVAVAKRLAARGVKIRPGTVISYIVLKGSGRIGDRAIPFDEFDPTKHKYDAEYYIENQVLPAVERILRAFGYRKEDLRYQKTRQVGLSAWLKPKGT

SEQ ID NO: 1192 - protein, 774 aa, synthetic construct
MILDTDYITEDGKPVLRIFKKENGEFKIEYDRTFEPYFYALLKDDSAIEEVKKITAERHGTVVTVKRVEKVQKKFLGRPVEVWKLYFTHPQDRPAIHDKIREHPAVIDIYEYDIPFAKRYLIDKGLVPMEGDEELKMLAFDIETLYHEGEEFAEGPILMISYADEEGARVITWKNVDLPYVDVVSTEREMIKRFLRVVKEKDPDVLITYNGDNFDFAYLKKRCEKLGINFALGRDGSEPKIQRMGDRFAVEVKGRIHFDLYPVIRRTINLPTYTLEAVYEAVFGQPKEKVYAEEITTAWETGENLERVARYSMEDAKVTYELGKEFLPMEAQLSRLIGQSLWDVSRSSTGNLVEWFLLRKAYERNELAPNKPDEKELARRRQSYEGGYVKEPERGLWENIVYLDFRSLYPSIIITHNVSPDTLNREGCKEYDVAPQVGHRFCKDFPGFIPSLLGDLLEERQKIKKKMKATIDPIERKLLDYRQRAIKILANSYYGYYGYARARWYCKECAESVTAWGREYITMTIKEIEEKYGFKVIYSDTDGFFATIPGADAETVKKKAMEFLKYINAKLPGALELEYEGFYKRGFFVTKKKYAVIDEEGKITTRGLEIVRRDWSEIAKETQARVLEALLKDGDVEKAVRIVKEVTEKLSKYEVPPEKLVIHEQITRDLKDYKATGPHVAVAKRLAARGVKIRPGTVISYIVLKGSGRIGDRAIPFDEFDPTKHKYDAEYYIENQVLPAVERILRAFGYRKEDLRYQKTRQVGLSAWLKPKGT

SEQ ID NO: 1193 - protein, 774 aa, synthetic construct
MILDTDYITEDGKPVLRIFKKENGEFKIEYDRTFEPYFYALLKDDSAIEEVKKITAERHGTVVTVKRVEKVQKKFLGRPVEVWKLYFTHPQDRPAIWDKIREHPAVIDIYEYDIPFAKRYLIDKGLVPMEGDEELKMLAFDIETLYHEGEEFAEGPILMISYADEEGARVITWKNVDLPYVDVVSTEREMIKRFLRVVKEKDPDVLITYNGDNFDFAYLKKRCEKLGINFALGRDGSEPKIQRMGDRFAVEVKGRIHFDLYPVIRRTINLPTYTLEAVYEAVFGQPKEKVYAEEITTAWETGENLERVARYSMEDAKVTYELGKEFLPMEAQLSRLIGQSLWDVSRSSTGNLVEWFLLRKAYERNELAPNKPDEKELARRRQSYEGGYVKEPERGLWENIVYLDFRSLYPSIIITHNVSPDTLNREGCKEYDVAPQVGHRFCKDFPGFIPSLLGDLLEERQKIKKKMKATIDPIERKLLDYRQRAIKILANSYYGYYGYARARWYCKECAESVTAWGREYITMTIKEIEEKYGFKVIYSDTDGFFATIPGADAETVKKKAMEFLKYINAKLPGALELEYEGFYKRGFFVTKKKYAVIDEEGKITTRGLEIVRRDWSEIAKETQARVLEALLKDGDVEKAVRIVKEVTEKLSKYEVPPEKLVIHEQITRDLKDYKATGPHVAVAKRLAARGVKIRPGTVISYIVLKGSGRIGDRAIPFDEFDPTKHKYDAEYYIENQVLPAVERILRAFGYRKEDLRYQKTRQVGLSAWLKPKGT

SEQ ID NO: 1194 - protein, 774 aa, synthetic construct
MILDTDYITEDGKPVLRIFKKENGEFKIEYDRTFEPYFYALLKDDSAIEEVKKITAERHGTVVTVKRVEKVQKKFLGRPVEVWKLYFTHPQDRPAIWDKIREHPAVIDIYEYDIPFAKQYLIDKGLVPMEGDEELKMLAFDIETLYHEGEEFAEGPILMISYADEEGARVITWKNVDLPYVDVVSTEREMIKRFLRVVKEKDPDVLITYNGDNFDFAYLKKRCEKLGINFALGRDGSEPKIQRMGDRFAVEVKGRIHFDLYPVIRRTINLPTYTLEAVYEAVFGQPKEKVYAEEITTAWETGENLERVARYSMEDAKVTYELGKEFLPMEAQLSRLIGQSLWDVSRSSTGNLVEWFLLRKAYERNELAPNKPDEKELARRRQSYEGGYVKEPERGLWENIVYLDFRSLYPSIIITHNVSPDTLNREGCKEYDVAPQVGHRFCKDFPGFIPSLLGDLLEERQKIKKKMKATIDPIERKLLDYRQRAIKILANSYYGYYGYARARWYCKECAESVTAWGREYITMTIKEIEEKYGFKVIYSDTDGFFATIPGADAETVKKKAMEFLKYINAKLPGALELEYEGFYKRGFFVTKKKYAVIDEEGKITTRGLEIVRRDWSEIAKETQARVLEALLKDGDVEKAVRIVKEVTEKLSKYEVPPEKLVIHEQITRDLKDYKATGPHVAVAKRLAARGVKIRPGTVISYIVLKGSGRIGDRAIPFDEFDPTKHKYDAEYYIENQVLPAVERILRAFGYRKEDLRYQKTRQVGLSAWLKPKGT

SEQ ID NO: 1195 - protein, 774 aa, synthetic construct
MILDTDYITEDGKPVLRIFKKENGEFKIEYDRTFEPYFYALLKDDSAIEEVKKITAERHGTVVTVKRVEKVQKKFLGRPVEVWKLYFTHPQDRPAIRDKIREHPAVIDIYEYDIPFAKQYLIDKGLVPMEGDEELKMLAFDIETLYHEGEEFAEGPILMISYADEEGARVITWKNVDLPYVDVVSTEREMIKRFLRVVKEKDPDVLITYNGDNFDFAYLKKRCEKLGINFALGRDGSEPKIQRMGDRFAVEVKGRIHFDLYPVIRRTINLPTYTLEAVYEAVFGQPKEKVYAEEITTAWETGENLERVARYSMEDAKVTYELGKEFLPMEAQLSRLIGQSLWDVSRSSTGNLVEWFLLRKAYERNELAPNKPDEKELARRRQSYEGGYVKEPERGLWENIVYLDFRSLYPSIIITHNVSPDTLNREGCKEYDVAPQVGHRFCKDFPGFIPSLLGDLLEERQKIKKKMKATIDPIERKLLDYRQRAIKILANSYYGYYGYARARWYCKECAESVTAWGREYITMTIKEIEEKYGFKVIYSDTDGFFATIPGADAETVKKKAMEFLKYINAKLPGALELEYEGFYKRGFFVTKKKYAVIDEEGKITTRGLEIVRRDWSEIAKETQARVLEALLKDGDVEKAVRIVKEVTEKLSKYEVPPEKLVIHEQITRDLKDYKATGPHVAVAKRLAARGVKIRPGTVISYIVLKGSGRIGDRAIPFDEFDPTKHKYDAEYYIENQVLPAVERILRAFGYRKEDLRYQKTRQVGLSAWLKPKGT

SEQ ID NO: 1196 - protein, 774 aa, synthetic construct
MILDTDYITEDGKPVMRIFKKENGEFKIEYDRTFEAYFYALLKDDSAIEEVKKITAERHGTVVTVKRVEKVQKKFLGRPVEVWKLYFTHFQDVPAIRDKIREHPAVIDIYEYDIPFAKRYLIDKGLVPMEGDEELKMLAFDIETLYHEGEEFAEGPILMISYADEEGARVITWKNVDLPYVDVVSTEREMIKRFLRVVKEKDPDVLITYNGDNFDFAYLKKRCEKLGINFALGRDGSEPKIQRMGDRFAVEVKGRIHFDLYPVIRRTINLPTYTLEAVYEAVFGQPKEKVYAEEITTAWETGENLERVARYSMEDAKVTYELGKEFLPMEAQLSRLIGQSLWDVSRSSTGNLVEWFLLRKAYERNELAPNKPDEKELARRRQSYEGGYVKEPERGLWENIVYLDFRSLYPSIIITHNVSPDTLNREGCKEYDVAPQVGHRFCKDFPGFIPSLLGDLLEERQKIKKKMKATIDPIERKLLDYRQRAIKILANSYYGYYGYARARWYCKECAESVTAWGREYITMTIKEIEEKYGFKVIYSDTDGFFATIPGADAETVKKKAMEFLKYINAKLPGALELEYEGFYKRGFFVTKKKYAVIDEEGKITTRGLEIVRRDWSEIAKETQARVLEALLKDGDVEKAVRIVKEVTEKLSKYEVPPEKLVIHEQITRDLKDYKATGPHVAVAKRLAARGVKIRPGTVISYIVLKGSGRIGDRAIPFDEFDPTKHKYDAEYYIENQVLPAVERILRAFGYRKEDLRYQKTRQVGLSAWLKPKGT

SEQ ID NO: 1197 - protein, 774 aa, synthetic construct
MILDTDYITEDGKPVMRIFKKENGEFKIEYDRTFEAYFYALLKDDSAIEEVKKITAERHGTVVTVKRVEKVQKKFLGRPVEVWKLYFTHFQDVPAIADKIREHPAVIDIYEYDIPFAKRYLIDKGLVPMEGDEELKMLAFDIETLYHEGEEFAEGPILMISYADEEGARVITWKNVDLPYVDVVSTEREMIKRFLRVVKEKDPDVLITYNGDNFDFAYLKKRCEKLGINFALGRDGSEPKIQRMGDRFAVEVKGRIHFDLYPVIRRTINLPTYTLEAVYEAVFGQPKEKVYAEEITTAWETGENLERVARYSMEDAKVTYELGKEFLPMEAQLSRLIGQSLWDVSRSSTGNLVEWFLLRKAYERNELAPNKPDEKELARRRQSYEGGYVKEPERGLWENIVYLDFRSLYPSIIITHNVSPDTLNREGCKEYDVAPQVGHRFCKDFPGFIPSLLGDLLEERQKIKKKMKATIDPIERKLLDYRQRAIKILANSYYGYYGYARARWYCKECAESVTAWGREYITMTIKEIEEKYGFKVIYSDTDGFFATIPGADAETVKKKAMEFLKYINAKLPGALELEYEGFYKRGFFVTKKKYAVIDEEGKITTRGLEIVRRDWSEIAKETQARVLEALLKDGDVEKAVRIVKEVTEKLSKYEVPPEKLVIHEQITRDLKDYKATGPHVAVAKRLAARGVKIRPGTVISYIVLKGSGRIGDRAIPFDEFDPTKHKYDAEYYIENQVLPAVERILRAFGYRKEDLRYQKTRQVGLSAWLKPKGT

SEQ ID NO: 1198 - protein, 774 aa, synthetic construct
MILDTDYITEDGKPVMRIFKKENGEFKIEYDRTFEAYFYALLKDDSAIEEVKKITAERHGTVVTVKRVEKVQKKFLGRPVEVWKLYFTHFQDIPAIRDKIREHPAVIDIYEYDIPFAKRYLIDKGLVPMEGDEELKMLAFDIETLYHEGEEFAEGPILMISYADEEGARVITWKNVDLPYVDVVSTEREMIKRFLRVVKEKDPDVLITYNGDNFDFAYLKKRCEKLGINFALGRDGSEPKIQRMGDRFAVEVKGRIHFDLYPVIRRTINLPTYTLEAVYEAVFGQPKEKVYAEEITTAWETGENLERVARYSMEDAKVTYELGKEFLPMEAQLSRLIGQSLWDVSRSSTGNLVEWFLLRKAYERNELAPNKPDEKELARRRQSYEGGYVKEPERGLWENIVYLDFRSLYPSIIITHNVSPDTLNREGCKEYDVAPQVGHRFCKDFPGFIPSLLGDLLEERQKIKKKMKATIDPIERKLLDYRQRAIKILANSYYGYYGYARARWYCKECAESVTAWGREYITMTIKEIEEKYGFKVIYSDTDGFFATIPGADAETVKKKAMEFLKYINAKLPGALELEYEGFYKRGFFVTKKKYAVIDEEGKITTRGLEIVRRDWSEIAKETQARVLEALLKDGDVEKAVRIVKEVTEKLSKYEVPPEKLVIHEQITRDLKDYKATGPHVAVAKRLAARGVKIRPGTVISYIVLKGSGRIGDRAIPFDEFDPTKHKYDAEYYIENQVLPAVERILRAFGYRKEDLRYQKTRQVGLSAWLKPKGT

SEQ ID NO: 1199 - protein, 774 aa, synthetic construct
MILDTDYITEDGKPVMRIFKKENGEFKIEYDRTFEAYFYALLKDDSAIEEVKKITAERHGTVVTVKRVEKVQKKFLGRPVEVWKLYFTHFQDIPAIADKIREHPAVIDIYEYDIPFAKRYLIDKGLVPMEGDEELKMLAFDIETLYHEGEEFAEGPILMISYADEEGARVITWKNVDLPYVDVVSTEREMIKRFLRVVKEKDPDVLITYNGDNFDFAYLKKRCEKLGINFALGRDGSEPKIQRMGDRFAVEVKGRIHFDLYPVIRRTINLPTYTLEAVYEAVFGQPKEKVYAEEITTAWETGENLERVARYSMEDAKVTYELGKEFLPMEAQLSRLIGQSLWDVSRSSTGNLVEWFLLRKAYERNELAPNKPDEKELARRRQSYEGGYVKEPERGLWENIVYLDFRSLYPSIIITHNVSPDTLNREGCKEYDVAPQVGHRFCKDFPGFIPSLLGDLLEERQKIKKKMKATIDPIERKLLDYRQRAIKILANSYYGYYGYARARWYCKECAESVTAWGREYITMTIKEIEEKYGFKVIYSDTDGFFATIPGADAETVKKKAMEFLKYINAKLPGALELEYEGFYKRGFFVTKKKYAVIDEEGKITTRGLEIVRRDWSEIAKETQARVLEALLKDGDVEKAVRIVKEVTEKLSKYEVPPEKLVIHEQITRDLKDYKATGPHVAVAKRLAARGVKIRPGTVISYIVLKGSGRIGDRAIPFDEFDPTKHKYDAEYYIENQVLPAVERILRAFGYRKEDLRYQKTRQVGLSAWLKPKGT

SEQ ID NO: 1200 - protein, 774 aa, synthetic construct
MILDTDYITEDGKPVMRIFKKENGEFKIEYDRTFEAYFYALLKDDSAIEEVKKITAERHGTVVTVKRVEKVQKKFLGRPVEVWKLYFTHFQDIPAIFDKIREHPAVIDIYEYDIPFAKRYLIDKGLVPMEGDEELKMLAFDIETLYHEGEEFAEGPILMISYADEEGARVITWKNVDLPYVDVVSTEREMIKRFLRVVKEKDPDVLITYNGDNFDFAYLKKRCEKLGINFALGRDGSEPKIQRMGDRFAVEVKGRIHFDLYPVIRRTINLPTYTLEAVYEAVFGQPKEKVYAEEITTAWETGENLERVARYSMEDAKVTYELGKEFLPMEAQLSRLIGQSLWDVSRSSTGNLVEWFLLRKAYERNELAPNKPDEKELARRRQSYEGGYVKEPERGLWENIVYLDFRSLYPSIIITHNVSPDTLNREGCKEYDVAPQVGHRFCKDFPGFIPSLLGDLLEERQKIKKKMKATIDPIERKLLDYRQRAIKILANSYYGYYGYARARWYCKECAESVTAWGREYITMTIKEIEEKYGFKVIYSDTDGFFATIPGADAETVKKKAMEFLKYINAKLPGALELEYEGFYKRGFFVTKKKYAVIDEEGKITTRGLEIVRRDWSEIAKETQARVLEALLKDGDVEKAVRIVKEVTEKLSKYEVPPEKLVIHEQITRDLKDYKATGPHVAVAKRLAARGVKIRPGTVISYIVLKGSGRIGDRAIPFDEFDPTKHKYDAEYYIENQVLPAVERILRAFGYRKEDLRYQKTRQVGLSAWLKPKGT

SEQ ID NO: 1201 - protein, 774 aa, synthetic construct
MILDTDYITEDGKPVMRIFKKENGEFKIEYDRTFEAYFYALLKDDSAIEEVKKITAERHGTVVTVKRVEKVQKKFLGRPVEVWKLYFTHFQDIPAIHDKIREHPAVIDIYEYDIPFAKRYLIDKGLVPMEGDEELKMLAFDIETLYHEGEEFAEGPILMISYADEEGARVITWKNVDLPYVDVVSTEREMIKRFLRVVKEKDPDVLITYNGDNFDFAYLKKRCEKLGINFALGRDGSEPKIQRMGDRFAVEVKGRIHFDLYPVIRRTINLPTYTLEAVYEAVFGQPKEKVYAEEITTAWETGENLERVARYSMEDAKVTYELGKEFLPMEAQLSRLIGQSLWDVSRSSTGNLVEWFLLRKAYERNELAPNKPDEKELARRRQSYEGGYVKEPERGLWENIVYLDFRSLYPSIIITHNVSPDTLNREGCKEYDVAPQVGHRFCKDFPGFIPSLLGDLLEERQKIKKKMKATIDPIERKLLDYRQRAIKILANSYYGYYGYARARWYCKECAESVTAWGREYITMTIKEIEEKYGFKVIYSDTDGFFATIPGADAETVKKKAMEFLKYINAKLPGALELEYEGFYKRGFFVTKKKYAVIDEEGKITTRGLEIVRRDWSEIAKETQARVLEALLKDGDVEKAVRIVKEVTEKLSKYEVPPEKLVIHEQITRDLKDYKATGPHVAVAKRLAARGVKIRPGTVISYIVLKGSGRIGDRAIPFDEFDPTKHKYDAEYYIENQVLPAVERILRAFGYRKEDLRYQKTRQVGLSAWLKPKGT

SEQ ID NO: 1202 - protein, 774 aa, synthetic construct
MILDTDYITEDGKPVMRIFKKENGEFKIEYDRTFEAYFYALLKDDSAIEEVKKITAERHGTVVTVKRVEKVQKKFLGRPVEVWKLYFTHIQDVPAIRDKIREHPAVIDIYEYDIPFAKRYLIDKGLVPMEGDEELKMLAFDIETLYHEGEEFAEGPILMISYADEEGARVITWKNVDLPYVDVVSTEREMIKRFLRVVKEKDPDVLITYNGDNFDFAYLKKRCEKLGINFALGRDGSEPKIQRMGDRFAVEVKGRIHFDLYPVIRRTINLPTYTLEAVYEAVFGQPKEKVYAEEITTAWETGENLERVARYSMEDAKVTYELGKEFLPMEAQLSRLIGQSLWDVSRSSTGNLVEWFLLRKAYERNELAPNKPDEKELARRRQSYEGGYVKEPERGLWENIVYLDFRSLYPSIIITHNVSPDTLNREGCKEYDVAPQVGHRFCKDFPGFIPSLLGDLLEERQKIKKKMKATIDPIERKLLDYRQRAIKILANSYYGYYGYARARWYCKECAESVTAWGREYITMTIKEIEEKYGFKVIYSDTDGFFATIPGADAETVKKKAMEFLKYINAKLPGALELEYEGFYKRGFFVTKKKYAVIDEEGKITTRGLEIVRRDWSEIAKETQARVLEALLKDGDVEKAVRIVKEVTEKLSKYEVPPEKLVIHEQITRDLKDYKATGPHVAVAKRLAARGVKIRPGTVISYIVLKGSGRIGDRAIPFDEFDPTKHKYDAEYYIENQVLPAVERILRAFGYRKEDLRYQKTRQVGLSAWLKPKGT

SEQ ID NO: 1203 - protein, 774 aa, synthetic construct
MILDTDYITEDGKPVMRIFKKENGEFKIEYDRTFEAYFYALLKDDSAIEEVKKITAERHGTVVTVKRVEKVQKKFLGRPVEVWKLYFTHIQDIPAIRDKIREHPAVIDIYEYDIPFAKRYLIDKGLVPMEGDEELKMLAFDIETLYHEGEEFAEGPILMISYADEEGARVITWKNVDLPYVDVVSTEREMIKRFLRVVKEKDPDVLITYNGDNFDFAYLKKRCEKLGINFALGRDGSEPKIQRMGDRFAVEVKGRIHFDLYPVIRRTINLPTYTLEAVYEAVFGQPKEKVYAEEITTAWETGENLERVARYSMEDAKVTYELGKEFLPMEAQLSRLIGQSLWDVSRSSTGNLVEWFLLRKAYERNELAPNKPDEKELARRRQSYEGGYVKEPERGLWENIVYLDFRSLYPSIIITHNVSPDTLNREGCKEYDVAPQVGHRFCKDFPGFIPSLLGDLLEERQKIKKKMKATIDPIERKLLDYRQRAIKILANSYYGYYGYARARWYCKECAESVTAWGREYITMTIKEIEEKYGFKVIYSDTDGFFATIPGADAETVKKKAMEFLKYINAKLPGALELEYEGFYKRGFFVTKKKYAVIDEEGKITTRGLEIVRRDWSEIAKETQARVLEALLKDGDVEKAVRIVKEVTEKLSKYEVPPEKLVIHEQITRDLKDYKATGPHVAVAKRLAARGVKIRPGTVISYIVLKGSGRIGDRAIPFDEFDPTKHKYDAEYYIENQVLPAVERILRAFGYRKEDLRYQKTRQVGLSAWLKPKGT

SEQ ID NO: 1204 - protein, 774 aa, synthetic construct
MILDTDYITEDGKPVMRIFKKENGEFKIEYDRTFEAYFYALLKDDSAIEEVKKITAERHGTVVTVKRVEKVQKKFLGRPVEVWKLYFTHIQDQPAIRDKIREHPAVIDIYEYDIPFAKRYLIDKGLVPMEGDEELKMLAFDIETLYHEGEEFAEGPILMISYADEEGARVITWKNVDLPYVDVVSTEREMIKRFLRVVKEKDPDVLITYNGDNFDFAYLKKRCEKLGINFALGRDGSEPKIQRMGDRFAVEVKGRIHFDLYPVIRRTINLPTYTLEAVYEAVFGQPKEKVYAEEITTAWETGENLERVARYSMEDAKVTYELGKEFLPMEAQLSRLIGQSLWDVSRSSTGNLVEWFLLRKAYERNELAPNKPDEKELARRRQSYEGGYVKEPERGLWENIVYLDFRSLYPSIIITHNVSPDTLNREGCKEYDVAPQVGHRFCKDFPGFIPSLLGDLLEERQKIKKKMKATIDPIERKLLDYRQRAIKILANSYYGYYGYARARWYCKECAESVTAWGREYITMTIKEIEEKYGFKVIYSDTDGFFATIPGADAETVKKKAMEFLKYINAKLPGALELEYEGFYKRGFFVTKKKYAVIDEEGKITTRGLEIVRRDWSEIAKETQARVLEALLKDGDVEKAVRIVKEVTEKLSKYEVPPEKLVIHEQITRDLKDYKATGPHVAVAKRLAARGVKIRPGTVISYIVLKGSGRIGDRAIPFDEFDPTKHKYDAEYYIENQVLPAVERILRAFGYRKEDLRYQKTRQVGLSAWLKPKGT

SEQ ID NO: 1205 - protein, 774 aa, synthetic construct
MILDTDYITEDGKPVMRIFKKENGEFKIEYDRTFEAYFYALLKDDSAIEEVKKITAERHGTVVTVKRVEKVQKKFLGRPVEVWKLYFTHWQDVPAIRDKIREHPAVIDIYEYDIPFAKRYLIDKGLVPMEGDEELKMLAFDIETLYHEGEEFAEGPILMISYADEEGARVITWKNVDLPYVDVVSTEREMIKRFLRVVKEKDPDVLITYNGDNFDFAYLKKRCEKLGINFALGRDGSEPKIQRMGDRFAVEVKGRIHFDLYPVIRRTINLPTYTLEAVYEAVFGQPKEKVYAEEITTAWETGENLERVARYSMEDAKVTYELGKEFLPMEAQLSRLIGQSLWDVSRSSTGNLVEWFLLRKAYERNELAPNKPDEKELARRRQSYEGGYVKEPERGLWENIVYLDFRSLYPSIIITHNVSPDTLNREGCKEYDVAPQVGHRFCKDFPGFIPSLLGDLLEERQKIKKKMKATIDPIERKLLDYRQRAIKILANSYYGYYGYARARWYCKECAESVTAWGREYITMTIKEIEEKYGFKVIYSDTDGFFATIPGADAETVKKKAMEFLKYINAKLPGALELEYEGFYKRGFFVTKKKYAVIDEEGKITTRGLEIVRRDWSEIAKETQARVLEALLKDGDVEKAVRIVKEVTEKLSKYEVPPEKLVIHEQITRDLKDYKATGPHVAVAKRLAARGVKIRPGTVISYIVLKGSGRIGDRAIPFDEFDPTKHKYDAEYYIENQVLPAVERILRAFGYRKEDLRYQKTRQVGLSAWLKPKGT

SEQ ID NO: 1206 - protein, 774 aa, synthetic construct
MILDTDYITEDGKPVMRIFKKENGEFKIEYDRTFEAYFYALLKDDSAIEEVKKITAERHGTVVTVKRVEKVQKKFLGRPVEVWKLYFTHWQDIPAIADKIREHPAVIDIYEYDIPFAKRYLIDKGLVPMEGDEELKMLAFDIETLYHEGEEFAEGPILMISYADEEGARVITWKNVDLPYVDVVSTEREMIKRFLRVVKEKDPDVLITYNGDNFDFAYLKKRCEKLGINFALGRDGSEPKIQRMGDRFAVEVKGRIHFDLYPVIRRTINLPTYTLEAVYEAVFGQPKEKVYAEEITTAWETGENLERVARYSMEDAKVTYELGKEFLPMEAQLSRLIGQSLWDVSRSSTGNLVEWFLLRKAYERNELAPNKPDEKELARRRQSYEGGYVKEPERGLWENIVYLDFRSLYPSIIITHNVSPDTLNREGCKEYDVAPQVGHRFCKDFPGFIPSLLGDLLEERQKIKKKMKATIDPIERKLLDYRQRAIKILANSYYGYYGYARARWYCKECAESVTAWGREYITMTIKEIEEKYGFKVIYSDTDGFFATIPGADAETVKKKAMEFLKYINAKLPGALELEYEGFYKRGFFVTKKKYAVIDEEGKITTRGLEIVRRDWSEIAKETQARVLEALLKDGDVEKAVRIVKEVTEKLSKYEVPPEKLVIHEQITRDLKDYKATGPHVAVAKRLAARGVKIRPGTVISYIVLKGSGRIGDRAIPFDEFDPTKHKYDAEYYIENQVLPAVERILRAFGYRKEDLRYQKTRQVGLSAWLKPKGT

SEQ ID NO: 1207 - protein, 774 aa, synthetic construct
MILDTDYITEDGKPVMRIFKKENGEFKIEYDRTFEAYFYALLKDDSAIEEVKKITAERHGTVVTVKRVEKVQKKFLGRPVEVWKLYFTHYQDVPAIRDKIREHPAVIDIYEYDIPFAKRYLIDKGLVPMEGDEELKMLAFDIETLYHEGEEFAEGPILMISYADEEGARVITWKNVDLPYVDVVSTEREMIKRFLRVVKEKDPDVLITYNGDNFDFAYLKKRCEKLGINFALGRDGSEPKIQRMGDRFAVEVKGRIHFDLYPVIRRTINLPTYTLEAVYEAVFGQPKEKVYAEEITTAWETGENLERVARYSMEDAKVTYELGKEFLPMEAQLSRLIGQSLWDVSRSSTGNLVEWFLLRKAYERNELAPNKPDEKELARRRQSYEGGYVKEPERGLWENIVYLDFRSLYPSIIITHNVSPDTLNREGCKEYDVAPQVGHRFCKDFPGFIPSLLGDLLEERQKIKKKMKATIDPIERKLLDYRQRAIKILANSYYGYYGYARARWYCKECAESVTAWGREYITMTIKEIEEKYGFKVIYSDTDGFFATIPGADAETVKKKAMEFLKYINAKLPGALELEYEGFYKRGFFVTKKKYAVIDEEGKITTRGLEIVRRDWSEIAKETQARVLEALLKDGDVEKAVRIVKEVTEKLSKYEVPPEKLVIHEQITRDLKDYKATGPHVAVAKRLAARGVKIRPGTVISYIVLKGSGRIGDRAIPFDEFDPTKHKYDAEYYIENQVLPAVERILRAFGYRKEDLRYQKTRQVGLSAWLKPKGT

SEQ ID NO: 1208 - protein, 774 aa, synthetic construct
MILDTDYITEDGKPVMRIFKKENGEFKIEYDRTFEAYFYALLKDDSAIEEVKKITAERHGTVVTVKRVEKVQKKFLGRPVEVWKLYFTHYQDIPAIRDKIREHPAVIDIYEYDIPFAKRYLIDKGLVPMEGDEELKMLAFDIETLYHEGEEFAEGPILMISYADEEGARVITWKNVDLPYVDVVSTEREMIKRFLRVVKEKDPDVLITYNGDNFDFAYLKKRCEKLGINFALGRDGSEPKIQRMGDRFAVEVKGRIHFDLYPVIRRTINLPTYTLEAVYEAVFGQPKEKVYAEEITTAWETGENLERVARYSMEDAKVTYELGKEFLPMEAQLSRLIGQSLWDVSRSSTGNLVEWFLLRKAYERNELAPNKPDEKELARRRQSYEGGYVKEPERGLWENIVYLDFRSLYPSIIITHNVSPDTLNREGCKEYDVAPQVGHRFCKDFPGFIPSLLGDLLEERQKIKKKMKATIDPIERKLLDYRQRAIKILANSYYGYYGYARARWYCKECAESVTAWGREYITMTIKEIEEKYGFKVIYSDTDGFFATIPGADAETVKKKAMEFLKYINAKLPGALELEYEGFYKRGFFVTKKKYAVIDEEGKITTRGLEIVRRDWSEIAKETQARVLEALLKDGDVEKAVRIVKEVTEKLSKYEVPPEKLVIHEQITRDLKDYKATGPHVAVAKRLAARGVKIRPGTVISYIVLKGSGRIGDRAIPFDEFDPTKHKYDAEYYIENQVLPAVERILRAFGYRKEDLRYQKTRQVGLSAWLKPKGT

SEQ ID NO: 1209 - protein, 774 aa, synthetic construct
MILDTDYITEDGKPVMRIFKKENGEFKIEYDRTFEAYFYALLKDDSAIEEVKKITAERHGTVVTVKRVEKVQKKFLGRPVEVWKLYFTHYQDIPAIWDKIREHPAVIDIYEYDIPFAKRYLIDKGLVPMEGDEELKMLAFDIETLYHEGEEFAEGPILMISYADEEGARVITWKNVDLPYVDVVSTEREMIKRFLRVVKEKDPDVLITYNGDNFDFAYLKKRCEKLGINFALGRDGSEPKIQRMGDRFAVEVKGRIHFDLYPVIRRTINLPTYTLEAVYEAVFGQPKEKVYAEEITTAWETGENLERVARYSMEDAKVTYELGKEFLPMEAQLSRLIGQSLWDVSRSSTGNLVEWFLLRKAYERNELAPNKPDEKELARRRQSYEGGYVKEPERGLWENIVYLDFRSLYPSIIITHNVSPDTLNREGCKEYDVAPQVGHRFCKDFPGFIPSLLGDLLEERQKIKKKMKATIDPIERKLLDYRQRAIKILANSYYGYYGYARARWYCKECAESVTAWGREYITMTIKEIEEKYGFKVIYSDTDGFFATIPGADAETVKKKAMEFLKYINAKLPGALELEYEGFYKRGFFVTKKKYAVIDEEGKITTRGLEIVRRDWSEIAKETQARVLEALLKDGDVEKAVRIVKEVTEKLSKYEVPPEKLVIHEQITRDLKDYKATGPHVAVAKRLAARGVKIRPGTVISYIVLKGSGRIGDRAIPFDEFDPTKHKYDAEYYIENQVLPAVERILRAFGYRKEDLRYQKTRQVGLSAWLKPKGT

SEQ ID NO: 1210 - protein, 774 aa, synthetic construct
MILDTDYITEDGKPVMRIFKKENGEFKIEYDRTFEAYFYALLKDDSAIEEVKKITAERHGTVVTVKRVEKVQKKFLGRPVEVWKLYFTHPQDVPAIFDKIREHPAVIDIYEYDIPFAKRYLIDKGLVPMEGDEELKMLAFDIETLYHEGEEFAEGPILMISYADEEGARVITWKNVDLPYVDVVSTEREMIKRFLRVVKEKDPDVLITYNGDNFDFAYLKKRCEKLGINFALGRDGSEPKIQRMGDRFAVEVKGRIHFDLYPVIRRTINLPTYTLEAVYEAVFGQPKEKVYAEEITTAWETGENLERVARYSMEDAKVTYELGKEFLPMEAQLSRLIGQSLWDVSRSSTGNLVEWFLLRKAYERNELAPNKPDEKELARRRQSYEGGYVKEPERGLWENIVYLDFRSLYPSIIITHNVSPDTLNREGCKEYDVAPQVGHRFCKDFPGFIPSLLGDLLEERQKIKKKMKATIDPIERKLLDYRQRAIKILANSYYGYYGYARARWYCKECAESVTAWGREYITMTIKEIEEKYGFKVIYSDTDGFFATIPGADAETVKKKAMEFLKYINAKLPGALELEYEGFYKRGFFVTKKKYAVIDEEGKITTRGLEIVRRDWSEIAKETQARVLEALLKDGDVEKAVRIVKEVTEKLSKYEVPPEKLVIHEQITRDLKDYKATGPHVAVAKRLAARGVKIRPGTVISYIVLKGSGRIGDRAIPFDEFDPTKHKYDAEYYIENQVLPAVERILRAFGYRKEDLRYQKTRQVGLSAWLKPKGT

SEQ ID NO: 1211 - protein, 774 aa, synthetic construct
MILDTDYITEDGKPVMRIFKKENGEFKIEYDRTFEAYFYALLKDDSAIEEVKKITAERHGTVVTVKRVEKVQKKFLGRPVEVWKLYFTHPQDVPAIWDKIREHPAVIDIYEYDIPFAKRYLIDKGLVPMEGDEELKMLAFDIETLYHEGEEFAEGPILMISYADEEGARVITWKNVDLPYVDVVSTEREMIKRFLRVVKEKDPDVLITYNGDNFDFAYLKKRCEKLGINFALGRDGSEPKIQRMGDRFAVEVKGRIHFDLYPVIRRTINLPTYTLEAVYEAVFGQPKEKVYAEEITTAWETGENLERVARYSMEDAKVTYELGKEFLPMEAQLSRLIGQSLWDVSRSSTGNLVEWFLLRKAYERNELAPNKPDEKELARRRQSYEGGYVKEPERGLWENIVYLDFRSLYPSIIITHNVSPDTLNREGCKEYDVAPQVGHRFCKDFPGFIPSLLGDLLEERQKIKKKMKATIDPIERKLLDYRQRAIKILANSYYGYYGYARARWYCKECAESVTAWGREYITMTIKEIEEKYGFKVIYSDTDGFFATIPGADAETVKKKAMEFLKYINAKLPGALELEYEGFYKRGFFVTKKKYAVIDEEGKITTRGLEIVRRDWSEIAKETQARVLEALLKDGDVEKAVRIVKEVTEKLSKYEVPPEKLVIHEQITRDLKDYKATGPHVAVAKRLAARGVKIRPGTVISYIVLKGSGRIGDRAIPFDEFDPTKHKYDAEYYIENQVLPAVERILRAFGYRKEDLRYQKTRQVGLSAWLKPKGT

SEQ ID NO: 1212 - protein, 774 aa, synthetic construct
MILDTDYITEDGKPVMRIFKKENGEFKIEYDRTFEAYFYALLKDDSAIEEVKKITAERHGTVVTVKRVEKVQKKFLGRPVEVWKLYFTHPQDIPAIFDKIREHPAVIDIYEYDIPFAKRYLIDKGLVPMEGDEELKMLAFDIETLYHEGEEFAEGPILMISYADEEGARVITWKNVDLPYVDVVSTEREMIKRFLRVVKEKDPDVLITYNGDNFDFAYLKKRCEKLGINFALGRDGSEPKIQRMGDRFAVEVKGRIHFDLYPVIRRTINLPTYTLEAVYEAVFGQPKEKVYAEEITTAWETGENLERVARYSMEDAKVTYELGKEFLPMEAQLSRLIGQSLWDVSRSSTGNLVEWFLLRKAYERNELAPNKPDEKELARRRQSYEGGYVKEPERGLWENIVYLDFRSLYPSIIITHNVSPDTLNREGCKEYDVAPQVGHRFCKDFPGFIPSLLGDLLEERQKIKKKMKATIDPIERKLLDYRQRAIKILANSYYGYYGYARARWYCKECAESVTAWGREYITMTIKEIEEKYGFKVIYSDTDGFFATIPGADAETVKKKAMEFLKYINAKLPGALELEYEGFYKRGFFVTKKKYAVIDEEGKITTRGLEIVRRDWSEIAKETQARVLEALLKDGDVEKAVRIVKEVTEKLSKYEVPPEKLVIHEQITRDLKDYKATGPHVAVAKRLAARGVKIRPGTVISYIVLKGSGRIGDRAIPFDEFDPTKHKYDAEYYIENQVLPAVERILRAFGYRKEDLRYQKTRQVGLSAWLKPKGT

SEQ ID NO: 1213 - protein, 774 aa, synthetic construct
MILDTDYITEDGKPVMRIFKKENGEFKIEYDRTFEAYFYALLKDDSAIEEVKKITAERHGTVVTVKRVEKVQKKFLGRPVEVWKLYFTHPQDKPAIRDKIREHPAVIDIYEYDIPFAKRYLIDKGLVPMEGDEELKMLAFDIETLYHEGEEFAEGPILMISYADEEGARVITWKNVDLPYVDVVSTEREMIKRFLRVVKEKDPDVLITYNGDNFDFAYLKKRCEKLGINFALGRDGSEPKIQRMGDRFAVEVKGRIHFDLYPVIRRTINLPTYTLEAVYEAVFGQPKEKVYAEEITTAWETGENLERVARYSMEDAKVTYELGKEFLPMEAQLSRLIGQSLWDVSRSSTGNLVEWFLLRKAYERNELAPNKPDEKELARRRQSYEGGYVKEPERGLWENIVYLDFRSLYPSIIITHNVSPDTLNREGCKEYDVAPQVGHRFCKDFPGFIPSLLGDLLEERQKIKKKMKATIDPIERKLLDYRQRAIKILANSYYGYYGYARARWYCKECAESVTAWGREYITMTIKEIEEKYGFKVIYSDTDGFFATIPGADAETVKKKAMEFLKYINAKLPGALELEYEGFYKRGFFVTKKKYAVIDEEGKITTRGLEIVRRDWSEIAKETQARVLEALLKDGDVEKAVRIVKEVTEKLSKYEVPPEKLVIHEQITRDLKDYKATGPHVAVAKRLAARGVKIRPGTVISYIVLKGSGRIGDRAIPFDEFDPTKHKYDAEYYIENQVLPAVERILRAFGYRKEDLRYQKTRQVGLSAWLKPKGT

SEQ ID NO: 1214 - protein, 774 aa, synthetic construct
MILDTDYITEDGKPVMRIFKKENGEFKIEYDRTFEAYFYALLKDDSAIEEVKKITAERHGTVVTVKRVEKVQKKFLGRPVEVWKLYFTHPQDKPAIWDKIREHPAVIDIYEYDIPFAKRYLIDKGLVPMEGDEELKMLAFDIETLYHEGEEFAEGPILMISYADEEGARVITWKNVDLPYVDVVSTEREMIKRFLRVVKEKDPDVLITYNGDNFDFAYLKKRCEKLGINFALGRDGSEPKIQRMGDRFAVEVKGRIHFDLYPVIRRTINLPTYTLEAVYEAVFGQPKEKVYAEEITTAWETGENLERVARYSMEDAKVTYELGKEFLPMEAQLSRLIGQSLWDVSRSSTGNLVEWFLLRKAYERNELAPNKPDEKELARRRQSYEGGYVKEPERGLWENIVYLDFRSLYPSIIITHNVSPDTLNREGCKEYDVAPQVGHRFCKDFPGFIPSLLGDLLEERQKIKKKMKATIDPIERKLLDYRQRAIKILANSYYGYYGYARARWYCKECAESVTAWGREYITMTIKEIEEKYGFKVIYSDTDGFFATIPGADAETVKKKAMEFLKYINAKLPGALELEYEGFYKRGFFVTKKKYAVIDEEGKITTRGLEIVRRDWSEIAKETQARVLEALLKDGDVEKAVRIVKEVTEKLSKYEVPPEKLVIHEQITRDLKDYKATGPHVAVAKRLAARGVKIRPGTVISYIVLKGSGRIGDRAIPFDEFDPTKHKYDAEYYIENQVLPAVERILRAFGYRKEDLRYQKTRQVGLSAWLKPKGT

SEQ ID NO: 1215 - protein, 774 aa, synthetic construct
MILDTDYITEDGKPVMRIFKKENGEFKIEYDRTFEAYFYALLKDDSAIEEVKKITAERHGTVVTVKRVEKVQKKFLGRPVEVWKLYFTHPQDQPAIRDKIREHPAVIDIYEYDIPFAKRYLIDKGLVPMEGDEELKMLAFDIETLYHEGEEFAEGPILMISYADEEGARVITWKNVDLPYVDVVSTEREMIKRFLRVVKEKDPDVLITYNGDNFDFAYLKKRCEKLGINFALGRDGSEPKIQRMGDRFAVEVKGRIHFDLYPVIRRTINLPTYTLEAVYEAVFGQPKEKVYAEEITTAWETGENLERVARYSMEDAKVTYELGKEFLPMEAQLSRLIGQSLWDVSRSSTGNLVEWFLLRKAYERNELAPNKPDEKELARRRQSYEGGYVKEPERGLWENIVYLDFRSLYPSIIITHNVSPDTLNREGCKEYDVAPQVGHRFCKDFPGFIPSLLGDLLEERQKIKKKMKATIDPIERKLLDYRQRAIKILANSYYGYYGYARARWYCKECAESVTAWGREYITMTIKEIEEKYGFKVIYSDTDGFFATIPGADAETVKKKAMEFLKYINAKLPGALELEYEGFYKRGFFVTKKKYAVIDEEGKITTRGLEIVRRDWSEIAKETQARVLEALLKDGDVEKAVRIVKEVTEKLSKYEVPPEKLVIHEQITRDLKDYKATGPHVAVAKRLAARGVKIRPGTVISYIVLKGSGRIGDRAIPFDEFDPTKHKYDAEYYIENQVLPAVERILRAFGYRKEDLRYQKTRQVGLSAWLKPKGT

SEQ ID NO: 1216 - protein, 774 aa, synthetic construct
MILDTDYITEDGKPVMRIFKKENGEFKIEYDRTFEAYFYALLKDDSAIEEVKKITAERHGTVVTVKRVEKVQKKFLGRPVEVWKLYFTHPQDQPAIADKIREHPAVIDIYEYDIPFAKRYLIDKGLVPMEGDEELKMLAFDIETLYHEGEEFAEGPILMISYADEEGARVITWKNVDLPYVDVVSTEREMIKRFLRVVKEKDPDVLITYNGDNFDFAYLKKRCEKLGINFALGRDGSEPKIQRMGDRFAVEVKGRIHFDLYPVIRRTINLPTYTLEAVYEAVFGQPKEKVYAEEITTAWETGENLERVARYSMEDAKVTYELGKEFLPMEAQLSRLIGQSLWDVSRSSTGNLVEWFLLRKAYERNELAPNKPDEKELARRRQSYEGGYVKEPERGLWENIVYLDFRSLYPSIIITHNVSPDTLNREGCKEYDVAPQVGHRFCKDFPGFIPSLLGDLLEERQKIKKKMKATIDPIERKLLDYRQRAIKILANSYYGYYGYARARWYCKECAESVTAWGREYITMTIKEIEEKYGFKVIYSDTDGFFATIPGADAETVKKKAMEFLKYINAKLPGALELEYEGFYKRGFFVTKKKYAVIDEEGKITTRGLEIVRRDWSEIAKETQARVLEALLKDGDVEKAVRIVKEVTEKLSKYEVPPEKLVIHEQITRDLKDYKATGPHVAVAKRLAARGVKIRPGTVISYIVLKGSGRIGDRAIPFDEFDPTKHKYDAEYYIENQVLPAVERILRAFGYRKEDLRYQKTRQVGLSAWLKPKGT

SEQ ID NO: 1217 - protein, 774 aa, synthetic construct
MILDTDYITEDGKPVMRIFKKENGEFKIEYDRTFEAYFYALLKDDSAIEEVKKITAERHGTVVTVKRVEKVQKKFLGRPVEVWKLYFTHPQDQPAIWDKIREHPAVIDIYEYDIPFAKRYLIDKGLVPMEGDEELKMLAFDIETLYHEGEEFAEGPILMISYADEEGARVITWKNVDLPYVDVVSTEREMIKRFLRVVKEKDPDVLITYNGDNFDFAYLKKRCEKLGINFALGRDGSEPKIQRMGDRFAVEVKGRIHFDLYPVIRRTINLPTYTLEAVYEAVFGQPKEKVYAEEITTAWETGENLERVARYSMEDAKVTYELGKEFLPMEAQLSRLIGQSLWDVSRSSTGNLVEWFLLRKAYERNELAPNKPDEKELARRRQSYEGGYVKEPERGLWENIVYLDFRSLYPSIIITHNVSPDTLNREGCKEYDVAPQVGHRFCKDFPGFIPSLLGDLLEERQKIKKKMKATIDPIERKLLDYRQRAIKILANSYYGYYGYARARWYCKECAESVTAWGREYITMTIKEIEEKYGFKVIYSDTDGFFATIPGADAETVKKKAMEFLKYINAKLPGALELEYEGFYKRGFFVTKKKYAVIDEEGKITTRGLEIVRRDWSEIAKETQARVLEALLKDGDVEKAVRIVKEVTEKLSKYEVPPEKLVIHEQITRDLKDYKATGPHVAVAKRLAARGVKIRPGTVISYIVLKGSGRIGDRAIPFDEFDPTKHKYDAEYYIENQVLPAVERILRAFGYRKEDLRYQKTRQVGLSAWLKPKGT

SEQ ID NO: 1218 - protein, 774 aa, synthetic construct
MILDTDYITEDGKPVMRIFKKENGEFKIEYDRTFEAYFYALLKDDSAIEEVKKITAERHGTVVTVKRVEKVQKKFLGRPVEVWKLYFTHPQDRPAIRDKIREHPAVIDIYEYDIPFAKRYLIDKGLVPMEGDEELKMLAFDIETLYHEGEEFAEGPILMISYADEEGARVITWKNVDLPYVDVVSTEREMIKRFLRVVKEKDPDVLITYNGDNFDFAYLKKRCEKLGINFALGRDGSEPKIQRMGDRFAVEVKGRIHFDLYPVIRRTINLPTYTLEAVYEAVFGQPKEKVYAEEITTAWETGENLERVARYSMEDAKVTYELGKEFLPMEAQLSRLIGQSLWDVSRSSTGNLVEWFLLRKAYERNELAPNKPDEKELARRRQSYEGGYVKEPERGLWENIVYLDFRSLYPSIIITHNVSPDTLNREGCKEYDVAPQVGHRFCKDFPGFIPSLLGDLLEERQKIKKKMKATIDPIERKLLDYRQRAIKILANSYYGYYGYARARWYCKECAESVTAWGREYITMTIKEIEEKYGFKVIYSDTDGFFATIPGADAETVKKKAMEFLKYINAKLPGALELEYEGFYKRGFFVTKKKYAVIDEEGKITTRGLEIVRRDWSEIAKETQARVLEALLKDGDVEKAVRIVKEVTEKLSKYEVPPEKLVIHEQITRDLKDYKATGPHVAVAKRLAARGVKIRPGTVISYIVLKGSGRIGDRAIPFDEFDPTKHKYDAEYYIENQVLPAVERILRAFGYRKEDLRYQKTRQVGLSAWLKPKGT

SEQ ID NO: 1219 - protein, 774 aa, synthetic construct
MILDTDYITEDGKPVMRIFKKENGEFKIEYDRTFEAYFYALLKDDSAIEEVKKITAERHGTVVTVKRVEKVQKKFLGRPVEVWKLYFTHPQDRPAIADKIREHPAVIDIYEYDIPFAKRYLIDKGLVPMEGDEELKMLAFDIETLYHEGEEFAEGPILMISYADEEGARVITWKNVDLPYVDVVSTEREMIKRFLRVVKEKDPDVLITYNGDNFDFAYLKKRCEKLGINFALGRDGSEPKIQRMGDRFAVEVKGRIHFDLYPVIRRTINLPTYTLEAVYEAVFGQPKEKVYAEEITTAWETGENLERVARYSMEDAKVTYELGKEFLPMEAQLSRLIGQSLWDVSRSSTGNLVEWFLLRKAYERNELAPNKPDEKELARRRQSYEGGYVKEPERGLWENIVYLDFRSLYPSIIITHNVSPDTLNREGCKEYDVAPQVGHRFCKDFPGFIPSLLGDLLEERQKIKKKMKATIDPIERKLLDYRQRAIKILANSYYGYYGYARARWYCKECAESVTAWGREYITMTIKEIEEKYGFKVIYSDTDGFFATIPGADAETVKKKAMEFLKYINAKLPGALELEYEGFYKRGFFVTKKKYAVIDEEGKITTRGLEIVRRDWSEIAKETQARVLEALLKDGDVEKAVRIVKEVTEKLSKYEVPPEKLVIHEQITRDLKDYKATGPHVAVAKRLAARGVKIRPGTVISYIVLKGSGRIGDRAIPFDEFDPTKHKYDAEYYIENQVLPAVERILRAFGYRKEDLRYQKTRQVGLSAWLKPKGT

SEQ ID NO: 1220 - protein, 774 aa, synthetic construct
MILDTDYITEDGKPVMRIFKKENGEFKIEYDRTFEAYFYALLKDDSAIEEVKKITAERHGTVVTVKRVEKVQKKFLGRPVEVWKLYFTHPQDRPAIWDKIREHPAVIDIYEYDIPFAKRYLIDKGLVPMEGDEELKMLAFDIETLYHEGEEFAEGPILMISYADEEGARVITWKNVDLPYVDVVSTEREMIKRFLRVVKEKDPDVLITYNGDNFDFAYLKKRCEKLGINFALGRDGSEPKIQRMGDRFAVEVKGRIHFDLYPVIRRTINLPTYTLEAVYEAVFGQPKEKVYAEEITTAWETGENLERVARYSMEDAKVTYELGKEFLPMEAQLSRLIGQSLWDVSRSSTGNLVEWFLLRKAYERNELAPNKPDEKELARRRQSYEGGYVKEPERGLWENIVYLDFRSLYPSIIITHNVSPDTLNREGCKEYDVAPQVGHRFCKDFPGFIPSLLGDLLEERQKIKKKMKATIDPIERKLLDYRQRAIKILANSYYGYYGYARARWYCKECAESVTAWGREYITMTIKEIEEKYGFKVIYSDTDGFFATIPGADAETVKKKAMEFLKYINAKLPGALELEYEGFYKRGFFVTKKKYAVIDEEGKITTRGLEIVRRDWSEIAKETQARVLEALLKDGDVEKAVRIVKEVTEKLSKYEVPPEKLVIHEQITRDLKDYKATGPHVAVAKRLAARGVKIRPGTVISYIVLKGSGRIGDRAIPFDEFDPTKHKYDAEYYIENQVLPAVERILRAFGYRKEDLRYQKTRQVGLSAWLKPKGT

SEQ ID NO: 1221 - protein, 774 aa, synthetic construct
MILDTDYITEDGKPVMRIFKKENGEFKIEYDRTFEHYFYALLKDDSAIEEVKKITAERHGTVVTVKRVEKVQKKFLGRPVEVWKLYFTHPQDVPAIRDKIREHPAVIDIYEYDIPFAKRYLIDKGLVPMEGDEELKMLAFDIETLYHEGEEFAEGPILMISYADEEGARVITWKNVDLPYVDVVSTEREMIKRFLRVVKEKDPDVLITYNGDNFDFAYLKKRCEKLGINFALGRDGSEPKIQRMGDRFAVEVKGRIHFDLYPVIRRTINLPTYTLEAVYEAVFGQPKEKVYAEEITTAWETGENLERVARYSMEDAKVTYELGKEFLPMEAQLSRLIGQSLWDVSRSSTGNLVEWFLLRKAYERNELAPNKPDEKELARRRQSYEGGYVKEPERGLWENIVYLDFRSLYPSIIITHNVSPDTLNREGCKEYDVAPQVGHRFCKDFPGFIPSLLGDLLEERQKIKKKMKATIDPIERKLLDYRQRAIKILANSYYGYYGYARARWYCKECAESVTAWGREYITMTIKEIEEKYGFKVIYSDTDGFFATIPGADAETVKKKAMEFLKYINAKLPGALELEYEGFYKRGFFVTKKKYAVIDEEGKITTRGLEIVRRDWSEIAKETQARVLEALLKDGDVEKAVRIVKEVTEKLSKYEVPPEKLVIHEQITRDLKDYKATGPHVAVAKRLAARGVKIRPGTVISYIVLKGSGRIGDRAIPFDEFDPTKHKYDAEYYIENQVLPAVERILRAFGYRKEDLRYQKTRQVGLSAWLKPKGT

SEQ ID NO: 1222 - protein, 774 aa, synthetic construct
MILDTDYITEDGKPVMRIFKKENGEFKIEYDRTFEHYFYALLKDDSAIEEVKKITAERHGTVVTVKRVEKVQKKFLGRPVEVWKLYFTHFQDIPAIRDKIREHPAVIDIYEYDIPFAKRYLIDKGLVPMEGDEELKMLAFDIETLYHEGEEFAEGPILMISYADEEGARVITWKNVDLPYVDVVSTEREMIKRFLRVVKEKDPDVLITYNGDNFDFAYLKKRCEKLGINFALGRDGSEPKIQRMGDRFAVEVKGRIHFDLYPVIRRTINLPTYTLEAVYEAVFGQPKEKVYAEEITTAWETGENLERVARYSMEDAKVTYELGKEFLPMEAQLSRLIGQSLWDVSRSSTGNLVEWFLLRKAYERNELAPNKPDEKELARRRQSYEGGYVKEPERGLWENIVYLDFRSLYPSIIITHNVSPDTLNREGCKEYDVAPQVGHRFCKDFPGFIPSLLGDLLEERQKIKKKMKATIDPIERKLLDYRQRAIKILANSYYGYYGYARARWYCKECAESVTAWGREYITMTIKEIEEKYGFKVIYSDTDGFFATIPGADAETVKKKAMEFLKYINAKLPGALELEYEGFYKRGFFVTKKKYAVIDEEGKITTRGLEIVRRDWSEIAKETQARVLEALLKDGDVEKAVRIVKEVTEKLSKYEVPPEKLVIHEQITRDLKDYKATGPHVAVAKRLAARGVKIRPGTVISYIVLKGSGRIGDRAIPFDEFDPTKHKYDAEYYIENQVLPAVERILRAFGYRKEDLRYQKTRQVGLSAWLKPKGT

SEQ ID NO: 1223 - protein, 774 aa, synthetic construct
MILDTDYITEDGKPVMRIFKKENGEFKIEYDRTFEHYFYALLKDDSAIEEVKKITAERHGTVVTVKRVEKVQKKFLGRPVEVWKLYFTHPQDVPAIADKIREHPAVIDIYEYDIPFAKRYLIDKGLVPMEGDEELKMLAFDIETLYHEGEEFAEGPILMISYADEEGARVITWKNVDLPYVDVVSTEREMIKRFLRVVKEKDPDVLITYNGDNFDFAYLKKRCEKLGINFALGRDGSEPKIQRMGDRFAVEVKGRIHFDLYPVIRRTINLPTYTLEAVYEAVFGQPKEKVYAEEITTAWETGENLERVARYSMEDAKVTYELGKEFLPMEAQLSRLIGQSLWDVSRSSTGNLVEWFLLRKAYERNELAPNKPDEKELARRRQSYEGGYVKEPERGLWENIVYLDFRSLYPSIIITHNVSPDTLNREGCKEYDVAPQVGHRFCKDFPGFIPSLLGDLLEERQKIKKKMKATIDPIERKLLDYRQRAIKILANSYYGYYGYARARWYCKECAESVTAWGREYITMTIKEIEEKYGFKVIYSDTDGFFATIPGADAETVKKKAMEFLKYINAKLPGALELEYEGFYKRGFFVTKKKYAVIDEEGKITTRGLEIVRRDWSEIAKETQARVLEALLKDGDVEKAVRIVKEVTEKLSKYEVPPEKLVIHEQITRDLKDYKATGPHVAVAKRLAARGVKIRPGTVISYIVLKGSGRIGDRAIPFDEFDPTKHKYDAEYYIENQVLPAVERILRAFGYRKEDLRYQKTRQVGLSAWLKPKGT

SEQ ID NO: 1224 - protein, 774 aa, synthetic construct
MILDTDYITEDGKPVMRIFKKENGEFKIEYDRTFEHYFYALLKDDSAIEEVKKITAERHGTVVTVKRVEKVQKKFLGRPVEVWKLYFTHPQDVPAIFDKIREHPAVIDIYEYDIPFAKRYLIDKGLVPMEGDEELKMLAFDIETLYHEGEEFAEGPILMISYADEEGARVITWKNVDLPYVDVVSTEREMIKRFLRVVKEKDPDVLITYNGDNFDFAYLKKRCEKLGINFALGRDGSEPKIQRMGDRFAVEVKGRIHFDLYPVIRRTINLPTYTLEAVYEAVFGQPKEKVYAEEITTAWETGENLERVARYSMEDAKVTYELGKEFLPMEAQLSRLIGQSLWDVSRSSTGNLVEWFLLRKAYERNELAPNKPDEKELARRRQSYEGGYVKEPERGLWENIVYLDFRSLYPSIIITHNVSPDTLNREGCKEYDVAPQVGHRFCKDFPGFIPSLLGDLLEERQKIKKKMKATIDPIERKLLDYRQRAIKILANSYYGYYGYARARWYCKECAESVTAWGREYITMTIKEIEEKYGFKVIYSDTDGFFATIPGADAETVKKKAMEFLKYINAKLPGALELEYEGFYKRGFFVTKKKYAVIDEEGKITTRGLEIVRRDWSEIAKETQARVLEALLKDGDVEKAVRIVKEVTEKLSKYEVPPEKLVIHEQITRDLKDYKATGPHVAVAKRLAARGVKIRPGTVISYIVLKGSGRIGDRAIPFDEFDPTKHKYDAEYYIENQVLPAVERILRAFGYRKEDLRYQKTRQVGLSAWLKPKGT

SEQ ID NO: 1225 - protein, 774 aa, synthetic construct
MILDTDYITEDGKPVMRIFKKENGEFKIEYDRTFEHYFYALLKDDSAIEEVKKITAERHGTVVTVKRVEKVQKKFLGRPVEVWKLYFTHPQDVPAIWDKIREHPAVIDIYEYDIPFAKRYLIDKGLVPMEGDEELKMLAFDIETLYHEGEEFAEGPILMISYADEEGARVITWKNVDLPYVDVVSTEREMIKRFLRVVKEKDPDVLITYNGDNFDFAYLKKRCEKLGINFALGRDGSEPKIQRMGDRFAVEVKGRIHFDLYPVIRRTINLPTYTLEAVYEAVFGQPKEKVYAEEITTAWETGENLERVARYSMEDAKVTYELGKEFLPMEAQLSRLIGQSLWDVSRSSTGNLVEWFLLRKAYERNELAPNKPDEKELARRRQSYEGGYVKEPERGLWENIVYLDFRSLYPSIIITHNVSPDTLNREGCKEYDVAPQVGHRFCKDFPGFIPSLLGDLLEERQKIKKKMKATIDPIERKLLDYRQRAIKILANSYYGYYGYARARWYCKECAESVTAWGREYITMTIKEIEEKYGFKVIYSDTDGFFATIPGADAETVKKKAMEFLKYINAKLPGALELEYEGFYKRGFFVTKKKYAVIDEEGKITTRGLEIVRRDWSEIAKETQARVLEALLKDGDVEKAVRIVKEVTEKLSKYEVPPEKLVIHEQITRDLKDYKATGPHVAVAKRLAARGVKIRPGTVISYIVLKGSGRIGDRAIPFDEFDPTKHKYDAEYYIENQVLPAVERILRAFGYRKEDLRYQKTRQVGLSAWLKPKGT

SEQ ID NO: 1226 - protein, 774 aa, synthetic construct
MILDTDYITEDGKPVMRIFKKENGEFKIEYDRTFEHYFYALLKDDSAIEEVKKITAERHGTVVTVKRVEKVQKKFLGRPVEVWKLYFTHPQDIPAIRDKIREHPAVIDIYEYDIPFAKRYLIDKGLVPMEGDEELKMLAFDIETLYHEGEEFAEGPILMISYADEEGARVITWKNVDLPYVDVVSTEREMIKRFLRVVKEKDPDVLITYNGDNFDFAYLKKRCEKLGINFALGRDGSEPKIQRMGDRFAVEVKGRIHFDLYPVIRRTINLPTYTLEAVYEAVFGQPKEKVYAEEITTAWETGENLERVARYSMEDAKVTYELGKEFLPMEAQLSRLIGQSLWDVSRSSTGNLVEWFLLRKAYERNELAPNKPDEKELARRRQSYEGGYVKEPERGLWENIVYLDFRSLYPSIIITHNVSPDTLNREGCKEYDVAPQVGHRFCKDFPGFIPSLLGDLLEERQKIKKKMKATIDPIERKLLDYRQRAIKILANSYYGYYGYARARWYCKECAESVTAWGREYITMTIKEIEEKYGFKVIYSDTDGFFATIPGADAETVKKKAMEFLKYINAKLPGALELEYEGFYKRGFFVTKKKYAVIDEEGKITTRGLEIVRRDWSEIAKETQARVLEALLKDGDVEKAVRIVKEVTEKLSKYEVPPEKLVIHEQITRDLKDYKATGPHVAVAKRLAARGVKIRPGTVISYIVLKGSGRIGDRAIPFDEFDPTKHKYDAEYYIENQVLPAVERILRAFGYRKEDLRYQKTRQVGLSAWLKPKGT

SEQ ID NO: 1227 - protein, 774 aa, synthetic construct
MILDTDYITEDGKPVMRIFKKENGEFKIEYDRTFEHYFYALLKDDSAIEEVKKITAERHGTVVTVKRVEKVQKKFLGRPVEVWKLYFTHPQDIPAIADKIREHPAVIDIYEYDIPFAKRYLIDKGLVPMEGDEELKMLAFDIETLYHEGEEFAEGPILMISYADEEGARVITWKNVDLPYVDVVSTEREMIKRFLRVVKEKDPDVLITYNGDNFDFAYLKKRCEKLGINFALGRDGSEPKIQRMGDRFAVEVKGRIHFDLYPVIRRTINLPTYTLEAVYEAVFGQPKEKVYAEEITTAWETGENLERVARYSMEDAKVTYELGKEFLPMEAQLSRLIGQSLWDVSRSSTGNLVEWFLLRKAYERNELAPNKPDEKELARRRQSYEGGYVKEPERGLWENIVYLDFRSLYPSIIITHNVSPDTLNREGCKEYDVAPQVGHRFCKDFPGFIPSLLGDLLEERQKIKKKMKATIDPIERKLLDYRQRAIKILANSYYGYYGYARARWYCKECAESVTAWGREYITMTIKEIEEKYGFKVIYSDTDGFFATIPGADAETVKKKAMEFLKYINAKLPGALELEYEGFYKRGFFVTKKKYAVIDEEGKITTRGLEIVRRDWSEIAKETQARVLEALLKDGDVEKAVRIVKEVTEKLSKYEVPPEKLVIHEQITRDLKDYKATGPHVAVAKRLAARGVKIRPGTVISYIVLKGSGRIGDRAIPFDEFDPTKHKYDAEYYIENQVLPAVERILRAFGYRKEDLRYQKTRQVGLSAWLKPKGT

SEQ ID NO: 1228 - protein, 774 aa, synthetic construct
MILDTDYITEDGKPVMRIFKKENGEFKIEYDRTFEHYFYALLKDDSAIEEVKKITAERHGTVVTVKRVEKVQKKFLGRPVEVWKLYFTHPQDIPAIHDKIREHPAVIDIYEYDIPFAKRYLIDKGLVPMEGDEELKMLAFDIETLYHEGEEFAEGPILMISYADEEGARVITWKNVDLPYVDVVSTEREMIKRFLRVVKEKDPDVLITYNGDNFDFAYLKKRCEKLGINFALGRDGSEPKIQRMGDRFAVEVKGRIHFDLYPVIRRTINLPTYTLEAVYEAVFGQPKEKVYAEEITTAWETGENLERVARYSMEDAKVTYELGKEFLPMEAQLSRLIGQSLWDVSRSSTGNLVEWFLLRKAYERNELAPNKPDEKELARRRQSYEGGYVKEPERGLWENIVYLDFRSLYPSIIITHNVSPDTLNREGCKEYDVAPQVGHRFCKDFPGFIPSLLGDLLEERQKIKKKMKATIDPIERKLLDYRQRAIKILANSYYGYYGYARARWYCKECAESVTAWGREYITMTIKEIEEKYGFKVIYSDTDGFFATIPGADAETVKKKAMEFLKYINAKLPGALELEYEGFYKRGFFVTKKKYAVIDEEGKITTRGLEIVRRDWSEIAKETQARVLEALLKDGDVEKAVRIVKEVTEKLSKYEVPPEKLVIHEQITRDLKDYKATGPHVAVAKRLAARGVKIRPGTVISYIVLKGSGRIGDRAIPFDEFDPTKHKYDAEYYIENQVLPAVERILRAFGYRKEDLRYQKTRQVGLSAWLKPKGT

SEQ ID NO: 1229 - protein, 774 aa, synthetic construct
MILDTDYITEDGKPVMRIFKKENGEFKIEYDRTFEHYFYALLKDDSAIEEVKKITAERHGTVVTVKRVEKVQKKFLGRPVEVWKLYFTHPQDRPAIRDKIREHPAVIDIYEYDIPFAKRYLIDKGLVPMEGDEELKMLAFDIETLYHEGEEFAEGPILMISYADEEGARVITWKNVDLPYVDVVSTEREMIKRFLRVVKEKDPDVLITYNGDNFDFAYLKKRCEKLGINFALGRDGSEPKIQRMGDRFAVEVKGRIHFDLYPVIRRTINLPTYTLEAVYEAVFGQPKEKVYAEEITTAWETGENLERVARYSMEDAKVTYELGKEFLPMEAQLSRLIGQSLWDVSRSSTGNLVEWFLLRKAYERNELAPNKPDEKELARRRQSYEGGYVKEPERGLWENIVYLDFRSLYPSIIITHNVSPDTLNREGCKEYDVAPQVGHRFCKDFPGFIPSLLGDLLEERQKIKKKMKATIDPIERKLLDYRQRAIKILANSYYGYYGYARARWYCKECAESVTAWGREYITMTIKEIEEKYGFKVIYSDTDGFFATIPGADAETVKKKAMEFLKYINAKLPGALELEYEGFYKRGFFVTKKKYAVIDEEGKITTRGLEIVRRDWSEIAKETQARVLEALLKDGDVEKAVRIVKEVTEKLSKYEVPPEKLVIHEQITRDLKDYKATGPHVAVAKRLAARGVKIRPGTVISYIVLKGSGRIGDRAIPFDEFDPTKHKYDAEYYIENQVLPAVERILRAFGYRKEDLRYQKTRQVGLSAWLKPKGT

SEQ ID NO: 1230 - protein, 774 aa, synthetic construct
MILDTDYITEDGKPVMRIFKKENGEFKIEYDRTFERYFYALLKDDSAIEEVKKITAERHGTVVTVKRVEKVQKKFLGRPVEVWKLYFTHPQDVPAIRDKIREHPAVIDIYEYDIPFAKRYLIDKGLVPMEGDEELKMLAFDIETLYHEGEEFAEGPILMISYADEEGARVITWKNVDLPYVDVVSTEREMIKRFLRVVKEKDPDVLITYNGDNFDFAYLKKRCEKLGINFALGRDGSEPKIQRMGDRFAVEVKGRIHFDLYPVIRRTINLPTYTLEAVYEAVFGQPKEKVYAEEITTAWETGENLERVARYSMEDAKVTYELGKEFLPMEAQLSRLIGQSLWDVSRSSTGNLVEWFLLRKAYERNELAPNKPDEKELARRRQSYEGGYVKEPERGLWENIVYLDFRSLYPSIIITHNVSPDTLNREGCKEYDVAPQVGHRFCKDFPGFIPSLLGDLLEERQKIKKKMKATIDPIERKLLDYRQRAIKILANSYYGYYGYARARWYCKECAESVTAWGREYITMTIKEIEEKYGFKVIYSDTDGFFATIPGADAETVKKKAMEFLKYINAKLPGALELEYEGFYKRGFFVTKKKYAVIDEEGKITTRGLEIVRRDWSEIAKETQARVLEALLKDGDVEKAVRIVKEVTEKLSKYEVPPEKLVIHEQITRDLKDYKATGPHVAVAKRLAARGVKIRPGTVISYIVLKGSGRIGDRAIPFDEFDPTKHKYDAEYYIENQVLPAVERILRAFGYRKEDLRYQKTRQVGLSAWLKPKGT

SEQ ID NO: 1231 - protein, 774 aa, synthetic construct
MILDTDYITEDGKPVMRIFKKENGEFKIEYDRTFERYFYALLKDDSAIEEVKKITAERHGTVVTVKRVEKVQKKFLGRPVEVWKLYFTHPQDVPAIFDKIREHPAVIDIYEYDIPFAKRYLIDKGLVPMEGDEELKMLAFDIETLYHEGEEFAEGPILMISYADEEGARVITWKNVDLPYVDVVSTEREMIKRFLRVVKEKDPDVLITYNGDNFDFAYLKKRCEKLGINFALGRDGSEPKIQRMGDRFAVEVKGRIHFDLYPVIRRTINLPTYTLEAVYEAVFGQPKEKVYAEEITTAWETGENLERVARYSMEDAKVTYELGKEFLPMEAQLSRLIGQSLWDVSRSSTGNLVEWFLLRKAYERNELAPNKPDEKELARRRQSYEGGYVKEPERGLWENIVYLDFRSLYPSIIITHNVSPDTLNREGCKEYDVAPQVGHRFCKDFPGFIPSLLGDLLEERQKIKKKMKATIDPIERKLLDYRQRAIKILANSYYGYYGYARARWYCKECAESVTAWGREYITMTIKEIEEKYGFKVIYSDTDGFFATIPGADAETVKKKAMEFLKYINAKLPGALELEYEGFYKRGFFVTKKKYAVIDEEGKITTRGLEIVRRDWSEIAKETQARVLEALLKDGDVEKAVRIVKEVTEKLSKYEVPPEKLVIHEQITRDLKDYKATGPHVAVAKRLAARGVKIRPGTVISYIVLKGSGRIGDRAIPFDEFDPTKHKYDAEYYIENQVLPAVERILRAFGYRKEDLRYQKTRQVGLSAWLKPKGT

SEQ ID NO: 1232 - protein, 774 aa, synthetic construct
MILDTDYITEDGKPVMRIFKKENGEFKIEYDRTFERYFYALLKDDSAIEEVKKITAERHGTVVTVKRVEKVQKKFLGRPVEVWKLYFTHPQDIPAIRDKIREHPAVIDIYEYDIPFAKRYLIDKGLVPMEGDEELKMLAFDIETLYHEGEEFAEGPILMISYADEEGARVITWKNVDLPYVDVVSTEREMIKRFLRVVKEKDPDVLITYNGDNFDFAYLKKRCEKLGINFALGRDGSEPKIQRMGDRFAVEVKGRIHFDLYPVIRRTINLPTYTLEAVYEAVFGQPKEKVYAEEITTAWETGENLERVARYSMEDAKVTYELGKEFLPMEAQLSRLIGQSLWDVSRSSTGNLVEWFLLRKAYERNELAPNKPDEKELARRRQSYEGGYVKEPERGLWENIVYLDFRSLYPSIIITHNVSPDTLNREGCKEYDVAPQVGHRFCKDFPGFIPSLLGDLLEERQKIKKKMKATIDPIERKLLDYRQRAIKILANSYYGYYGYARARWYCKECAESVTAWGREYITMTIKEIEEKYGFKVIYSDTDGFFATIPGADAETVKKKAMEFLKYINAKLPGALELEYEGFYKRGFFVTKKKYAVIDEEGKITTRGLEIVRRDWSEIAKETQARVLEALLKDGDVEKAVRIVKEVTEKLSKYEVPPEKLVIHEQITRDLKDYKATGPHVAVAKRLAARGVKIRPGTVISYIVLKGSGRIGDRAIPFDEFDPTKHKYDAEYYIENQVLPAVERILRAFGYRKEDLRYQKTRQVGLSAWLKPKGT

SEQ ID NO: 1233 - protein, 774 aa, synthetic construct
MILDTDYITEDGKPVMRIFKKENGEFKIEYDRTFERYFYALLKDDSAIEEVKKITAERHGTVVTVKRVEKVQKKFLGRPVEVWKLYFTHPQDQPAIADKIREHPAVIDIYEYDIPFAKRYLIDKGLVPMEGDEELKMLAFDIETLYHEGEEFAEGPILMISYADEEGARVITWKNVDLPYVDVVSTEREMIKRFLRVVKEKDPDVLITYNGDNFDFAYLKKRCEKLGINFALGRDGSEPKIQRMGDRFAVEVKGRIHFDLYPVIRRTINLPTYTLEAVYEAVFGQPKEKVYAEEITTAWETGENLERVARYSMEDAKVTYELGKEFLPMEAQLSRLIGQSLWDVSRSSTGNLVEWFLLRKAYERNELAPNKPDEKELARRRQSYEGGYVKEPERGLWENIVYLDFRSLYPSIIITHNVSPDTLNREGCKEYDVAPQVGHRFCKDFPGFIPSLLGDLLEERQKIKKKMKATIDPIERKLLDYRQRAIKILANSYYGYYGYARARWYCKECAESVTAWGREYITMTIKEIEEKYGFKVIYSDTDGFFATIPGADAETVKKKAMEFLKYINAKLPGALELEYEGFYKRGFFVTKKKYAVIDEEGKITTRGLEIVRRDWSEIAKETQARVLEALLKDGDVEKAVRIVKEVTEKLSKYEVPPEKLVIHEQITRDLKDYKATGPHVAVAKRLAARGVKIRPGTVISYIVLKGSGRIGDRAIPFDEFDPTKHKYDAEYYIENQVLPAVERILRAFGYRKEDLRYQKTRQVGLSAWLKPKGT

SEQ ID NO: 1234 - protein, 774 aa, synthetic construct
MILDTDYITEDGKPVMRIFKKENGEFKIEYDRTFESYFYALLKDDSAIEEVKKITAERHGTVVTVKRVEKVQKKFLGRPVEVWKLYFTHFQDVPAIRDKIREHPAVIDIYEYDIPFAKRYLIDKGLVPMEGDEELKMLAFDIETLYHEGEEFAEGPILMISYADEEGARVITWKNVDLPYVDVVSTEREMIKRFLRVVKEKDPDVLITYNGDNFDFAYLKKRCEKLGINFALGRDGSEPKIQRMGDRFAVEVKGRIHFDLYPVIRRTINLPTYTLEAVYEAVFGQPKEKVYAEEITTAWETGENLERVARYSMEDAKVTYELGKEFLPMEAQLSRLIGQSLWDVSRSSTGNLVEWFLLRKAYERNELAPNKPDEKELARRRQSYEGGYVKEPERGLWENIVYLDFRSLYPSIIITHNVSPDTLNREGCKEYDVAPQVGHRFCKDFPGFIPSLLGDLLEERQKIKKKMKATIDPIERKLLDYRQRAIKILANSYYGYYGYARARWYCKECAESVTAWGREYITMTIKEIEEKYGFKVIYSDTDGFFATIPGADAETVKKKAMEFLKYINAKLPGALELEYEGFYKRGFFVTKKKYAVIDEEGKITTRGLEIVRRDWSEIAKETQARVLEALLKDGDVEKAVRIVKEVTEKLSKYEVPPEKLVIHEQITRDLKDYKATGPHVAVAKRLAARGVKIRPGTVISYIVLKGSGRIGDRAIPFDEFDPTKHKYDAEYYIENQVLPAVERILRAFGYRKEDLRYQKTRQVGLSAWLKPKGT

SEQ ID NO: 1235 - protein, 774 aa, synthetic construct
MILDTDYITEDGKPVMRIFKKENGEFKIEYDRTFESYFYALLKDDSAIEEVKKITAERHGTVVTVKRVEKVQKKFLGRPVEVWKLYFTHFQDIPAIRDKIREHPAVIDIYEYDIPFAKRYLIDKGLVPMEGDEELKMLAFDIETLYHEGEEFAEGPILMISYADEEGARVITWKNVDLPYVDVVSTEREMIKRFLRVVKEKDPDVLITYNGDNFDFAYLKKRCEKLGINFALGRDGSEPKIQRMGDRFAVEVKGRIHFDLYPVIRRTINLPTYTLEAVYEAVFGQPKEKVYAEEITTAWETGENLERVARYSMEDAKVTYELGKEFLPMEAQLSRLIGQSLWDVSRSSTGNLVEWFLLRKAYERNELAPNKPDEKELARRRQSYEGGYVKEPERGLWENIVYLDFRSLYPSIIITHNVSPDTLNREGCKEYDVAPQVGHRFCKDFPGFIPSLLGDLLEERQKIKKKMKATIDPIERKLLDYRQRAIKILANSYYGYYGYARARWYCKECAESVTAWGREYITMTIKEIEEKYGFKVIYSDTDGFFATIPGADAETVKKKAMEFLKYINAKLPGALELEYEGFYKRGFFVTKKKYAVIDEEGKITTRGLEIVRRDWSEIAKETQARVLEALLKDGDVEKAVRIVKEVTEKLSKYEVPPEKLVIHEQITRDLKDYKATGPHVAVAKRLAARGVKIRPGTVISYIVLKGSGRIGDRAIPFDEFDPTKHKYDAEYYIENQVLPAVERILRAFGYRKEDLRYQKTRQVGLSAWLKPKGT

SEQ ID NO: 1236 - protein, 774 aa, synthetic construct
MILDTDYITEDGKPVMRIFKKENGEFKIEYDRTFESYFYALLKDDSAIEEVKKITAERHGTVVTVKRVEKVQKKFLGRPVEVWKLYFTHYQDIPAIRDKIREHPAVIDIYEYDIPFAKRYLIDKGLVPMEGDEELKMLAFDIETLYHEGEEFAEGPILMISYADEEGARVITWKNVDLPYVDVVSTEREMIKRFLRVVKEKDPDVLITYNGDNFDFAYLKKRCEKLGINFALGRDGSEPKIQRMGDRFAVEVKGRIHFDLYPVIRRTINLPTYTLEAVYEAVFGQPKEKVYAEEITTAWETGENLERVARYSMEDAKVTYELGKEFLPMEAQLSRLIGQSLWDVSRSSTGNLVEWFLLRKAYERNELAPNKPDEKELARRRQSYEGGYVKEPERGLWENIVYLDFRSLYPSIIITHNVSPDTLNREGCKEYDVAPQVGHRFCKDFPGFIPSLLGDLLEERQKIKKKMKATIDPIERKLLDYRQRAIKILANSYYGYYGYARARWYCKECAESVTAWGREYITMTIKEIEEKYGFKVIYSDTDGFFATIPGADAETVKKKAMEFLKYINAKLPGALELEYEGFYKRGFFVTKKKYAVIDEEGKITTRGLEIVRRDWSEIAKETQARVLEALLKDGDVEKAVRIVKEVTEKLSKYEVPPEKLVIHEQITRDLKDYKATGPHVAVAKRLAARGVKIRPGTVISYIVLKGSGRIGDRAIPFDEFDPTKHKYDAEYYIENQVLPAVERILRAFGYRKEDLRYQKTRQVGLSAWLKPKGT

SEQ ID NO: 1237 - protein, 774 aa, synthetic construct
MILDTDYITEDGKPVMRIFKKENGEFKIEYDRTFESYFYALLKDDSAIEEVKKITAERHGTVVTVKRVEKVQKKFLGRPVEVWKLYFTHPQDIPAIADKIREHPAVIDIYEYDIPFAKRYLIDKGLVPMEGDEELKMLAFDIETLYHEGEEFAEGPILMISYADEEGARVITWKNVDLPYVDVVSTEREMIKRFLRVVKEKDPDVLITYNGDNFDFAYLKKRCEKLGINFALGRDGSEPKIQRMGDRFAVEVKGRIHFDLYPVIRRTINLPTYTLEAVYEAVFGQPKEKVYAEEITTAWETGENLERVARYSMEDAKVTYELGKEFLPMEAQLSRLIGQSLWDVSRSSTGNLVEWFLLRKAYERNELAPNKPDEKELARRRQSYEGGYVKEPERGLWENIVYLDFRSLYPSIIITHNVSPDTLNREGCKEYDVAPQVGHRFCKDFPGFIPSLLGDLLEERQKIKKKMKATIDPIERKLLDYRQRAIKILANSYYGYYGYARARWYCKECAESVTAWGREYITMTIKEIEEKYGFKVIYSDTDGFFATIPGADAETVKKKAMEFLKYINAKLPGALELEYEGFYKRGFFVTKKKYAVIDEEGKITTRGLEIVRRDWSEIAKETQARVLEALLKDGDVEKAVRIVKEVTEKLSKYEVPPEKLVIHEQITRDLKDYKATGPHVAVAKRLAARGVKIRPGTVISYIVLKGSGRIGDRAIPFDEFDPTKHKYDAEYYIENQVLPAVERILRAFGYRKEDLRYQKTRQVGLSAWLKPKGT

SEQ ID NO: 1238 - protein, 774 aa, synthetic construct
MILDTDYITEDGKPVMRIFKKENGEFKIEYDRTFESYFYALLKDDSAIEEVKKITAERHGTVVTVKRVEKVQKKFLGRPVEVWKLYFTHPQDQPAIFDKIREHPAVIDIYEYDIPFAKRYLIDKGLVPMEGDEELKMLAFDIETLYHEGEEFAEGPILMISYADEEGARVITWKNVDLPYVDVVSTEREMIKRFLRVVKEKDPDVLITYNGDNFDFAYLKKRCEKLGINFALGRDGSEPKIQRMGDRFAVEVKGRIHFDLYPVIRRTINLPTYTLEAVYEAVFGQPKEKVYAEEITTAWETGENLERVARYSMEDAKVTYELGKEFLPMEAQLSRLIGQSLWDVSRSSTGNLVEWFLLRKAYERNELAPNKPDEKELARRRQSYEGGYVKEPERGLWENIVYLDFRSLYPSIIITHNVSPDTLNREGCKEYDVAPQVGHRFCKDFPGFIPSLLGDLLEERQKIKKKMKATIDPIERKLLDYRQRAIKILANSYYGYYGYARARWYCKECAESVTAWGREYITMTIKEIEEKYGFKVIYSDTDGFFATIPGADAETVKKKAMEFLKYINAKLPGALELEYEGFYKRGFFVTKKKYAVIDEEGKITTRGLEIVRRDWSEIAKETQARVLEALLKDGDVEKAVRIVKEVTEKLSKYEVPPEKLVIHEQITRDLKDYKATGPHVAVAKRLAARGVKIRPGTVISYIVLKGSGRIGDRAIPFDEFDPTKHKYDAEYYIENQVLPAVERILRAFGYRKEDLRYQKTRQVGLSAWLKPKGT

SEQ ID NO: 1239 - protein, 774 aa, synthetic construct
MILDTDYITEDGKPVMRIFKKENGEFKIEYDRTFEWYFYALLKDDSAIEEVKKITAERHGTVVTVKRVEKVQKKFLGRPVEVWKLYFTHPQDVPAIRDKIREHPAVIDIYEYDIPFAKRYLIDKGLVPMEGDEELKMLAFDIETLYHEGEEFAEGPILMISYADEEGARVITWKNVDLPYVDVVSTEREMIKRFLRVVKEKDPDVLITYNGDNFDFAYLKKRCEKLGINFALGRDGSEPKIQRMGDRFAVEVKGRIHFDLYPVIRRTINLPTYTLEAVYEAVFGQPKEKVYAEEITTAWETGENLERVARYSMEDAKVTYELGKEFLPMEAQLSRLIGQSLWDVSRSSTGNLVEWFLLRKAYERNELAPNKPDEKELARRRQSYEGGYVKEPERGLWENIVYLDFRSLYPSIIITHNVSPDTLNREGCKEYDVAPQVGHRFCKDFPGFIPSLLGDLLEERQKIKKKMKATIDPIERKLLDYRQRAIKILANSYYGYYGYARARWYCKECAESVTAWGREYITMTIKEIEEKYGFKVIYSDTDGFFATIPGADAETVKKKAMEFLKYINAKLPGALELEYEGFYKRGFFVTKKKYAVIDEEGKITTRGLEIVRRDWSEIAKETQARVLEALLKDGDVEKAVRIVKEVTEKLSKYEVPPEKLVIHEQITRDLKDYKATGPHVAVAKRLAARGVKIRPGTVISYIVLKGSGRIGDRAIPFDEFDPTKHKYDAEYYIENQVLPAVERILRAFGYRKEDLRYQKTRQVGLSAWLKPKGT

SEQ ID NO: 1240 - protein, 774 aa, synthetic construct
MILDTDYITEDGKPVMRIFKKENGEFKIEYDRTFEWYFYALLKDDSAIEEVKKITAERHGTVVTVKRVEKVQKKFLGRPVEVWKLYFTHFQDVPAIRDKIREHPAVIDIYEYDIPFAKRYLIDKGLVPMEGDEELKMLAFDIETLYHEGEEFAEGPILMISYADEEGARVITWKNVDLPYVDVVSTEREMIKRFLRVVKEKDPDVLITYNGDNFDFAYLKKRCEKLGINFALGRDGSEPKIQRMGDRFAVEVKGRIHFDLYPVIRRTINLPTYTLEAVYEAVFGQPKEKVYAEEITTAWETGENLERVARYSMEDAKVTYELGKEFLPMEAQLSRLIGQSLWDVSRSSTGNLVEWFLLRKAYERNELAPNKPDEKELARRRQSYEGGYVKEPERGLWENIVYLDFRSLYPSIIITHNVSPDTLNREGCKEYDVAPQVGHRFCKDFPGFIPSLLGDLLEERQKIKKKMKATIDPIERKLLDYRQRAIKILANSYYGYYGYARARWYCKECAESVTAWGREYITMTIKEIEEKYGFKVIYSDTDGFFATIPGADAETVKKKAMEFLKYINAKLPGALELEYEGFYKRGFFVTKKKYAVIDEEGKITTRGLEIVRRDWSEIAKETQARVLEALLKDGDVEKAVRIVKEVTEKLSKYEVPPEKLVIHEQITRDLKDYKATGPHVAVAKRLAARGVKIRPGTVISYIVLKGSGRIGDRAIPFDEFDPTKHKYDAEYYIENQVLPAVERILRAFGYRKEDLRYQKTRQVGLSAWLKPKGT

SEQ ID NO: 1241 - protein, 774 aa, synthetic construct
MILDTDYITEDGKPVMRIFKKENGEFKIEYDRTFEWYFYALLKDDSAIEEVKKITAERHGTVVTVKRVEKVQKKFLGRPVEVWKLYFTHFQDVPAIHDKIREHPAVIDIYEYDIPFAKRYLIDKGLVPMEGDEELKMLAFDIETLYHEGEEFAEGPILMISYADEEGARVITWKNVDLPYVDVVSTEREMIKRFLRVVKEKDPDVLITYNGDNFDFAYLKKRCEKLGINFALGRDGSEPKIQRMGDRFAVEVKGRIHFDLYPVIRRTINLPTYTLEAVYEAVFGQPKEKVYAEEITTAWETGENLERVARYSMEDAKVTYELGKEFLPMEAQLSRLIGQSLWDVSRSSTGNLVEWFLLRKAYERNELAPNKPDEKELARRRQSYEGGYVKEPERGLWENIVYLDFRSLYPSIIITHNVSPDTLNREGCKEYDVAPQVGHRFCKDFPGFIPSLLGDLLEERQKIKKKMKATIDPIERKLLDYRQRAIKILANSYYGYYGYARARWYCKECAESVTAWGREYITMTIKEIEEKYGFKVIYSDTDGFFATIPGADAETVKKKAMEFLKYINAKLPGALELEYEGFYKRGFFVTKKKYAVIDEEGKITTRGLEIVRRDWSEIAKETQARVLEALLKDGDVEKAVRIVKEVTEKLSKYEVPPEKLVIHEQITRDLKDYKATGPHVAVAKRLAARGVKIRPGTVISYIVLKGSGRIGDRAIPFDEFDPTKHKYDAEYYIENQVLPAVERILRAFGYRKEDLRYQKTRQVGLSAWLKPKGT

SEQ ID NO: 1242 - protein, 774 aa, synthetic construct
MILDTDYITEDGKPVMRIFKKENGEFKIEYDRTFEWYFYALLKDDSAIEEVKKITAERHGTVVTVKRVEKVQKKFLGRPVEVWKLYFTHFQDIPAIRDKIREHPAVIDIYEYDIPFAKRYLIDKGLVPMEGDEELKMLAFDIETLYHEGEEFAEGPILMISYADEEGARVITWKNVDLPYVDVVSTEREMIKRFLRVVKEKDPDVLITYNGDNFDFAYLKKRCEKLGINFALGRDGSEPKIQRMGDRFAVEVKGRIHFDLYPVIRRTINLPTYTLEAVYEAVFGQPKEKVYAEEITTAWETGENLERVARYSMEDAKVTYELGKEFLPMEAQLSRLIGQSLWDVSRSSTGNLVEWFLLRKAYERNELAPNKPDEKELARRRQSYEGGYVKEPERGLWENIVYLDFRSLYPSIIITHNVSPDTLNREGCKEYDVAPQVGHRFCKDFPGFIPSLLGDLLEERQKIKKKMKATIDPIERKLLDYRQRAIKILANSYYGYYGYARARWYCKECAESVTAWGREYITMTIKEIEEKYGFKVIYSDTDGFFATIPGADAETVKKKAMEFLKYINAKLPGALELEYEGFYKRGFFVTKKKYAVIDEEGKITTRGLEIVRRDWSEIAKETQARVLEALLKDGDVEKAVRIVKEVTEKLSKYEVPPEKLVIHEQITRDLKDYKATGPHVAVAKRLAARGVKIRPGTVISYIVLKGSGRIGDRAIPFDEFDPTKHKYDAEYYIENQVLPAVERILRAFGYRKEDLRYQKTRQVGLSAWLKPKGT

SEQ ID NO: 1243 - protein, 774 aa, synthetic construct
MILDTDYITEDGKPVMRIFKKENGEFKIEYDRTFEWYFYALLKDDSAIEEVKKITAERHGTVVTVKRVEKVQKKFLGRPVEVWKLYFTHFQDIPAIADKIREHPAVIDIYEYDIPFAKRYLIDKGLVPMEGDEELKMLAFDIETLYHEGEEFAEGPILMISYADEEGARVITWKNVDLPYVDVVSTEREMIKRFLRVVKEKDPDVLITYNGDNFDFAYLKKRCEKLGINFALGRDGSEPKIQRMGDRFAVEVKGRIHFDLYPVIRRTINLPTYTLEAVYEAVFGQPKEKVYAEEITTAWETGENLERVARYSMEDAKVTYELGKEFLPMEAQLSRLIGQSLWDVSRSSTGNLVEWFLLRKAYERNELAPNKPDEKELARRRQSYEGGYVKEPERGLWENIVYLDFRSLYPSIIITHNVSPDTLNREGCKEYDVAPQVGHRFCKDFPGFIPSLLGDLLEERQKIKKKMKATIDPIERKLLDYRQRAIKILANSYYGYYGYARARWYCKECAESVTAWGREYITMTIKEIEEKYGFKVIYSDTDGFFATIPGADAETVKKKAMEFLKYINAKLPGALELEYEGFYKRGFFVTKKKYAVIDEEGKITTRGLEIVRRDWSEIAKETQARVLEALLKDGDVEKAVRIVKEVTEKLSKYEVPPEKLVIHEQITRDLKDYKATGPHVAVAKRLAARGVKIRPGTVISYIVLKGSGRIGDRAIPFDEFDPTKHKYDAEYYIENQVLPAVERILRAFGYRKEDLRYQKTRQVGLSAWLKPKGT

SEQ ID NO: 1244 - protein, 774 aa, synthetic construct
MILDTDYITEDGKPVMRIFKKENGEFKIEYDRTFEWYFYALLKDDSAIEEVKKITAERHGTVVTVKRVEKVQKKFLGRPVEVWKLYFTHFQDIPAIFDKIREHPAVIDIYEYDIPFAKRYLIDKGLVPMEGDEELKMLAFDIETLYHEGEEFAEGPILMISYADEEGARVITWKNVDLPYVDVVSTEREMIKRFLRVVKEKDPDVLITYNGDNFDFAYLKKRCEKLGINFALGRDGSEPKIQRMGDRFAVEVKGRIHFDLYPVIRRTINLPTYTLEAVYEAVFGQPKEKVYAEEITTAWETGENLERVARYSMEDAKVTYELGKEFLPMEAQLSRLIGQSLWDVSRSSTGNLVEWFLLRKAYERNELAPNKPDEKELARRRQSYEGGYVKEPERGLWENIVYLDFRSLYPSIIITHNVSPDTLNREGCKEYDVAPQVGHRFCKDFPGFIPSLLGDLLEERQKIKKKMKATIDPIERKLLDYRQRAIKILANSYYGYYGYARARWYCKECAESVTAWGREYITMTIKEIEEKYGFKVIYSDTDGFFATIPGADAETVKKKAMEFLKYINAKLPGALELEYEGFYKRGFFVTKKKYAVIDEEGKITTRGLEIVRRDWSEIAKETQARVLEALLKDGDVEKAVRIVKEVTEKLSKYEVPPEKLVIHEQITRDLKDYKATGPHVAVAKRLAARGVKIRPGTVISYIVLKGSGRIGDRAIPFDEFDPTKHKYDAEYYIENQVLPAVERILRAFGYRKEDLRYQKTRQVGLSAWLKPKGT

SEQ ID NO: 1245 - protein, 774 aa, synthetic construct
MILDTDYITEDGKPVMRIFKKENGEFKIEYDRTFEWYFYALLKDDSAIEEVKKITAERHGTVVTVKRVEKVQKKFLGRPVEVWKLYFTHFQDRPAIADKIREHPAVIDIYEYDIPFAKRYLIDKGLVPMEGDEELKMLAFDIETLYHEGEEFAEGPILMISYADEEGARVITWKNVDLPYVDVVSTEREMIKRFLRVVKEKDPDVLITYNGDNFDFAYLKKRCEKLGINFALGRDGSEPKIQRMGDRFAVEVKGRIHFDLYPVIRRTINLPTYTLEAVYEAVFGQPKEKVYAEEITTAWETGENLERVARYSMEDAKVTYELGKEFLPMEAQLSRLIGQSLWDVSRSSTGNLVEWFLLRKAYERNELAPNKPDEKELARRRQSYEGGYVKEPERGLWENIVYLDFRSLYPSIIITHNVSPDTLNREGCKEYDVAPQVGHRFCKDFPGFIPSLLGDLLEERQKIKKKMKATIDPIERKLLDYRQRAIKILANSYYGYYGYARARWYCKECAESVTAWGREYITMTIKEIEEKYGFKVIYSDTDGFFATIPGADAETVKKKAMEFLKYINAKLPGALELEYEGFYKRGFFVTKKKYAVIDEEGKITTRGLEIVRRDWSEIAKETQARVLEALLKDGDVEKAVRIVKEVTEKLSKYEVPPEKLVIHEQITRDLKDYKATGPHVAVAKRLAARGVKIRPGTVISYIVLKGSGRIGDRAIPFDEFDPTKHKYDAEYYIENQVLPAVERILRAFGYRKEDLRYQKTRQVGLSAWLKPKGT

SEQ ID NO: 1246 - protein, 774 aa, synthetic construct
MILDTDYITEDGKPVMRIFKKENGEFKIEYDRTFEWYFYALLKDDSAIEEVKKITAERHGTVVTVKRVEKVQKKFLGRPVEVWKLYFTHIQDVPAIRDKIREHPAVIDIYEYDIPFAKRYLIDKGLVPMEGDEELKMLAFDIETLYHEGEEFAEGPILMISYADEEGARVITWKNVDLPYVDVVSTEREMIKRFLRVVKEKDPDVLITYNGDNFDFAYLKKRCEKLGINFALGRDGSEPKIQRMGDRFAVEVKGRIHFDLYPVIRRTINLPTYTLEAVYEAVFGQPKEKVYAEEITTAWETGENLERVARYSMEDAKVTYELGKEFLPMEAQLSRLIGQSLWDVSRSSTGNLVEWFLLRKAYERNELAPNKPDEKELARRRQSYEGGYVKEPERGLWENIVYLDFRSLYPSIIITHNVSPDTLNREGCKEYDVAPQVGHRFCKDFPGFIPSLLGDLLEERQKIKKKMKATIDPIERKLLDYRQRAIKILANSYYGYYGYARARWYCKECAESVTAWGREYITMTIKEIEEKYGFKVIYSDTDGFFATIPGADAETVKKKAMEFLKYINAKLPGALELEYEGFYKRGFFVTKKKYAVIDEEGKITTRGLEIVRRDWSEIAKETQARVLEALLKDGDVEKAVRIVKEVTEKLSKYEVPPEKLVIHEQITRDLKDYKATGPHVAVAKRLAARGVKIRPGTVISYIVLKGSGRIGDRAIPFDEFDPTKHKYDAEYYIENQVLPAVERILRAFGYRKEDLRYQKTRQVGLSAWLKPKGT

SEQ ID NO: 1247 - protein, 774 aa, synthetic construct
MILDTDYITEDGKPVMRIFKKENGEFKIEYDRTFEWYFYALLKDDSAIEEVKKITAERHGTVVTVKRVEKVQKKFLGRPVEVWKLYFTHIQDIPAIRDKIREHPAVIDIYEYDIPFAKRYLIDKGLVPMEGDEELKMLAFDIETLYHEGEEFAEGPILMISYADEEGARVITWKNVDLPYVDVVSTEREMIKRFLRVVKEKDPDVLITYNGDNFDFAYLKKRCEKLGINFALGRDGSEPKIQRMGDRFAVEVKGRIHFDLYPVIRRTINLPTYTLEAVYEAVFGQPKEKVYAEEITTAWETGENLERVARYSMEDAKVTYELGKEFLPMEAQLSRLIGQSLWDVSRSSTGNLVEWFLLRKAYERNELAPNKPDEKELARRRQSYEGGYVKEPERGLWENIVYLDFRSLYPSIIITHNVSPDTLNREGCKEYDVAPQVGHRFCKDFPGFIPSLLGDLLEERQKIKKKMKATIDPIERKLLDYRQRAIKILANSYYGYYGYARARWYCKECAESVTAWGREYITMTIKEIEEKYGFKVIYSDTDGFFATIPGADAETVKKKAMEFLKYINAKLPGALELEYEGFYKRGFFVTKKKYAVIDEEGKITTRGLEIVRRDWSEIAKETQARVLEALLKDGDVEKAVRIVKEVTEKLSKYEVPPEKLVIHEQITRDLKDYKATGPHVAVAKRLAARGVKIRPGTVISYIVLKGSGRIGDRAIPFDEFDPTKHKYDAEYYIENQVLPAVERILRAFGYRKEDLRYQKTRQVGLSAWLKPKGT

SEQ ID NO: 1248 - protein, 774 aa, synthetic construct
MILDTDYITEDGKPVMRIFKKENGEFKIEYDRTFEWYFYALLKDDSAIEEVKKITAERHGTVVTVKRVEKVQKKFLGRPVEVWKLYFTHWQDVPAIRDKIREHPAVIDIYEYDIPFAKRYLIDKGLVPMEGDEELKMLAFDIETLYHEGEEFAEGPILMISYADEEGARVITWKNVDLPYVDVVSTEREMIKRFLRVVKEKDPDVLITYNGDNFDFAYLKKRCEKLGINFALGRDGSEPKIQRMGDRFAVEVKGRIHFDLYPVIRRTINLPTYTLEAVYEAVFGQPKEKVYAEEITTAWETGENLERVARYSMEDAKVTYELGKEFLPMEAQLSRLIGQSLWDVSRSSTGNLVEWFLLRKAYERNELAPNKPDEKELARRRQSYEGGYVKEPERGLWENIVYLDFRSLYPSIIITHNVSPDTLNREGCKEYDVAPQVGHRFCKDFPGFIPSLLGDLLEERQKIKKKMKATIDPIERKLLDYRQRAIKILANSYYGYYGYARARWYCKECAESVTAWGREYITMTIKEIEEKYGFKVIYSDTDGFFATIPGADAETVKKKAMEFLKYINAKLPGALELEYEGFYKRGFFVTKKKYAVIDEEGKITTRGLEIVRRDWSEIAKETQARVLEALLKDGDVEKAVRIVKEVTEKLSKYEVPPEKLVIHEQITRDLKDYKATGPHVAVAKRLAARGVKIRPGTVISYIVLKGSGRIGDRAIPFDEFDPTKHKYDAEYYIENQVLPAVERILRAFGYRKEDLRYQKTRQVGLSAWLKPKGT

SEQ ID NO: 1249 - protein, 774 aa, synthetic construct
MILDTDYITEDGKPVMRIFKKENGEFKIEYDRTFEWYFYALLKDDSAIEEVKKITAERHGTVVTVKRVEKVQKKFLGRPVEVWKLYFTHWQDVPAIADKIREHPAVIDIYEYDIPFAKRYLIDKGLVPMEGDEELKMLAFDIETLYHEGEEFAEGPILMISYADEEGARVITWKNVDLPYVDVVSTEREMIKRFLRVVKEKDPDVLITYNGDNFDFAYLKKRCEKLGINFALGRDGSEPKIQRMGDRFAVEVKGRIHFDLYPVIRRTINLPTYTLEAVYEAVFGQPKEKVYAEEITTAWETGENLERVARYSMEDAKVTYELGKEFLPMEAQLSRLIGQSLWDVSRSSTGNLVEWFLLRKAYERNELAPNKPDEKELARRRQSYEGGYVKEPERGLWENIVYLDFRSLYPSIIITHNVSPDTLNREGCKEYDVAPQVGHRFCKDFPGFIPSLLGDLLEERQKIKKKMKATIDPIERKLLDYRQRAIKILANSYYGYYGYARARWYCKECAESVTAWGREYITMTIKEIEEKYGFKVIYSDTDGFFATIPGADAETVKKKAMEFLKYINAKLPGALELEYEGFYKRGFFVTKKKYAVIDEEGKITTRGLEIVRRDWSEIAKETQARVLEALLKDGDVEKAVRIVKEVTEKLSKYEVPPEKLVIHEQITRDLKDYKATGPHVAVAKRLAARGVKIRPGTVISYIVLKGSGRIGDRAIPFDEFDPTKHKYDAEYYIENQVLPAVERILRAFGYRKEDLRYQKTRQVGLSAWLKPKGT

SEQ ID NO: 1250 - protein, 774 aa, synthetic construct
MILDTDYITEDGKPVMRIFKKENGEFKIEYDRTFEWYFYALLKDDSAIEEVKKITAERHGTVVTVKRVEKVQKKFLGRPVEVWKLYFTHWQDIPAIRDKIREHPAVIDIYEYDIPFAKRYLIDKGLVPMEGDEELKMLAFDIETLYHEGEEFAEGPILMISYADEEGARVITWKNVDLPYVDVVSTEREMIKRFLRVVKEKDPDVLITYNGDNFDFAYLKKRCEKLGINFALGRDGSEPKIQRMGDRFAVEVKGRIHFDLYPVIRRTINLPTYTLEAVYEAVFGQPKEKVYAEEITTAWETGENLERVARYSMEDAKVTYELGKEFLPMEAQLSRLIGQSLWDVSRSSTGNLVEWFLLRKAYERNELAPNKPDEKELARRRQSYEGGYVKEPERGLWENIVYLDFRSLYPSIIITHNVSPDTLNREGCKEYDVAPQVGHRFCKDFPGFIPSLLGDLLEERQKIKKKMKATIDPIERKLLDYRQRAIKILANSYYGYYGYARARWYCKECAESVTAWGREYITMTIKEIEEKYGFKVIYSDTDGFFATIPGADAETVKKKAMEFLKYINAKLPGALELEYEGFYKRGFFVTKKKYAVIDEEGKITTRGLEIVRRDWSEIAKETQARVLEALLKDGDVEKAVRIVKEVTEKLSKYEVPPEKLVIHEQITRDLKDYKATGPHVAVAKRLAARGVKIRPGTVISYIVLKGSGRIGDRAIPFDEFDPTKHKYDAEYYIENQVLPAVERILRAFGYRKEDLRYQKTRQVGLSAWLKPKGT

SEQ ID NO: 1251 - protein, 774 aa, synthetic construct
MILDTDYITEDGKPVMRIFKKENGEFKIEYDRTFEWYFYALLKDDSAIEEVKKITAERHGTVVTVKRVEKVQKKFLGRPVEVWKLYFTHWQDIPAIADKIREHPAVIDIYEYDIPFAKRYLIDKGLVPMEGDEELKMLAFDIETLYHEGEEFAEGPILMISYADEEGARVITWKNVDLPYVDVVSTEREMIKRFLRVVKEKDPDVLITYNGDNFDFAYLKKRCEKLGINFALGRDGSEPKIQRMGDRFAVEVKGRIHFDLYPVIRRTINLPTYTLEAVYEAVFGQPKEKVYAEEITTAWETGENLERVARYSMEDAKVTYELGKEFLPMEAQLSRLIGQSLWDVSRSSTGNLVEWFLLRKAYERNELAPNKPDEKELARRRQSYEGGYVKEPERGLWENIVYLDFRSLYPSIIITHNVSPDTLNREGCKEYDVAPQVGHRFCKDFPGFIPSLLGDLLEERQKIKKKMKATIDPIERKLLDYRQRAIKILANSYYGYYGYARARWYCKECAESVTAWGREYITMTIKEIEEKYGFKVIYSDTDGFFATIPGADAETVKKKAMEFLKYINAKLPGALELEYEGFYKRGFFVTKKKYAVIDEEGKITTRGLEIVRRDWSEIAKETQARVLEALLKDGDVEKAVRIVKEVTEKLSKYEVPPEKLVIHEQITRDLKDYKATGPHVAVAKRLAARGVKIRPGTVISYIVLKGSGRIGDRAIPFDEFDPTKHKYDAEYYIENQVLPAVERILRAFGYRKEDLRYQKTRQVGLSAWLKPKGT

SEQ ID NO: 1252 - protein, 774 aa, synthetic construct
MILDTDYITEDGKPVMRIFKKENGEFKIEYDRTFEWYFYALLKDDSAIEEVKKITAERHGTVVTVKRVEKVQKKFLGRPVEVWKLYFTHWQDIPAIFDKIREHPAVIDIYEYDIPFAKRYLIDKGLVPMEGDEELKMLAFDIETLYHEGEEFAEGPILMISYADEEGARVITWKNVDLPYVDVVSTEREMIKRFLRVVKEKDPDVLITYNGDNFDFAYLKKRCEKLGINFALGRDGSEPKIQRMGDRFAVEVKGRIHFDLYPVIRRTINLPTYTLEAVYEAVFGQPKEKVYAEEITTAWETGENLERVARYSMEDAKVTYELGKEFLPMEAQLSRLIGQSLWDVSRSSTGNLVEWFLLRKAYERNELAPNKPDEKELARRRQSYEGGYVKEPERGLWENIVYLDFRSLYPSIIITHNVSPDTLNREGCKEYDVAPQVGHRFCKDFPGFIPSLLGDLLEERQKIKKKMKATIDPIERKLLDYRQRAIKILANSYYGYYGYARARWYCKECAESVTAWGREYITMTIKEIEEKYGFKVIYSDTDGFFATIPGADAETVKKKAMEFLKYINAKLPGALELEYEGFYKRGFFVTKKKYAVIDEEGKITTRGLEIVRRDWSEIAKETQARVLEALLKDGDVEKAVRIVKEVTEKLSKYEVPPEKLVIHEQITRDLKDYKATGPHVAVAKRLAARGVKIRPGTVISYIVLKGSGRIGDRAIPFDEFDPTKHKYDAEYYIENQVLPAVERILRAFGYRKEDLRYQKTRQVGLSAWLKPKGT

SEQ ID NO: 1253 - protein, 774 aa, synthetic construct
MILDTDYITEDGKPVMRIFKKENGEFKIEYDRTFEWYFYALLKDDSAIEEVKKITAERHGTVVTVKRVEKVQKKFLGRPVEVWKLYFTHWQDIPAIHDKIREHPAVIDIYEYDIPFAKRYLIDKGLVPMEGDEELKMLAFDIETLYHEGEEFAEGPILMISYADEEGARVITWKNVDLPYVDVVSTEREMIKRFLRVVKEKDPDVLITYNGDNFDFAYLKKRCEKLGINFALGRDGSEPKIQRMGDRFAVEVKGRIHFDLYPVIRRTINLPTYTLEAVYEAVFGQPKEKVYAEEITTAWETGENLERVARYSMEDAKVTYELGKEFLPMEAQLSRLIGQSLWDVSRSSTGNLVEWFLLRKAYERNELAPNKPDEKELARRRQSYEGGYVKEPERGLWENIVYLDFRSLYPSIIITHNVSPDTLNREGCKEYDVAPQVGHRFCKDFPGFIPSLLGDLLEERQKIKKKMKATIDPIERKLLDYRQRAIKILANSYYGYYGYARARWYCKECAESVTAWGREYITMTIKEIEEKYGFKVIYSDTDGFFATIPGADAETVKKKAMEFLKYINAKLPGALELEYEGFYKRGFFVTKKKYAVIDEEGKITTRGLEIVRRDWSEIAKETQARVLEALLKDGDVEKAVRIVKEVTEKLSKYEVPPEKLVIHEQITRDLKDYKATGPHVAVAKRLAARGVKIRPGTVISYIVLKGSGRIGDRAIPFDEFDPTKHKYDAEYYIENQVLPAVERILRAFGYRKEDLRYQKTRQVGLSAWLKPKGT

SEQ ID NO: 1254 - protein, 774 aa, synthetic construct
MILDTDYITEDGKPVMRIFKKENGEFKIEYDRTFEWYFYALLKDDSAIEEVKKITAERHGTVVTVKRVEKVQKKFLGRPVEVWKLYFTHYQDVPAIRDKIREHPAVIDIYEYDIPFAKRYLIDKGLVPMEGDEELKMLAFDIETLYHEGEEFAEGPILMISYADEEGARVITWKNVDLPYVDVVSTEREMIKRFLRVVKEKDPDVLITYNGDNFDFAYLKKRCEKLGINFALGRDGSEPKIQRMGDRFAVEVKGRIHFDLYPVIRRTINLPTYTLEAVYEAVFGQPKEKVYAEEITTAWETGENLERVARYSMEDAKVTYELGKEFLPMEAQLSRLIGQSLWDVSRSSTGNLVEWFLLRKAYERNELAPNKPDEKELARRRQSYEGGYVKEPERGLWENIVYLDFRSLYPSIIITHNVSPDTLNREGCKEYDVAPQVGHRFCKDFPGFIPSLLGDLLEERQKIKKKMKATIDPIERKLLDYRQRAIKILANSYYGYYGYARARWYCKECAESVTAWGREYITMTIKEIEEKYGFKVIYSDTDGFFATIPGADAETVKKKAMEFLKYINAKLPGALELEYEGFYKRGFFVTKKKYAVIDEEGKITTRGLEIVRRDWSEIAKETQARVLEALLKDGDVEKAVRIVKEVTEKLSKYEVPPEKLVIHEQITRDLKDYKATGPHVAVAKRLAARGVKIRPGTVISYIVLKGSGRIGDRAIPFDEFDPTKHKYDAEYYIENQVLPAVERILRAFGYRKEDLRYQKTRQVGLSAWLKPKGT

SEQ ID NO: 1255 - protein, 774 aa, synthetic construct
MILDTDYITEDGKPVMRIFKKENGEFKIEYDRTFEWYFYALLKDDSAIEEVKKITAERHGTVVTVKRVEKVQKKFLGRPVEVWKLYFTHYQDIPAIRDKIREHPAVIDIYEYDIPFAKRYLIDKGLVPMEGDEELKMLAFDIETLYHEGEEFAEGPILMISYADEEGARVITWKNVDLPYVDVVSTEREMIKRFLRVVKEKDPDVLITYNGDNFDFAYLKKRCEKLGINFALGRDGSEPKIQRMGDRFAVEVKGRIHFDLYPVIRRTINLPTYTLEAVYEAVFGQPKEKVYAEEITTAWETGENLERVARYSMEDAKVTYELGKEFLPMEAQLSRLIGQSLWDVSRSSTGNLVEWFLLRKAYERNELAPNKPDEKELARRRQSYEGGYVKEPERGLWENIVYLDFRSLYPSIIITHNVSPDTLNREGCKEYDVAPQVGHRFCKDFPGFIPSLLGDLLEERQKIKKKMKATIDPIERKLLDYRQRAIKILANSYYGYYGYARARWYCKECAESVTAWGREYITMTIKEIEEKYGFKVIYSDTDGFFATIPGADAETVKKKAMEFLKYINAKLPGALELEYEGFYKRGFFVTKKKYAVIDEEGKITTRGLEIVRRDWSEIAKETQARVLEALLKDGDVEKAVRIVKEVTEKLSKYEVPPEKLVIHEQITRDLKDYKATGPHVAVAKRLAARGVKIRPGTVISYIVLKGSGRIGDRAIPFDEFDPTKHKYDAEYYIENQVLPAVERILRAFGYRKEDLRYQKTRQVGLSAWLKPKGT

SEQ ID NO: 1256 - protein, 774 aa, synthetic construct
MILDTDYITEDGKPVMRIFKKENGEFKIEYDRTFEWYFYALLKDDSAIEEVKKITAERHGTVVTVKRVEKVQKKFLGRPVEVWKLYFTHPQDVPAIADKIREHPAVIDIYEYDIPFAKRYLIDKGLVPMEGDEELKMLAFDIETLYHEGEEFAEGPILMISYADEEGARVITWKNVDLPYVDVVSTEREMIKRFLRVVKEKDPDVLITYNGDNFDFAYLKKRCEKLGINFALGRDGSEPKIQRMGDRFAVEVKGRIHFDLYPVIRRTINLPTYTLEAVYEAVFGQPKEKVYAEEITTAWETGENLERVARYSMEDAKVTYELGKEFLPMEAQLSRLIGQSLWDVSRSSTGNLVEWFLLRKAYERNELAPNKPDEKELARRRQSYEGGYVKEPERGLWENIVYLDFRSLYPSIIITHNVSPDTLNREGCKEYDVAPQVGHRFCKDFPGFIPSLLGDLLEERQKIKKKMKATIDPIERKLLDYRQRAIKILANSYYGYYGYARARWYCKECAESVTAWGREYITMTIKEIEEKYGFKVIYSDTDGFFATIPGADAETVKKKAMEFLKYINAKLPGALELEYEGFYKRGFFVTKKKYAVIDEEGKITTRGLEIVRRDWSEIAKETQARVLEALLKDGDVEKAVRIVKEVTEKLSKYEVPPEKLVIHEQITRDLKDYKATGPHVAVAKRLAARGVKIRPGTVISYIVLKGSGRIGDRAIPFDEFDPTKHKYDAEYYIENQVLPAVERILRAFGYRKEDLRYQKTRQVGLSAWLKPKGT

SEQ ID NO: 1257 - protein, 774 aa, synthetic construct
MILDTDYITEDGKPVMRIFKKENGEFKIEYDRTFEWYFYALLKDDSAIEEVKKITAERHGTVVTVKRVEKVQKKFLGRPVEVWKLYFTHPQDIPAIRDKIREHPAVIDIYEYDIPFAKRYLIDKGLVPMEGDEELKMLAFDIETLYHEGEEFAEGPILMISYADEEGARVITWKNVDLPYVDVVSTEREMIKRFLRVVKEKDPDVLITYNGDNFDFAYLKKRCEKLGINFALGRDGSEPKIQRMGDRFAVEVKGRIHFDLYPVIRRTINLPTYTLEAVYEAVFGQPKEKVYAEEITTAWETGENLERVARYSMEDAKVTYELGKEFLPMEAQLSRLIGQSLWDVSRSSTGNLVEWFLLRKAYERNELAPNKPDEKELARRRQSYEGGYVKEPERGLWENIVYLDFRSLYPSIIITHNVSPDTLNREGCKEYDVAPQVGHRFCKDFPGFIPSLLGDLLEERQKIKKKMKATIDPIERKLLDYRQRAIKILANSYYGYYGYARARWYCKECAESVTAWGREYITMTIKEIEEKYGFKVIYSDTDGFFATIPGADAETVKKKAMEFLKYINAKLPGALELEYEGFYKRGFFVTKKKYAVIDEEGKITTRGLEIVRRDWSEIAKETQARVLEALLKDGDVEKAVRIVKEVTEKLSKYEVPPEKLVIHEQITRDLKDYKATGPHVAVAKRLAARGVKIRPGTVISYIVLKGSGRIGDRAIPFDEFDPTKHKYDAEYYIENQVLPAVERILRAFGYRKEDLRYQKTRQVGLSAWLKPKGT

SEQ ID NO: 1258 - protein, 774 aa, synthetic construct
MILDTDYITEDGKPVMRIFKKENGEFKIEYDRTFEWYFYALLKDDSAIEEVKKITAERHGTVVTVKRVEKVQKKFLGRPVEVWKLYFTHPQDIPAIADKIREHPAVIDIYEYDIPFAKRYLIDKGLVPMEGDEELKMLAFDIETLYHEGEEFAEGPILMISYADEEGARVITWKNVDLPYVDVVSTEREMIKRFLRVVKEKDPDVLITYNGDNFDFAYLKKRCEKLGINFALGRDGSEPKIQRMGDRFAVEVKGRIHFDLYPVIRRTINLPTYTLEAVYEAVFGQPKEKVYAEEITTAWETGENLERVARYSMEDAKVTYELGKEFLPMEAQLSRLIGQSLWDVSRSSTGNLVEWFLLRKAYERNELAPNKPDEKELARRRQSYEGGYVKEPERGLWENIVYLDFRSLYPSIIITHNVSPDTLNREGCKEYDVAPQVGHRFCKDFPGFIPSLLGDLLEERQKIKKKMKATIDPIERKLLDYRQRAIKILANSYYGYYGYARARWYCKECAESVTAWGREYITMTIKEIEEKYGFKVIYSDTDGFFATIPGADAETVKKKAMEFLKYINAKLPGALELEYEGFYKRGFFVTKKKYAVIDEEGKITTRGLEIVRRDWSEIAKETQARVLEALLKDGDVEKAVRIVKEVTEKLSKYEVPPEKLVIHEQITRDLKDYKATGPHVAVAKRLAARGVKIRPGTVISYIVLKGSGRIGDRAIPFDEFDPTKHKYDAEYYIENQVLPAVERILRAFGYRKEDLRYQKTRQVGLSAWLKPKGT

SEQ ID NO: 1259 - protein, 774 aa, synthetic construct
MILDTDYITEDGKPVMRIFKKENGEFKIEYDRTFEWYFYALLKDDSAIEEVKKITAERHGTVVTVKRVEKVQKKFLGRPVEVWKLYFTHPQDIPAIFDKIREHPAVIDIYEYDIPFAKRYLIDKGLVPMEGDEELKMLAFDIETLYHEGEEFAEGPILMISYADEEGARVITWKNVDLPYVDVVSTEREMIKRFLRVVKEKDPDVLITYNGDNFDFAYLKKRCEKLGINFALGRDGSEPKIQRMGDRFAVEVKGRIHFDLYPVIRRTINLPTYTLEAVYEAVFGQPKEKVYAEEITTAWETGENLERVARYSMEDAKVTYELGKEFLPMEAQLSRLIGQSLWDVSRSSTGNLVEWFLLRKAYERNELAPNKPDEKELARRRQSYEGGYVKEPERGLWENIVYLDFRSLYPSIIITHNVSPDTLNREGCKEYDVAPQVGHRFCKDFPGFIPSLLGDLLEERQKIKKKMKATIDPIERKLLDYRQRAIKILANSYYGYYGYARARWYCKECAESVTAWGREYITMTIKEIEEKYGFKVIYSDTDGFFATIPGADAETVKKKAMEFLKYINAKLPGALELEYEGFYKRGFFVTKKKYAVIDEEGKITTRGLEIVRRDWSEIAKETQARVLEALLKDGDVEKAVRIVKEVTEKLSKYEVPPEKLVIHEQITRDLKDYKATGPHVAVAKRLAARGVKIRPGTVISYIVLKGSGRIGDRAIPFDEFDPTKHKYDAEYYIENQVLPAVERILRAFGYRKEDLRYQKTRQVGLSAWLKPKGT

SEQ ID NO: 1260 - protein, 774 aa, synthetic construct
MILDTDYITEDGKPVMRIFKKENGEFKIEYDRTFEWYFYALLKDDSAIEEVKKITAERHGTVVTVKRVEKVQKKFLGRPVEVWKLYFTHPQDQPAIRDKIREHPAVIDIYEYDIPFAKRYLIDKGLVPMEGDEELKMLAFDIETLYHEGEEFAEGPILMISYADEEGARVITWKNVDLPYVDVVSTEREMIKRFLRVVKEKDPDVLITYNGDNFDFAYLKKRCEKLGINFALGRDGSEPKIQRMGDRFAVEVKGRIHFDLYPVIRRTINLPTYTLEAVYEAVFGQPKEKVYAEEITTAWETGENLERVARYSMEDAKVTYELGKEFLPMEAQLSRLIGQSLWDVSRSSTGNLVEWFLLRKAYERNELAPNKPDEKELARRRQSYEGGYVKEPERGLWENIVYLDFRSLYPSIIITHNVSPDTLNREGCKEYDVAPQVGHRFCKDFPGFIPSLLGDLLEERQKIKKKMKATIDPIERKLLDYRQRAIKILANSYYGYYGYARARWYCKECAESVTAWGREYITMTIKEIEEKYGFKVIYSDTDGFFATIPGADAETVKKKAMEFLKYINAKLPGALELEYEGFYKRGFFVTKKKYAVIDEEGKITTRGLEIVRRDWSEIAKETQARVLEALLKDGDVEKAVRIVKEVTEKLSKYEVPPEKLVIHEQITRDLKDYKATGPHVAVAKRLAARGVKIRPGTVISYIVLKGSGRIGDRAIPFDEFDPTKHKYDAEYYIENQVLPAVERILRAFGYRKEDLRYQKTRQVGLSAWLKPKGT

SEQ ID NO: 1261 - protein, 774 aa, synthetic construct
MILDTDYITEDGKPVMRIFKKENGEFKIEYDRTFEPYFYALLKDDSAIEEVKKITAERHGTVVTVKRVEKVQKKFLGRPVEVWKLYFTHFQDVPAIRDKIREHPAVIDIYEYDIPFAKRYLIDKGLVPMEGDEELKMLAFDIETLYHEGEEFAEGPILMISYADEEGARVITWKNVDLPYVDVVSTEREMIKRFLRVVKEKDPDVLITYNGDNFDFAYLKKRCEKLGINFALGRDGSEPKIQRMGDRFAVEVKGRIHFDLYPVIRRTINLPTYTLEAVYEAVFGQPKEKVYAEEITTAWETGENLERVARYSMEDAKVTYELGKEFLPMEAQLSRLIGQSLWDVSRSSTGNLVEWFLLRKAYERNELAPNKPDEKELARRRQSYEGGYVKEPERGLWENIVYLDFRSLYPSIIITHNVSPDTLNREGCKEYDVAPQVGHRFCKDFPGFIPSLLGDLLEERQKIKKKMKATIDPIERKLLDYRQRAIKILANSYYGYYGYARARWYCKECAESVTAWGREYITMTIKEIEEKYGFKVIYSDTDGFFATIPGADAETVKKKAMEFLKYINAKLPGALELEYEGFYKRGFFVTKKKYAVIDEEGKITTRGLEIVRRDWSEIAKETQARVLEALLKDGDVEKAVRIVKEVTEKLSKYEVPPEKLVIHEQITRDLKDYKATGPHVAVAKRLAARGVKIRPGTVISYIVLKGSGRIGDRAIPFDEFDPTKHKYDAEYYIENQVLPAVERILRAFGYRKEDLRYQKTRQVGLSAWLKPKGT

SEQ ID NO: 1262 - protein, 774 aa, synthetic construct
MILDTDYITEDGKPVMRIFKKENGEFKIEYDRTFEPYFYALLKDDSAIEEVKKITAERHGTVVTVKRVEKVQKKFLGRPVEVWKLYFTHFQDVPAIADKIREHPAVIDIYEYDIPFAKRYLIDKGLVPMEGDEELKMLAFDIETLYHEGEEFAEGPILMISYADEEGARVITWKNVDLPYVDVVSTEREMIKRFLRVVKEKDPDVLITYNGDNFDFAYLKKRCEKLGINFALGRDGSEPKIQRMGDRFAVEVKGRIHFDLYPVIRRTINLPTYTLEAVYEAVFGQPKEKVYAEEITTAWETGENLERVARYSMEDAKVTYELGKEFLPMEAQLSRLIGQSLWDVSRSSTGNLVEWFLLRKAYERNELAPNKPDEKELARRRQSYEGGYVKEPERGLWENIVYLDFRSLYPSIIITHNVSPDTLNREGCKEYDVAPQVGHRFCKDFPGFIPSLLGDLLEERQKIKKKMKATIDPIERKLLDYRQRAIKILANSYYGYYGYARARWYCKECAESVTAWGREYITMTIKEIEEKYGFKVIYSDTDGFFATIPGADAETVKKKAMEFLKYINAKLPGALELEYEGFYKRGFFVTKKKYAVIDEEGKITTRGLEIVRRDWSEIAKETQARVLEALLKDGDVEKAVRIVKEVTEKLSKYEVPPEKLVIHEQITRDLKDYKATGPHVAVAKRLAARGVKIRPGTVISYIVLKGSGRIGDRAIPFDEFDPTKHKYDAEYYIENQVLPAVERILRAFGYRKEDLRYQKTRQVGLSAWLKPKGT

SEQ ID NO: 1263 - protein, 774 aa, synthetic construct
MILDTDYITEDGKPVMRIFKKENGEFKIEYDRTFEPYFYALLKDDSAIEEVKKITAERHGTVVTVKRVEKVQKKFLGRPVEVWKLYFTHFQDVPAIFDKIREHPAVIDIYEYDIPFAKRYLIDKGLVPMEGDEELKMLAFDIETLYHEGEEFAEGPILMISYADEEGARVITWKNVDLPYVDVVSTEREMIKRFLRVVKEKDPDVLITYNGDNFDFAYLKKRCEKLGINFALGRDGSEPKIQRMGDRFAVEVKGRIHFDLYPVIRRTINLPTYTLEAVYEAVFGQPKEKVYAEEITTAWETGENLERVARYSMEDAKVTYELGKEFLPMEAQLSRLIGQSLWDVSRSSTGNLVEWFLLRKAYERNELAPNKPDEKELARRRQSYEGGYVKEPERGLWENIVYLDFRSLYPSIIITHNVSPDTLNREGCKEYDVAPQVGHRFCKDFPGFIPSLLGDLLEERQKIKKKMKATIDPIERKLLDYRQRAIKILANSYYGYYGYARARWYCKECAESVTAWGREYITMTIKEIEEKYGFKVIYSDTDGFFATIPGADAETVKKKAMEFLKYINAKLPGALELEYEGFYKRGFFVTKKKYAVIDEEGKITTRGLEIVRRDWSEIAKETQARVLEALLKDGDVEKAVRIVKEVTEKLSKYEVPPEKLVIHEQITRDLKDYKATGPHVAVAKRLAARGVKIRPGTVISYIVLKGSGRIGDRAIPFDEFDPTKHKYDAEYYIENQVLPAVERILRAFGYRKEDLRYQKTRQVGLSAWLKPKGT

SEQ ID NO: 1264 - protein, 774 aa, synthetic construct
MILDTDYITEDGKPVMRIFKKENGEFKIEYDRTFEPYFYALLKDDSAIEEVKKITAERHGTVVTVKRVEKVQKKFLGRPVEVWKLYFTHFQDVPAIHDKIREHPAVIDIYEYDIPFAKRYLIDKGLVPMEGDEELKMLAFDIETLYHEGEEFAEGPILMISYADEEGARVITWKNVDLPYVDVVSTEREMIKRFLRVVKEKDPDVLITYNGDNFDFAYLKKRCEKLGINFALGRDGSEPKIQRMGDRFAVEVKGRIHFDLYPVIRRTINLPTYTLEAVYEAVFGQPKEKVYAEEITTAWETGENLERVARYSMEDAKVTYELGKEFLPMEAQLSRLIGQSLWDVSRSSTGNLVEWFLLRKAYERNELAPNKPDEKELARRRQSYEGGYVKEPERGLWENIVYLDFRSLYPSIIITHNVSPDTLNREGCKEYDVAPQVGHRFCKDFPGFIPSLLGDLLEERQKIKKKMKATIDPIERKLLDYRQRAIKILANSYYGYYGYARARWYCKECAESVTAWGREYITMTIKEIEEKYGFKVIYSDTDGFFATIPGADAETVKKKAMEFLKYINAKLPGALELEYEGFYKRGFFVTKKKYAVIDEEGKITTRGLEIVRRDWSEIAKETQARVLEALLKDGDVEKAVRIVKEVTEKLSKYEVPPEKLVIHEQITRDLKDYKATGPHVAVAKRLAARGVKIRPGTVISYIVLKGSGRIGDRAIPFDEFDPTKHKYDAEYYIENQVLPAVERILRAFGYRKEDLRYQKTRQVGLSAWLKPKGT

SEQ ID NO: 1265 - protein, 774 aa, synthetic construct
MILDTDYITEDGKPVMRIFKKENGEFKIEYDRTFEPYFYALLKDDSAIEEVKKITAERHGTVVTVKRVEKVQKKFLGRPVEVWKLYFTHFQDIPAIRDKIREHPAVIDIYEYDIPFAKRYLIDKGLVPMEGDEELKMLAFDIETLYHEGEEFAEGPILMISYADEEGARVITWKNVDLPYVDVVSTEREMIKRFLRVVKEKDPDVLITYNGDNFDFAYLKKRCEKLGINFALGRDGSEPKIQRMGDRFAVEVKGRIHFDLYPVIRRTINLPTYTLEAVYEAVFGQPKEKVYAEEITTAWETGENLERVARYSMEDAKVTYELGKEFLPMEAQLSRLIGQSLWDVSRSSTGNLVEWFLLRKAYERNELAPNKPDEKELARRRQSYEGGYVKEPERGLWENIVYLDFRSLYPSIIITHNVSPDTLNREGCKEYDVAPQVGHRFCKDFPGFIPSLLGDLLEERQKIKKKMKATIDPIERKLLDYRQRAIKILANSYYGYYGYARARWYCKECAESVTAWGREYITMTIKEIEEKYGFKVIYSDTDGFFATIPGADAETVKKKAMEFLKYINAKLPGALELEYEGFYKRGFFVTKKKYAVIDEEGKITTRGLEIVRRDWSEIAKETQARVLEALLKDGDVEKAVRIVKEVTEKLSKYEVPPEKLVIHEQITRDLKDYKATGPHVAVAKRLAARGVKIRPGTVISYIVLKGSGRIGDRAIPFDEFDPTKHKYDAEYYIENQVLPAVERILRAFGYRKEDLRYQKTRQVGLSAWLKPKGT

SEQ ID NO: 1266 - protein, 774 aa, synthetic construct
MILDTDYITEDGKPVMRIFKKENGEFKIEYDRTFEPYFYALLKDDSAIEEVKKITAERHGTVVTVKRVEKVQKKFLGRPVEVWKLYFTHFQDIPAIADKIREHPAVIDIYEYDIPFAKRYLIDKGLVPMEGDEELKMLAFDIETLYHEGEEFAEGPILMISYADEEGARVITWKNVDLPYVDVVSTEREMIKRFLRVVKEKDPDVLITYNGDNFDFAYLKKRCEKLGINFALGRDGSEPKIQRMGDRFAVEVKGRIHFDLYPVIRRTINLPTYTLEAVYEAVFGQPKEKVYAEEITTAWETGENLERVARYSMEDAKVTYELGKEFLPMEAQLSRLIGQSLWDVSRSSTGNLVEWFLLRKAYERNELAPNKPDEKELARRRQSYEGGYVKEPERGLWENIVYLDFRSLYPSIIITHNVSPDTLNREGCKEYDVAPQVGHRFCKDFPGFIPSLLGDLLEERQKIKKKMKATIDPIERKLLDYRQRAIKILANSYYGYYGYARARWYCKECAESVTAWGREYITMTIKEIEEKYGFKVIYSDTDGFFATIPGADAETVKKKAMEFLKYINAKLPGALELEYEGFYKRGFFVTKKKYAVIDEEGKITTRGLEIVRRDWSEIAKETQARVLEALLKDGDVEKAVRIVKEVTEKLSKYEVPPEKLVIHEQITRDLKDYKATGPHVAVAKRLAARGVKIRPGTVISYIVLKGSGRIGDRAIPFDEFDPTKHKYDAEYYIENQVLPAVERILRAFGYRKEDLRYQKTRQVGLSAWLKPKGT

SEQ ID NO: 1267 - protein, 774 aa, synthetic construct
MILDTDYITEDGKPVMRIFKKENGEFKIEYDRTFEPYFYALLKDDSAIEEVKKITAERHGTVVTVKRVEKVQKKFLGRPVEVWKLYFTHFQDIPAIFDKIREHPAVIDIYEYDIPFAKRYLIDKGLVPMEGDEELKMLAFDIETLYHEGEEFAEGPILMISYADEEGARVITWKNVDLPYVDVVSTEREMIKRFLRVVKEKDPDVLITYNGDNFDFAYLKKRCEKLGINFALGRDGSEPKIQRMGDRFAVEVKGRIHFDLYPVIRRTINLPTYTLEAVYEAVFGQPKEKVYAEEITTAWETGENLERVARYSMEDAKVTYELGKEFLPMEAQLSRLIGQSLWDVSRSSTGNLVEWFLLRKAYERNELAPNKPDEKELARRRQSYEGGYVKEPERGLWENIVYLDFRSLYPSIIITHNVSPDTLNREGCKEYDVAPQVGHRFCKDFPGFIPSLLGDLLEERQKIKKKMKATIDPIERKLLDYRQRAIKILANSYYGYYGYARARWYCKECAESVTAWGREYITMTIKEIEEKYGFKVIYSDTDGFFATIPGADAETVKKKAMEFLKYINAKLPGALELEYEGFYKRGFFVTKKKYAVIDEEGKITTRGLEIVRRDWSEIAKETQARVLEALLKDGDVEKAVRIVKEVTEKLSKYEVPPEKLVIHEQITRDLKDYKATGPHVAVAKRLAARGVKIRPGTVISYIVLKGSGRIGDRAIPFDEFDPTKHKYDAEYYIENQVLPAVERILRAFGYRKEDLRYQKTRQVGLSAWLKPKGT

SEQ ID NO: 1268 - protein, 774 aa, synthetic construct
MILDTDYITEDGKPVMRIFKKENGEFKIEYDRTFEPYFYALLKDDSAIEEVKKITAERHGTVVTVKRVEKVQKKFLGRPVEVWKLYFTHFQDIPAIHDKIREHPAVIDIYEYDIPFAKRYLIDKGLVPMEGDEELKMLAFDIETLYHEGEEFAEGPILMISYADEEGARVITWKNVDLPYVDVVSTEREMIKRFLRVVKEKDPDVLITYNGDNFDFAYLKKRCEKLGINFALGRDGSEPKIQRMGDRFAVEVKGRIHFDLYPVIRRTINLPTYTLEAVYEAVFGQPKEKVYAEEITTAWETGENLERVARYSMEDAKVTYELGKEFLPMEAQLSRLIGQSLWDVSRSSTGNLVEWFLLRKAYERNELAPNKPDEKELARRRQSYEGGYVKEPERGLWENIVYLDFRSLYPSIIITHNVSPDTLNREGCKEYDVAPQVGHRFCKDFPGFIPSLLGDLLEERQKIKKKMKATIDPIERKLLDYRQRAIKILANSYYGYYGYARARWYCKECAESVTAWGREYITMTIKEIEEKYGFKVIYSDTDGFFATIPGADAETVKKKAMEFLKYINAKLPGALELEYEGFYKRGFFVTKKKYAVIDEEGKITTRGLEIVRRDWSEIAKETQARVLEALLKDGDVEKAVRIVKEVTEKLSKYEVPPEKLVIHEQITRDLKDYKATGPHVAVAKRLAARGVKIRPGTVISYIVLKGSGRIGDRAIPFDEFDPTKHKYDAEYYIENQVLPAVERILRAFGYRKEDLRYQKTRQVGLSAWLKPKGT

SEQ ID NO: 1269 - protein, 774 aa, synthetic construct
MILDTDYITEDGKPVMRIFKKENGEFKIEYDRTFEPYFYALLKDDSAIEEVKKITAERHGTVVTVKRVEKVQKKFLGRPVEVWKLYFTHFQDIPAIWDKIREHPAVIDIYEYDIPFAKRYLIDKGLVPMEGDEELKMLAFDIETLYHEGEEFAEGPILMISYADEEGARVITWKNVDLPYVDVVSTEREMIKRFLRVVKEKDPDVLITYNGDNFDFAYLKKRCEKLGINFALGRDGSEPKIQRMGDRFAVEVKGRIHFDLYPVIRRTINLPTYTLEAVYEAVFGQPKEKVYAEEITTAWETGENLERVARYSMEDAKVTYELGKEFLPMEAQLSRLIGQSLWDVSRSSTGNLVEWFLLRKAYERNELAPNKPDEKELARRRQSYEGGYVKEPERGLWENIVYLDFRSLYPSIIITHNVSPDTLNREGCKEYDVAPQVGHRFCKDFPGFIPSLLGDLLEERQKIKKKMKATIDPIERKLLDYRQRAIKILANSYYGYYGYARARWYCKECAESVTAWGREYITMTIKEIEEKYGFKVIYSDTDGFFATIPGADAETVKKKAMEFLKYINAKLPGALELEYEGFYKRGFFVTKKKYAVIDEEGKITTRGLEIVRRDWSEIAKETQARVLEALLKDGDVEKAVRIVKEVTEKLSKYEVPPEKLVIHEQITRDLKDYKATGPHVAVAKRLAARGVKIRPGTVISYIVLKGSGRIGDRAIPFDEFDPTKHKYDAEYYIENQVLPAVERILRAFGYRKEDLRYQKTRQVGLSAWLKPKGT

SEQ ID NO: 1270 - protein, 774 aa, synthetic construct
MILDTDYITEDGKPVMRIFKKENGEFKIEYDRTFEPYFYALLKDDSAIEEVKKITAERHGTVVTVKRVEKVQKKFLGRPVEVWKLYFTHFQDKPAIRDKIREHPAVIDIYEYDIPFAKRYLIDKGLVPMEGDEELKMLAFDIETLYHEGEEFAEGPILMISYADEEGARVITWKNVDLPYVDVVSTEREMIKRFLRVVKEKDPDVLITYNGDNFDFAYLKKRCEKLGINFALGRDGSEPKIQRMGDRFAVEVKGRIHFDLYPVIRRTINLPTYTLEAVYEAVFGQPKEKVYAEEITTAWETGENLERVARYSMEDAKVTYELGKEFLPMEAQLSRLIGQSLWDVSRSSTGNLVEWFLLRKAYERNELAPNKPDEKELARRRQSYEGGYVKEPERGLWENIVYLDFRSLYPSIIITHNVSPDTLNREGCKEYDVAPQVGHRFCKDFPGFIPSLLGDLLEERQKIKKKMKATIDPIERKLLDYRQRAIKILANSYYGYYGYARARWYCKECAESVTAWGREYITMTIKEIEEKYGFKVIYSDTDGFFATIPGADAETVKKKAMEFLKYINAKLPGALELEYEGFYKRGFFVTKKKYAVIDEEGKITTRGLEIVRRDWSEIAKETQARVLEALLKDGDVEKAVRIVKEVTEKLSKYEVPPEKLVIHEQITRDLKDYKATGPHVAVAKRLAARGVKIRPGTVISYIVLKGSGRIGDRAIPFDEFDPTKHKYDAEYYIENQVLPAVERILRAFGYRKEDLRYQKTRQVGLSAWLKPKGT

SEQ ID NO: 1271 - protein, 774 aa, synthetic construct
MILDTDYITEDGKPVMRIFKKENGEFKIEYDRTFEPYFYALLKDDSAIEEVKKITAERHGTVVTVKRVEKVQKKFLGRPVEVWKLYFTHFQDQPAIRDKIREHPAVIDIYEYDIPFAKRYLIDKGLVPMEGDEELKMLAFDIETLYHEGEEFAEGPILMISYADEEGARVITWKNVDLPYVDVVSTEREMIKRFLRVVKEKDPDVLITYNGDNFDFAYLKKRCEKLGINFALGRDGSEPKIQRMGDRFAVEVKGRIHFDLYPVIRRTINLPTYTLEAVYEAVFGQPKEKVYAEEITTAWETGENLERVARYSMEDAKVTYELGKEFLPMEAQLSRLIGQSLWDVSRSSTGNLVEWFLLRKAYERNELAPNKPDEKELARRRQSYEGGYVKEPERGLWENIVYLDFRSLYPSIIITHNVSPDTLNREGCKEYDVAPQVGHRFCKDFPGFIPSLLGDLLEERQKIKKKMKATIDPIERKLLDYRQRAIKILANSYYGYYGYARARWYCKECAESVTAWGREYITMTIKEIEEKYGFKVIYSDTDGFFATIPGADAETVKKKAMEFLKYINAKLPGALELEYEGFYKRGFFVTKKKYAVIDEEGKITTRGLEIVRRDWSEIAKETQARVLEALLKDGDVEKAVRIVKEVTEKLSKYEVPPEKLVIHEQITRDLKDYKATGPHVAVAKRLAARGVKIRPGTVISYIVLKGSGRIGDRAIPFDEFDPTKHKYDAEYYIENQVLPAVERILRAFGYRKEDLRYQKTRQVGLSAWLKPKGT

SEQ ID NO: 1272 - protein, 774 aa, synthetic construct
MILDTDYITEDGKPVMRIFKKENGEFKIEYDRTFEPYFYALLKDDSAIEEVKKITAERHGTVVTVKRVEKVQKKFLGRPVEVWKLYFTHFQDQPAIADKIREHPAVIDIYEYDIPFAKRYLIDKGLVPMEGDEELKMLAFDIETLYHEGEEFAEGPILMISYADEEGARVITWKNVDLPYVDVVSTEREMIKRFLRVVKEKDPDVLITYNGDNFDFAYLKKRCEKLGINFALGRDGSEPKIQRMGDRFAVEVKGRIHFDLYPVIRRTINLPTYTLEAVYEAVFGQPKEKVYAEEITTAWETGENLERVARYSMEDAKVTYELGKEFLPMEAQLSRLIGQSLWDVSRSSTGNLVEWFLLRKAYERNELAPNKPDEKELARRRQSYEGGYVKEPERGLWENIVYLDFRSLYPSIIITHNVSPDTLNREGCKEYDVAPQVGHRFCKDFPGFIPSLLGDLLEERQKIKKKMKATIDPIERKLLDYRQRAIKILANSYYGYYGYARARWYCKECAESVTAWGREYITMTIKEIEEKYGFKVIYSDTDGFFATIPGADAETVKKKAMEFLKYINAKLPGALELEYEGFYKRGFFVTKKKYAVIDEEGKITTRGLEIVRRDWSEIAKETQARVLEALLKDGDVEKAVRIVKEVTEKLSKYEVPPEKLVIHEQITRDLKDYKATGPHVAVAKRLAARGVKIRPGTVISYIVLKGSGRIGDRAIPFDEFDPTKHKYDAEYYIENQVLPAVERILRAFGYRKEDLRYQKTRQVGLSAWLKPKGT

SEQ ID NO: 1273 - protein, 774 aa, synthetic construct
MILDTDYITEDGKPVMRIFKKENGEFKIEYDRTFEPYFYALLKDDSAIEEVKKITAERHGTVVTVKRVEKVQKKFLGRPVEVWKLYFTHFQDQPAIHDKIREHPAVIDIYEYDIPFAKRYLIDKGLVPMEGDEELKMLAFDIETLYHEGEEFAEGPILMISYADEEGARVITWKNVDLPYVDVVSTEREMIKRFLRVVKEKDPDVLITYNGDNFDFAYLKKRCEKLGINFALGRDGSEPKIQRMGDRFAVEVKGRIHFDLYPVIRRTINLPTYTLEAVYEAVFGQPKEKVYAEEITTAWETGENLERVARYSMEDAKVTYELGKEFLPMEAQLSRLIGQSLWDVSRSSTGNLVEWFLLRKAYERNELAPNKPDEKELARRRQSYEGGYVKEPERGLWENIVYLDFRSLYPSIIITHNVSPDTLNREGCKEYDVAPQVGHRFCKDFPGFIPSLLGDLLEERQKIKKKMKATIDPIERKLLDYRQRAIKILANSYYGYYGYARARWYCKECAESVTAWGREYITMTIKEIEEKYGFKVIYSDTDGFFATIPGADAETVKKKAMEFLKYINAKLPGALELEYEGFYKRGFFVTKKKYAVIDEEGKITTRGLEIVRRDWSEIAKETQARVLEALLKDGDVEKAVRIVKEVTEKLSKYEVPPEKLVIHEQITRDLKDYKATGPHVAVAKRLAARGVKIRPGTVISYIVLKGSGRIGDRAIPFDEFDPTKHKYDAEYYIENQVLPAVERILRAFGYRKEDLRYQKTRQVGLSAWLKPKGT

SEQ ID NO: 1274 - protein, 774 aa, synthetic construct
MILDTDYITEDGKPVMRIFKKENGEFKIEYDRTFEPYFYALLKDDSAIEEVKKITAERHGTVVTVKRVEKVQKKFLGRPVEVWKLYFTHFQDRPAIRDKIREHPAVIDIYEYDIPFAKRYLIDKGLVPMEGDEELKMLAFDIETLYHEGEEFAEGPILMISYADEEGARVITWKNVDLPYVDVVSTEREMIKRFLRVVKEKDPDVLITYNGDNFDFAYLKKRCEKLGINFALGRDGSEPKIQRMGDRFAVEVKGRIHFDLYPVIRRTINLPTYTLEAVYEAVFGQPKEKVYAEEITTAWETGENLERVARYSMEDAKVTYELGKEFLPMEAQLSRLIGQSLWDVSRSSTGNLVEWFLLRKAYERNELAPNKPDEKELARRRQSYEGGYVKEPERGLWENIVYLDFRSLYPSIIITHNVSPDTLNREGCKEYDVAPQVGHRFCKDFPGFIPSLLGDLLEERQKIKKKMKATIDPIERKLLDYRQRAIKILANSYYGYYGYARARWYCKECAESVTAWGREYITMTIKEIEEKYGFKVIYSDTDGFFATIPGADAETVKKKAMEFLKYINAKLPGALELEYEGFYKRGFFVTKKKYAVIDEEGKITTRGLEIVRRDWSEIAKETQARVLEALLKDGDVEKAVRIVKEVTEKLSKYEVPPEKLVIHEQITRDLKDYKATGPHVAVAKRLAARGVKIRPGTVISYIVLKGSGRIGDRAIPFDEFDPTKHKYDAEYYIENQVLPAVERILRAFGYRKEDLRYQKTRQVGLSAWLKPKGT

SEQ ID NO: 1275 - protein, 774 aa, synthetic construct
MILDTDYITEDGKPVMRIFKKENGEFKIEYDRTFEPYFYALLKDDSAIEEVKKITAERHGTVVTVKRVEKVQKKFLGRPVEVWKLYFTHIQDVPAIRDKIREHPAVIDIYEYDIPFAKRYLIDKGLVPMEGDEELKMLAFDIETLYHEGEEFAEGPILMISYADEEGARVITWKNVDLPYVDVVSTEREMIKRFLRVVKEKDPDVLITYNGDNFDFAYLKKRCEKLGINFALGRDGSEPKIQRMGDRFAVEVKGRIHFDLYPVIRRTINLPTYTLEAVYEAVFGQPKEKVYAEEITTAWETGENLERVARYSMEDAKVTYELGKEFLPMEAQLSRLIGQSLWDVSRSSTGNLVEWFLLRKAYERNELAPNKPDEKELARRRQSYEGGYVKEPERGLWENIVYLDFRSLYPSIIITHNVSPDTLNREGCKEYDVAPQVGHRFCKDFPGFIPSLLGDLLEERQKIKKKMKATIDPIERKLLDYRQRAIKILANSYYGYYGYARARWYCKECAESVTAWGREYITMTIKEIEEKYGFKVIYSDTDGFFATIPGADAETVKKKAMEFLKYINAKLPGALELEYEGFYKRGFFVTKKKYAVIDEEGKITTRGLEIVRRDWSEIAKETQARVLEALLKDGDVEKAVRIVKEVTEKLSKYEVPPEKLVIHEQITRDLKDYKATGPHVAVAKRLAARGVKIRPGTVISYIVLKGSGRIGDRAIPFDEFDPTKHKYDAEYYIENQVLPAVERILRAFGYRKEDLRYQKTRQVGLSAWLKPKGT

SEQ ID NO: 1276 - protein, 774 aa, synthetic construct
MILDTDYITEDGKPVMRIFKKENGEFKIEYDRTFEPYFYALLKDDSAIEEVKKITAERHGTVVTVKRVEKVQKKFLGRPVEVWKLYFTHIQDVPAIADKIREHPAVIDIYEYDIPFAKRYLIDKGLVPMEGDEELKMLAFDIETLYHEGEEFAEGPILMISYADEEGARVITWKNVDLPYVDVVSTEREMIKRFLRVVKEKDPDVLITYNGDNFDFAYLKKRCEKLGINFALGRDGSEPKIQRMGDRFAVEVKGRIHFDLYPVIRRTINLPTYTLEAVYEAVFGQPKEKVYAEEITTAWETGENLERVARYSMEDAKVTYELGKEFLPMEAQLSRLIGQSLWDVSRSSTGNLVEWFLLRKAYERNELAPNKPDEKELARRRQSYEGGYVKEPERGLWENIVYLDFRSLYPSIIITHNVSPDTLNREGCKEYDVAPQVGHRFCKDFPGFIPSLLGDLLEERQKIKKKMKATIDPIERKLLDYRQRAIKILANSYYGYYGYARARWYCKECAESVTAWGREYITMTIKEIEEKYGFKVIYSDTDGFFATIPGADAETVKKKAMEFLKYINAKLPGALELEYEGFYKRGFFVTKKKYAVIDEEGKITTRGLEIVRRDWSEIAKETQARVLEALLKDGDVEKAVRIVKEVTEKLSKYEVPPEKLVIHEQITRDLKDYKATGPHVAVAKRLAARGVKIRPGTVISYIVLKGSGRIGDRAIPFDEFDPTKHKYDAEYYIENQVLPAVERILRAFGYRKEDLRYQKTRQVGLSAWLKPKGT

SEQ ID NO: 1277 - protein, 774 aa, synthetic construct
MILDTDYITEDGKPVMRIFKKENGEFKIEYDRTFEPYFYALLKDDSAIEEVKKITAERHGTVVTVKRVEKVQKKFLGRPVEVWKLYFTHIQDVPAIFDKIREHPAVIDIYEYDIPFAKRYLIDKGLVPMEGDEELKMLAFDIETLYHEGEEFAEGPILMISYADEEGARVITWKNVDLPYVDVVSTEREMIKRFLRVVKEKDPDVLITYNGDNFDFAYLKKRCEKLGINFALGRDGSEPKIQRMGDRFAVEVKGRIHFDLYPVIRRTINLPTYTLEAVYEAVFGQPKEKVYAEEITTAWETGENLERVARYSMEDAKVTYELGKEFLPMEAQLSRLIGQSLWDVSRSSTGNLVEWFLLRKAYERNELAPNKPDEKELARRRQSYEGGYVKEPERGLWENIVYLDFRSLYPSIIITHNVSPDTLNREGCKEYDVAPQVGHRFCKDFPGFIPSLLGDLLEERQKIKKKMKATIDPIERKLLDYRQRAIKILANSYYGYYGYARARWYCKECAESVTAWGREYITMTIKEIEEKYGFKVIYSDTDGFFATIPGADAETVKKKAMEFLKYINAKLPGALELEYEGFYKRGFFVTKKKYAVIDEEGKITTRGLEIVRRDWSEIAKETQARVLEALLKDGDVEKAVRIVKEVTEKLSKYEVPPEKLVIHEQITRDLKDYKATGPHVAVAKRLAARGVKIRPGTVISYIVLKGSGRIGDRAIPFDEFDPTKHKYDAEYYIENQVLPAVERILRAFGYRKEDLRYQKTRQVGLSAWLKPKGT

SEQ ID NO: 1278 - protein, 774 aa, synthetic construct
MILDTDYITEDGKPVMRIFKKENGEFKIEYDRTFEPYFYALLKDDSAIEEVKKITAERHGTVVTVKRVEKVQKKFLGRPVEVWKLYFTHIQDVPAIHDKIREHPAVIDIYEYDIPFAKRYLIDKGLVPMEGDEELKMLAFDIETLYHEGEEFAEGPILMISYADEEGARVITWKNVDLPYVDVVSTEREMIKRFLRVVKEKDPDVLITYNGDNFDFAYLKKRCEKLGINFALGRDGSEPKIQRMGDRFAVEVKGRIHFDLYPVIRRTINLPTYTLEAVYEAVFGQPKEKVYAEEITTAWETGENLERVARYSMEDAKVTYELGKEFLPMEAQLSRLIGQSLWDVSRSSTGNLVEWFLLRKAYERNELAPNKPDEKELARRRQSYEGGYVKEPERGLWENIVYLDFRSLYPSIIITHNVSPDTLNREGCKEYDVAPQVGHRFCKDFPGFIPSLLGDLLEERQKIKKKMKATIDPIERKLLDYRQRAIKILANSYYGYYGYARARWYCKECAESVTAWGREYITMTIKEIEEKYGFKVIYSDTDGFFATIPGADAETVKKKAMEFLKYINAKLPGALELEYEGFYKRGFFVTKKKYAVIDEEGKITTRGLEIVRRDWSEIAKETQARVLEALLKDGDVEKAVRIVKEVTEKLSKYEVPPEKLVIHEQITRDLKDYKATGPHVAVAKRLAARGVKIRPGTVISYIVLKGSGRIGDRAIPFDEFDPTKHKYDAEYYIENQVLPAVERILRAFGYRKEDLRYQKTRQVGLSAWLKPKGT

SEQ ID NO: 1279 - protein, 774 aa, synthetic construct
MILDTDYITEDGKPVMRIFKKENGEFKIEYDRTFEPYFYALLKDDSAIEEVKKITAERHGTVVTVKRVEKVQKKFLGRPVEVWKLYFTHIQDVPAIWDKIREHPAVIDIYEYDIPFAKRYLIDKGLVPMEGDEELKMLAFDIETLYHEGEEFAEGPILMISYADEEGARVITWKNVDLPYVDVVSTEREMIKRFLRVVKEKDPDVLITYNGDNFDFAYLKKRCEKLGINFALGRDGSEPKIQRMGDRFAVEVKGRIHFDLYPVIRRTINLPTYTLEAVYEAVFGQPKEKVYAEEITTAWETGENLERVARYSMEDAKVTYELGKEFLPMEAQLSRLIGQSLWDVSRSSTGNLVEWFLLRKAYERNELAPNKPDEKELARRRQSYEGGYVKEPERGLWENIVYLDFRSLYPSIIITHNVSPDTLNREGCKEYDVAPQVGHRFCKDFPGFIPSLLGDLLEERQKIKKKMKATIDPIERKLLDYRQRAIKILANSYYGYYGYARARWYCKECAESVTAWGREYITMTIKEIEEKYGFKVIYSDTDGFFATIPGADAETVKKKAMEFLKYINAKLPGALELEYEGFYKRGFFVTKKKYAVIDEEGKITTRGLEIVRRDWSEIAKETQARVLEALLKDGDVEKAVRIVKEVTEKLSKYEVPPEKLVIHEQITRDLKDYKATGPHVAVAKRLAARGVKIRPGTVISYIVLKGSGRIGDRAIPFDEFDPTKHKYDAEYYIENQVLPAVERILRAFGYRKEDLRYQKTRQVGLSAWLKPKGT

SEQ ID NO: 1280 - protein, 774 aa, synthetic construct
MILDTDYITEDGKPVMRIFKKENGEFKIEYDRTFEPYFYALLKDDSAIEEVKKITAERHGTVVTVKRVEKVQKKFLGRPVEVWKLYFTHIQDIPAIRDKIREHPAVIDIYEYDIPFAKRYLIDKGLVPMEGDEELKMLAFDIETLYHEGEEFAEGPILMISYADEEGARVITWKNVDLPYVDVVSTEREMIKRFLRVVKEKDPDVLITYNGDNFDFAYLKKRCEKLGINFALGRDGSEPKIQRMGDRFAVEVKGRIHFDLYPVIRRTINLPTYTLEAVYEAVFGQPKEKVYAEEITTAWETGENLERVARYSMEDAKVTYELGKEFLPMEAQLSRLIGQSLWDVSRSSTGNLVEWFLLRKAYERNELAPNKPDEKELARRRQSYEGGYVKEPERGLWENIVYLDFRSLYPSIIITHNVSPDTLNREGCKEYDVAPQVGHRFCKDFPGFIPSLLGDLLEERQKIKKKMKATIDPIERKLLDYRQRAIKILANSYYGYYGYARARWYCKECAESVTAWGREYITMTIKEIEEKYGFKVIYSDTDGFFATIPGADAETVKKKAMEFLKYINAKLPGALELEYEGFYKRGFFVTKKKYAVIDEEGKITTRGLEIVRRDWSEIAKETQARVLEALLKDGDVEKAVRIVKEVTEKLSKYEVPPEKLVIHEQITRDLKDYKATGPHVAVAKRLAARGVKIRPGTVISYIVLKGSGRIGDRAIPFDEFDPTKHKYDAEYYIENQVLPAVERILRAFGYRKEDLRYQKTRQVGLSAWLKPKGT

SEQ ID NO: 1281 - protein, 774 aa, synthetic construct
MILDTDYITEDGKPVMRIFKKENGEFKIEYDRTFEPYFYALLKDDSAIEEVKKITAERHGTVVTVKRVEKVQKKFLGRPVEVWKLYFTHIQDIPAIFDKIREHPAVIDIYEYDIPFAKRYLIDKGLVPMEGDEELKMLAFDIETLYHEGEEFAEGPILMISYADEEGARVITWKNVDLPYVDVVSTEREMIKRFLRVVKEKDPDVLITYNGDNFDFAYLKKRCEKLGINFALGRDGSEPKIQRMGDRFAVEVKGRIHFDLYPVIRRTINLPTYTLEAVYEAVFGQPKEKVYAEEITTAWETGENLERVARYSMEDAKVTYELGKEFLPMEAQLSRLIGQSLWDVSRSSTGNLVEWFLLRKAYERNELAPNKPDEKELARRRQSYEGGYVKEPERGLWENIVYLDFRSLYPSIIITHNVSPDTLNREGCKEYDVAPQVGHRFCKDFPGFIPSLLGDLLEERQKIKKKMKATIDPIERKLLDYRQRAIKILANSYYGYYGYARARWYCKECAESVTAWGREYITMTIKEIEEKYGFKVIYSDTDGFFATIPGADAETVKKKAMEFLKYINAKLPGALELEYEGFYKRGFFVTKKKYAVIDEEGKITTRGLEIVRRDWSEIAKETQARVLEALLKDGDVEKAVRIVKEVTEKLSKYEVPPEKLVIHEQITRDLKDYKATGPHVAVAKRLAARGVKIRPGTVISYIVLKGSGRIGDRAIPFDEFDPTKHKYDAEYYIENQVLPAVERILRAFGYRKEDLRYQKTRQVGLSAWLKPKGT

SEQ ID NO: 1282 - protein, 774 aa, synthetic construct
MILDTDYITEDGKPVMRIFKKENGEFKIEYDRTFEPYFYALLKDDSAIEEVKKITAERHGTVVTVKRVEKVQKKFLGRPVEVWKLYFTHIQDIPAIHDKIREHPAVIDIYEYDIPFAKRYLIDKGLVPMEGDEELKMLAFDIETLYHEGEEFAEGPILMISYADEEGARVITWKNVDLPYVDVVSTEREMIKRFLRVVKEKDPDVLITYNGDNFDFAYLKKRCEKLGINFALGRDGSEPKIQRMGDRFAVEVKGRIHFDLYPVIRRTINLPTYTLEAVYEAVFGQPKEKVYAEEITTAWETGENLERVARYSMEDAKVTYELGKEFLPMEAQLSRLIGQSLWDVSRSSTGNLVEWFLLRKAYERNELAPNKPDEKELARRRQSYEGGYVKEPERGLWENIVYLDFRSLYPSIIITHNVSPDTLNREGCKEYDVAPQVGHRFCKDFPGFIPSLLGDLLEERQKIKKKMKATIDPIERKLLDYRQRAIKILANSYYGYYGYARARWYCKECAESVTAWGREYITMTIKEIEEKYGFKVIYSDTDGFFATIPGADAETVKKKAMEFLKYINAKLPGALELEYEGFYKRGFFVTKKKYAVIDEEGKITTRGLEIVRRDWSEIAKETQARVLEALLKDGDVEKAVRIVKEVTEKLSKYEVPPEKLVIHEQITRDLKDYKATGPHVAVAKRLAARGVKIRPGTVISYIVLKGSGRIGDRAIPFDEFDPTKHKYDAEYYIENQVLPAVERILRAFGYRKEDLRYQKTRQVGLSAWLKPKGT

SEQ ID NO: 1283 - protein, 774 aa, synthetic construct
MILDTDYITEDGKPVMRIFKKENGEFKIEYDRTFEPYFYALLKDDSAIEEVKKITAERHGTVVTVKRVEKVQKKFLGRPVEVWKLYFTHIQDIPAIWDKIREHPAVIDIYEYDIPFAKRYLIDKGLVPMEGDEELKMLAFDIETLYHEGEEFAEGPILMISYADEEGARVITWKNVDLPYVDVVSTEREMIKRFLRVVKEKDPDVLITYNGDNFDFAYLKKRCEKLGINFALGRDGSEPKIQRMGDRFAVEVKGRIHFDLYPVIRRTINLPTYTLEAVYEAVFGQPKEKVYAEEITTAWETGENLERVARYSMEDAKVTYELGKEFLPMEAQLSRLIGQSLWDVSRSSTGNLVEWFLLRKAYERNELAPNKPDEKELARRRQSYEGGYVKEPERGLWENIVYLDFRSLYPSIIITHNVSPDTLNREGCKEYDVAPQVGHRFCKDFPGFIPSLLGDLLEERQKIKKKMKATIDPIERKLLDYRQRAIKILANSYYGYYGYARARWYCKECAESVTAWGREYITMTIKEIEEKYGFKVIYSDTDGFFATIPGADAETVKKKAMEFLKYINAKLPGALELEYEGFYKRGFFVTKKKYAVIDEEGKITTRGLEIVRRDWSEIAKETQARVLEALLKDGDVEKAVRIVKEVTEKLSKYEVPPEKLVIHEQITRDLKDYKATGPHVAVAKRLAARGVKIRPGTVISYIVLKGSGRIGDRAIPFDEFDPTKHKYDAEYYIENQVLPAVERILRAFGYRKEDLRYQKTRQVGLSAWLKPKGT

SEQ ID NO: 1284 - protein, 774 aa, synthetic construct
MILDTDYITEDGKPVMRIFKKENGEFKIEYDRTFEPYFYALLKDDSAIEEVKKITAERHGTVVTVKRVEKVQKKFLGRPVEVWKLYFTHIQDKPAIRDKIREHPAVIDIYEYDIPFAKRYLIDKGLVPMEGDEELKMLAFDIETLYHEGEEFAEGPILMISYADEEGARVITWKNVDLPYVDVVSTEREMIKRFLRVVKEKDPDVLITYNGDNFDFAYLKKRCEKLGINFALGRDGSEPKIQRMGDRFAVEVKGRIHFDLYPVIRRTINLPTYTLEAVYEAVFGQPKEKVYAEEITTAWETGENLERVARYSMEDAKVTYELGKEFLPMEAQLSRLIGQSLWDVSRSSTGNLVEWFLLRKAYERNELAPNKPDEKELARRRQSYEGGYVKEPERGLWENIVYLDFRSLYPSIIITHNVSPDTLNREGCKEYDVAPQVGHRFCKDFPGFIPSLLGDLLEERQKIKKKMKATIDPIERKLLDYRQRAIKILANSYYGYYGYARARWYCKECAESVTAWGREYITMTIKEIEEKYGFKVIYSDTDGFFATIPGADAETVKKKAMEFLKYINAKLPGALELEYEGFYKRGFFVTKKKYAVIDEEGKITTRGLEIVRRDWSEIAKETQARVLEALLKDGDVEKAVRIVKEVTEKLSKYEVPPEKLVIHEQITRDLKDYKATGPHVAVAKRLAARGVKIRPGTVISYIVLKGSGRIGDRAIPFDEFDPTKHKYDAEYYIENQVLPAVERILRAFGYRKEDLRYQKTRQVGLSAWLKPKGT

SEQ ID NO: 1285 - protein, 774 aa, synthetic construct
MILDTDYITEDGKPVMRIFKKENGEFKIEYDRTFEPYFYALLKDDSAIEEVKKITAERHGTVVTVKRVEKVQKKFLGRPVEVWKLYFTHIQDKPAIADKIREHPAVIDIYEYDIPFAKRYLIDKGLVPMEGDEELKMLAFDIETLYHEGEEFAEGPILMISYADEEGARVITWKNVDLPYVDVVSTEREMIKRFLRVVKEKDPDVLITYNGDNFDFAYLKKRCEKLGINFALGRDGSEPKIQRMGDRFAVEVKGRIHFDLYPVIRRTINLPTYTLEAVYEAVFGQPKEKVYAEEITTAWETGENLERVARYSMEDAKVTYELGKEFLPMEAQLSRLIGQSLWDVSRSSTGNLVEWFLLRKAYERNELAPNKPDEKELARRRQSYEGGYVKEPERGLWENIVYLDFRSLYPSIIITHNVSPDTLNREGCKEYDVAPQVGHRFCKDFPGFIPSLLGDLLEERQKIKKKMKATIDPIERKLLDYRQRAIKILANSYYGYYGYARARWYCKECAESVTAWGREYITMTIKEIEEKYGFKVIYSDTDGFFATIPGADAETVKKKAMEFLKYINAKLPGALELEYEGFYKRGFFVTKKKYAVIDEEGKITTRGLEIVRRDWSEIAKETQARVLEALLKDGDVEKAVRIVKEVTEKLSKYEVPPEKLVIHEQITRDLKDYKATGPHVAVAKRLAARGVKIRPGTVISYIVLKGSGRIGDRAIPFDEFDPTKHKYDAEYYIENQVLPAVERILRAFGYRKEDLRYQKTRQVGLSAWLKPKGT

SEQ ID NO: 1286 - protein, 774 aa, synthetic construct
MILDTDYITEDGKPVMRIFKKENGEFKIEYDRTFEPYFYALLKDDSAIEEVKKITAERHGTVVTVKRVEKVQKKFLGRPVEVWKLYFTHIQDKPAIFDKIREHPAVIDIYEYDIPFAKRYLIDKGLVPMEGDEELKMLAFDIETLYHEGEEFAEGPILMISYADEEGARVITWKNVDLPYVDVVSTEREMIKRFLRVVKEKDPDVLITYNGDNFDFAYLKKRCEKLGINFALGRDGSEPKIQRMGDRFAVEVKGRIHFDLYPVIRRTINLPTYTLEAVYEAVFGQPKEKVYAEEITTAWETGENLERVARYSMEDAKVTYELGKEFLPMEAQLSRLIGQSLWDVSRSSTGNLVEWFLLRKAYERNELAPNKPDEKELARRRQSYEGGYVKEPERGLWENIVYLDFRSLYPSIIITHNVSPDTLNREGCKEYDVAPQVGHRFCKDFPGFIPSLLGDLLEERQKIKKKMKATIDPIERKLLDYRQRAIKILANSYYGYYGYARARWYCKECAESVTAWGREYITMTIKEIEEKYGFKVIYSDTDGFFATIPGADAETVKKKAMEFLKYINAKLPGALELEYEGFYKRGFFVTKKKYAVIDEEGKITTRGLEIVRRDWSEIAKETQARVLEALLKDGDVEKAVRIVKEVTEKLSKYEVPPEKLVIHEQITRDLKDYKATGPHVAVAKRLAARGVKIRPGTVISYIVLKGSGRIGDRAIPFDEFDPTKHKYDAEYYIENQVLPAVERILRAFGYRKEDLRYQKTRQVGLSAWLKPKGT

SEQ ID NO: 1287 - protein, 774 aa, synthetic construct
MILDTDYITEDGKPVMRIFKKENGEFKIEYDRTFEPYFYALLKDDSAIEEVKKITAERHGTVVTVKRVEKVQKKFLGRPVEVWKLYFTHIQDQPAIRDKIREHPAVIDIYEYDIPFAKRYLIDKGLVPMEGDEELKMLAFDIETLYHEGEEFAEGPILMISYADEEGARVITWKNVDLPYVDVVSTEREMIKRFLRVVKEKDPDVLITYNGDNFDFAYLKKRCEKLGINFALGRDGSEPKIQRMGDRFAVEVKGRIHFDLYPVIRRTINLPTYTLEAVYEAVFGQPKEKVYAEEITTAWETGENLERVARYSMEDAKVTYELGKEFLPMEAQLSRLIGQSLWDVSRSSTGNLVEWFLLRKAYERNELAPNKPDEKELARRRQSYEGGYVKEPERGLWENIVYLDFRSLYPSIIITHNVSPDTLNREGCKEYDVAPQVGHRFCKDFPGFIPSLLGDLLEERQKIKKKMKATIDPIERKLLDYRQRAIKILANSYYGYYGYARARWYCKECAESVTAWGREYITMTIKEIEEKYGFKVIYSDTDGFFATIPGADAETVKKKAMEFLKYINAKLPGALELEYEGFYKRGFFVTKKKYAVIDEEGKITTRGLEIVRRDWSEIAKETQARVLEALLKDGDVEKAVRIVKEVTEKLSKYEVPPEKLVIHEQITRDLKDYKATGPHVAVAKRLAARGVKIRPGTVISYIVLKGSGRIGDRAIPFDEFDPTKHKYDAEYYIENQVLPAVERILRAFGYRKEDLRYQKTRQVGLSAWLKPKGT

SEQ ID NO: 1288 - protein, 774 aa, synthetic construct
MILDTDYITEDGKPVMRIFKKENGEFKIEYDRTFEPYFYALLKDDSAIEEVKKITAERHGTVVTVKRVEKVQKKFLGRPVEVWKLYFTHIQDRPAIRDKIREHPAVIDIYEYDIPFAKRYLIDKGLVPMEGDEELKMLAFDIETLYHEGEEFAEGPILMISYADEEGARVITWKNVDLPYVDVVSTEREMIKRFLRVVKEKDPDVLITYNGDNFDFAYLKKRCEKLGINFALGRDGSEPKIQRMGDRFAVEVKGRIHFDLYPVIRRTINLPTYTLEAVYEAVFGQPKEKVYAEEITTAWETGENLERVARYSMEDAKVTYELGKEFLPMEAQLSRLIGQSLWDVSRSSTGNLVEWFLLRKAYERNELAPNKPDEKELARRRQSYEGGYVKEPERGLWENIVYLDFRSLYPSIIITHNVSPDTLNREGCKEYDVAPQVGHRFCKDFPGFIPSLLGDLLEERQKIKKKMKATIDPIERKLLDYRQRAIKILANSYYGYYGYARARWYCKECAESVTAWGREYITMTIKEIEEKYGFKVIYSDTDGFFATIPGADAETVKKKAMEFLKYINAKLPGALELEYEGFYKRGFFVTKKKYAVIDEEGKITTRGLEIVRRDWSEIAKETQARVLEALLKDGDVEKAVRIVKEVTEKLSKYEVPPEKLVIHEQITRDLKDYKATGPHVAVAKRLAARGVKIRPGTVISYIVLKGSGRIGDRAIPFDEFDPTKHKYDAEYYIENQVLPAVERILRAFGYRKEDLRYQKTRQVGLSAWLKPKGT

SEQ ID NO: 1289 - protein, 774 aa, synthetic construct
MILDTDYITEDGKPVMRIFKKENGEFKIEYDRTFEPYFYALLKDDSAIEEVKKITAERHGTVVTVKRVEKVQKKFLGRPVEVWKLYFTHSQDIPAIHDKIREHPAVIDIYEYDIPFAKRYLIDKGLVPMEGDEELKMLAFDIETLYHEGEEFAEGPILMISYADEEGARVITWKNVDLPYVDVVSTEREMIKRFLRVVKEKDPDVLITYNGDNFDFAYLKKRCEKLGINFALGRDGSEPKIQRMGDRFAVEVKGRIHFDLYPVIRRTINLPTYTLEAVYEAVFGQPKEKVYAEEITTAWETGENLERVARYSMEDAKVTYELGKEFLPMEAQLSRLIGQSLWDVSRSSTGNLVEWFLLRKAYERNELAPNKPDEKELARRRQSYEGGYVKEPERGLWENIVYLDFRSLYPSIIITHNVSPDTLNREGCKEYDVAPQVGHRFCKDFPGFIPSLLGDLLEERQKIKKKMKATIDPIERKLLDYRQRAIKILANSYYGYYGYARARWYCKECAESVTAWGREYITMTIKEIEEKYGFKVIYSDTDGFFATIPGADAETVKKKAMEFLKYINAKLPGALELEYEGFYKRGFFVTKKKYAVIDEEGKITTRGLEIVRRDWSEIAKETQARVLEALLKDGDVEKAVRIVKEVTEKLSKYEVPPEKLVIHEQITRDLKDYKATGPHVAVAKRLAARGVKIRPGTVISYIVLKGSGRIGDRAIPFDEFDPTKHKYDAEYYIENQVLPAVERILRAFGYRKEDLRYQKTRQVGLSAWLKPKGT

SEQ ID NO: 1290 - protein, 774 aa, synthetic construct
MILDTDYITEDGKPVMRIFKKENGEFKIEYDRTFEPYFYALLKDDSAIEEVKKITAERHGTVVTVKRVEKVQKKFLGRPVEVWKLYFTHWQDVPAIRDKIREHPAVIDIYEYDIPFAKRYLIDKGLVPMEGDEELKMLAFDIETLYHEGEEFAEGPILMISYADEEGARVITWKNVDLPYVDVVSTEREMIKRFLRVVKEKDPDVLITYNGDNFDFAYLKKRCEKLGINFALGRDGSEPKIQRMGDRFAVEVKGRIHFDLYPVIRRTINLPTYTLEAVYEAVFGQPKEKVYAEEITTAWETGENLERVARYSMEDAKVTYELGKEFLPMEAQLSRLIGQSLWDVSRSSTGNLVEWFLLRKAYERNELAPNKPDEKELARRRQSYEGGYVKEPERGLWENIVYLDFRSLYPSIIITHNVSPDTLNREGCKEYDVAPQVGHRFCKDFPGFIPSLLGDLLEERQKIKKKMKATIDPIERKLLDYRQRAIKILANSYYGYYGYARARWYCKECAESVTAWGREYITMTIKEIEEKYGFKVIYSDTDGFFATIPGADAETVKKKAMEFLKYINAKLPGALELEYEGFYKRGFFVTKKKYAVIDEEGKITTRGLEIVRRDWSEIAKETQARVLEALLKDGDVEKAVRIVKEVTEKLSKYEVPPEKLVIHEQITRDLKDYKATGPHVAVAKRLAARGVKIRPGTVISYIVLKGSGRIGDRAIPFDEFDPTKHKYDAEYYIENQVLPAVERILRAFGYRKEDLRYQKTRQVGLSAWLKPKGT

SEQ ID NO: 1291 - protein, 774 aa, synthetic construct
MILDTDYITEDGKPVMRIFKKENGEFKIEYDRTFEPYFYALLKDDSAIEEVKKITAERHGTVVTVKRVEKVQKKFLGRPVEVWKLYFTHWQDVPAIADKIREHPAVIDIYEYDIPFAKRYLIDKGLVPMEGDEELKMLAFDIETLYHEGEEFAEGPILMISYADEEGARVITWKNVDLPYVDVVSTEREMIKRFLRVVKEKDPDVLITYNGDNFDFAYLKKRCEKLGINFALGRDGSEPKIQRMGDRFAVEVKGRIHFDLYPVIRRTINLPTYTLEAVYEAVFGQPKEKVYAEEITTAWETGENLERVARYSMEDAKVTYELGKEFLPMEAQLSRLIGQSLWDVSRSSTGNLVEWFLLRKAYERNELAPNKPDEKELARRRQSYEGGYVKEPERGLWENIVYLDFRSLYPSIIITHNVSPDTLNREGCKEYDVAPQVGHRFCKDFPGFIPSLLGDLLEERQKIKKKMKATIDPIERKLLDYRQRAIKILANSYYGYYGYARARWYCKECAESVTAWGREYITMTIKEIEEKYGFKVIYSDTDGFFATIPGADAETVKKKAMEFLKYINAKLPGALELEYEGFYKRGFFVTKKKYAVIDEEGKITTRGLEIVRRDWSEIAKETQARVLEALLKDGDVEKAVRIVKEVTEKLSKYEVPPEKLVIHEQITRDLKDYKATGPHVAVAKRLAARGVKIRPGTVISYIVLKGSGRIGDRAIPFDEFDPTKHKYDAEYYIENQVLPAVERILRAFGYRKEDLRYQKTRQVGLSAWLKPKGT

SEQ ID NO: 1292 - protein, 774 aa, synthetic construct
MILDTDYITEDGKPVMRIFKKENGEFKIEYDRTFEPYFYALLKDDSAIEEVKKITAERHGTVVTVKRVEKVQKKFLGRPVEVWKLYFTHWQDVPAIFDKIREHPAVIDIYEYDIPFAKRYLIDKGLVPMEGDEELKMLAFDIETLYHEGEEFAEGPILMISYADEEGARVITWKNVDLPYVDVVSTEREMIKRFLRVVKEKDPDVLITYNGDNFDFAYLKKRCEKLGINFALGRDGSEPKIQRMGDRFAVEVKGRIHFDLYPVIRRTINLPTYTLEAVYEAVFGQPKEKVYAEEITTAWETGENLERVARYSMEDAKVTYELGKEFLPMEAQLSRLIGQSLWDVSRSSTGNLVEWFLLRKAYERNELAPNKPDEKELARRRQSYEGGYVKEPERGLWENIVYLDFRSLYPSIIITHNVSPDTLNREGCKEYDVAPQVGHRFCKDFPGFIPSLLGDLLEERQKIKKKMKATIDPIERKLLDYRQRAIKILANSYYGYYGYARARWYCKECAESVTAWGREYITMTIKEIEEKYGFKVIYSDTDGFFATIPGADAETVKKKAMEFLKYINAKLPGALELEYEGFYKRGFFVTKKKYAVIDEEGKITTRGLEIVRRDWSEIAKETQARVLEALLKDGDVEKAVRIVKEVTEKLSKYEVPPEKLVIHEQITRDLKDYKATGPHVAVAKRLAARGVKIRPGTVISYIVLKGSGRIGDRAIPFDEFDPTKHKYDAEYYIENQVLPAVERILRAFGYRKEDLRYQKTRQVGLSAWLKPKGT

SEQ ID NO: 1293 - protein, 774 aa, synthetic construct
MILDTDYITEDGKPVMRIFKKENGEFKIEYDRTFEPYFYALLKDDSAIEEVKKITAERHGTVVTVKRVEKVQKKFLGRPVEVWKLYFTHWQDVPAIHDKIREHPAVIDIYEYDIPFAKRYLIDKGLVPMEGDEELKMLAFDIETLYHEGEEFAEGPILMISYADEEGARVITWKNVDLPYVDVVSTEREMIKRFLRVVKEKDPDVLITYNGDNFDFAYLKKRCEKLGINFALGRDGSEPKIQRMGDRFAVEVKGRIHFDLYPVIRRTINLPTYTLEAVYEAVFGQPKEKVYAEEITTAWETGENLERVARYSMEDAKVTYELGKEFLPMEAQLSRLIGQSLWDVSRSSTGNLVEWFLLRKAYERNELAPNKPDEKELARRRQSYEGGYVKEPERGLWENIVYLDFRSLYPSIIITHNVSPDTLNREGCKEYDVAPQVGHRFCKDFPGFIPSLLGDLLEERQKIKKKMKATIDPIERKLLDYRQRAIKILANSYYGYYGYARARWYCKECAESVTAWGREYITMTIKEIEEKYGFKVIYSDTDGFFATIPGADAETVKKKAMEFLKYINAKLPGALELEYEGFYKRGFFVTKKKYAVIDEEGKITTRGLEIVRRDWSEIAKETQARVLEALLKDGDVEKAVRIVKEVTEKLSKYEVPPEKLVIHEQITRDLKDYKATGPHVAVAKRLAARGVKIRPGTVISYIVLKGSGRIGDRAIPFDEFDPTKHKYDAEYYIENQVLPAVERILRAFGYRKEDLRYQKTRQVGLSAWLKPKGT

SEQ ID NO: 1294 - protein, 774 aa, synthetic construct
MILDTDYITEDGKPVMRIFKKENGEFKIEYDRTFEPYFYALLKDDSAIEEVKKITAERHGTVVTVKRVEKVQKKFLGRPVEVWKLYFTHWQDVPAIWDKIREHPAVIDIYEYDIPFAKRYLIDKGLVPMEGDEELKMLAFDIETLYHEGEEFAEGPILMISYADEEGARVITWKNVDLPYVDVVSTEREMIKRFLRVVKEKDPDVLITYNGDNFDFAYLKKRCEKLGINFALGRDGSEPKIQRMGDRFAVEVKGRIHFDLYPVIRRTINLPTYTLEAVYEAVFGQPKEKVYAEEITTAWETGENLERVARYSMEDAKVTYELGKEFLPMEAQLSRLIGQSLWDVSRSSTGNLVEWFLLRKAYERNELAPNKPDEKELARRRQSYEGGYVKEPERGLWENIVYLDFRSLYPSIIITHNVSPDTLNREGCKEYDVAPQVGHRFCKDFPGFIPSLLGDLLEERQKIKKKMKATIDPIERKLLDYRQRAIKILANSYYGYYGYARARWYCKECAESVTAWGREYITMTIKEIEEKYGFKVIYSDTDGFFATIPGADAETVKKKAMEFLKYINAKLPGALELEYEGFYKRGFFVTKKKYAVIDEEGKITTRGLEIVRRDWSEIAKETQARVLEALLKDGDVEKAVRIVKEVTEKLSKYEVPPEKLVIHEQITRDLKDYKATGPHVAVAKRLAARGVKIRPGTVISYIVLKGSGRIGDRAIPFDEFDPTKHKYDAEYYIENQVLPAVERILRAFGYRKEDLRYQKTRQVGLSAWLKPKGT

SEQ ID NO: 1295 - protein, 774 aa, synthetic construct
MILDTDYITEDGKPVMRIFKKENGEFKIEYDRTFEPYFYALLKDDSAIEEVKKITAERHGTVVTVKRVEKVQKKFLGRPVEVWKLYFTHWQDIPAIRDKIREHPAVIDIYEYDIPFAKRYLIDKGLVPMEGDEELKMLAFDIETLYHEGEEFAEGPILMISYADEEGARVITWKNVDLPYVDVVSTEREMIKRFLRVVKEKDPDVLITYNGDNFDFAYLKKRCEKLGINFALGRDGSEPKIQRMGDRFAVEVKGRIHFDLYPVIRRTINLPTYTLEAVYEAVFGQPKEKVYAEEITTAWETGENLERVARYSMEDAKVTYELGKEFLPMEAQLSRLIGQSLWDVSRSSTGNLVEWFLLRKAYERNELAPNKPDEKELARRRQSYEGGYVKEPERGLWENIVYLDFRSLYPSIIITHNVSPDTLNREGCKEYDVAPQVGHRFCKDFPGFIPSLLGDLLEERQKIKKKMKATIDPIERKLLDYRQRAIKILANSYYGYYGYARARWYCKECAESVTAWGREYITMTIKEIEEKYGFKVIYSDTDGFFATIPGADAETVKKKAMEFLKYINAKLPGALELEYEGFYKRGFFVTKKKYAVIDEEGKITTRGLEIVRRDWSEIAKETQARVLEALLKDGDVEKAVRIVKEVTEKLSKYEVPPEKLVIHEQITRDLKDYKATGPHVAVAKRLAARGVKIRPGTVISYIVLKGSGRIGDRAIPFDEFDPTKHKYDAEYYIENQVLPAVERILRAFGYRKEDLRYQKTRQVGLSAWLKPKGT

SEQ ID NO: 1296 - protein, 774 aa, synthetic construct
MILDTDYITEDGKPVMRIFKKENGEFKIEYDRTFEPYFYALLKDDSAIEEVKKITAERHGTVVTVKRVEKVQKKFLGRPVEVWKLYFTHWQDIPAIADKIREHPAVIDIYEYDIPFAKRYLIDKGLVPMEGDEELKMLAFDIETLYHEGEEFAEGPILMISYADEEGARVITWKNVDLPYVDVVSTEREMIKRFLRVVKEKDPDVLITYNGDNFDFAYLKKRCEKLGINFALGRDGSEPKIQRMGDRFAVEVKGRIHFDLYPVIRRTINLPTYTLEAVYEAVFGQPKEKVYAEEITTAWETGENLERVARYSMEDAKVTYELGKEFLPMEAQLSRLIGQSLWDVSRSSTGNLVEWFLLRKAYERNELAPNKPDEKELARRRQSYEGGYVKEPERGLWENIVYLDFRSLYPSIIITHNVSPDTLNREGCKEYDVAPQVGHRFCKDFPGFIPSLLGDLLEERQKIKKKMKATIDPIERKLLDYRQRAIKILANSYYGYYGYARARWYCKECAESVTAWGREYITMTIKEIEEKYGFKVIYSDTDGFFATIPGADAETVKKKAMEFLKYINAKLPGALELEYEGFYKRGFFVTKKKYAVIDEEGKITTRGLEIVRRDWSEIAKETQARVLEALLKDGDVEKAVRIVKEVTEKLSKYEVPPEKLVIHEQITRDLKDYKATGPHVAVAKRLAARGVKIRPGTVISYIVLKGSGRIGDRAIPFDEFDPTKHKYDAEYYIENQVLPAVERILRAFGYRKEDLRYQKTRQVGLSAWLKPKGT

SEQ ID NO: 1297 - protein, 774 aa, synthetic construct
MILDTDYITEDGKPVMRIFKKENGEFKIEYDRTFEPYFYALLKDDSAIEEVKKITAERHGTVVTVKRVEKVQKKFLGRPVEVWKLYFTHWQDIPAIFDKIREHPAVIDIYEYDIPFAKRYLIDKGLVPMEGDEELKMLAFDIETLYHEGEEFAEGPILMISYADEEGARVITWKNVDLPYVDVVSTEREMIKRFLRVVKEKDPDVLITYNGDNFDFAYLKKRCEKLGINFALGRDGSEPKIQRMGDRFAVEVKGRIHFDLYPVIRRTINLPTYTLEAVYEAVFGQPKEKVYAEEITTAWETGENLERVARYSMEDAKVTYELGKEFLPMEAQLSRLIGQSLWDVSRSSTGNLVEWFLLRKAYERNELAPNKPDEKELARRRQSYEGGYVKEPERGLWENIVYLDFRSLYPSIIITHNVSPDTLNREGCKEYDVAPQVGHRFCKDFPGFIPSLLGDLLEERQKIKKKMKATIDPIERKLLDYRQRAIKILANSYYGYYGYARARWYCKECAESVTAWGREYITMTIKEIEEKYGFKVIYSDTDGFFATIPGADAETVKKKAMEFLKYINAKLPGALELEYEGFYKRGFFVTKKKYAVIDEEGKITTRGLEIVRRDWSEIAKETQARVLEALLKDGDVEKAVRIVKEVTEKLSKYEVPPEKLVIHEQITRDLKDYKATGPHVAVAKRLAARGVKIRPGTVISYIVLKGSGRIGDRAIPFDEFDPTKHKYDAEYYIENQVLPAVERILRAFGYRKEDLRYQKTRQVGLSAWLKPKGT

SEQ ID NO: 1298 - protein, 774 aa, synthetic construct
MILDTDYITEDGKPVMRIFKKENGEFKIEYDRTFEPYFYALLKDDSAIEEVKKITAERHGTVVTVKRVEKVQKKFLGRPVEVWKLYFTHWQDIPAIHDKIREHPAVIDIYEYDIPFAKRYLIDKGLVPMEGDEELKMLAFDIETLYHEGEEFAEGPILMISYADEEGARVITWKNVDLPYVDVVSTEREMIKRFLRVVKEKDPDVLITYNGDNFDFAYLKKRCEKLGINFALGRDGSEPKIQRMGDRFAVEVKGRIHFDLYPVIRRTINLPTYTLEAVYEAVFGQPKEKVYAEEITTAWETGENLERVARYSMEDAKVTYELGKEFLPMEAQLSRLIGQSLWDVSRSSTGNLVEWFLLRKAYERNELAPNKPDEKELARRRQSYEGGYVKEPERGLWENIVYLDFRSLYPSIIITHNVSPDTLNREGCKEYDVAPQVGHRFCKDFPGFIPSLLGDLLEERQKIKKKMKATIDPIERKLLDYRQRAIKILANSYYGYYGYARARWYCKECAESVTAWGREYITMTIKEIEEKYGFKVIYSDTDGFFATIPGADAETVKKKAMEFLKYINAKLPGALELEYEGFYKRGFFVTKKKYAVIDEEGKITTRGLEIVRRDWSEIAKETQARVLEALLKDGDVEKAVRIVKEVTEKLSKYEVPPEKLVIHEQITRDLKDYKATGPHVAVAKRLAARGVKIRPGTVISYIVLKGSGRIGDRAIPFDEFDPTKHKYDAEYYIENQVLPAVERILRAFGYRKEDLRYQKTRQVGLSAWLKPKGT

SEQ ID NO: 1299 - protein, 774 aa, synthetic construct
MILDTDYITEDGKPVMRIFKKENGEFKIEYDRTFEPYFYALLKDDSAIEEVKKITAERHGTVVTVKRVEKVQKKFLGRPVEVWKLYFTHWQDIPAIWDKIREHPAVIDIYEYDIPFAKRYLIDKGLVPMEGDEELKMLAFDIETLYHEGEEFAEGPILMISYADEEGARVITWKNVDLPYVDVVSTEREMIKRFLRVVKEKDPDVLITYNGDNFDFAYLKKRCEKLGINFALGRDGSEPKIQRMGDRFAVEVKGRIHFDLYPVIRRTINLPTYTLEAVYEAVFGQPKEKVYAEEITTAWETGENLERVARYSMEDAKVTYELGKEFLPMEAQLSRLIGQSLWDVSRSSTGNLVEWFLLRKAYERNELAPNKPDEKELARRRQSYEGGYVKEPERGLWENIVYLDFRSLYPSIIITHNVSPDTLNREGCKEYDVAPQVGHRFCKDFPGFIPSLLGDLLEERQKIKKKMKATIDPIERKLLDYRQRAIKILANSYYGYYGYARARWYCKECAESVTAWGREYITMTIKEIEEKYGFKVIYSDTDGFFATIPGADAETVKKKAMEFLKYINAKLPGALELEYEGFYKRGFFVTKKKYAVIDEEGKITTRGLEIVRRDWSEIAKETQARVLEALLKDGDVEKAVRIVKEVTEKLSKYEVPPEKLVIHEQITRDLKDYKATGPHVAVAKRLAARGVKIRPGTVISYIVLKGSGRIGDRAIPFDEFDPTKHKYDAEYYIENQVLPAVERILRAFGYRKEDLRYQKTRQVGLSAWLKPKGT

SEQ ID NO: 1300 - protein, 774 aa, synthetic construct
MILDTDYITEDGKPVMRIFKKENGEFKIEYDRTFEPYFYALLKDDSAIEEVKKITAERHGTVVTVKRVEKVQKKFLGRPVEVWKLYFTHWQDQPAIRDKIREHPAVIDIYEYDIPFAKRYLIDKGLVPMEGDEELKMLAFDIETLYHEGEEFAEGPILMISYADEEGARVITWKNVDLPYVDVVSTEREMIKRFLRVVKEKDPDVLITYNGDNFDFAYLKKRCEKLGINFALGRDGSEPKIQRMGDRFAVEVKGRIHFDLYPVIRRTINLPTYTLEAVYEAVFGQPKEKVYAEEITTAWETGENLERVARYSMEDAKVTYELGKEFLPMEAQLSRLIGQSLWDVSRSSTGNLVEWFLLRKAYERNELAPNKPDEKELARRRQSYEGGYVKEPERGLWENIVYLDFRSLYPSIIITHNVSPDTLNREGCKEYDVAPQVGHRFCKDFPGFIPSLLGDLLEERQKIKKKMKATIDPIERKLLDYRQRAIKILANSYYGYYGYARARWYCKECAESVTAWGREYITMTIKEIEEKYGFKVIYSDTDGFFATIPGADAETVKKKAMEFLKYINAKLPGALELEYEGFYKRGFFVTKKKYAVIDEEGKITTRGLEIVRRDWSEIAKETQARVLEALLKDGDVEKAVRIVKEVTEKLSKYEVPPEKLVIHEQITRDLKDYKATGPHVAVAKRLAARGVKIRPGTVISYIVLKGSGRIGDRAIPFDEFDPTKHKYDAEYYIENQVLPAVERILRAFGYRKEDLRYQKTRQVGLSAWLKPKGT

SEQ ID NO: 1301 - protein, 774 aa, synthetic construct
MILDTDYITEDGKPVMRIFKKENGEFKIEYDRTFEPYFYALLKDDSAIEEVKKITAERHGTVVTVKRVEKVQKKFLGRPVEVWKLYFTHWQDQPAIWDKIREHPAVIDIYEYDIPFAKRYLIDKGLVPMEGDEELKMLAFDIETLYHEGEEFAEGPILMISYADEEGARVITWKNVDLPYVDVVSTEREMIKRFLRVVKEKDPDVLITYNGDNFDFAYLKKRCEKLGINFALGRDGSEPKIQRMGDRFAVEVKGRIHFDLYPVIRRTINLPTYTLEAVYEAVFGQPKEKVYAEEITTAWETGENLERVARYSMEDAKVTYELGKEFLPMEAQLSRLIGQSLWDVSRSSTGNLVEWFLLRKAYERNELAPNKPDEKELARRRQSYEGGYVKEPERGLWENIVYLDFRSLYPSIIITHNVSPDTLNREGCKEYDVAPQVGHRFCKDFPGFIPSLLGDLLEERQKIKKKMKATIDPIERKLLDYRQRAIKILANSYYGYYGYARARWYCKECAESVTAWGREYITMTIKEIEEKYGFKVIYSDTDGFFATIPGADAETVKKKAMEFLKYINAKLPGALELEYEGFYKRGFFVTKKKYAVIDEEGKITTRGLEIVRRDWSEIAKETQARVLEALLKDGDVEKAVRIVKEVTEKLSKYEVPPEKLVIHEQITRDLKDYKATGPHVAVAKRLAARGVKIRPGTVISYIVLKGSGRIGDRAIPFDEFDPTKHKYDAEYYIENQVLPAVERILRAFGYRKEDLRYQKTRQVGLSAWLKPKGT

SEQ ID NO: 1302 - protein, 774 aa, synthetic construct
MILDTDYITEDGKPVMRIFKKENGEFKIEYDRTFEPYFYALLKDDSAIEEVKKITAERHGTVVTVKRVEKVQKKFLGRPVEVWKLYFTHWQDRPAIRDKIREHPAVIDIYEYDIPFAKRYLIDKGLVPMEGDEELKMLAFDIETLYHEGEEFAEGPILMISYADEEGARVITWKNVDLPYVDVVSTEREMIKRFLRVVKEKDPDVLITYNGDNFDFAYLKKRCEKLGINFALGRDGSEPKIQRMGDRFAVEVKGRIHFDLYPVIRRTINLPTYTLEAVYEAVFGQPKEKVYAEEITTAWETGENLERVARYSMEDAKVTYELGKEFLPMEAQLSRLIGQSLWDVSRSSTGNLVEWFLLRKAYERNELAPNKPDEKELARRRQSYEGGYVKEPERGLWENIVYLDFRSLYPSIIITHNVSPDTLNREGCKEYDVAPQVGHRFCKDFPGFIPSLLGDLLEERQKIKKKMKATIDPIERKLLDYRQRAIKILANSYYGYYGYARARWYCKECAESVTAWGREYITMTIKEIEEKYGFKVIYSDTDGFFATIPGADAETVKKKAMEFLKYINAKLPGALELEYEGFYKRGFFVTKKKYAVIDEEGKITTRGLEIVRRDWSEIAKETQARVLEALLKDGDVEKAVRIVKEVTEKLSKYEVPPEKLVIHEQITRDLKDYKATGPHVAVAKRLAARGVKIRPGTVISYIVLKGSGRIGDRAIPFDEFDPTKHKYDAEYYIENQVLPAVERILRAFGYRKEDLRYQKTRQVGLSAWLKPKGT

SEQ ID NO: 1303 - protein, 774 aa, synthetic construct
MILDTDYITEDGKPVMRIFKKENGEFKIEYDRTFEPYFYALLKDDSAIEEVKKITAERHGTVVTVKRVEKVQKKFLGRPVEVWKLYFTHWQDRPAIADKIREHPAVIDIYEYDIPFAKRYLIDKGLVPMEGDEELKMLAFDIETLYHEGEEFAEGPILMISYADEEGARVITWKNVDLPYVDVVSTEREMIKRFLRVVKEKDPDVLITYNGDNFDFAYLKKRCEKLGINFALGRDGSEPKIQRMGDRFAVEVKGRIHFDLYPVIRRTINLPTYTLEAVYEAVFGQPKEKVYAEEITTAWETGENLERVARYSMEDAKVTYELGKEFLPMEAQLSRLIGQSLWDVSRSSTGNLVEWFLLRKAYERNELAPNKPDEKELARRRQSYEGGYVKEPERGLWENIVYLDFRSLYPSIIITHNVSPDTLNREGCKEYDVAPQVGHRFCKDFPGFIPSLLGDLLEERQKIKKKMKATIDPIERKLLDYRQRAIKILANSYYGYYGYARARWYCKECAESVTAWGREYITMTIKEIEEKYGFKVIYSDTDGFFATIPGADAETVKKKAMEFLKYINAKLPGALELEYEGFYKRGFFVTKKKYAVIDEEGKITTRGLEIVRRDWSEIAKETQARVLEALLKDGDVEKAVRIVKEVTEKLSKYEVPPEKLVIHEQITRDLKDYKATGPHVAVAKRLAARGVKIRPGTVISYIVLKGSGRIGDRAIPFDEFDPTKHKYDAEYYIENQVLPAVERILRAFGYRKEDLRYQKTRQVGLSAWLKPKGT

SEQ ID NO: 1304 - protein, 774 aa, synthetic construct
MILDTDYITEDGKPVMRIFKKENGEFKIEYDRTFEPYFYALLKDDSAIEEVKKITAERHGTVVTVKRVEKVQKKFLGRPVEVWKLYFTHYQDVPAIRDKIREHPAVIDIYEYDIPFAKRYLIDKGLVPMEGDEELKMLAFDIETLYHEGEEFAEGPILMISYADEEGARVITWKNVDLPYVDVVSTEREMIKRFLRVVKEKDPDVLITYNGDNFDFAYLKKRCEKLGINFALGRDGSEPKIQRMGDRFAVEVKGRIHFDLYPVIRRTINLPTYTLEAVYEAVFGQPKEKVYAEEITTAWETGENLERVARYSMEDAKVTYELGKEFLPMEAQLSRLIGQSLWDVSRSSTGNLVEWFLLRKAYERNELAPNKPDEKELARRRQSYEGGYVKEPERGLWENIVYLDFRSLYPSIIITHNVSPDTLNREGCKEYDVAPQVGHRFCKDFPGFIPSLLGDLLEERQKIKKKMKATIDPIERKLLDYRQRAIKILANSYYGYYGYARARWYCKECAESVTAWGREYITMTIKEIEEKYGFKVIYSDTDGFFATIPGADAETVKKKAMEFLKYINAKLPGALELEYEGFYKRGFFVTKKKYAVIDEEGKITTRGLEIVRRDWSEIAKETQARVLEALLKDGDVEKAVRIVKEVTEKLSKYEVPPEKLVIHEQITRDLKDYKATGPHVAVAKRLAARGVKIRPGTVISYIVLKGSGRIGDRAIPFDEFDPTKHKYDAEYYIENQVLPAVERILRAFGYRKEDLRYQKTRQVGLSAWLKPKGT

SEQ ID NO: 1305 - protein, 774 aa, synthetic construct
MILDTDYITEDGKPVMRIFKKENGEFKIEYDRTFEPYFYALLKDDSAIEEVKKITAERHGTVVTVKRVEKVQKKFLGRPVEVWKLYFTHYQDVPAIFDKIREHPAVIDIYEYDIPFAKRYLIDKGLVPMEGDEELKMLAFDIETLYHEGEEFAEGPILMISYADEEGARVITWKNVDLPYVDVVSTEREMIKRFLRVVKEKDPDVLITYNGDNFDFAYLKKRCEKLGINFALGRDGSEPKIQRMGDRFAVEVKGRIHFDLYPVIRRTINLPTYTLEAVYEAVFGQPKEKVYAEEITTAWETGENLERVARYSMEDAKVTYELGKEFLPMEAQLSRLIGQSLWDVSRSSTGNLVEWFLLRKAYERNELAPNKPDEKELARRRQSYEGGYVKEPERGLWENIVYLDFRSLYPSIIITHNVSPDTLNREGCKEYDVAPQVGHRFCKDFPGFIPSLLGDLLEERQKIKKKMKATIDPIERKLLDYRQRAIKILANSYYGYYGYARARWYCKECAESVTAWGREYITMTIKEIEEKYGFKVIYSDTDGFFATIPGADAETVKKKAMEFLKYINAKLPGALELEYEGFYKRGFFVTKKKYAVIDEEGKITTRGLEIVRRDWSEIAKETQARVLEALLKDGDVEKAVRIVKEVTEKLSKYEVPPEKLVIHEQITRDLKDYKATGPHVAVAKRLAARGVKIRPGTVISYIVLKGSGRIGDRAIPFDEFDPTKHKYDAEYYIENQVLPAVERILRAFGYRKEDLRYQKTRQVGLSAWLKPKGT

SEQ ID NO: 1306 - protein, 774 aa, synthetic construct
MILDTDYITEDGKPVMRIFKKENGEFKIEYDRTFEPYFYALLKDDSAIEEVKKITAERHGTVVTVKRVEKVQKKFLGRPVEVWKLYFTHYQDVPAIHDKIREHPAVIDIYEYDIPFAKRYLIDKGLVPMEGDEELKMLAFDIETLYHEGEEFAEGPILMISYADEEGARVITWKNVDLPYVDVVSTEREMIKRFLRVVKEKDPDVLITYNGDNFDFAYLKKRCEKLGINFALGRDGSEPKIQRMGDRFAVEVKGRIHFDLYPVIRRTINLPTYTLEAVYEAVFGQPKEKVYAEEITTAWETGENLERVARYSMEDAKVTYELGKEFLPMEAQLSRLIGQSLWDVSRSSTGNLVEWFLLRKAYERNELAPNKPDEKELARRRQSYEGGYVKEPERGLWENIVYLDFRSLYPSIIITHNVSPDTLNREGCKEYDVAPQVGHRFCKDFPGFIPSLLGDLLEERQKIKKKMKATIDPIERKLLDYRQRAIKILANSYYGYYGYARARWYCKECAESVTAWGREYITMTIKEIEEKYGFKVIYSDTDGFFATIPGADAETVKKKAMEFLKYINAKLPGALELEYEGFYKRGFFVTKKKYAVIDEEGKITTRGLEIVRRDWSEIAKETQARVLEALLKDGDVEKAVRIVKEVTEKLSKYEVPPEKLVIHEQITRDLKDYKATGPHVAVAKRLAARGVKIRPGTVISYIVLKGSGRIGDRAIPFDEFDPTKHKYDAEYYIENQVLPAVERILRAFGYRKEDLRYQKTRQVGLSAWLKPKGT

SEQ ID NO: 1307 - protein, 774 aa, synthetic construct
MILDTDYITEDGKPVMRIFKKENGEFKIEYDRTFEPYFYALLKDDSAIEEVKKITAERHGTVVTVKRVEKVQKKFLGRPVEVWKLYFTHYQDIPAIRDKIREHPAVIDIYEYDIPFAKRYLIDKGLVPMEGDEELKMLAFDIETLYHEGEEFAEGPILMISYADEEGARVITWKNVDLPYVDVVSTEREMIKRFLRVVKEKDPDVLITYNGDNFDFAYLKKRCEKLGINFALGRDGSEPKIQRMGDRFAVEVKGRIHFDLYPVIRRTINLPTYTLEAVYEAVFGQPKEKVYAEEITTAWETGENLERVARYSMEDAKVTYELGKEFLPMEAQLSRLIGQSLWDVSRSSTGNLVEWFLLRKAYERNELAPNKPDEKELARRRQSYEGGYVKEPERGLWENIVYLDFRSLYPSIIITHNVSPDTLNREGCKEYDVAPQVGHRFCKDFPGFIPSLLGDLLEERQKIKKKMKATIDPIERKLLDYRQRAIKILANSYYGYYGYARARWYCKECAESVTAWGREYITMTIKEIEEKYGFKVIYSDTDGFFATIPGADAETVKKKAMEFLKYINAKLPGALELEYEGFYKRGFFVTKKKYAVIDEEGKITTRGLEIVRRDWSEIAKETQARVLEALLKDGDVEKAVRIVKEVTEKLSKYEVPPEKLVIHEQITRDLKDYKATGPHVAVAKRLAARGVKIRPGTVISYIVLKGSGRIGDRAIPFDEFDPTKHKYDAEYYIENQVLPAVERILRAFGYRKEDLRYQKTRQVGLSAWLKPKGT

SEQ ID NO: 1308 - protein, 774 aa, synthetic construct
MILDTDYITEDGKPVMRIFKKENGEFKIEYDRTFEPYFYALLKDDSAIEEVKKITAERHGTVVTVKRVEKVQKKFLGRPVEVWKLYFTHYQDIPAIADKIREHPAVIDIYEYDIPFAKRYLIDKGLVPMEGDEELKMLAFDIETLYHEGEEFAEGPILMISYADEEGARVITWKNVDLPYVDVVSTEREMIKRFLRVVKEKDPDVLITYNGDNFDFAYLKKRCEKLGINFALGRDGSEPKIQRMGDRFAVEVKGRIHFDLYPVIRRTINLPTYTLEAVYEAVFGQPKEKVYAEEITTAWETGENLERVARYSMEDAKVTYELGKEFLPMEAQLSRLIGQSLWDVSRSSTGNLVEWFLLRKAYERNELAPNKPDEKELARRRQSYEGGYVKEPERGLWENIVYLDFRSLYPSIIITHNVSPDTLNREGCKEYDVAPQVGHRFCKDFPGFIPSLLGDLLEERQKIKKKMKATIDPIERKLLDYRQRAIKILANSYYGYYGYARARWYCKECAESVTAWGREYITMTIKEIEEKYGFKVIYSDTDGFFATIPGADAETVKKKAMEFLKYINAKLPGALELEYEGFYKRGFFVTKKKYAVIDEEGKITTRGLEIVRRDWSEIAKETQARVLEALLKDGDVEKAVRIVKEVTEKLSKYEVPPEKLVIHEQITRDLKDYKATGPHVAVAKRLAARGVKIRPGTVISYIVLKGSGRIGDRAIPFDEFDPTKHKYDAEYYIENQVLPAVERILRAFGYRKEDLRYQKTRQVGLSAWLKPKGT

SEQ ID NO: 1309 - protein, 774 aa, synthetic construct
MILDTDYITEDGKPVMRIFKKENGEFKIEYDRTFEPYFYALLKDDSAIEEVKKITAERHGTVVTVKRVEKVQKKFLGRPVEVWKLYFTHYQDIPAIFDKIREHPAVIDIYEYDIPFAKRYLIDKGLVPMEGDEELKMLAFDIETLYHEGEEFAEGPILMISYADEEGARVITWKNVDLPYVDVVSTEREMIKRFLRVVKEKDPDVLITYNGDNFDFAYLKKRCEKLGINFALGRDGSEPKIQRMGDRFAVEVKGRIHFDLYPVIRRTINLPTYTLEAVYEAVFGQPKEKVYAEEITTAWETGENLERVARYSMEDAKVTYELGKEFLPMEAQLSRLIGQSLWDVSRSSTGNLVEWFLLRKAYERNELAPNKPDEKELARRRQSYEGGYVKEPERGLWENIVYLDFRSLYPSIIITHNVSPDTLNREGCKEYDVAPQVGHRFCKDFPGFIPSLLGDLLEERQKIKKKMKATIDPIERKLLDYRQRAIKILANSYYGYYGYARARWYCKECAESVTAWGREYITMTIKEIEEKYGFKVIYSDTDGFFATIPGADAETVKKKAMEFLKYINAKLPGALELEYEGFYKRGFFVTKKKYAVIDEEGKITTRGLEIVRRDWSEIAKETQARVLEALLKDGDVEKAVRIVKEVTEKLSKYEVPPEKLVIHEQITRDLKDYKATGPHVAVAKRLAARGVKIRPGTVISYIVLKGSGRIGDRAIPFDEFDPTKHKYDAEYYIENQVLPAVERILRAFGYRKEDLRYQKTRQVGLSAWLKPKGT

SEQ ID NO: 1310 - protein, 774 aa, synthetic construct
MILDTDYITEDGKPVMRIFKKENGEFKIEYDRTFEPYFYALLKDDSAIEEVKKITAERHGTVVTVKRVEKVQKKFLGRPVEVWKLYFTHYQDIPAIHDKIREHPAVIDIYEYDIPFAKRYLIDKGLVPMEGDEELKMLAFDIETLYHEGEEFAEGPILMISYADEEGARVITWKNVDLPYVDVVSTEREMIKRFLRVVKEKDPDVLITYNGDNFDFAYLKKRCEKLGINFALGRDGSEPKIQRMGDRFAVEVKGRIHFDLYPVIRRTINLPTYTLEAVYEAVFGQPKEKVYAEEITTAWETGENLERVARYSMEDAKVTYELGKEFLPMEAQLSRLIGQSLWDVSRSSTGNLVEWFLLRKAYERNELAPNKPDEKELARRRQSYEGGYVKEPERGLWENIVYLDFRSLYPSIIITHNVSPDTLNREGCKEYDVAPQVGHRFCKDFPGFIPSLLGDLLEERQKIKKKMKATIDPIERKLLDYRQRAIKILANSYYGYYGYARARWYCKECAESVTAWGREYITMTIKEIEEKYGFKVIYSDTDGFFATIPGADAETVKKKAMEFLKYINAKLPGALELEYEGFYKRGFFVTKKKYAVIDEEGKITTRGLEIVRRDWSEIAKETQARVLEALLKDGDVEKAVRIVKEVTEKLSKYEVPPEKLVIHEQITRDLKDYKATGPHVAVAKRLAARGVKIRPGTVISYIVLKGSGRIGDRAIPFDEFDPTKHKYDAEYYIENQVLPAVERILRAFGYRKEDLRYQKTRQVGLSAWLKPKGT

SEQ ID NO: 1311 - protein, 774 aa, synthetic construct
MILDTDYITEDGKPVMRIFKKENGEFKIEYDRTFEPYFYALLKDDSAIEEVKKITAERHGTVVTVKRVEKVQKKFLGRPVEVWKLYFTHYQDIPAIWDKIREHPAVIDIYEYDIPFAKRYLIDKGLVPMEGDEELKMLAFDIETLYHEGEEFAEGPILMISYADEEGARVITWKNVDLPYVDVVSTEREMIKRFLRVVKEKDPDVLITYNGDNFDFAYLKKRCEKLGINFALGRDGSEPKIQRMGDRFAVEVKGRIHFDLYPVIRRTINLPTYTLEAVYEAVFGQPKEKVYAEEITTAWETGENLERVARYSMEDAKVTYELGKEFLPMEAQLSRLIGQSLWDVSRSSTGNLVEWFLLRKAYERNELAPNKPDEKELARRRQSYEGGYVKEPERGLWENIVYLDFRSLYPSIIITHNVSPDTLNREGCKEYDVAPQVGHRFCKDFPGFIPSLLGDLLEERQKIKKKMKATIDPIERKLLDYRQRAIKILANSYYGYYGYARARWYCKECAESVTAWGREYITMTIKEIEEKYGFKVIYSDTDGFFATIPGADAETVKKKAMEFLKYINAKLPGALELEYEGFYKRGFFVTKKKYAVIDEEGKITTRGLEIVRRDWSEIAKETQARVLEALLKDGDVEKAVRIVKEVTEKLSKYEVPPEKLVIHEQITRDLKDYKATGPHVAVAKRLAARGVKIRPGTVISYIVLKGSGRIGDRAIPFDEFDPTKHKYDAEYYIENQVLPAVERILRAFGYRKEDLRYQKTRQVGLSAWLKPKGT

SEQ ID NO: 1312 - protein, 774 aa, synthetic construct
MILDTDYITEDGKPVMRIFKKENGEFKIEYDRTFEPYFYALLKDDSAIEEVKKITAERHGTVVTVKRVEKVQKKFLGRPVEVWKLYFTHPQDVPAIADKIREHPAVIDIYEYDIPFAKRYLIDKGLVPMEGDEELKMLAFDIETLYHEGEEFAEGPILMISYADEEGARVITWKNVDLPYVDVVSTEREMIKRFLRVVKEKDPDVLITYNGDNFDFAYLKKRCEKLGINFALGRDGSEPKIQRMGDRFAVEVKGRIHFDLYPVIRRTINLPTYTLEAVYEAVFGQPKEKVYAEEITTAWETGENLERVARYSMEDAKVTYELGKEFLPMEAQLSRLIGQSLWDVSRSSTGNLVEWFLLRKAYERNELAPNKPDEKELARRRQSYEGGYVKEPERGLWENIVYLDFRSLYPSIIITHNVSPDTLNREGCKEYDVAPQVGHRFCKDFPGFIPSLLGDLLEERQKIKKKMKATIDPIERKLLDYRQRAIKILANSYYGYYGYARARWYCKECAESVTAWGREYITMTIKEIEEKYGFKVIYSDTDGFFATIPGADAETVKKKAMEFLKYINAKLPGALELEYEGFYKRGFFVTKKKYAVIDEEGKITTRGLEIVRRDWSEIAKETQARVLEALLKDGDVEKAVRIVKEVTEKLSKYEVPPEKLVIHEQITRDLKDYKATGPHVAVAKRLAARGVKIRPGTVISYIVLKGSGRIGDRAIPFDEFDPTKHKYDAEYYIENQVLPAVERILRAFGYRKEDLRYQKTRQVGLSAWLKPKGT

SEQ ID NO: 1313 - protein, 774 aa, synthetic construct
MILDTDYITEDGKPVMRIFKKENGEFKIEYDRTFEPYFYALLKDDSAIEEVKKITAERHGTVVTVKRVEKVQKKFLGRPVEVWKLYFTHPQDVPAIFDKIREHPAVIDIYEYDIPFAKRYLIDKGLVPMEGDEELKMLAFDIETLYHEGEEFAEGPILMISYADEEGARVITWKNVDLPYVDVVSTEREMIKRFLRVVKEKDPDVLITYNGDNFDFAYLKKRCEKLGINFALGRDGSEPKIQRMGDRFAVEVKGRIHFDLYPVIRRTINLPTYTLEAVYEAVFGQPKEKVYAEEITTAWETGENLERVARYSMEDAKVTYELGKEFLPMEAQLSRLIGQSLWDVSRSSTGNLVEWFLLRKAYERNELAPNKPDEKELARRRQSYEGGYVKEPERGLWENIVYLDFRSLYPSIIITHNVSPDTLNREGCKEYDVAPQVGHRFCKDFPGFIPSLLGDLLEERQKIKKKMKATIDPIERKLLDYRQRAIKILANSYYGYYGYARARWYCKECAESVTAWGREYITMTIKEIEEKYGFKVIYSDTDGFFATIPGADAETVKKKAMEFLKYINAKLPGALELEYEGFYKRGFFVTKKKYAVIDEEGKITTRGLEIVRRDWSEIAKETQARVLEALLKDGDVEKAVRIVKEVTEKLSKYEVPPEKLVIHEQITRDLKDYKATGPHVAVAKRLAARGVKIRPGTVISYIVLKGSGRIGDRAIPFDEFDPTKHKYDAEYYIENQVLPAVERILRAFGYRKEDLRYQKTRQVGLSAWLKPKGT

SEQ ID NO: 1314 - protein, 774 aa, synthetic construct
MILDTDYITEDGKPVMRIFKKENGEFKIEYDRTFEPYFYALLKDDSAIEEVKKITAERHGTVVTVKRVEKVQKKFLGRPVEVWKLYFTHPQDVPAIHDKIREHPAVIDIYEYDIPFAKRYLIDKGLVPMEGDEELKMLAFDIETLYHEGEEFAEGPILMISYADEEGARVITWKNVDLPYVDVVSTEREMIKRFLRVVKEKDPDVLITYNGDNFDFAYLKKRCEKLGINFALGRDGSEPKIQRMGDRFAVEVKGRIHFDLYPVIRRTINLPTYTLEAVYEAVFGQPKEKVYAEEITTAWETGENLERVARYSMEDAKVTYELGKEFLPMEAQLSRLIGQSLWDVSRSSTGNLVEWFLLRKAYERNELAPNKPDEKELARRRQSYEGGYVKEPERGLWENIVYLDFRSLYPSIIITHNVSPDTLNREGCKEYDVAPQVGHRFCKDFPGFIPSLLGDLLEERQKIKKKMKATIDPIERKLLDYRQRAIKILANSYYGYYGYARARWYCKECAESVTAWGREYITMTIKEIEEKYGFKVIYSDTDGFFATIPGADAETVKKKAMEFLKYINAKLPGALELEYEGFYKRGFFVTKKKYAVIDEEGKITTRGLEIVRRDWSEIAKETQARVLEALLKDGDVEKAVRIVKEVTEKLSKYEVPPEKLVIHEQITRDLKDYKATGPHVAVAKRLAARGVKIRPGTVISYIVLKGSGRIGDRAIPFDEFDPTKHKYDAEYYIENQVLPAVERILRAFGYRKEDLRYQKTRQVGLSAWLKPKGT

SEQ ID NO: 1315 - protein, 774 aa, synthetic construct
MILDTDYITEDGKPVMRIFKKENGEFKIEYDRTFEPYFYALLKDDSAIEEVKKITAERHGTVVTVKRVEKVQKKFLGRPVEVWKLYFTHPQDIPAIRDKIREHPAVIDIYEYDIPFAKRYLIDKGLVPMEGDEELKMLAFDIETLYHEGEEFAEGPILMISYADEEGARVITWKNVDLPYVDVVSTEREMIKRFLRVVKEKDPDVLITYNGDNFDFAYLKKRCEKLGINFALGRDGSEPKIQRMGDRFAVEVKGRIHFDLYPVIRRTINLPTYTLEAVYEAVFGQPKEKVYAEEITTAWETGENLERVARYSMEDAKVTYELGKEFLPMEAQLSRLIGQSLWDVSRSSTGNLVEWFLLRKAYERNELAPNKPDEKELARRRQSYEGGYVKEPERGLWENIVYLDFRSLYPSIIITHNVSPDTLNREGCKEYDVAPQVGHRFCKDFPGFIPSLLGDLLEERQKIKKKMKATIDPIERKLLDYRQRAIKILANSYYGYYGYARARWYCKECAESVTAWGREYITMTIKEIEEKYGFKVIYSDTDGFFATIPGADAETVKKKAMEFLKYINAKLPGALELEYEGFYKRGFFVTKKKYAVIDEEGKITTRGLEIVRRDWSEIAKETQARVLEALLKDGDVEKAVRIVKEVTEKLSKYEVPPEKLVIHEQITRDLKDYKATGPHVAVAKRLAARGVKIRPGTVISYIVLKGSGRIGDRAIPFDEFDPTKHKYDAEYYIENQVLPAVERILRAFGYRKEDLRYQKTRQVGLSAWLKPKGT

SEQ ID NO: 1316 - protein, 774 aa, synthetic construct
MILDTDYITEDGKPVMRIFKKENGEFKIEYDRTFEPYFYALLKDDSAIEEVKKITAERHGTVVTVKRVEKVQKKFLGRPVEVWKLYFTHPQDIPAIADKIREHPAVIDIYEYDIPFAKRYLIDKGLVPMEGDEELKMLAFDIETLYHEGEEFAEGPILMISYADEEGARVITWKNVDLPYVDVVSTEREMIKRFLRVVKEKDPDVLITYNGDNFDFAYLKKRCEKLGINFALGRDGSEPKIQRMGDRFAVEVKGRIHFDLYPVIRRTINLPTYTLEAVYEAVFGQPKEKVYAEEITTAWETGENLERVARYSMEDAKVTYELGKEFLPMEAQLSRLIGQSLWDVSRSSTGNLVEWFLLRKAYERNELAPNKPDEKELARRRQSYEGGYVKEPERGLWENIVYLDFRSLYPSIIITHNVSPDTLNREGCKEYDVAPQVGHRFCKDFPGFIPSLLGDLLEERQKIKKKMKATIDPIERKLLDYRQRAIKILANSYYGYYGYARARWYCKECAESVTAWGREYITMTIKEIEEKYGFKVIYSDTDGFFATIPGADAETVKKKAMEFLKYINAKLPGALELEYEGFYKRGFFVTKKKYAVIDEEGKITTRGLEIVRRDWSEIAKETQARVLEALLKDGDVEKAVRIVKEVTEKLSKYEVPPEKLVIHEQITRDLKDYKATGPHVAVAKRLAARGVKIRPGTVISYIVLKGSGRIGDRAIPFDEFDPTKHKYDAEYYIENQVLPAVERILRAFGYRKEDLRYQKTRQVGLSAWLKPKGT

SEQ ID NO: 1317 - protein, 774 aa, synthetic construct
MILDTDYITEDGKPVMRIFKKENGEFKIEYDRTFEPYFYALLKDDSAIEEVKKITAERHGTVVTVKRVEKVQKKFLGRPVEVWKLYFTHPQDIPAIFDKIREHPAVIDIYEYDIPFAKRYLIDKGLVPMEGDEELKMLAFDIETLYHEGEEFAEGPILMISYADEEGARVITWKNVDLPYVDVVSTEREMIKRFLRVVKEKDPDVLITYNGDNFDFAYLKKRCEKLGINFALGRDGSEPKIQRMGDRFAVEVKGRIHFDLYPVIRRTINLPTYTLEAVYEAVFGQPKEKVYAEEITTAWETGENLERVARYSMEDAKVTYELGKEFLPMEAQLSRLIGQSLWDVSRSSTGNLVEWFLLRKAYERNELAPNKPDEKELARRRQSYEGGYVKEPERGLWENIVYLDFRSLYPSIIITHNVSPDTLNREGCKEYDVAPQVGHRFCKDFPGFIPSLLGDLLEERQKIKKKMKATIDPIERKLLDYRQRAIKILANSYYGYYGYARARWYCKECAESVTAWGREYITMTIKEIEEKYGFKVIYSDTDGFFATIPGADAETVKKKAMEFLKYINAKLPGALELEYEGFYKRGFFVTKKKYAVIDEEGKITTRGLEIVRRDWSEIAKETQARVLEALLKDGDVEKAVRIVKEVTEKLSKYEVPPEKLVIHEQITRDLKDYKATGPHVAVAKRLAARGVKIRPGTVISYIVLKGSGRIGDRAIPFDEFDPTKHKYDAEYYIENQVLPAVERILRAFGYRKEDLRYQKTRQVGLSAWLKPKGT

SEQ ID NO: 1318 - protein, 774 aa, synthetic construct
MILDTDYITEDGKPVMRIFKKENGEFKIEYDRTFEPYFYALLKDDSAIEEVKKITAERHGTVVTVKRVEKVQKKFLGRPVEVWKLYFTHPQDIPAIHDKIREHPAVIDIYEYDIPFAKRYLIDKGLVPMEGDEELKMLAFDIETLYHEGEEFAEGPILMISYADEEGARVITWKNVDLPYVDVVSTEREMIKRFLRVVKEKDPDVLITYNGDNFDFAYLKKRCEKLGINFALGRDGSEPKIQRMGDRFAVEVKGRIHFDLYPVIRRTINLPTYTLEAVYEAVFGQPKEKVYAEEITTAWETGENLERVARYSMEDAKVTYELGKEFLPMEAQLSRLIGQSLWDVSRSSTGNLVEWFLLRKAYERNELAPNKPDEKELARRRQSYEGGYVKEPERGLWENIVYLDFRSLYPSIIITHNVSPDTLNREGCKEYDVAPQVGHRFCKDFPGFIPSLLGDLLEERQKIKKKMKATIDPIERKLLDYRQRAIKILANSYYGYYGYARARWYCKECAESVTAWGREYITMTIKEIEEKYGFKVIYSDTDGFFATIPGADAETVKKKAMEFLKYINAKLPGALELEYEGFYKRGFFVTKKKYAVIDEEGKITTRGLEIVRRDWSEIAKETQARVLEALLKDGDVEKAVRIVKEVTEKLSKYEVPPEKLVIHEQITRDLKDYKATGPHVAVAKRLAARGVKIRPGTVISYIVLKGSGRIGDRAIPFDEFDPTKHKYDAEYYIENQVLPAVERILRAFGYRKEDLRYQKTRQVGLSAWLKPKGT

SEQ ID NO: 1319 - protein, 774 aa, synthetic construct
MILDTDYITEDGKPVMRIFKKENGEFKIEYDRTFEPYFYALLKDDSAIEEVKKITAERHGTVVTVKRVEKVQKKFLGRPVEVWKLYFTHPQDIPAIWDKIREHPAVIDIYEYDIPFAKRYLIDKGLVPMEGDEELKMLAFDIETLYHEGEEFAEGPILMISYADEEGARVITWKNVDLPYVDVVSTEREMIKRFLRVVKEKDPDVLITYNGDNFDFAYLKKRCEKLGINFALGRDGSEPKIQRMGDRFAVEVKGRIHFDLYPVIRRTINLPTYTLEAVYEAVFGQPKEKVYAEEITTAWETGENLERVARYSMEDAKVTYELGKEFLPMEAQLSRLIGQSLWDVSRSSTGNLVEWFLLRKAYERNELAPNKPDEKELARRRQSYEGGYVKEPERGLWENIVYLDFRSLYPSIIITHNVSPDTLNREGCKEYDVAPQVGHRFCKDFPGFIPSLLGDLLEERQKIKKKMKATIDPIERKLLDYRQRAIKILANSYYGYYGYARARWYCKECAESVTAWGREYITMTIKEIEEKYGFKVIYSDTDGFFATIPGADAETVKKKAMEFLKYINAKLPGALELEYEGFYKRGFFVTKKKYAVIDEEGKITTRGLEIVRRDWSEIAKETQARVLEALLKDGDVEKAVRIVKEVTEKLSKYEVPPEKLVIHEQITRDLKDYKATGPHVAVAKRLAARGVKIRPGTVISYIVLKGSGRIGDRAIPFDEFDPTKHKYDAEYYIENQVLPAVERILRAFGYRKEDLRYQKTRQVGLSAWLKPKGT

SEQ ID NO: 1320 - protein, 774 aa, synthetic construct
MILDTDYITEDGKPVMRIFKKENGEFKIEYDRTFEPYFYALLKDDSAIEEVKKITAERHGTVVTVKRVEKVQKKFLGRPVEVWKLYFTHPQDIPAIRDKIREHPAVIDIYEYDIPFAKQYLIDKGLVPMEGDEELKMLAFDIETLYHEGEEFAEGPILMISYADEEGARVITWKNVDLPYVDVVSTEREMIKRFLRVVKEKDPDVLITYNGDNFDFAYLKKRCEKLGINFALGRDGSEPKIQRMGDRFAVEVKGRIHFDLYPVIRRTINLPTYTLEAVYEAVFGQPKEKVYAEEITTAWETGENLERVARYSMEDAKVTYELGKEFLPMEAQLSRLIGQSLWDVSRSSTGNLVEWFLLRKAYERNELAPNKPDEKELARRRQSYEGGYVKEPERGLWENIVYLDFRSLYPSIIITHNVSPDTLNREGCKEYDVAPQVGHRFCKDFPGFIPSLLGDLLEERQKIKKKMKATIDPIERKLLDYRQRAIKILANSYYGYYGYARARWYCKECAESVTAWGREYITMTIKEIEEKYGFKVIYSDTDGFFATIPGADAETVKKKAMEFLKYINAKLPGALELEYEGFYKRGFFVTKKKYAVIDEEGKITTRGLEIVRRDWSEIAKETQARVLEALLKDGDVEKAVRIVKEVTEKLSKYEVPPEKLVIHEQITRDLKDYKATGPHVAVAKRLAARGVKIRPGTVISYIVLKGSGRIGDRAIPFDEFDPTKHKYDAEYYIENQVLPAVERILRAFGYRKEDLRYQKTRQVGLSAWLKPKGT

SEQ ID NO: 1321 - protein, 774 aa, synthetic construct
MILDTDYITEDGKPVMRIFKKENGEFKIEYDRTFEPYFYALLKDDSAIEEVKKITAERHGTVVTVKRVEKVQKKFLGRPVEVWKLYFTHPQDKPAIRDKIREHPAVIDIYEYDIPFAKRYLIDKGLVPMEGDEELKMLAFDIETLYHEGEEFAEGPILMISYADEEGARVITWKNVDLPYVDVVSTEREMIKRFLRVVKEKDPDVLITYNGDNFDFAYLKKRCEKLGINFALGRDGSEPKIQRMGDRFAVEVKGRIHFDLYPVIRRTINLPTYTLEAVYEAVFGQPKEKVYAEEITTAWETGENLERVARYSMEDAKVTYELGKEFLPMEAQLSRLIGQSLWDVSRSSTGNLVEWFLLRKAYERNELAPNKPDEKELARRRQSYEGGYVKEPERGLWENIVYLDFRSLYPSIIITHNVSPDTLNREGCKEYDVAPQVGHRFCKDFPGFIPSLLGDLLEERQKIKKKMKATIDPIERKLLDYRQRAIKILANSYYGYYGYARARWYCKECAESVTAWGREYITMTIKEIEEKYGFKVIYSDTDGFFATIPGADAETVKKKAMEFLKYINAKLPGALELEYEGFYKRGFFVTKKKYAVIDEEGKITTRGLEIVRRDWSEIAKETQARVLEALLKDGDVEKAVRIVKEVTEKLSKYEVPPEKLVIHEQITRDLKDYKATGPHVAVAKRLAARGVKIRPGTVISYIVLKGSGRIGDRAIPFDEFDPTKHKYDAEYYIENQVLPAVERILRAFGYRKEDLRYQKTRQVGLSAWLKPKGT

SEQ ID NO: 1322 - protein, 774 aa, synthetic construct
MILDTDYITEDGKPVMRIFKKENGEFKIEYDRTFEPYFYALLKDDSAIEEVKKITAERHGTVVTVKRVEKVQKKFLGRPVEVWKLYFTHPQDKPAIADKIREHPAVIDIYEYDIPFAKRYLIDKGLVPMEGDEELKMLAFDIETLYHEGEEFAEGPILMISYADEEGARVITWKNVDLPYVDVVSTEREMIKRFLRVVKEKDPDVLITYNGDNFDFAYLKKRCEKLGINFALGRDGSEPKIQRMGDRFAVEVKGRIHFDLYPVIRRTINLPTYTLEAVYEAVFGQPKEKVYAEEITTAWETGENLERVARYSMEDAKVTYELGKEFLPMEAQLSRLIGQSLWDVSRSSTGNLVEWFLLRKAYERNELAPNKPDEKELARRRQSYEGGYVKEPERGLWENIVYLDFRSLYPSIIITHNVSPDTLNREGCKEYDVAPQVGHRFCKDFPGFIPSLLGDLLEERQKIKKKMKATIDPIERKLLDYRQRAIKILANSYYGYYGYARARWYCKECAESVTAWGREYITMTIKEIEEKYGFKVIYSDTDGFFATIPGADAETVKKKAMEFLKYINAKLPGALELEYEGFYKRGFFVTKKKYAVIDEEGKITTRGLEIVRRDWSEIAKETQARVLEALLKDGDVEKAVRIVKEVTEKLSKYEVPPEKLVIHEQITRDLKDYKATGPHVAVAKRLAARGVKIRPGTVISYIVLKGSGRIGDRAIPFDEFDPTKHKYDAEYYIENQVLPAVERILRAFGYRKEDLRYQKTRQVGLSAWLKPKGT

SEQ ID NO: 1323 - protein, 774 aa, synthetic construct
MILDTDYITEDGKPVMRIFKKENGEFKIEYDRTFEPYFYALLKDDSAIEEVKKITAERHGTVVTVKRVEKVQKKFLGRPVEVWKLYFTHPQDKPAIFDKIREHPAVIDIYEYDIPFAKRYLIDKGLVPMEGDEELKMLAFDIETLYHEGEEFAEGPILMISYADEEGARVITWKNVDLPYVDVVSTEREMIKRFLRVVKEKDPDVLITYNGDNFDFAYLKKRCEKLGINFALGRDGSEPKIQRMGDRFAVEVKGRIHFDLYPVIRRTINLPTYTLEAVYEAVFGQPKEKVYAEEITTAWETGENLERVARYSMEDAKVTYELGKEFLPMEAQLSRLIGQSLWDVSRSSTGNLVEWFLLRKAYERNELAPNKPDEKELARRRQSYEGGYVKEPERGLWENIVYLDFRSLYPSIIITHNVSPDTLNREGCKEYDVAPQVGHRFCKDFPGFIPSLLGDLLEERQKIKKKMKATIDPIERKLLDYRQRAIKILANSYYGYYGYARARWYCKECAESVTAWGREYITMTIKEIEEKYGFKVIYSDTDGFFATIPGADAETVKKKAMEFLKYINAKLPGALELEYEGFYKRGFFVTKKKYAVIDEEGKITTRGLEIVRRDWSEIAKETQARVLEALLKDGDVEKAVRIVKEVTEKLSKYEVPPEKLVIHEQITRDLKDYKATGPHVAVAKRLAARGVKIRPGTVISYIVLKGSGRIGDRAIPFDEFDPTKHKYDAEYYIENQVLPAVERILRAFGYRKEDLRYQKTRQVGLSAWLKPKGT

SEQ ID NO: 1324 - protein, 774 aa, synthetic construct
MILDTDYITEDGKPVMRIFKKENGEFKIEYDRTFEPYFYALLKDDSAIEEVKKITAERHGTVVTVKRVEKVQKKFLGRPVEVWKLYFTHPQDKPAIWDKIREHPAVIDIYEYDIPFAKRYLIDKGLVPMEGDEELKMLAFDIETLYHEGEEFAEGPILMISYADEEGARVITWKNVDLPYVDVVSTEREMIKRFLRVVKEKDPDVLITYNGDNFDFAYLKKRCEKLGINFALGRDGSEPKIQRMGDRFAVEVKGRIHFDLYPVIRRTINLPTYTLEAVYEAVFGQPKEKVYAEEITTAWETGENLERVARYSMEDAKVTYELGKEFLPMEAQLSRLIGQSLWDVSRSSTGNLVEWFLLRKAYERNELAPNKPDEKELARRRQSYEGGYVKEPERGLWENIVYLDFRSLYPSIIITHNVSPDTLNREGCKEYDVAPQVGHRFCKDFPGFIPSLLGDLLEERQKIKKKMKATIDPIERKLLDYRQRAIKILANSYYGYYGYARARWYCKECAESVTAWGREYITMTIKEIEEKYGFKVIYSDTDGFFATIPGADAETVKKKAMEFLKYINAKLPGALELEYEGFYKRGFFVTKKKYAVIDEEGKITTRGLEIVRRDWSEIAKETQARVLEALLKDGDVEKAVRIVKEVTEKLSKYEVPPEKLVIHEQITRDLKDYKATGPHVAVAKRLAARGVKIRPGTVISYIVLKGSGRIGDRAIPFDEFDPTKHKYDAEYYIENQVLPAVERILRAFGYRKEDLRYQKTRQVGLSAWLKPKGT

SEQ ID NO: 1325 - protein, 774 aa, synthetic construct
MILDTDYITEDGKPVMRIFKKENGEFKIEYDRTFEPYFYALLKDDSAIEEVKKITAERHGTVVTVKRVEKVQKKFLGRPVEVWKLYFTHPQDQPAIRDKIREHPAVIDIYEYDIPFAKRYLIDKGLVPMEGDEELKMLAFDIETLYHEGEEFAEGPILMISYADEEGARVITWKNVDLPYVDVVSTEREMIKRFLRVVKEKDPDVLITYNGDNFDFAYLKKRCEKLGINFALGRDGSEPKIQRMGDRFAVEVKGRIHFDLYPVIRRTINLPTYTLEAVYEAVFGQPKEKVYAEEITTAWETGENLERVARYSMEDAKVTYELGKEFLPMEAQLSRLIGQSLWDVSRSSTGNLVEWFLLRKAYERNELAPNKPDEKELARRRQSYEGGYVKEPERGLWENIVYLDFRSLYPSIIITHNVSPDTLNREGCKEYDVAPQVGHRFCKDFPGFIPSLLGDLLEERQKIKKKMKATIDPIERKLLDYRQRAIKILANSYYGYYGYARARWYCKECAESVTAWGREYITMTIKEIEEKYGFKVIYSDTDGFFATIPGADAETVKKKAMEFLKYINAKLPGALELEYEGFYKRGFFVTKKKYAVIDEEGKITTRGLEIVRRDWSEIAKETQARVLEALLKDGDVEKAVRIVKEVTEKLSKYEVPPEKLVIHEQITRDLKDYKATGPHVAVAKRLAARGVKIRPGTVISYIVLKGSGRIGDRAIPFDEFDPTKHKYDAEYYIENQVLPAVERILRAFGYRKEDLRYQKTRQVGLSAWLKPKGT

SEQ ID NO: 1326 - protein, 774 aa, synthetic construct
MILDTDYITEDGKPVMRIFKKENGEFKIEYDRTFEPYFYALLKDDSAIEEVKKITAERHGTVVTVKRVEKVQKKFLGRPVEVWKLYFTHPQDQPAIADKIREHPAVIDIYEYDIPFAKRYLIDKGLVPMEGDEELKMLAFDIETLYHEGEEFAEGPILMISYADEEGARVITWKNVDLPYVDVVSTEREMIKRFLRVVKEKDPDVLITYNGDNFDFAYLKKRCEKLGINFALGRDGSEPKIQRMGDRFAVEVKGRIHFDLYPVIRRTINLPTYTLEAVYEAVFGQPKEKVYAEEITTAWETGENLERVARYSMEDAKVTYELGKEFLPMEAQLSRLIGQSLWDVSRSSTGNLVEWFLLRKAYERNELAPNKPDEKELARRRQSYEGGYVKEPERGLWENIVYLDFRSLYPSIIITHNVSPDTLNREGCKEYDVAPQVGHRFCKDFPGFIPSLLGDLLEERQKIKKKMKATIDPIERKLLDYRQRAIKILANSYYGYYGYARARWYCKECAESVTAWGREYITMTIKEIEEKYGFKVIYSDTDGFFATIPGADAETVKKKAMEFLKYINAKLPGALELEYEGFYKRGFFVTKKKYAVIDEEGKITTRGLEIVRRDWSEIAKETQARVLEALLKDGDVEKAVRIVKEVTEKLSKYEVPPEKLVIHEQITRDLKDYKATGPHVAVAKRLAARGVKIRPGTVISYIVLKGSGRIGDRAIPFDEFDPTKHKYDAEYYIENQVLPAVERILRAFGYRKEDLRYQKTRQVGLSAWLKPKGT

SEQ ID NO: 1327 - protein, 774 aa, synthetic construct
MILDTDYITEDGKPVMRIFKKENGEFKIEYDRTFEPYFYALLKDDSAIEEVKKITAERHGTVVTVKRVEKVQKKFLGRPVEVWKLYFTHPQDQPAIFDKIREHPAVIDIYEYDIPFAKRYLIDKGLVPMEGDEELKMLAFDIETLYHEGEEFAEGPILMISYADEEGARVITWKNVDLPYVDVVSTEREMIKRFLRVVKEKDPDVLITYNGDNFDFAYLKKRCEKLGINFALGRDGSEPKIQRMGDRFAVEVKGRIHFDLYPVIRRTINLPTYTLEAVYEAVFGQPKEKVYAEEITTAWETGENLERVARYSMEDAKVTYELGKEFLPMEAQLSRLIGQSLWDVSRSSTGNLVEWFLLRKAYERNELAPNKPDEKELARRRQSYEGGYVKEPERGLWENIVYLDFRSLYPSIIITHNVSPDTLNREGCKEYDVAPQVGHRFCKDFPGFIPSLLGDLLEERQKIKKKMKATIDPIERKLLDYRQRAIKILANSYYGYYGYARARWYCKECAESVTAWGREYITMTIKEIEEKYGFKVIYSDTDGFFATIPGADAETVKKKAMEFLKYINAKLPGALELEYEGFYKRGFFVTKKKYAVIDEEGKITTRGLEIVRRDWSEIAKETQARVLEALLKDGDVEKAVRIVKEVTEKLSKYEVPPEKLVIHEQITRDLKDYKATGPHVAVAKRLAARGVKIRPGTVISYIVLKGSGRIGDRAIPFDEFDPTKHKYDAEYYIENQVLPAVERILRAFGYRKEDLRYQKTRQVGLSAWLKPKGT

SEQ ID NO: 1328 - protein, 774 aa, synthetic construct
MILDTDYITEDGKPVMRIFKKENGEFKIEYDRTFEPYFYALLKDDSAIEEVKKITAERHGTVVTVKRVEKVQKKFLGRPVEVWKLYFTHPQDQPAIHDKIREHPAVIDIYEYDIPFAKRYLIDKGLVPMEGDEELKMLAFDIETLYHEGEEFAEGPILMISYADEEGARVITWKNVDLPYVDVVSTEREMIKRFLRVVKEKDPDVLITYNGDNFDFAYLKKRCEKLGINFALGRDGSEPKIQRMGDRFAVEVKGRIHFDLYPVIRRTINLPTYTLEAVYEAVFGQPKEKVYAEEITTAWETGENLERVARYSMEDAKVTYELGKEFLPMEAQLSRLIGQSLWDVSRSSTGNLVEWFLLRKAYERNELAPNKPDEKELARRRQSYEGGYVKEPERGLWENIVYLDFRSLYPSIIITHNVSPDTLNREGCKEYDVAPQVGHRFCKDFPGFIPSLLGDLLEERQKIKKKMKATIDPIERKLLDYRQRAIKILANSYYGYYGYARARWYCKECAESVTAWGREYITMTIKEIEEKYGFKVIYSDTDGFFATIPGADAETVKKKAMEFLKYINAKLPGALELEYEGFYKRGFFVTKKKYAVIDEEGKITTRGLEIVRRDWSEIAKETQARVLEALLKDGDVEKAVRIVKEVTEKLSKYEVPPEKLVIHEQITRDLKDYKATGPHVAVAKRLAARGVKIRPGTVISYIVLKGSGRIGDRAIPFDEFDPTKHKYDAEYYIENQVLPAVERILRAFGYRKEDLRYQKTRQVGLSAWLKPKGT

SEQ ID NO: 1329 - protein, 774 aa, synthetic construct
MILDTDYITEDGKPVMRIFKKENGEFKIEYDRTFEPYFYALLKDDSAIEEVKKITAERHGTVVTVKRVEKVQKKFLGRPVEVWKLYFTHPQDQPAIWDKIREHPAVIDIYEYDIPFAKRYLIDKGLVPMEGDEELKMLAFDIETLYHEGEEFAEGPILMISYADEEGARVITWKNVDLPYVDVVSTEREMIKRFLRVVKEKDPDVLITYNGDNFDFAYLKKRCEKLGINFALGRDGSEPKIQRMGDRFAVEVKGRIHFDLYPVIRRTINLPTYTLEAVYEAVFGQPKEKVYAEEITTAWETGENLERVARYSMEDAKVTYELGKEFLPMEAQLSRLIGQSLWDVSRSSTGNLVEWFLLRKAYERNELAPNKPDEKELARRRQSYEGGYVKEPERGLWENIVYLDFRSLYPSIIITHNVSPDTLNREGCKEYDVAPQVGHRFCKDFPGFIPSLLGDLLEERQKIKKKMKATIDPIERKLLDYRQRAIKILANSYYGYYGYARARWYCKECAESVTAWGREYITMTIKEIEEKYGFKVIYSDTDGFFATIPGADAETVKKKAMEFLKYINAKLPGALELEYEGFYKRGFFVTKKKYAVIDEEGKITTRGLEIVRRDWSEIAKETQARVLEALLKDGDVEKAVRIVKEVTEKLSKYEVPPEKLVIHEQITRDLKDYKATGPHVAVAKRLAARGVKIRPGTVISYIVLKGSGRIGDRAIPFDEFDPTKHKYDAEYYIENQVLPAVERILRAFGYRKEDLRYQKTRQVGLSAWLKPKGT

SEQ ID NO: 1330 - protein, 774 aa, synthetic construct
MILDTDYITEDGKPVMRIFKKENGEFKIEYDRTFEPYFYALLKDDSAIEEVKKITAERHGTVVTVKRVEKVQKKFLGRPVEVWKLYFTHPQDRPAIRDKIREHPAVIDIYEYDIPFAKRYLIDKGLVPMEGDEELKMLAFDIETLYHEGEEFAEGPILMISYADEEGARVITWKNVDLPYVDVVSTEREMIKRFLRVVKEKDPDVLITYNGDNFDFAYLKKRCEKLGINFALGRDGSEPKIQRMGDRFAVEVKGRIHFDLYPVIRRTINLPTYTLEAVYEAVFGQPKEKVYAEEITTAWETGENLERVARYSMEDAKVTYELGKEFLPMEAQLSRLIGQSLWDVSRSSTGNLVEWFLLRKAYERNELAPNKPDEKELARRRQSYEGGYVKEPERGLWENIVYLDFRSLYPSIIITHNVSPDTLNREGCKEYDVAPQVGHRFCKDFPGFIPSLLGDLLEERQKIKKKMKATIDPIERKLLDYRQRAIKILANSYYGYYGYARARWYCKECAESVTAWGREYITMTIKEIEEKYGFKVIYSDTDGFFATIPGADAETVKKKAMEFLKYINAKLPGALELEYEGFYKRGFFVTKKKYAVIDEEGKITTRGLEIVRRDWSEIAKETQARVLEALLKDGDVEKAVRIVKEVTEKLSKYEVPPEKLVIHEQITRDLKDYKATGPHVAVAKRLAARGVKIRPGTVISYIVLKGSGRIGDRAIPFDEFDPTKHKYDAEYYIENQVLPAVERILRAFGYRKEDLRYQKTRQVGLSAWLKPKGT

SEQ ID NO: 1331 - protein, 774 aa, synthetic construct
MILDTDYITEDGKPVMRIFKKENGEFKIEYDRTFEPYFYALLKDDSAIEEVKKITAERHGTVVTVKRVEKVQKKFLGRPVEVWKLYFTHPQDRPAIADKIREHPAVIDIYEYDIPFAKRYLIDKGLVPMEGDEELKMLAFDIETLYHEGEEFAEGPILMISYADEEGARVITWKNVDLPYVDVVSTEREMIKRFLRVVKEKDPDVLITYNGDNFDFAYLKKRCEKLGINFALGRDGSEPKIQRMGDRFAVEVKGRIHFDLYPVIRRTINLPTYTLEAVYEAVFGQPKEKVYAEEITTAWETGENLERVARYSMEDAKVTYELGKEFLPMEAQLSRLIGQSLWDVSRSSTGNLVEWFLLRKAYERNELAPNKPDEKELARRRQSYEGGYVKEPERGLWENIVYLDFRSLYPSIIITHNVSPDTLNREGCKEYDVAPQVGHRFCKDFPGFIPSLLGDLLEERQKIKKKMKATIDPIERKLLDYRQRAIKILANSYYGYYGYARARWYCKECAESVTAWGREYITMTIKEIEEKYGFKVIYSDTDGFFATIPGADAETVKKKAMEFLKYINAKLPGALELEYEGFYKRGFFVTKKKYAVIDEEGKITTRGLEIVRRDWSEIAKETQARVLEALLKDGDVEKAVRIVKEVTEKLSKYEVPPEKLVIHEQITRDLKDYKATGPHVAVAKRLAARGVKIRPGTVISYIVLKGSGRIGDRAIPFDEFDPTKHKYDAEYYIENQVLPAVERILRAFGYRKEDLRYQKTRQVGLSAWLKPKGT

SEQ ID NO: 1332 - protein, 774 aa, synthetic construct
MILDTDYITEDGKPVMRIFKKENGEFKIEYDRTFEPYFYALLKDDSAIEEVKKITAERHGTVVTVKRVEKVQKKFLGRPVEVWKLYFTHPQDRPAIHDKIREHPAVIDIYEYDIPFAKRYLIDKGLVPMEGDEELKMLAFDIETLYHEGEEFAEGPILMISYADEEGARVITWKNVDLPYVDVVSTEREMIKRFLRVVKEKDPDVLITYNGDNFDFAYLKKRCEKLGINFALGRDGSEPKIQRMGDRFAVEVKGRIHFDLYPVIRRTINLPTYTLEAVYEAVFGQPKEKVYAEEITTAWETGENLERVARYSMEDAKVTYELGKEFLPMEAQLSRLIGQSLWDVSRSSTGNLVEWFLLRKAYERNELAPNKPDEKELARRRQSYEGGYVKEPERGLWENIVYLDFRSLYPSIIITHNVSPDTLNREGCKEYDVAPQVGHRFCKDFPGFIPSLLGDLLEERQKIKKKMKATIDPIERKLLDYRQRAIKILANSYYGYYGYARARWYCKECAESVTAWGREYITMTIKEIEEKYGFKVIYSDTDGFFATIPGADAETVKKKAMEFLKYINAKLPGALELEYEGFYKRGFFVTKKKYAVIDEEGKITTRGLEIVRRDWSEIAKETQARVLEALLKDGDVEKAVRIVKEVTEKLSKYEVPPEKLVIHEQITRDLKDYKATGPHVAVAKRLAARGVKIRPGTVISYIVLKGSGRIGDRAIPFDEFDPTKHKYDAEYYIENQVLPAVERILRAFGYRKEDLRYQKTRQVGLSAWLKPKGT

SEQ ID NO: 1333 - protein, 774 aa, synthetic construct
MILDTDYITEDGKPVMRIFKKENGEFKIEYDRTFEPYFYALLKDDSAIEEVKKITAERHGTVVTVKRVEKVQKKFLGRPVEVWKLYFTHPQDRPAIHDKIREHPAVIDIYEYDIPFAKQYLIDKGLVPMEGDEELKMLAFDIETLYHEGEEFAEGPILMISYADEEGARVITWKNVDLPYVDVVSTEREMIKRFLRVVKEKDPDVLITYNGDNFDFAYLKKRCEKLGINFALGRDGSEPKIQRMGDRFAVEVKGRIHFDLYPVIRRTINLPTYTLEAVYEAVFGQPKEKVYAEEITTAWETGENLERVARYSMEDAKVTYELGKEFLPMEAQLSRLIGQSLWDVSRSSTGNLVEWFLLRKAYERNELAPNKPDEKELARRRQSYEGGYVKEPERGLWENIVYLDFRSLYPSIIITHNVSPDTLNREGCKEYDVAPQVGHRFCKDFPGFIPSLLGDLLEERQKIKKKMKATIDPIERKLLDYRQRAIKILANSYYGYYGYARARWYCKECAESVTAWGREYITMTIKEIEEKYGFKVIYSDTDGFFATIPGADAETVKKKAMEFLKYINAKLPGALELEYEGFYKRGFFVTKKKYAVIDEEGKITTRGLEIVRRDWSEIAKETQARVLEALLKDGDVEKAVRIVKEVTEKLSKYEVPPEKLVIHEQITRDLKDYKATGPHVAVAKRLAARGVKIRPGTVISYIVLKGSGRIGDRAIPFDEFDPTKHKYDAEYYIENQVLPAVERILRAFGYRKEDLRYQKTRQVGLSAWLKPKGT

SEQ ID NO: 1334 - protein, 774 aa, synthetic construct
MILDTDYITEDGKPVMRIFKKENGEFKIEYDRTFEPYFYALLKDDSAIEEVKKITAERHGTVVTVKRVEKVQKKFLGRPVEVWKLYFTHPQDRPAIWDKIREHPAVIDIYEYDIPFAKRYLIDKGLVPMEGDEELKMLAFDIETLYHEGEEFAEGPILMISYADEEGARVITWKNVDLPYVDVVSTEREMIKRFLRVVKEKDPDVLITYNGDNFDFAYLKKRCEKLGINFALGRDGSEPKIQRMGDRFAVEVKGRIHFDLYPVIRRTINLPTYTLEAVYEAVFGQPKEKVYAEEITTAWETGENLERVARYSMEDAKVTYELGKEFLPMEAQLSRLIGQSLWDVSRSSTGNLVEWFLLRKAYERNELAPNKPDEKELARRRQSYEGGYVKEPERGLWENIVYLDFRSLYPSIIITHNVSPDTLNREGCKEYDVAPQVGHRFCKDFPGFIPSLLGDLLEERQKIKKKMKATIDPIERKLLDYRQRAIKILANSYYGYYGYARARWYCKECAESVTAWGREYITMTIKEIEEKYGFKVIYSDTDGFFATIPGADAETVKKKAMEFLKYINAKLPGALELEYEGFYKRGFFVTKKKYAVIDEEGKITTRGLEIVRRDWSEIAKETQARVLEALLKDGDVEKAVRIVKEVTEKLSKYEVPPEKLVIHEQITRDLKDYKATGPHVAVAKRLAARGVKIRPGTVISYIVLKGSGRIGDRAIPFDEFDPTKHKYDAEYYIENQVLPAVERILRAFGYRKEDLRYQKTRQVGLSAWLKPKGT

SEQ ID NO: 1335 - protein, 774 aa, synthetic construct
MILDTDYITEDGKPVMRIFKKENGEFKIEYDRTFEPYFYALLKDDSAIEEVKKITAERHGTVVTVKRVEKVQKKFLGRPVEVWKLYFTHPQDRPAIRDKIREHPAVIDIYEYDIPFAKMYLIDKGLVPMEGDEELKMLAFDIETLYHEGEEFAEGPILMISYADEEGARVITWKNVDLPYVDVVSTEREMIKRFLRVVKEKDPDVLITYNGDNFDFAYLKKRCEKLGINFALGRDGSEPKIQRMGDRFAVEVKGRIHFDLYPVIRRTINLPTYTLEAVYEAVFGQPKEKVYAEEITTAWETGENLERVARYSMEDAKVTYELGKEFLPMEAQLSRLIGQSLWDVSRSSTGNLVEWFLLRKAYERNELAPNKPDEKELARRRQSYEGGYVKEPERGLWENIVYLDFRSLYPSIIITHNVSPDTLNREGCKEYDVAPQVGHRFCKDFPGFIPSLLGDLLEERQKIKKKMKATIDPIERKLLDYRQRAIKILANSYYGYYGYARARWYCKECAESVTAWGREYITMTIKEIEEKYGFKVIYSDTDGFFATIPGADAETVKKKAMEFLKYINAKLPGALELEYEGFYKRGFFVTKKKYAVIDEEGKITTRGLEIVRRDWSEIAKETQARVLEALLKDGDVEKAVRIVKEVTEKLSKYEVPPEKLVIHEQITRDLKDYKATGPHVAVAKRLAARGVKIRPGTVISYIVLKGSGRIGDRAIPFDEFDPTKHKYDAEYYIENQVLPAVERILRAFGYRKEDLRYQKTRQVGLSAWLKPKGT

SEQ ID NO: 1336 - protein, 774 aa, synthetic construct
MILDTDYITEDGKPVMRIFKKENGEFKIEYDRTFEPYFYALLKDDSAIEEVKKITAERHGTVVTVKRVEKVQKKFLGRPVEVWKLYFTHPQDRPAIRDKIREHPAVIDIYEYDIPFAKQYLIDKGLVPMEGDEELKMLAFDIETLYHEGEEFAEGPILMISYADEEGARVITWKNVDLPYVDVVSTEREMIKRFLRVVKEKDPDVLITYNGDNFDFAYLKKRCEKLGINFALGRDGSEPKIQRMGDRFAVEVKGRIHFDLYPVIRRTINLPTYTLEAVYEAVFGQPKEKVYAEEITTAWETGENLERVARYSMEDAKVTYELGKEFLPMEAQLSRLIGQSLWDVSRSSTGNLVEWFLLRKAYERNELAPNKPDEKELARRRQSYEGGYVKEPERGLWENIVYLDFRSLYPSIIITHNVSPDTLNREGCKEYDVAPQVGHRFCKDFPGFIPSLLGDLLEERQKIKKKMKATIDPIERKLLDYRQRAIKILANSYYGYYGYARARWYCKECAESVTAWGREYITMTIKEIEEKYGFKVIYSDTDGFFATIPGADAETVKKKAMEFLKYINAKLPGALELEYEGFYKRGFFVTKKKYAVIDEEGKITTRGLEIVRRDWSEIAKETQARVLEALLKDGDVEKAVRIVKEVTEKLSKYEVPPEKLVIHEQITRDLKDYKATGPHVAVAKRLAARGVKIRPGTVISYIVLKGSGRIGDRAIPFDEFDPTKHKYDAEYYIENQVLPAVERILRAFGYRKEDLRYQKTRQVGLSAWLKPKGT

SEQ ID NO: 1337 - protein, 774 aa, synthetic construct
MILDTDYITEDGKPVWRIFKKENGEFKIEYDRTFEAYFYALLKDDSAIEEVKKITAERHGTVVTVKRVEKVQKKFLGRPVEVWKLYFTHPQDVPAIRDKIREHPAVIDIYEYDIPFAKRYLIDKGLVPMEGDEELKMLAFDIETLYHEGEEFAEGPILMISYADEEGARVITWKNVDLPYVDVVSTEREMIKRFLRVVKEKDPDVLITYNGDNFDFAYLKKRCEKLGINFALGRDGSEPKIQRMGDRFAVEVKGRIHFDLYPVIRRTINLPTYTLEAVYEAVFGQPKEKVYAEEITTAWETGENLERVARYSMEDAKVTYELGKEFLPMEAQLSRLIGQSLWDVSRSSTGNLVEWFLLRKAYERNELAPNKPDEKELARRRQSYEGGYVKEPERGLWENIVYLDFRSLYPSIIITHNVSPDTLNREGCKEYDVAPQVGHRFCKDFPGFIPSLLGDLLEERQKIKKKMKATIDPIERKLLDYRQRAIKILANSYYGYYGYARARWYCKECAESVTAWGREYITMTIKEIEEKYGFKVIYSDTDGFFATIPGADAETVKKKAMEFLKYINAKLPGALELEYEGFYKRGFFVTKKKYAVIDEEGKITTRGLEIVRRDWSEIAKETQARVLEALLKDGDVEKAVRIVKEVTEKLSKYEVPPEKLVIHEQITRDLKDYKATGPHVAVAKRLAARGVKIRPGTVISYIVLKGSGRIGDRAIPFDEFDPTKHKYDAEYYIENQVLPAVERILRAFGYRKEDLRYQKTRQVGLSAWLKPKGT

SEQ ID NO: 1338 - protein, 774 aa, synthetic construct
MILDTDYITEDGKPVWRIFKKENGEFKIEYDRTFEAYFYALLKDDSAIEEVKKITAERHGTVVTVKRVEKVQKKFLGRPVEVWKLYFTHFQDVPAIADKIREHPAVIDIYEYDIPFAKRYLIDKGLVPMEGDEELKMLAFDIETLYHEGEEFAEGPILMISYADEEGARVITWKNVDLPYVDVVSTEREMIKRFLRVVKEKDPDVLITYNGDNFDFAYLKKRCEKLGINFALGRDGSEPKIQRMGDRFAVEVKGRIHFDLYPVIRRTINLPTYTLEAVYEAVFGQPKEKVYAEEITTAWETGENLERVARYSMEDAKVTYELGKEFLPMEAQLSRLIGQSLWDVSRSSTGNLVEWFLLRKAYERNELAPNKPDEKELARRRQSYEGGYVKEPERGLWENIVYLDFRSLYPSIIITHNVSPDTLNREGCKEYDVAPQVGHRFCKDFPGFIPSLLGDLLEERQKIKKKMKATIDPIERKLLDYRQRAIKILANSYYGYYGYARARWYCKECAESVTAWGREYITMTIKEIEEKYGFKVIYSDTDGFFATIPGADAETVKKKAMEFLKYINAKLPGALELEYEGFYKRGFFVTKKKYAVIDEEGKITTRGLEIVRRDWSEIAKETQARVLEALLKDGDVEKAVRIVKEVTEKLSKYEVPPEKLVIHEQITRDLKDYKATGPHVAVAKRLAARGVKIRPGTVISYIVLKGSGRIGDRAIPFDEFDPTKHKYDAEYYIENQVLPAVERILRAFGYRKEDLRYQKTRQVGLSAWLKPKGT

SEQ ID NO: 1339 - protein, 774 aa, synthetic construct
MILDTDYITEDGKPVWRIFKKENGEFKIEYDRTFEAYFYALLKDDSAIEEVKKITAERHGTVVTVKRVEKVQKKFLGRPVEVWKLYFTHPQDVPAIADKIREHPAVIDIYEYDIPFAKRYLIDKGLVPMEGDEELKMLAFDIETLYHEGEEFAEGPILMISYADEEGARVITWKNVDLPYVDVVSTEREMIKRFLRVVKEKDPDVLITYNGDNFDFAYLKKRCEKLGINFALGRDGSEPKIQRMGDRFAVEVKGRIHFDLYPVIRRTINLPTYTLEAVYEAVFGQPKEKVYAEEITTAWETGENLERVARYSMEDAKVTYELGKEFLPMEAQLSRLIGQSLWDVSRSSTGNLVEWFLLRKAYERNELAPNKPDEKELARRRQSYEGGYVKEPERGLWENIVYLDFRSLYPSIIITHNVSPDTLNREGCKEYDVAPQVGHRFCKDFPGFIPSLLGDLLEERQKIKKKMKATIDPIERKLLDYRQRAIKILANSYYGYYGYARARWYCKECAESVTAWGREYITMTIKEIEEKYGFKVIYSDTDGFFATIPGADAETVKKKAMEFLKYINAKLPGALELEYEGFYKRGFFVTKKKYAVIDEEGKITTRGLEIVRRDWSEIAKETQARVLEALLKDGDVEKAVRIVKEVTEKLSKYEVPPEKLVIHEQITRDLKDYKATGPHVAVAKRLAARGVKIRPGTVISYIVLKGSGRIGDRAIPFDEFDPTKHKYDAEYYIENQVLPAVERILRAFGYRKEDLRYQKTRQVGLSAWLKPKGT

SEQ ID NO: 1340 - protein, 774 aa, synthetic construct
MILDTDYITEDGKPVWRIFKKENGEFKIEYDRTFEAYFYALLKDDSAIEEVKKITAERHGTVVTVKRVEKVQKKFLGRPVEVWKLYFTHPQDVPAIFDKIREHPAVIDIYEYDIPFAKRYLIDKGLVPMEGDEELKMLAFDIETLYHEGEEFAEGPILMISYADEEGARVITWKNVDLPYVDVVSTEREMIKRFLRVVKEKDPDVLITYNGDNFDFAYLKKRCEKLGINFALGRDGSEPKIQRMGDRFAVEVKGRIHFDLYPVIRRTINLPTYTLEAVYEAVFGQPKEKVYAEEITTAWETGENLERVARYSMEDAKVTYELGKEFLPMEAQLSRLIGQSLWDVSRSSTGNLVEWFLLRKAYERNELAPNKPDEKELARRRQSYEGGYVKEPERGLWENIVYLDFRSLYPSIIITHNVSPDTLNREGCKEYDVAPQVGHRFCKDFPGFIPSLLGDLLEERQKIKKKMKATIDPIERKLLDYRQRAIKILANSYYGYYGYARARWYCKECAESVTAWGREYITMTIKEIEEKYGFKVIYSDTDGFFATIPGADAETVKKKAMEFLKYINAKLPGALELEYEGFYKRGFFVTKKKYAVIDEEGKITTRGLEIVRRDWSEIAKETQARVLEALLKDGDVEKAVRIVKEVTEKLSKYEVPPEKLVIHEQITRDLKDYKATGPHVAVAKRLAARGVKIRPGTVISYIVLKGSGRIGDRAIPFDEFDPTKHKYDAEYYIENQVLPAVERILRAFGYRKEDLRYQKTRQVGLSAWLKPKGT

SEQ ID NO: 1341 - protein, 774 aa, synthetic construct
MILDTDYITEDGKPVWRIFKKENGEFKIEYDRTFEAYFYALLKDDSAIEEVKKITAERHGTVVTVKRVEKVQKKFLGRPVEVWKLYFTHPQDVPAIHDKIREHPAVIDIYEYDIPFAKRYLIDKGLVPMEGDEELKMLAFDIETLYHEGEEFAEGPILMISYADEEGARVITWKNVDLPYVDVVSTEREMIKRFLRVVKEKDPDVLITYNGDNFDFAYLKKRCEKLGINFALGRDGSEPKIQRMGDRFAVEVKGRIHFDLYPVIRRTINLPTYTLEAVYEAVFGQPKEKVYAEEITTAWETGENLERVARYSMEDAKVTYELGKEFLPMEAQLSRLIGQSLWDVSRSSTGNLVEWFLLRKAYERNELAPNKPDEKELARRRQSYEGGYVKEPERGLWENIVYLDFRSLYPSIIITHNVSPDTLNREGCKEYDVAPQVGHRFCKDFPGFIPSLLGDLLEERQKIKKKMKATIDPIERKLLDYRQRAIKILANSYYGYYGYARARWYCKECAESVTAWGREYITMTIKEIEEKYGFKVIYSDTDGFFATIPGADAETVKKKAMEFLKYINAKLPGALELEYEGFYKRGFFVTKKKYAVIDEEGKITTRGLEIVRRDWSEIAKETQARVLEALLKDGDVEKAVRIVKEVTEKLSKYEVPPEKLVIHEQITRDLKDYKATGPHVAVAKRLAARGVKIRPGTVISYIVLKGSGRIGDRAIPFDEFDPTKHKYDAEYYIENQVLPAVERILRAFGYRKEDLRYQKTRQVGLSAWLKPKGT

SEQ ID NO: 1342 - protein, 774 aa, synthetic construct
MILDTDYITEDGKPVWRIFKKENGEFKIEYDRTFEAYFYALLKDDSAIEEVKKITAERHGTVVTVKRVEKVQKKFLGRPVEVWKLYFTHPQDIPAIRDKIREHPAVIDIYEYDIPFAKRYLIDKGLVPMEGDEELKMLAFDIETLYHEGEEFAEGPILMISYADEEGARVITWKNVDLPYVDVVSTEREMIKRFLRVVKEKDPDVLITYNGDNFDFAYLKKRCEKLGINFALGRDGSEPKIQRMGDRFAVEVKGRIHFDLYPVIRRTINLPTYTLEAVYEAVFGQPKEKVYAEEITTAWETGENLERVARYSMEDAKVTYELGKEFLPMEAQLSRLIGQSLWDVSRSSTGNLVEWFLLRKAYERNELAPNKPDEKELARRRQSYEGGYVKEPERGLWENIVYLDFRSLYPSIIITHNVSPDTLNREGCKEYDVAPQVGHRFCKDFPGFIPSLLGDLLEERQKIKKKMKATIDPIERKLLDYRQRAIKILANSYYGYYGYARARWYCKECAESVTAWGREYITMTIKEIEEKYGFKVIYSDTDGFFATIPGADAETVKKKAMEFLKYINAKLPGALELEYEGFYKRGFFVTKKKYAVIDEEGKITTRGLEIVRRDWSEIAKETQARVLEALLKDGDVEKAVRIVKEVTEKLSKYEVPPEKLVIHEQITRDLKDYKATGPHVAVAKRLAARGVKIRPGTVISYIVLKGSGRIGDRAIPFDEFDPTKHKYDAEYYIENQVLPAVERILRAFGYRKEDLRYQKTRQVGLSAWLKPKGT

SEQ ID NO: 1343 - protein, 774 aa, synthetic construct
MILDTDYITEDGKPVWRIFKKENGEFKIEYDRTFEAYFYALLKDDSAIEEVKKITAERHGTVVTVKRVEKVQKKFLGRPVEVWKLYFTHPQDIPAIADKIREHPAVIDIYEYDIPFAKRYLIDKGLVPMEGDEELKMLAFDIETLYHEGEEFAEGPILMISYADEEGARVITWKNVDLPYVDVVSTEREMIKRFLRVVKEKDPDVLITYNGDNFDFAYLKKRCEKLGINFALGRDGSEPKIQRMGDRFAVEVKGRIHFDLYPVIRRTINLPTYTLEAVYEAVFGQPKEKVYAEEITTAWETGENLERVARYSMEDAKVTYELGKEFLPMEAQLSRLIGQSLWDVSRSSTGNLVEWFLLRKAYERNELAPNKPDEKELARRRQSYEGGYVKEPERGLWENIVYLDFRSLYPSIIITHNVSPDTLNREGCKEYDVAPQVGHRFCKDFPGFIPSLLGDLLEERQKIKKKMKATIDPIERKLLDYRQRAIKILANSYYGYYGYARARWYCKECAESVTAWGREYITMTIKEIEEKYGFKVIYSDTDGFFATIPGADAETVKKKAMEFLKYINAKLPGALELEYEGFYKRGFFVTKKKYAVIDEEGKITTRGLEIVRRDWSEIAKETQARVLEALLKDGDVEKAVRIVKEVTEKLSKYEVPPEKLVIHEQITRDLKDYKATGPHVAVAKRLAARGVKIRPGTVISYIVLKGSGRIGDRAIPFDEFDPTKHKYDAEYYIENQVLPAVERILRAFGYRKEDLRYQKTRQVGLSAWLKPKGT

SEQ ID NO: 1344 - protein, 774 aa, synthetic construct
MILDTDYITEDGKPVWRIFKKENGEFKIEYDRTFEAYFYALLKDDSAIEEVKKITAERHGTVVTVKRVEKVQKKFLGRPVEVWKLYFTHPQDIPAIFDKIREHPAVIDIYEYDIPFAKRYLIDKGLVPMEGDEELKMLAFDIETLYHEGEEFAEGPILMISYADEEGARVITWKNVDLPYVDVVSTEREMIKRFLRVVKEKDPDVLITYNGDNFDFAYLKKRCEKLGINFALGRDGSEPKIQRMGDRFAVEVKGRIHFDLYPVIRRTINLPTYTLEAVYEAVFGQPKEKVYAEEITTAWETGENLERVARYSMEDAKVTYELGKEFLPMEAQLSRLIGQSLWDVSRSSTGNLVEWFLLRKAYERNELAPNKPDEKELARRRQSYEGGYVKEPERGLWENIVYLDFRSLYPSIIITHNVSPDTLNREGCKEYDVAPQVGHRFCKDFPGFIPSLLGDLLEERQKIKKKMKATIDPIERKLLDYRQRAIKILANSYYGYYGYARARWYCKECAESVTAWGREYITMTIKEIEEKYGFKVIYSDTDGFFATIPGADAETVKKKAMEFLKYINAKLPGALELEYEGFYKRGFFVTKKKYAVIDEEGKITTRGLEIVRRDWSEIAKETQARVLEALLKDGDVEKAVRIVKEVTEKLSKYEVPPEKLVIHEQITRDLKDYKATGPHVAVAKRLAARGVKIRPGTVISYIVLKGSGRIGDRAIPFDEFDPTKHKYDAEYYIENQVLPAVERILRAFGYRKEDLRYQKTRQVGLSAWLKPKGT

SEQ ID NO: 1345 - protein, 774 aa, synthetic construct
MILDTDYITEDGKPVWRIFKKENGEFKIEYDRTFEAYFYALLKDDSAIEEVKKITAERHGTVVTVKRVEKVQKKFLGRPVEVWKLYFTHPQDIPAIHDKIREHPAVIDIYEYDIPFAKRYLIDKGLVPMEGDEELKMLAFDIETLYHEGEEFAEGPILMISYADEEGARVITWKNVDLPYVDVVSTEREMIKRFLRVVKEKDPDVLITYNGDNFDFAYLKKRCEKLGINFALGRDGSEPKIQRMGDRFAVEVKGRIHFDLYPVIRRTINLPTYTLEAVYEAVFGQPKEKVYAEEITTAWETGENLERVARYSMEDAKVTYELGKEFLPMEAQLSRLIGQSLWDVSRSSTGNLVEWFLLRKAYERNELAPNKPDEKELARRRQSYEGGYVKEPERGLWENIVYLDFRSLYPSIIITHNVSPDTLNREGCKEYDVAPQVGHRFCKDFPGFIPSLLGDLLEERQKIKKKMKATIDPIERKLLDYRQRAIKILANSYYGYYGYARARWYCKECAESVTAWGREYITMTIKEIEEKYGFKVIYSDTDGFFATIPGADAETVKKKAMEFLKYINAKLPGALELEYEGFYKRGFFVTKKKYAVIDEEGKITTRGLEIVRRDWSEIAKETQARVLEALLKDGDVEKAVRIVKEVTEKLSKYEVPPEKLVIHEQITRDLKDYKATGPHVAVAKRLAARGVKIRPGTVISYIVLKGSGRIGDRAIPFDEFDPTKHKYDAEYYIENQVLPAVERILRAFGYRKEDLRYQKTRQVGLSAWLKPKGT

SEQ ID NO: 1346 - protein, 774 aa, synthetic construct
MILDTDYITEDGKPVWRIFKKENGEFKIEYDRTFEAYFYALLKDDSAIEEVKKITAERHGTVVTVKRVEKVQKKFLGRPVEVWKLYFTHPQDIPAIWDKIREHPAVIDIYEYDIPFAKRYLIDKGLVPMEGDEELKMLAFDIETLYHEGEEFAEGPILMISYADEEGARVITWKNVDLPYVDVVSTEREMIKRFLRVVKEKDPDVLITYNGDNFDFAYLKKRCEKLGINFALGRDGSEPKIQRMGDRFAVEVKGRIHFDLYPVIRRTINLPTYTLEAVYEAVFGQPKEKVYAEEITTAWETGENLERVARYSMEDAKVTYELGKEFLPMEAQLSRLIGQSLWDVSRSSTGNLVEWFLLRKAYERNELAPNKPDEKELARRRQSYEGGYVKEPERGLWENIVYLDFRSLYPSIIITHNVSPDTLNREGCKEYDVAPQVGHRFCKDFPGFIPSLLGDLLEERQKIKKKMKATIDPIERKLLDYRQRAIKILANSYYGYYGYARARWYCKECAESVTAWGREYITMTIKEIEEKYGFKVIYSDTDGFFATIPGADAETVKKKAMEFLKYINAKLPGALELEYEGFYKRGFFVTKKKYAVIDEEGKITTRGLEIVRRDWSEIAKETQARVLEALLKDGDVEKAVRIVKEVTEKLSKYEVPPEKLVIHEQITRDLKDYKATGPHVAVAKRLAARGVKIRPGTVISYIVLKGSGRIGDRAIPFDEFDPTKHKYDAEYYIENQVLPAVERILRAFGYRKEDLRYQKTRQVGLSAWLKPKGT

SEQ ID NO: 1347 - protein, 774 aa, synthetic construct
MILDTDYITEDGKPVWRIFKKENGEFKIEYDRTFEAYFYALLKDDSAIEEVKKITAERHGTVVTVKRVEKVQKKFLGRPVEVWKLYFTHPQDKPAIHDKIREHPAVIDIYEYDIPFAKRYLIDKGLVPMEGDEELKMLAFDIETLYHEGEEFAEGPILMISYADEEGARVITWKNVDLPYVDVVSTEREMIKRFLRVVKEKDPDVLITYNGDNFDFAYLKKRCEKLGINFALGRDGSEPKIQRMGDRFAVEVKGRIHFDLYPVIRRTINLPTYTLEAVYEAVFGQPKEKVYAEEITTAWETGENLERVARYSMEDAKVTYELGKEFLPMEAQLSRLIGQSLWDVSRSSTGNLVEWFLLRKAYERNELAPNKPDEKELARRRQSYEGGYVKEPERGLWENIVYLDFRSLYPSIIITHNVSPDTLNREGCKEYDVAPQVGHRFCKDFPGFIPSLLGDLLEERQKIKKKMKATIDPIERKLLDYRQRAIKILANSYYGYYGYARARWYCKECAESVTAWGREYITMTIKEIEEKYGFKVIYSDTDGFFATIPGADAETVKKKAMEFLKYINAKLPGALELEYEGFYKRGFFVTKKKYAVIDEEGKITTRGLEIVRRDWSEIAKETQARVLEALLKDGDVEKAVRIVKEVTEKLSKYEVPPEKLVIHEQITRDLKDYKATGPHVAVAKRLAARGVKIRPGTVISYIVLKGSGRIGDRAIPFDEFDPTKHKYDAEYYIENQVLPAVERILRAFGYRKEDLRYQKTRQVGLSAWLKPKGT

SEQ ID NO: 1348 - protein, 774 aa, synthetic construct
MILDTDYITEDGKPVWRIFKKENGEFKIEYDRTFEHYFYALLKDDSAIEEVKKITAERHGTVVTVKRVEKVQKKFLGRPVEVWKLYFTHPQDVPAIRDKIREHPAVIDIYEYDIPFAKRYLIDKGLVPMEGDEELKMLAFDIETLYHEGEEFAEGPILMISYADEEGARVITWKNVDLPYVDVVSTEREMIKRFLRVVKEKDPDVLITYNGDNFDFAYLKKRCEKLGINFALGRDGSEPKIQRMGDRFAVEVKGRIHFDLYPVIRRTINLPTYTLEAVYEAVFGQPKEKVYAEEITTAWETGENLERVARYSMEDAKVTYELGKEFLPMEAQLSRLIGQSLWDVSRSSTGNLVEWFLLRKAYERNELAPNKPDEKELARRRQSYEGGYVKEPERGLWENIVYLDFRSLYPSIIITHNVSPDTLNREGCKEYDVAPQVGHRFCKDFPGFIPSLLGDLLEERQKIKKKMKATIDPIERKLLDYRQRAIKILANSYYGYYGYARARWYCKECAESVTAWGREYITMTIKEIEEKYGFKVIYSDTDGFFATIPGADAETVKKKAMEFLKYINAKLPGALELEYEGFYKRGFFVTKKKYAVIDEEGKITTRGLEIVRRDWSEIAKETQARVLEALLKDGDVEKAVRIVKEVTEKLSKYEVPPEKLVIHEQITRDLKDYKATGPHVAVAKRLAARGVKIRPGTVISYIVLKGSGRIGDRAIPFDEFDPTKHKYDAEYYIENQVLPAVERILRAFGYRKEDLRYQKTRQVGLSAWLKPKGT

SEQ ID NO: 1349 - protein, 774 aa, synthetic construct
MILDTDYITEDGKPVWRIFKKENGEFKIEYDRTFEHYFYALLKDDSAIEEVKKITAERHGTVVTVKRVEKVQKKFLGRPVEVWKLYFTHPQDVPAIADKIREHPAVIDIYEYDIPFAKRYLIDKGLVPMEGDEELKMLAFDIETLYHEGEEFAEGPILMISYADEEGARVITWKNVDLPYVDVVSTEREMIKRFLRVVKEKDPDVLITYNGDNFDFAYLKKRCEKLGINFALGRDGSEPKIQRMGDRFAVEVKGRIHFDLYPVIRRTINLPTYTLEAVYEAVFGQPKEKVYAEEITTAWETGENLERVARYSMEDAKVTYELGKEFLPMEAQLSRLIGQSLWDVSRSSTGNLVEWFLLRKAYERNELAPNKPDEKELARRRQSYEGGYVKEPERGLWENIVYLDFRSLYPSIIITHNVSPDTLNREGCKEYDVAPQVGHRFCKDFPGFIPSLLGDLLEERQKIKKKMKATIDPIERKLLDYRQRAIKILANSYYGYYGYARARWYCKECAESVTAWGREYITMTIKEIEEKYGFKVIYSDTDGFFATIPGADAETVKKKAMEFLKYINAKLPGALELEYEGFYKRGFFVTKKKYAVIDEEGKITTRGLEIVRRDWSEIAKETQARVLEALLKDGDVEKAVRIVKEVTEKLSKYEVPPEKLVIHEQITRDLKDYKATGPHVAVAKRLAARGVKIRPGTVISYIVLKGSGRIGDRAIPFDEFDPTKHKYDAEYYIENQVLPAVERILRAFGYRKEDLRYQKTRQVGLSAWLKPKGT

SEQ ID NO: 1350 - protein, 774 aa, synthetic construct
MILDTDYITEDGKPVWRIFKKENGEFKIEYDRTFEHYFYALLKDDSAIEEVKKITAERHGTVVTVKRVEKVQKKFLGRPVEVWKLYFTHPQDIPAIRDKIREHPAVIDIYEYDIPFAKRYLIDKGLVPMEGDEELKMLAFDIETLYHEGEEFAEGPILMISYADEEGARVITWKNVDLPYVDVVSTEREMIKRFLRVVKEKDPDVLITYNGDNFDFAYLKKRCEKLGINFALGRDGSEPKIQRMGDRFAVEVKGRIHFDLYPVIRRTINLPTYTLEAVYEAVFGQPKEKVYAEEITTAWETGENLERVARYSMEDAKVTYELGKEFLPMEAQLSRLIGQSLWDVSRSSTGNLVEWFLLRKAYERNELAPNKPDEKELARRRQSYEGGYVKEPERGLWENIVYLDFRSLYPSIIITHNVSPDTLNREGCKEYDVAPQVGHRFCKDFPGFIPSLLGDLLEERQKIKKKMKATIDPIERKLLDYRQRAIKILANSYYGYYGYARARWYCKECAESVTAWGREYITMTIKEIEEKYGFKVIYSDTDGFFATIPGADAETVKKKAMEFLKYINAKLPGALELEYEGFYKRGFFVTKKKYAVIDEEGKITTRGLEIVRRDWSEIAKETQARVLEALLKDGDVEKAVRIVKEVTEKLSKYEVPPEKLVIHEQITRDLKDYKATGPHVAVAKRLAARGVKIRPGTVISYIVLKGSGRIGDRAIPFDEFDPTKHKYDAEYYIENQVLPAVERILRAFGYRKEDLRYQKTRQVGLSAWLKPKGT

SEQ ID NO: 1351 - protein, 774 aa, synthetic construct
MILDTDYITEDGKPVWRIFKKENGEFKIEYDRTFEHYFYALLKDDSAIEEVKKITAERHGTVVTVKRVEKVQKKFLGRPVEVWKLYFTHPQDIPAIADKIREHPAVIDIYEYDIPFAKRYLIDKGLVPMEGDEELKMLAFDIETLYHEGEEFAEGPILMISYADEEGARVITWKNVDLPYVDVVSTEREMIKRFLRVVKEKDPDVLITYNGDNFDFAYLKKRCEKLGINFALGRDGSEPKIQRMGDRFAVEVKGRIHFDLYPVIRRTINLPTYTLEAVYEAVFGQPKEKVYAEEITTAWETGENLERVARYSMEDAKVTYELGKEFLPMEAQLSRLIGQSLWDVSRSSTGNLVEWFLLRKAYERNELAPNKPDEKELARRRQSYEGGYVKEPERGLWENIVYLDFRSLYPSIIITHNVSPDTLNREGCKEYDVAPQVGHRFCKDFPGFIPSLLGDLLEERQKIKKKMKATIDPIERKLLDYRQRAIKILANSYYGYYGYARARWYCKECAESVTAWGREYITMTIKEIEEKYGFKVIYSDTDGFFATIPGADAETVKKKAMEFLKYINAKLPGALELEYEGFYKRGFFVTKKKYAVIDEEGKITTRGLEIVRRDWSEIAKETQARVLEALLKDGDVEKAVRIVKEVTEKLSKYEVPPEKLVIHEQITRDLKDYKATGPHVAVAKRLAARGVKIRPGTVISYIVLKGSGRIGDRAIPFDEFDPTKHKYDAEYYIENQVLPAVERILRAFGYRKEDLRYQKTRQVGLSAWLKPKGT

SEQ ID NO: 1352 - protein, 774 aa, synthetic construct
MILDTDYITEDGKPVWRIFKKENGEFKIEYDRTFEHYFYALLKDDSAIEEVKKITAERHGTVVTVKRVEKVQKKFLGRPVEVWKLYFTHPQDIPAIFDKIREHPAVIDIYEYDIPFAKRYLIDKGLVPMEGDEELKMLAFDIETLYHEGEEFAEGPILMISYADEEGARVITWKNVDLPYVDVVSTEREMIKRFLRVVKEKDPDVLITYNGDNFDFAYLKKRCEKLGINFALGRDGSEPKIQRMGDRFAVEVKGRIHFDLYPVIRRTINLPTYTLEAVYEAVFGQPKEKVYAEEITTAWETGENLERVARYSMEDAKVTYELGKEFLPMEAQLSRLIGQSLWDVSRSSTGNLVEWFLLRKAYERNELAPNKPDEKELARRRQSYEGGYVKEPERGLWENIVYLDFRSLYPSIIITHNVSPDTLNREGCKEYDVAPQVGHRFCKDFPGFIPSLLGDLLEERQKIKKKMKATIDPIERKLLDYRQRAIKILANSYYGYYGYARARWYCKECAESVTAWGREYITMTIKEIEEKYGFKVIYSDTDGFFATIPGADAETVKKKAMEFLKYINAKLPGALELEYEGFYKRGFFVTKKKYAVIDEEGKITTRGLEIVRRDWSEIAKETQARVLEALLKDGDVEKAVRIVKEVTEKLSKYEVPPEKLVIHEQITRDLKDYKATGPHVAVAKRLAARGVKIRPGTVISYIVLKGSGRIGDRAIPFDEFDPTKHKYDAEYYIENQVLPAVERILRAFGYRKEDLRYQKTRQVGLSAWLKPKGT

SEQ ID NO: 1353 - protein, 774 aa, synthetic construct
MILDTDYITEDGKPVWRIFKKENGEFKIEYDRTFEHYFYALLKDDSAIEEVKKITAERHGTVVTVKRVEKVQKKFLGRPVEVWKLYFTHPQDIPAIHDKIREHPAVIDIYEYDIPFAKRYLIDKGLVPMEGDEELKMLAFDIETLYHEGEEFAEGPILMISYADEEGARVITWKNVDLPYVDVVSTEREMIKRFLRVVKEKDPDVLITYNGDNFDFAYLKKRCEKLGINFALGRDGSEPKIQRMGDRFAVEVKGRIHFDLYPVIRRTINLPTYTLEAVYEAVFGQPKEKVYAEEITTAWETGENLERVARYSMEDAKVTYELGKEFLPMEAQLSRLIGQSLWDVSRSSTGNLVEWFLLRKAYERNELAPNKPDEKELARRRQSYEGGYVKEPERGLWENIVYLDFRSLYPSIIITHNVSPDTLNREGCKEYDVAPQVGHRFCKDFPGFIPSLLGDLLEERQKIKKKMKATIDPIERKLLDYRQRAIKILANSYYGYYGYARARWYCKECAESVTAWGREYITMTIKEIEEKYGFKVIYSDTDGFFATIPGADAETVKKKAMEFLKYINAKLPGALELEYEGFYKRGFFVTKKKYAVIDEEGKITTRGLEIVRRDWSEIAKETQARVLEALLKDGDVEKAVRIVKEVTEKLSKYEVPPEKLVIHEQITRDLKDYKATGPHVAVAKRLAARGVKIRPGTVISYIVLKGSGRIGDRAIPFDEFDPTKHKYDAEYYIENQVLPAVERILRAFGYRKEDLRYQKTRQVGLSAWLKPKGT

SEQ ID NO: 1354 - protein, 774 aa, synthetic construct
MILDTDYITEDGKPVWRIFKKENGEFKIEYDRTFESYFYALLKDDSAIEEVKKITAERHGTVVTVKRVEKVQKKFLGRPVEVWKLYFTHPQDVPAIRDKIREHPAVIDIYEYDIPFAKRYLIDKGLVPMEGDEELKMLAFDIETLYHEGEEFAEGPILMISYADEEGARVITWKNVDLPYVDVVSTEREMIKRFLRVVKEKDPDVLITYNGDNFDFAYLKKRCEKLGINFALGRDGSEPKIQRMGDRFAVEVKGRIHFDLYPVIRRTINLPTYTLEAVYEAVFGQPKEKVYAEEITTAWETGENLERVARYSMEDAKVTYELGKEFLPMEAQLSRLIGQSLWDVSRSSTGNLVEWFLLRKAYERNELAPNKPDEKELARRRQSYEGGYVKEPERGLWENIVYLDFRSLYPSIIITHNVSPDTLNREGCKEYDVAPQVGHRFCKDFPGFIPSLLGDLLEERQKIKKKMKATIDPIERKLLDYRQRAIKILANSYYGYYGYARARWYCKECAESVTAWGREYITMTIKEIEEKYGFKVIYSDTDGFFATIPGADAETVKKKAMEFLKYINAKLPGALELEYEGFYKRGFFVTKKKYAVIDEEGKITTRGLEIVRRDWSEIAKETQARVLEALLKDGDVEKAVRIVKEVTEKLSKYEVPPEKLVIHEQITRDLKDYKATGPHVAVAKRLAARGVKIRPGTVISYIVLKGSGRIGDRAIPFDEFDPTKHKYDAEYYIENQVLPAVERILRAFGYRKEDLRYQKTRQVGLSAWLKPKGT

SEQ ID NO: 1355 - protein, 774 aa, synthetic construct
MILDTDYITEDGKPVWRIFKKENGEFKIEYDRTFESYFYALLKDDSAIEEVKKITAERHGTVVTVKRVEKVQKKFLGRPVEVWKLYFTHWQDIPAIADKIREHPAVIDIYEYDIPFAKRYLIDKGLVPMEGDEELKMLAFDIETLYHEGEEFAEGPILMISYADEEGARVITWKNVDLPYVDVVSTEREMIKRFLRVVKEKDPDVLITYNGDNFDFAYLKKRCEKLGINFALGRDGSEPKIQRMGDRFAVEVKGRIHFDLYPVIRRTINLPTYTLEAVYEAVFGQPKEKVYAEEITTAWETGENLERVARYSMEDAKVTYELGKEFLPMEAQLSRLIGQSLWDVSRSSTGNLVEWFLLRKAYERNELAPNKPDEKELARRRQSYEGGYVKEPERGLWENIVYLDFRSLYPSIIITHNVSPDTLNREGCKEYDVAPQVGHRFCKDFPGFIPSLLGDLLEERQKIKKKMKATIDPIERKLLDYRQRAIKILANSYYGYYGYARARWYCKECAESVTAWGREYITMTIKEIEEKYGFKVIYSDTDGFFATIPGADAETVKKKAMEFLKYINAKLPGALELEYEGFYKRGFFVTKKKYAVIDEEGKITTRGLEIVRRDWSEIAKETQARVLEALLKDGDVEKAVRIVKEVTEKLSKYEVPPEKLVIHEQITRDLKDYKATGPHVAVAKRLAARGVKIRPGTVISYIVLKGSGRIGDRAIPFDEFDPTKHKYDAEYYIENQVLPAVERILRAFGYRKEDLRYQKTRQVGLSAWLKPKGT

SEQ ID NO: 1356 - protein, 774 aa, synthetic construct
MILDTDYITEDGKPVWRIFKKENGEFKIEYDRTFESYFYALLKDDSAIEEVKKITAERHGTVVTVKRVEKVQKKFLGRPVEVWKLYFTHPQDVPAIADKIREHPAVIDIYEYDIPFAKRYLIDKGLVPMEGDEELKMLAFDIETLYHEGEEFAEGPILMISYADEEGARVITWKNVDLPYVDVVSTEREMIKRFLRVVKEKDPDVLITYNGDNFDFAYLKKRCEKLGINFALGRDGSEPKIQRMGDRFAVEVKGRIHFDLYPVIRRTINLPTYTLEAVYEAVFGQPKEKVYAEEITTAWETGENLERVARYSMEDAKVTYELGKEFLPMEAQLSRLIGQSLWDVSRSSTGNLVEWFLLRKAYERNELAPNKPDEKELARRRQSYEGGYVKEPERGLWENIVYLDFRSLYPSIIITHNVSPDTLNREGCKEYDVAPQVGHRFCKDFPGFIPSLLGDLLEERQKIKKKMKATIDPIERKLLDYRQRAIKILANSYYGYYGYARARWYCKECAESVTAWGREYITMTIKEIEEKYGFKVIYSDTDGFFATIPGADAETVKKKAMEFLKYINAKLPGALELEYEGFYKRGFFVTKKKYAVIDEEGKITTRGLEIVRRDWSEIAKETQARVLEALLKDGDVEKAVRIVKEVTEKLSKYEVPPEKLVIHEQITRDLKDYKATGPHVAVAKRLAARGVKIRPGTVISYIVLKGSGRIGDRAIPFDEFDPTKHKYDAEYYIENQVLPAVERILRAFGYRKEDLRYQKTRQVGLSAWLKPKGT

SEQ ID NO: 1357 - protein, 774 aa, synthetic construct
MILDTDYITEDGKPVWRIFKKENGEFKIEYDRTFESYFYALLKDDSAIEEVKKITAERHGTVVTVKRVEKVQKKFLGRPVEVWKLYFTHPQDIPAIRDKIREHPAVIDIYEYDIPFAKRYLIDKGLVPMEGDEELKMLAFDIETLYHEGEEFAEGPILMISYADEEGARVITWKNVDLPYVDVVSTEREMIKRFLRVVKEKDPDVLITYNGDNFDFAYLKKRCEKLGINFALGRDGSEPKIQRMGDRFAVEVKGRIHFDLYPVIRRTINLPTYTLEAVYEAVFGQPKEKVYAEEITTAWETGENLERVARYSMEDAKVTYELGKEFLPMEAQLSRLIGQSLWDVSRSSTGNLVEWFLLRKAYERNELAPNKPDEKELARRRQSYEGGYVKEPERGLWENIVYLDFRSLYPSIIITHNVSPDTLNREGCKEYDVAPQVGHRFCKDFPGFIPSLLGDLLEERQKIKKKMKATIDPIERKLLDYRQRAIKILANSYYGYYGYARARWYCKECAESVTAWGREYITMTIKEIEEKYGFKVIYSDTDGFFATIPGADAETVKKKAMEFLKYINAKLPGALELEYEGFYKRGFFVTKKKYAVIDEEGKITTRGLEIVRRDWSEIAKETQARVLEALLKDGDVEKAVRIVKEVTEKLSKYEVPPEKLVIHEQITRDLKDYKATGPHVAVAKRLAARGVKIRPGTVISYIVLKGSGRIGDRAIPFDEFDPTKHKYDAEYYIENQVLPAVERILRAFGYRKEDLRYQKTRQVGLSAWLKPKGT

SEQ ID NO: 1358 - protein, 774 aa, synthetic construct
MILDTDYITEDGKPVWRIFKKENGEFKIEYDRTFESYFYALLKDDSAIEEVKKITAERHGTVVTVKRVEKVQKKFLGRPVEVWKLYFTHPQDIPAIADKIREHPAVIDIYEYDIPFAKRYLIDKGLVPMEGDEELKMLAFDIETLYHEGEEFAEGPILMISYADEEGARVITWKNVDLPYVDVVSTEREMIKRFLRVVKEKDPDVLITYNGDNFDFAYLKKRCEKLGINFALGRDGSEPKIQRMGDRFAVEVKGRIHFDLYPVIRRTINLPTYTLEAVYEAVFGQPKEKVYAEEITTAWETGENLERVARYSMEDAKVTYELGKEFLPMEAQLSRLIGQSLWDVSRSSTGNLVEWFLLRKAYERNELAPNKPDEKELARRRQSYEGGYVKEPERGLWENIVYLDFRSLYPSIIITHNVSPDTLNREGCKEYDVAPQVGHRFCKDFPGFIPSLLGDLLEERQKIKKKMKATIDPIERKLLDYRQRAIKILANSYYGYYGYARARWYCKECAESVTAWGREYITMTIKEIEEKYGFKVIYSDTDGFFATIPGADAETVKKKAMEFLKYINAKLPGALELEYEGFYKRGFFVTKKKYAVIDEEGKITTRGLEIVRRDWSEIAKETQARVLEALLKDGDVEKAVRIVKEVTEKLSKYEVPPEKLVIHEQITRDLKDYKATGPHVAVAKRLAARGVKIRPGTVISYIVLKGSGRIGDRAIPFDEFDPTKHKYDAEYYIENQVLPAVERILRAFGYRKEDLRYQKTRQVGLSAWLKPKGT

SEQ ID NO: 1359 - protein, 774 aa, synthetic construct
MILDTDYITEDGKPVWRIFKKENGEFKIEYDRTFESYFYALLKDDSAIEEVKKITAERHGTVVTVKRVEKVQKKFLGRPVEVWKLYFTHPQDIPAIHDKIREHPAVIDIYEYDIPFAKRYLIDKGLVPMEGDEELKMLAFDIETLYHEGEEFAEGPILMISYADEEGARVITWKNVDLPYVDVVSTEREMIKRFLRVVKEKDPDVLITYNGDNFDFAYLKKRCEKLGINFALGRDGSEPKIQRMGDRFAVEVKGRIHFDLYPVIRRTINLPTYTLEAVYEAVFGQPKEKVYAEEITTAWETGENLERVARYSMEDAKVTYELGKEFLPMEAQLSRLIGQSLWDVSRSSTGNLVEWFLLRKAYERNELAPNKPDEKELARRRQSYEGGYVKEPERGLWENIVYLDFRSLYPSIIITHNVSPDTLNREGCKEYDVAPQVGHRFCKDFPGFIPSLLGDLLEERQKIKKKMKATIDPIERKLLDYRQRAIKILANSYYGYYGYARARWYCKECAESVTAWGREYITMTIKEIEEKYGFKVIYSDTDGFFATIPGADAETVKKKAMEFLKYINAKLPGALELEYEGFYKRGFFVTKKKYAVIDEEGKITTRGLEIVRRDWSEIAKETQARVLEALLKDGDVEKAVRIVKEVTEKLSKYEVPPEKLVIHEQITRDLKDYKATGPHVAVAKRLAARGVKIRPGTVISYIVLKGSGRIGDRAIPFDEFDPTKHKYDAEYYIENQVLPAVERILRAFGYRKEDLRYQKTRQVGLSAWLKPKGT

SEQ ID NO: 1360 - protein, 774 aa, synthetic construct
MILDTDYITEDGKPVWRIFKKENGEFKIEYDRTFESYFYALLKDDSAIEEVKKITAERHGTVVTVKRVEKVQKKFLGRPVEVWKLYFTHPQDRPAIADKIREHPAVIDIYEYDIPFAKRYLIDKGLVPMEGDEELKMLAFDIETLYHEGEEFAEGPILMISYADEEGARVITWKNVDLPYVDVVSTEREMIKRFLRVVKEKDPDVLITYNGDNFDFAYLKKRCEKLGINFALGRDGSEPKIQRMGDRFAVEVKGRIHFDLYPVIRRTINLPTYTLEAVYEAVFGQPKEKVYAEEITTAWETGENLERVARYSMEDAKVTYELGKEFLPMEAQLSRLIGQSLWDVSRSSTGNLVEWFLLRKAYERNELAPNKPDEKELARRRQSYEGGYVKEPERGLWENIVYLDFRSLYPSIIITHNVSPDTLNREGCKEYDVAPQVGHRFCKDFPGFIPSLLGDLLEERQKIKKKMKATIDPIERKLLDYRQRAIKILANSYYGYYGYARARWYCKECAESVTAWGREYITMTIKEIEEKYGFKVIYSDTDGFFATIPGADAETVKKKAMEFLKYINAKLPGALELEYEGFYKRGFFVTKKKYAVIDEEGKITTRGLEIVRRDWSEIAKETQARVLEALLKDGDVEKAVRIVKEVTEKLSKYEVPPEKLVIHEQITRDLKDYKATGPHVAVAKRLAARGVKIRPGTVISYIVLKGSGRIGDRAIPFDEFDPTKHKYDAEYYIENQVLPAVERILRAFGYRKEDLRYQKTRQVGLSAWLKPKGT

SEQ ID NO: 1361 - protein, 774 aa, synthetic construct
MILDTDYITEDGKPVWRIFKKENGEFKIEYDRTFEPYFYALLKDDSAIEEVKKITAERHGTVVTVKRVEKVQKKFLGRPVEVWKLYFTHFQDVPAIRDKIREHPAVIDIYEYDIPFAKRYLIDKGLVPMEGDEELKMLAFDIETLYHEGEEFAEGPILMISYADEEGARVITWKNVDLPYVDVVSTEREMIKRFLRVVKEKDPDVLITYNGDNFDFAYLKKRCEKLGINFALGRDGSEPKIQRMGDRFAVEVKGRIHFDLYPVIRRTINLPTYTLEAVYEAVFGQPKEKVYAEEITTAWETGENLERVARYSMEDAKVTYELGKEFLPMEAQLSRLIGQSLWDVSRSSTGNLVEWFLLRKAYERNELAPNKPDEKELARRRQSYEGGYVKEPERGLWENIVYLDFRSLYPSIIITHNVSPDTLNREGCKEYDVAPQVGHRFCKDFPGFIPSLLGDLLEERQKIKKKMKATIDPIERKLLDYRQRAIKILANSYYGYYGYARARWYCKECAESVTAWGREYITMTIKEIEEKYGFKVIYSDTDGFFATIPGADAETVKKKAMEFLKYINAKLPGALELEYEGFYKRGFFVTKKKYAVIDEEGKITTRGLEIVRRDWSEIAKETQARVLEALLKDGDVEKAVRIVKEVTEKLSKYEVPPEKLVIHEQITRDLKDYKATGPHVAVAKRLAARGVKIRPGTVISYIVLKGSGRIGDRAIPFDEFDPTKHKYDAEYYIENQVLPAVERILRAFGYRKEDLRYQKTRQVGLSAWLKPKGT

SEQ ID NO: 1362 - protein, 774 aa, synthetic construct
MILDTDYITEDGKPVWRIFKKENGEFKIEYDRTFEPYFYALLKDDSAIEEVKKITAERHGTVVTVKRVEKVQKKFLGRPVEVWKLYFTHFQDVPAIADKIREHPAVIDIYEYDIPFAKRYLIDKGLVPMEGDEELKMLAFDIETLYHEGEEFAEGPILMISYADEEGARVITWKNVDLPYVDVVSTEREMIKRFLRVVKEKDPDVLITYNGDNFDFAYLKKRCEKLGINFALGRDGSEPKIQRMGDRFAVEVKGRIHFDLYPVIRRTINLPTYTLEAVYEAVFGQPKEKVYAEEITTAWETGENLERVARYSMEDAKVTYELGKEFLPMEAQLSRLIGQSLWDVSRSSTGNLVEWFLLRKAYERNELAPNKPDEKELARRRQSYEGGYVKEPERGLWENIVYLDFRSLYPSIIITHNVSPDTLNREGCKEYDVAPQVGHRFCKDFPGFIPSLLGDLLEERQKIKKKMKATIDPIERKLLDYRQRAIKILANSYYGYYGYARARWYCKECAESVTAWGREYITMTIKEIEEKYGFKVIYSDTDGFFATIPGADAETVKKKAMEFLKYINAKLPGALELEYEGFYKRGFFVTKKKYAVIDEEGKITTRGLEIVRRDWSEIAKETQARVLEALLKDGDVEKAVRIVKEVTEKLSKYEVPPEKLVIHEQITRDLKDYKATGPHVAVAKRLAARGVKIRPGTVISYIVLKGSGRIGDRAIPFDEFDPTKHKYDAEYYIENQVLPAVERILRAFGYRKEDLRYQKTRQVGLSAWLKPKGT

SEQ ID NO: 1363 - protein, 774 aa, synthetic construct
MILDTDYITEDGKPVWRIFKKENGEFKIEYDRTFEPYFYALLKDDSAIEEVKKITAERHGTVVTVKRVEKVQKKFLGRPVEVWKLYFTHFQDIPAIRDKIREHPAVIDIYEYDIPFAKRYLIDKGLVPMEGDEELKMLAFDIETLYHEGEEFAEGPILMISYADEEGARVITWKNVDLPYVDVVSTEREMIKRFLRVVKEKDPDVLITYNGDNFDFAYLKKRCEKLGINFALGRDGSEPKIQRMGDRFAVEVKGRIHFDLYPVIRRTINLPTYTLEAVYEAVFGQPKEKVYAEEITTAWETGENLERVARYSMEDAKVTYELGKEFLPMEAQLSRLIGQSLWDVSRSSTGNLVEWFLLRKAYERNELAPNKPDEKELARRRQSYEGGYVKEPERGLWENIVYLDFRSLYPSIIITHNVSPDTLNREGCKEYDVAPQVGHRFCKDFPGFIPSLLGDLLEERQKIKKKMKATIDPIERKLLDYRQRAIKILANSYYGYYGYARARWYCKECAESVTAWGREYITMTIKEIEEKYGFKVIYSDTDGFFATIPGADAETVKKKAMEFLKYINAKLPGALELEYEGFYKRGFFVTKKKYAVIDEEGKITTRGLEIVRRDWSEIAKETQARVLEALLKDGDVEKAVRIVKEVTEKLSKYEVPPEKLVIHEQITRDLKDYKATGPHVAVAKRLAARGVKIRPGTVISYIVLKGSGRIGDRAIPFDEFDPTKHKYDAEYYIENQVLPAVERILRAFGYRKEDLRYQKTRQVGLSAWLKPKGT

SEQ ID NO: 1364 - protein, 774 aa, synthetic construct
MILDTDYITEDGKPVWRIFKKENGEFKIEYDRTFEPYFYALLKDDSAIEEVKKITAERHGTVVTVKRVEKVQKKFLGRPVEVWKLYFTHFQDIPAIADKIREHPAVIDIYEYDIPFAKRYLIDKGLVPMEGDEELKMLAFDIETLYHEGEEFAEGPILMISYADEEGARVITWKNVDLPYVDVVSTEREMIKRFLRVVKEKDPDVLITYNGDNFDFAYLKKRCEKLGINFALGRDGSEPKIQRMGDRFAVEVKGRIHFDLYPVIRRTINLPTYTLEAVYEAVFGQPKEKVYAEEITTAWETGENLERVARYSMEDAKVTYELGKEFLPMEAQLSRLIGQSLWDVSRSSTGNLVEWFLLRKAYERNELAPNKPDEKELARRRQSYEGGYVKEPERGLWENIVYLDFRSLYPSIIITHNVSPDTLNREGCKEYDVAPQVGHRFCKDFPGFIPSLLGDLLEERQKIKKKMKATIDPIERKLLDYRQRAIKILANSYYGYYGYARARWYCKECAESVTAWGREYITMTIKEIEEKYGFKVIYSDTDGFFATIPGADAETVKKKAMEFLKYINAKLPGALELEYEGFYKRGFFVTKKKYAVIDEEGKITTRGLEIVRRDWSEIAKETQARVLEALLKDGDVEKAVRIVKEVTEKLSKYEVPPEKLVIHEQITRDLKDYKATGPHVAVAKRLAARGVKIRPGTVISYIVLKGSGRIGDRAIPFDEFDPTKHKYDAEYYIENQVLPAVERILRAFGYRKEDLRYQKTRQVGLSAWLKPKGT

SEQ ID NO: 1365 - protein, 774 aa, synthetic construct
MILDTDYITEDGKPVWRIFKKENGEFKIEYDRTFEPYFYALLKDDSAIEEVKKITAERHGTVVTVKRVEKVQKKFLGRPVEVWKLYFTHFQDIPAIFDKIREHPAVIDIYEYDIPFAKRYLIDKGLVPMEGDEELKMLAFDIETLYHEGEEFAEGPILMISYADEEGARVITWKNVDLPYVDVVSTEREMIKRFLRVVKEKDPDVLITYNGDNFDFAYLKKRCEKLGINFALGRDGSEPKIQRMGDRFAVEVKGRIHFDLYPVIRRTINLPTYTLEAVYEAVFGQPKEKVYAEEITTAWETGENLERVARYSMEDAKVTYELGKEFLPMEAQLSRLIGQSLWDVSRSSTGNLVEWFLLRKAYERNELAPNKPDEKELARRRQSYEGGYVKEPERGLWENIVYLDFRSLYPSIIITHNVSPDTLNREGCKEYDVAPQVGHRFCKDFPGFIPSLLGDLLEERQKIKKKMKATIDPIERKLLDYRQRAIKILANSYYGYYGYARARWYCKECAESVTAWGREYITMTIKEIEEKYGFKVIYSDTDGFFATIPGADAETVKKKAMEFLKYINAKLPGALELEYEGFYKRGFFVTKKKYAVIDEEGKITTRGLEIVRRDWSEIAKETQARVLEALLKDGDVEKAVRIVKEVTEKLSKYEVPPEKLVIHEQITRDLKDYKATGPHVAVAKRLAARGVKIRPGTVISYIVLKGSGRIGDRAIPFDEFDPTKHKYDAEYYIENQVLPAVERILRAFGYRKEDLRYQKTRQVGLSAWLKPKGT

SEQ ID NO: 1366 - protein, 774 aa, synthetic construct
MILDTDYITEDGKPVWRIFKKENGEFKIEYDRTFEPYFYALLKDDSAIEEVKKITAERHGTVVTVKRVEKVQKKFLGRPVEVWKLYFTHFQDIPAIHDKIREHPAVIDIYEYDIPFAKRYLIDKGLVPMEGDEELKMLAFDIETLYHEGEEFAEGPILMISYADEEGARVITWKNVDLPYVDVVSTEREMIKRFLRVVKEKDPDVLITYNGDNFDFAYLKKRCEKLGINFALGRDGSEPKIQRMGDRFAVEVKGRIHFDLYPVIRRTINLPTYTLEAVYEAVFGQPKEKVYAEEITTAWETGENLERVARYSMEDAKVTYELGKEFLPMEAQLSRLIGQSLWDVSRSSTGNLVEWFLLRKAYERNELAPNKPDEKELARRRQSYEGGYVKEPERGLWENIVYLDFRSLYPSIIITHNVSPDTLNREGCKEYDVAPQVGHRFCKDFPGFIPSLLGDLLEERQKIKKKMKATIDPIERKLLDYRQRAIKILANSYYGYYGYARARWYCKECAESVTAWGREYITMTIKEIEEKYGFKVIYSDTDGFFATIPGADAETVKKKAMEFLKYINAKLPGALELEYEGFYKRGFFVTKKKYAVIDEEGKITTRGLEIVRRDWSEIAKETQARVLEALLKDGDVEKAVRIVKEVTEKLSKYEVPPEKLVIHEQITRDLKDYKATGPHVAVAKRLAARGVKIRPGTVISYIVLKGSGRIGDRAIPFDEFDPTKHKYDAEYYIENQVLPAVERILRAFGYRKEDLRYQKTRQVGLSAWLKPKGT

SEQ ID NO: 1367 - protein, 774 aa, synthetic construct
MILDTDYITEDGKPVWRIFKKENGEFKIEYDRTFEPYFYALLKDDSAIEEVKKITAERHGTVVTVKRVEKVQKKFLGRPVEVWKLYFTHFQDIPAIWDKIREHPAVIDIYEYDIPFAKRYLIDKGLVPMEGDEELKMLAFDIETLYHEGEEFAEGPILMISYADEEGARVITWKNVDLPYVDVVSTEREMIKRFLRVVKEKDPDVLITYNGDNFDFAYLKKRCEKLGINFALGRDGSEPKIQRMGDRFAVEVKGRIHFDLYPVIRRTINLPTYTLEAVYEAVFGQPKEKVYAEEITTAWETGENLERVARYSMEDAKVTYELGKEFLPMEAQLSRLIGQSLWDVSRSSTGNLVEWFLLRKAYERNELAPNKPDEKELARRRQSYEGGYVKEPERGLWENIVYLDFRSLYPSIIITHNVSPDTLNREGCKEYDVAPQVGHRFCKDFPGFIPSLLGDLLEERQKIKKKMKATIDPIERKLLDYRQRAIKILANSYYGYYGYARARWYCKECAESVTAWGREYITMTIKEIEEKYGFKVIYSDTDGFFATIPGADAETVKKKAMEFLKYINAKLPGALELEYEGFYKRGFFVTKKKYAVIDEEGKITTRGLEIVRRDWSEIAKETQARVLEALLKDGDVEKAVRIVKEVTEKLSKYEVPPEKLVIHEQITRDLKDYKATGPHVAVAKRLAARGVKIRPGTVISYIVLKGSGRIGDRAIPFDEFDPTKHKYDAEYYIENQVLPAVERILRAFGYRKEDLRYQKTRQVGLSAWLKPKGT

SEQ ID NO: 1368 - protein, 774 aa, synthetic construct
MILDTDYITEDGKPVWRIFKKENGEFKIEYDRTFEPYFYALLKDDSAIEEVKKITAERHGTVVTVKRVEKVQKKFLGRPVEVWKLYFTHFQDRPAIFDKIREHPAVIDIYEYDIPFAKRYLIDKGLVPMEGDEELKMLAFDIETLYHEGEEFAEGPILMISYADEEGARVITWKNVDLPYVDVVSTEREMIKRFLRVVKEKDPDVLITYNGDNFDFAYLKKRCEKLGINFALGRDGSEPKIQRMGDRFAVEVKGRIHFDLYPVIRRTINLPTYTLEAVYEAVFGQPKEKVYAEEITTAWETGENLERVARYSMEDAKVTYELGKEFLPMEAQLSRLIGQSLWDVSRSSTGNLVEWFLLRKAYERNELAPNKPDEKELARRRQSYEGGYVKEPERGLWENIVYLDFRSLYPSIIITHNVSPDTLNREGCKEYDVAPQVGHRFCKDFPGFIPSLLGDLLEERQKIKKKMKATIDPIERKLLDYRQRAIKILANSYYGYYGYARARWYCKECAESVTAWGREYITMTIKEIEEKYGFKVIYSDTDGFFATIPGADAETVKKKAMEFLKYINAKLPGALELEYEGFYKRGFFVTKKKYAVIDEEGKITTRGLEIVRRDWSEIAKETQARVLEALLKDGDVEKAVRIVKEVTEKLSKYEVPPEKLVIHEQITRDLKDYKATGPHVAVAKRLAARGVKIRPGTVISYIVLKGSGRIGDRAIPFDEFDPTKHKYDAEYYIENQVLPAVERILRAFGYRKEDLRYQKTRQVGLSAWLKPKGT

SEQ ID NO: 1369 - protein, 774 aa, synthetic construct
MILDTDYITEDGKPVWRIFKKENGEFKIEYDRTFEPYFYALLKDDSAIEEVKKITAERHGTVVTVKRVEKVQKKFLGRPVEVWKLYFTHIQDVPAIRDKIREHPAVIDIYEYDIPFAKRYLIDKGLVPMEGDEELKMLAFDIETLYHEGEEFAEGPILMISYADEEGARVITWKNVDLPYVDVVSTEREMIKRFLRVVKEKDPDVLITYNGDNFDFAYLKKRCEKLGINFALGRDGSEPKIQRMGDRFAVEVKGRIHFDLYPVIRRTINLPTYTLEAVYEAVFGQPKEKVYAEEITTAWETGENLERVARYSMEDAKVTYELGKEFLPMEAQLSRLIGQSLWDVSRSSTGNLVEWFLLRKAYERNELAPNKPDEKELARRRQSYEGGYVKEPERGLWENIVYLDFRSLYPSIIITHNVSPDTLNREGCKEYDVAPQVGHRFCKDFPGFIPSLLGDLLEERQKIKKKMKATIDPIERKLLDYRQRAIKILANSYYGYYGYARARWYCKECAESVTAWGREYITMTIKEIEEKYGFKVIYSDTDGFFATIPGADAETVKKKAMEFLKYINAKLPGALELEYEGFYKRGFFVTKKKYAVIDEEGKITTRGLEIVRRDWSEIAKETQARVLEALLKDGDVEKAVRIVKEVTEKLSKYEVPPEKLVIHEQITRDLKDYKATGPHVAVAKRLAARGVKIRPGTVISYIVLKGSGRIGDRAIPFDEFDPTKHKYDAEYYIENQVLPAVERILRAFGYRKEDLRYQKTRQVGLSAWLKPKGT

SEQ ID NO: 1370 - protein, 774 aa, synthetic construct
MILDTDYITEDGKPVWRIFKKENGEFKIEYDRTFEPYFYALLKDDSAIEEVKKITAERHGTVVTVKRVEKVQKKFLGRPVEVWKLYFTHIQDVPAIADKIREHPAVIDIYEYDIPFAKRYLIDKGLVPMEGDEELKMLAFDIETLYHEGEEFAEGPILMISYADEEGARVITWKNVDLPYVDVVSTEREMIKRFLRVVKEKDPDVLITYNGDNFDFAYLKKRCEKLGINFALGRDGSEPKIQRMGDRFAVEVKGRIHFDLYPVIRRTINLPTYTLEAVYEAVFGQPKEKVYAEEITTAWETGENLERVARYSMEDAKVTYELGKEFLPMEAQLSRLIGQSLWDVSRSSTGNLVEWFLLRKAYERNELAPNKPDEKELARRRQSYEGGYVKEPERGLWENIVYLDFRSLYPSIIITHNVSPDTLNREGCKEYDVAPQVGHRFCKDFPGFIPSLLGDLLEERQKIKKKMKATIDPIERKLLDYRQRAIKILANSYYGYYGYARARWYCKECAESVTAWGREYITMTIKEIEEKYGFKVIYSDTDGFFATIPGADAETVKKKAMEFLKYINAKLPGALELEYEGFYKRGFFVTKKKYAVIDEEGKITTRGLEIVRRDWSEIAKETQARVLEALLKDGDVEKAVRIVKEVTEKLSKYEVPPEKLVIHEQITRDLKDYKATGPHVAVAKRLAARGVKIRPGTVISYIVLKGSGRIGDRAIPFDEFDPTKHKYDAEYYIENQVLPAVERILRAFGYRKEDLRYQKTRQVGLSAWLKPKGT

SEQ ID NO: 1371 - protein, 774 aa, synthetic construct
MILDTDYITEDGKPVWRIFKKENGEFKIEYDRTFEPYFYALLKDDSAIEEVKKITAERHGTVVTVKRVEKVQKKFLGRPVEVWKLYFTHIQDIPAIRDKIREHPAVIDIYEYDIPFAKRYLIDKGLVPMEGDEELKMLAFDIETLYHEGEEFAEGPILMISYADEEGARVITWKNVDLPYVDVVSTEREMIKRFLRVVKEKDPDVLITYNGDNFDFAYLKKRCEKLGINFALGRDGSEPKIQRMGDRFAVEVKGRIHFDLYPVIRRTINLPTYTLEAVYEAVFGQPKEKVYAEEITTAWETGENLERVARYSMEDAKVTYELGKEFLPMEAQLSRLIGQSLWDVSRSSTGNLVEWFLLRKAYERNELAPNKPDEKELARRRQSYEGGYVKEPERGLWENIVYLDFRSLYPSIIITHNVSPDTLNREGCKEYDVAPQVGHRFCKDFPGFIPSLLGDLLEERQKIKKKMKATIDPIERKLLDYRQRAIKILANSYYGYYGYARARWYCKECAESVTAWGREYITMTIKEIEEKYGFKVIYSDTDGFFATIPGADAETVKKKAMEFLKYINAKLPGALELEYEGFYKRGFFVTKKKYAVIDEEGKITTRGLEIVRRDWSEIAKETQARVLEALLKDGDVEKAVRIVKEVTEKLSKYEVPPEKLVIHEQITRDLKDYKATGPHVAVAKRLAARGVKIRPGTVISYIVLKGSGRIGDRAIPFDEFDPTKHKYDAEYYIENQVLPAVERILRAFGYRKEDLRYQKTRQVGLSAWLKPKGT

SEQ ID NO: 1372 - protein, 774 aa, synthetic construct
MILDTDYITEDGKPVWRIFKKENGEFKIEYDRTFEPYFYALLKDDSAIEEVKKITAERHGTVVTVKRVEKVQKKFLGRPVEVWKLYFTHIQDIPAIADKIREHPAVIDIYEYDIPFAKRYLIDKGLVPMEGDEELKMLAFDIETLYHEGEEFAEGPILMISYADEEGARVITWKNVDLPYVDVVSTEREMIKRFLRVVKEKDPDVLITYNGDNFDFAYLKKRCEKLGINFALGRDGSEPKIQRMGDRFAVEVKGRIHFDLYPVIRRTINLPTYTLEAVYEAVFGQPKEKVYAEEITTAWETGENLERVARYSMEDAKVTYELGKEFLPMEAQLSRLIGQSLWDVSRSSTGNLVEWFLLRKAYERNELAPNKPDEKELARRRQSYEGGYVKEPERGLWENIVYLDFRSLYPSIIITHNVSPDTLNREGCKEYDVAPQVGHRFCKDFPGFIPSLLGDLLEERQKIKKKMKATIDPIERKLLDYRQRAIKILANSYYGYYGYARARWYCKECAESVTAWGREYITMTIKEIEEKYGFKVIYSDTDGFFATIPGADAETVKKKAMEFLKYINAKLPGALELEYEGFYKRGFFVTKKKYAVIDEEGKITTRGLEIVRRDWSEIAKETQARVLEALLKDGDVEKAVRIVKEVTEKLSKYEVPPEKLVIHEQITRDLKDYKATGPHVAVAKRLAARGVKIRPGTVISYIVLKGSGRIGDRAIPFDEFDPTKHKYDAEYYIENQVLPAVERILRAFGYRKEDLRYQKTRQVGLSAWLKPKGT

SEQ ID NO: 1373 - protein, 774 aa, synthetic construct
MILDTDYITEDGKPVWRIFKKENGEFKIEYDRTFEPYFYALLKDDSAIEEVKKITAERHGTVVTVKRVEKVQKKFLGRPVEVWKLYFTHIQDIPAIFDKIREHPAVIDIYEYDIPFAKRYLIDKGLVPMEGDEELKMLAFDIETLYHEGEEFAEGPILMISYADEEGARVITWKNVDLPYVDVVSTEREMIKRFLRVVKEKDPDVLITYNGDNFDFAYLKKRCEKLGINFALGRDGSEPKIQRMGDRFAVEVKGRIHFDLYPVIRRTINLPTYTLEAVYEAVFGQPKEKVYAEEITTAWETGENLERVARYSMEDAKVTYELGKEFLPMEAQLSRLIGQSLWDVSRSSTGNLVEWFLLRKAYERNELAPNKPDEKELARRRQSYEGGYVKEPERGLWENIVYLDFRSLYPSIIITHNVSPDTLNREGCKEYDVAPQVGHRFCKDFPGFIPSLLGDLLEERQKIKKKMKATIDPIERKLLDYRQRAIKILANSYYGYYGYARARWYCKECAESVTAWGREYITMTIKEIEEKYGFKVIYSDTDGFFATIPGADAETVKKKAMEFLKYINAKLPGALELEYEGFYKRGFFVTKKKYAVIDEEGKITTRGLEIVRRDWSEIAKETQARVLEALLKDGDVEKAVRIVKEVTEKLSKYEVPPEKLVIHEQITRDLKDYKATGPHVAVAKRLAARGVKIRPGTVISYIVLKGSGRIGDRAIPFDEFDPTKHKYDAEYYIENQVLPAVERILRAFGYRKEDLRYQKTRQVGLSAWLKPKGT

SEQ ID NO: 1374 - protein, 774 aa, synthetic construct
MILDTDYITEDGKPVWRIFKKENGEFKIEYDRTFEPYFYALLKDDSAIEEVKKITAERHGTVVTVKRVEKVQKKFLGRPVEVWKLYFTHIQDIPAIHDKIREHPAVIDIYEYDIPFAKRYLIDKGLVPMEGDEELKMLAFDIETLYHEGEEFAEGPILMISYADEEGARVITWKNVDLPYVDVVSTEREMIKRFLRVVKEKDPDVLITYNGDNFDFAYLKKRCEKLGINFALGRDGSEPKIQRMGDRFAVEVKGRIHFDLYPVIRRTINLPTYTLEAVYEAVFGQPKEKVYAEEITTAWETGENLERVARYSMEDAKVTYELGKEFLPMEAQLSRLIGQSLWDVSRSSTGNLVEWFLLRKAYERNELAPNKPDEKELARRRQSYEGGYVKEPERGLWENIVYLDFRSLYPSIIITHNVSPDTLNREGCKEYDVAPQVGHRFCKDFPGFIPSLLGDLLEERQKIKKKMKATIDPIERKLLDYRQRAIKILANSYYGYYGYARARWYCKECAESVTAWGREYITMTIKEIEEKYGFKVIYSDTDGFFATIPGADAETVKKKAMEFLKYINAKLPGALELEYEGFYKRGFFVTKKKYAVIDEEGKITTRGLEIVRRDWSEIAKETQARVLEALLKDGDVEKAVRIVKEVTEKLSKYEVPPEKLVIHEQITRDLKDYKATGPHVAVAKRLAARGVKIRPGTVISYIVLKGSGRIGDRAIPFDEFDPTKHKYDAEYYIENQVLPAVERILRAFGYRKEDLRYQKTRQVGLSAWLKPKGT

SEQ ID NO: 1375 - protein, 774 aa, synthetic construct
MILDTDYITEDGKPVWRIFKKENGEFKIEYDRTFEPYFYALLKDDSAIEEVKKITAERHGTVVTVKRVEKVQKKFLGRPVEVWKLYFTHWQDVPAIRDKIREHPAVIDIYEYDIPFAKRYLIDKGLVPMEGDEELKMLAFDIETLYHEGEEFAEGPILMISYADEEGARVITWKNVDLPYVDVVSTEREMIKRFLRVVKEKDPDVLITYNGDNFDFAYLKKRCEKLGINFALGRDGSEPKIQRMGDRFAVEVKGRIHFDLYPVIRRTINLPTYTLEAVYEAVFGQPKEKVYAEEITTAWETGENLERVARYSMEDAKVTYELGKEFLPMEAQLSRLIGQSLWDVSRSSTGNLVEWFLLRKAYERNELAPNKPDEKELARRRQSYEGGYVKEPERGLWENIVYLDFRSLYPSIIITHNVSPDTLNREGCKEYDVAPQVGHRFCKDFPGFIPSLLGDLLEERQKIKKKMKATIDPIERKLLDYRQRAIKILANSYYGYYGYARARWYCKECAESVTAWGREYITMTIKEIEEKYGFKVIYSDTDGFFATIPGADAETVKKKAMEFLKYINAKLPGALELEYEGFYKRGFFVTKKKYAVIDEEGKITTRGLEIVRRDWSEIAKETQARVLEALLKDGDVEKAVRIVKEVTEKLSKYEVPPEKLVIHEQITRDLKDYKATGPHVAVAKRLAARGVKIRPGTVISYIVLKGSGRIGDRAIPFDEFDPTKHKYDAEYYIENQVLPAVERILRAFGYRKEDLRYQKTRQVGLSAWLKPKGT

SEQ ID NO: 1376 - protein, 774 aa, synthetic construct
MILDTDYITEDGKPVWRIFKKENGEFKIEYDRTFEPYFYALLKDDSAIEEVKKITAERHGTVVTVKRVEKVQKKFLGRPVEVWKLYFTHWQDVPAIFDKIREHPAVIDIYEYDIPFAKRYLIDKGLVPMEGDEELKMLAFDIETLYHEGEEFAEGPILMISYADEEGARVITWKNVDLPYVDVVSTEREMIKRFLRVVKEKDPDVLITYNGDNFDFAYLKKRCEKLGINFALGRDGSEPKIQRMGDRFAVEVKGRIHFDLYPVIRRTINLPTYTLEAVYEAVFGQPKEKVYAEEITTAWETGENLERVARYSMEDAKVTYELGKEFLPMEAQLSRLIGQSLWDVSRSSTGNLVEWFLLRKAYERNELAPNKPDEKELARRRQSYEGGYVKEPERGLWENIVYLDFRSLYPSIIITHNVSPDTLNREGCKEYDVAPQVGHRFCKDFPGFIPSLLGDLLEERQKIKKKMKATIDPIERKLLDYRQRAIKILANSYYGYYGYARARWYCKECAESVTAWGREYITMTIKEIEEKYGFKVIYSDTDGFFATIPGADAETVKKKAMEFLKYINAKLPGALELEYEGFYKRGFFVTKKKYAVIDEEGKITTRGLEIVRRDWSEIAKETQARVLEALLKDGDVEKAVRIVKEVTEKLSKYEVPPEKLVIHEQITRDLKDYKATGPHVAVAKRLAARGVKIRPGTVISYIVLKGSGRIGDRAIPFDEFDPTKHKYDAEYYIENQVLPAVERILRAFGYRKEDLRYQKTRQVGLSAWLKPKGT

SEQ ID NO: 1377 - protein, 774 aa, synthetic construct
MILDTDYITEDGKPVWRIFKKENGEFKIEYDRTFEPYFYALLKDDSAIEEVKKITAERHGTVVTVKRVEKVQKKFLGRPVEVWKLYFTHWQDIPAIRDKIREHPAVIDIYEYDIPFAKRYLIDKGLVPMEGDEELKMLAFDIETLYHEGEEFAEGPILMISYADEEGARVITWKNVDLPYVDVVSTEREMIKRFLRVVKEKDPDVLITYNGDNFDFAYLKKRCEKLGINFALGRDGSEPKIQRMGDRFAVEVKGRIHFDLYPVIRRTINLPTYTLEAVYEAVFGQPKEKVYAEEITTAWETGENLERVARYSMEDAKVTYELGKEFLPMEAQLSRLIGQSLWDVSRSSTGNLVEWFLLRKAYERNELAPNKPDEKELARRRQSYEGGYVKEPERGLWENIVYLDFRSLYPSIIITHNVSPDTLNREGCKEYDVAPQVGHRFCKDFPGFIPSLLGDLLEERQKIKKKMKATIDPIERKLLDYRQRAIKILANSYYGYYGYARARWYCKECAESVTAWGREYITMTIKEIEEKYGFKVIYSDTDGFFATIPGADAETVKKKAMEFLKYINAKLPGALELEYEGFYKRGFFVTKKKYAVIDEEGKITTRGLEIVRRDWSEIAKETQARVLEALLKDGDVEKAVRIVKEVTEKLSKYEVPPEKLVIHEQITRDLKDYKATGPHVAVAKRLAARGVKIRPGTVISYIVLKGSGRIGDRAIPFDEFDPTKHKYDAEYYIENQVLPAVERILRAFGYRKEDLRYQKTRQVGLSAWLKPKGT

SEQ ID NO: 1378 - protein, 774 aa, synthetic construct
MILDTDYITEDGKPVWRIFKKENGEFKIEYDRTFEPYFYALLKDDSAIEEVKKITAERHGTVVTVKRVEKVQKKFLGRPVEVWKLYFTHYQDVPAIRDKIREHPAVIDIYEYDIPFAKRYLIDKGLVPMEGDEELKMLAFDIETLYHEGEEFAEGPILMISYADEEGARVITWKNVDLPYVDVVSTEREMIKRFLRVVKEKDPDVLITYNGDNFDFAYLKKRCEKLGINFALGRDGSEPKIQRMGDRFAVEVKGRIHFDLYPVIRRTINLPTYTLEAVYEAVFGQPKEKVYAEEITTAWETGENLERVARYSMEDAKVTYELGKEFLPMEAQLSRLIGQSLWDVSRSSTGNLVEWFLLRKAYERNELAPNKPDEKELARRRQSYEGGYVKEPERGLWENIVYLDFRSLYPSIIITHNVSPDTLNREGCKEYDVAPQVGHRFCKDFPGFIPSLLGDLLEERQKIKKKMKATIDPIERKLLDYRQRAIKILANSYYGYYGYARARWYCKECAESVTAWGREYITMTIKEIEEKYGFKVIYSDTDGFFATIPGADAETVKKKAMEFLKYINAKLPGALELEYEGFYKRGFFVTKKKYAVIDEEGKITTRGLEIVRRDWSEIAKETQARVLEALLKDGDVEKAVRIVKEVTEKLSKYEVPPEKLVIHEQITRDLKDYKATGPHVAVAKRLAARGVKIRPGTVISYIVLKGSGRIGDRAIPFDEFDPTKHKYDAEYYIENQVLPAVERILRAFGYRKEDLRYQKTRQVGLSAWLKPKGT

SEQ ID NO: 1379 - protein, 774 aa, synthetic construct
MILDTDYITEDGKPVWRIFKKENGEFKIEYDRTFEPYFYALLKDDSAIEEVKKITAERHGTVVTVKRVEKVQKKFLGRPVEVWKLYFTHYQDIPAIRDKIREHPAVIDIYEYDIPFAKRYLIDKGLVPMEGDEELKMLAFDIETLYHEGEEFAEGPILMISYADEEGARVITWKNVDLPYVDVVSTEREMIKRFLRVVKEKDPDVLITYNGDNFDFAYLKKRCEKLGINFALGRDGSEPKIQRMGDRFAVEVKGRIHFDLYPVIRRTINLPTYTLEAVYEAVFGQPKEKVYAEEITTAWETGENLERVARYSMEDAKVTYELGKEFLPMEAQLSRLIGQSLWDVSRSSTGNLVEWFLLRKAYERNELAPNKPDEKELARRRQSYEGGYVKEPERGLWENIVYLDFRSLYPSIIITHNVSPDTLNREGCKEYDVAPQVGHRFCKDFPGFIPSLLGDLLEERQKIKKKMKATIDPIERKLLDYRQRAIKILANSYYGYYGYARARWYCKECAESVTAWGREYITMTIKEIEEKYGFKVIYSDTDGFFATIPGADAETVKKKAMEFLKYINAKLPGALELEYEGFYKRGFFVTKKKYAVIDEEGKITTRGLEIVRRDWSEIAKETQARVLEALLKDGDVEKAVRIVKEVTEKLSKYEVPPEKLVIHEQITRDLKDYKATGPHVAVAKRLAARGVKIRPGTVISYIVLKGSGRIGDRAIPFDEFDPTKHKYDAEYYIENQVLPAVERILRAFGYRKEDLRYQKTRQVGLSAWLKPKGT

SEQ ID NO: 1380 - protein, 774 aa, synthetic construct
MILDTDYITEDGKPVWRIFKKENGEFKIEYDRTFEPYFYALLKDDSAIEEVKKITAERHGTVVTVKRVEKVQKKFLGRPVEVWKLYFTHYQDIPAIADKIREHPAVIDIYEYDIPFAKRYLIDKGLVPMEGDEELKMLAFDIETLYHEGEEFAEGPILMISYADEEGARVITWKNVDLPYVDVVSTEREMIKRFLRVVKEKDPDVLITYNGDNFDFAYLKKRCEKLGINFALGRDGSEPKIQRMGDRFAVEVKGRIHFDLYPVIRRTINLPTYTLEAVYEAVFGQPKEKVYAEEITTAWETGENLERVARYSMEDAKVTYELGKEFLPMEAQLSRLIGQSLWDVSRSSTGNLVEWFLLRKAYERNELAPNKPDEKELARRRQSYEGGYVKEPERGLWENIVYLDFRSLYPSIIITHNVSPDTLNREGCKEYDVAPQVGHRFCKDFPGFIPSLLGDLLEERQKIKKKMKATIDPIERKLLDYRQRAIKILANSYYGYYGYARARWYCKECAESVTAWGREYITMTIKEIEEKYGFKVIYSDTDGFFATIPGADAETVKKKAMEFLKYINAKLPGALELEYEGFYKRGFFVTKKKYAVIDEEGKITTRGLEIVRRDWSEIAKETQARVLEALLKDGDVEKAVRIVKEVTEKLSKYEVPPEKLVIHEQITRDLKDYKATGPHVAVAKRLAARGVKIRPGTVISYIVLKGSGRIGDRAIPFDEFDPTKHKYDAEYYIENQVLPAVERILRAFGYRKEDLRYQKTRQVGLSAWLKPKGT

SEQ ID NO: 1381 - protein, 774 aa, synthetic construct
MILDTDYITEDGKPVWRIFKKENGEFKIEYDRTFEPYFYALLKDDSAIEEVKKITAERHGTVVTVKRVEKVQKKFLGRPVEVWKLYFTHYQDIPAIHDKIREHPAVIDIYEYDIPFAKRYLIDKGLVPMEGDEELKMLAFDIETLYHEGEEFAEGPILMISYADEEGARVITWKNVDLPYVDVVSTEREMIKRFLRVVKEKDPDVLITYNGDNFDFAYLKKRCEKLGINFALGRDGSEPKIQRMGDRFAVEVKGRIHFDLYPVIRRTINLPTYTLEAVYEAVFGQPKEKVYAEEITTAWETGENLERVARYSMEDAKVTYELGKEFLPMEAQLSRLIGQSLWDVSRSSTGNLVEWFLLRKAYERNELAPNKPDEKELARRRQSYEGGYVKEPERGLWENIVYLDFRSLYPSIIITHNVSPDTLNREGCKEYDVAPQVGHRFCKDFPGFIPSLLGDLLEERQKIKKKMKATIDPIERKLLDYRQRAIKILANSYYGYYGYARARWYCKECAESVTAWGREYITMTIKEIEEKYGFKVIYSDTDGFFATIPGADAETVKKKAMEFLKYINAKLPGALELEYEGFYKRGFFVTKKKYAVIDEEGKITTRGLEIVRRDWSEIAKETQARVLEALLKDGDVEKAVRIVKEVTEKLSKYEVPPEKLVIHEQITRDLKDYKATGPHVAVAKRLAARGVKIRPGTVISYIVLKGSGRIGDRAIPFDEFDPTKHKYDAEYYIENQVLPAVERILRAFGYRKEDLRYQKTRQVGLSAWLKPKGT

SEQ ID NO: 1382 - protein, 774 aa, synthetic construct
MILDTDYITEDGKPVWRIFKKENGEFKIEYDRTFEPYFYALLKDDSAIEEVKKITAERHGTVVTVKRVEKVQKKFLGRPVEVWKLYFTHYQDKPAIADKIREHPAVIDIYEYDIPFAKRYLIDKGLVPMEGDEELKMLAFDIETLYHEGEEFAEGPILMISYADEEGARVITWKNVDLPYVDVVSTEREMIKRFLRVVKEKDPDVLITYNGDNFDFAYLKKRCEKLGINFALGRDGSEPKIQRMGDRFAVEVKGRIHFDLYPVIRRTINLPTYTLEAVYEAVFGQPKEKVYAEEITTAWETGENLERVARYSMEDAKVTYELGKEFLPMEAQLSRLIGQSLWDVSRSSTGNLVEWFLLRKAYERNELAPNKPDEKELARRRQSYEGGYVKEPERGLWENIVYLDFRSLYPSIIITHNVSPDTLNREGCKEYDVAPQVGHRFCKDFPGFIPSLLGDLLEERQKIKKKMKATIDPIERKLLDYRQRAIKILANSYYGYYGYARARWYCKECAESVTAWGREYITMTIKEIEEKYGFKVIYSDTDGFFATIPGADAETVKKKAMEFLKYINAKLPGALELEYEGFYKRGFFVTKKKYAVIDEEGKITTRGLEIVRRDWSEIAKETQARVLEALLKDGDVEKAVRIVKEVTEKLSKYEVPPEKLVIHEQITRDLKDYKATGPHVAVAKRLAARGVKIRPGTVISYIVLKGSGRIGDRAIPFDEFDPTKHKYDAEYYIENQVLPAVERILRAFGYRKEDLRYQKTRQVGLSAWLKPKGT

SEQ ID NO: 1383 - protein, 774 aa, synthetic construct
MILDTDYITEDGKPVWRIFKKENGEFKIEYDRTFEPYFYALLKDDSAIEEVKKITAERHGTVVTVKRVEKVQKKFLGRPVEVWKLYFTHYQDQPAIHDKIREHPAVIDIYEYDIPFAKRYLIDKGLVPMEGDEELKMLAFDIETLYHEGEEFAEGPILMISYADEEGARVITWKNVDLPYVDVVSTEREMIKRFLRVVKEKDPDVLITYNGDNFDFAYLKKRCEKLGINFALGRDGSEPKIQRMGDRFAVEVKGRIHFDLYPVIRRTINLPTYTLEAVYEAVFGQPKEKVYAEEITTAWETGENLERVARYSMEDAKVTYELGKEFLPMEAQLSRLIGQSLWDVSRSSTGNLVEWFLLRKAYERNELAPNKPDEKELARRRQSYEGGYVKEPERGLWENIVYLDFRSLYPSIIITHNVSPDTLNREGCKEYDVAPQVGHRFCKDFPGFIPSLLGDLLEERQKIKKKMKATIDPIERKLLDYRQRAIKILANSYYGYYGYARARWYCKECAESVTAWGREYITMTIKEIEEKYGFKVIYSDTDGFFATIPGADAETVKKKAMEFLKYINAKLPGALELEYEGFYKRGFFVTKKKYAVIDEEGKITTRGLEIVRRDWSEIAKETQARVLEALLKDGDVEKAVRIVKEVTEKLSKYEVPPEKLVIHEQITRDLKDYKATGPHVAVAKRLAARGVKIRPGTVISYIVLKGSGRIGDRAIPFDEFDPTKHKYDAEYYIENQVLPAVERILRAFGYRKEDLRYQKTRQVGLSAWLKPKGT

SEQ ID NO: 1384 - protein, 774 aa, synthetic construct
MILDTDYITEDGKPVWRIFKKENGEFKIEYDRTFEPYFYALLKDDSAIEEVKKITAERHGTVVTVKRVEKVQKKFLGRPVEVWKLYFTHPQDVPAIADKIREHPAVIDIYEYDIPFAKRYLIDKGLVPMEGDEELKMLAFDIETLYHEGEEFAEGPILMISYADEEGARVITWKNVDLPYVDVVSTEREMIKRFLRVVKEKDPDVLITYNGDNFDFAYLKKRCEKLGINFALGRDGSEPKIQRMGDRFAVEVKGRIHFDLYPVIRRTINLPTYTLEAVYEAVFGQPKEKVYAEEITTAWETGENLERVARYSMEDAKVTYELGKEFLPMEAQLSRLIGQSLWDVSRSSTGNLVEWFLLRKAYERNELAPNKPDEKELARRRQSYEGGYVKEPERGLWENIVYLDFRSLYPSIIITHNVSPDTLNREGCKEYDVAPQVGHRFCKDFPGFIPSLLGDLLEERQKIKKKMKATIDPIERKLLDYRQRAIKILANSYYGYYGYARARWYCKECAESVTAWGREYITMTIKEIEEKYGFKVIYSDTDGFFATIPGADAETVKKKAMEFLKYINAKLPGALELEYEGFYKRGFFVTKKKYAVIDEEGKITTRGLEIVRRDWSEIAKETQARVLEALLKDGDVEKAVRIVKEVTEKLSKYEVPPEKLVIHEQITRDLKDYKATGPHVAVAKRLAARGVKIRPGTVISYIVLKGSGRIGDRAIPFDEFDPTKHKYDAEYYIENQVLPAVERILRAFGYRKEDLRYQKTRQVGLSAWLKPKGT

SEQ ID NO: 1385 - protein, 774 aa, synthetic construct
MILDTDYITEDGKPVWRIFKKENGEFKIEYDRTFEPYFYALLKDDSAIEEVKKITAERHGTVVTVKRVEKVQKKFLGRPVEVWKLYFTHPQDVPAIFDKIREHPAVIDIYEYDIPFAKRYLIDKGLVPMEGDEELKMLAFDIETLYHEGEEFAEGPILMISYADEEGARVITWKNVDLPYVDVVSTEREMIKRFLRVVKEKDPDVLITYNGDNFDFAYLKKRCEKLGINFALGRDGSEPKIQRMGDRFAVEVKGRIHFDLYPVIRRTINLPTYTLEAVYEAVFGQPKEKVYAEEITTAWETGENLERVARYSMEDAKVTYELGKEFLPMEAQLSRLIGQSLWDVSRSSTGNLVEWFLLRKAYERNELAPNKPDEKELARRRQSYEGGYVKEPERGLWENIVYLDFRSLYPSIIITHNVSPDTLNREGCKEYDVAPQVGHRFCKDFPGFIPSLLGDLLEERQKIKKKMKATIDPIERKLLDYRQRAIKILANSYYGYYGYARARWYCKECAESVTAWGREYITMTIKEIEEKYGFKVIYSDTDGFFATIPGADAETVKKKAMEFLKYINAKLPGALELEYEGFYKRGFFVTKKKYAVIDEEGKITTRGLEIVRRDWSEIAKETQARVLEALLKDGDVEKAVRIVKEVTEKLSKYEVPPEKLVIHEQITRDLKDYKATGPHVAVAKRLAARGVKIRPGTVISYIVLKGSGRIGDRAIPFDEFDPTKHKYDAEYYIENQVLPAVERILRAFGYRKEDLRYQKTRQVGLSAWLKPKGT

SEQ ID NO: 1386 - protein, 774 aa, synthetic construct
MILDTDYITEDGKPVWRIFKKENGEFKIEYDRTFEPYFYALLKDDSAIEEVKKITAERHGTVVTVKRVEKVQKKFLGRPVEVWKLYFTHPQDVPAIHDKIREHPAVIDIYEYDIPFAKRYLIDKGLVPMEGDEELKMLAFDIETLYHEGEEFAEGPILMISYADEEGARVITWKNVDLPYVDVVSTEREMIKRFLRVVKEKDPDVLITYNGDNFDFAYLKKRCEKLGINFALGRDGSEPKIQRMGDRFAVEVKGRIHFDLYPVIRRTINLPTYTLEAVYEAVFGQPKEKVYAEEITTAWETGENLERVARYSMEDAKVTYELGKEFLPMEAQLSRLIGQSLWDVSRSSTGNLVEWFLLRKAYERNELAPNKPDEKELARRRQSYEGGYVKEPERGLWENIVYLDFRSLYPSIIITHNVSPDTLNREGCKEYDVAPQVGHRFCKDFPGFIPSLLGDLLEERQKIKKKMKATIDPIERKLLDYRQRAIKILANSYYGYYGYARARWYCKECAESVTAWGREYITMTIKEIEEKYGFKVIYSDTDGFFATIPGADAETVKKKAMEFLKYINAKLPGALELEYEGFYKRGFFVTKKKYAVIDEEGKITTRGLEIVRRDWSEIAKETQARVLEALLKDGDVEKAVRIVKEVTEKLSKYEVPPEKLVIHEQITRDLKDYKATGPHVAVAKRLAARGVKIRPGTVISYIVLKGSGRIGDRAIPFDEFDPTKHKYDAEYYIENQVLPAVERILRAFGYRKEDLRYQKTRQVGLSAWLKPKGT

SEQ ID NO: 1387 - protein, 774 aa, synthetic construct
MILDTDYITEDGKPVWRIFKKENGEFKIEYDRTFEPYFYALLKDDSAIEEVKKITAERHGTVVTVKRVEKVQKKFLGRPVEVWKLYFTHPQDVPAIWDKIREHPAVIDIYEYDIPFAKRYLIDKGLVPMEGDEELKMLAFDIETLYHEGEEFAEGPILMISYADEEGARVITWKNVDLPYVDVVSTEREMIKRFLRVVKEKDPDVLITYNGDNFDFAYLKKRCEKLGINFALGRDGSEPKIQRMGDRFAVEVKGRIHFDLYPVIRRTINLPTYTLEAVYEAVFGQPKEKVYAEEITTAWETGENLERVARYSMEDAKVTYELGKEFLPMEAQLSRLIGQSLWDVSRSSTGNLVEWFLLRKAYERNELAPNKPDEKELARRRQSYEGGYVKEPERGLWENIVYLDFRSLYPSIIITHNVSPDTLNREGCKEYDVAPQVGHRFCKDFPGFIPSLLGDLLEERQKIKKKMKATIDPIERKLLDYRQRAIKILANSYYGYYGYARARWYCKECAESVTAWGREYITMTIKEIEEKYGFKVIYSDTDGFFATIPGADAETVKKKAMEFLKYINAKLPGALELEYEGFYKRGFFVTKKKYAVIDEEGKITTRGLEIVRRDWSEIAKETQARVLEALLKDGDVEKAVRIVKEVTEKLSKYEVPPEKLVIHEQITRDLKDYKATGPHVAVAKRLAARGVKIRPGTVISYIVLKGSGRIGDRAIPFDEFDPTKHKYDAEYYIENQVLPAVERILRAFGYRKEDLRYQKTRQVGLSAWLKPKGT

SEQ ID NO: 1388 - protein, 774 aa, synthetic construct
MILDTDYITEDGKPVWRIFKKENGEFKIEYDRTFEPYFYALLKDDSAIEEVKKITAERHGTVVTVKRVEKVQKKFLGRPVEVWKLYFTHPQDIPAIRDKIREHPAVIDIYEYDIPFAKRYLIDKGLVPMEGDEELKMLAFDIETLYHEGEEFAEGPILMISYADEEGARVITWKNVDLPYVDVVSTEREMIKRFLRVVKEKDPDVLITYNGDNFDFAYLKKRCEKLGINFALGRDGSEPKIQRMGDRFAVEVKGRIHFDLYPVIRRTINLPTYTLEAVYEAVFGQPKEKVYAEEITTAWETGENLERVARYSMEDAKVTYELGKEFLPMEAQLSRLIGQSLWDVSRSSTGNLVEWFLLRKAYERNELAPNKPDEKELARRRQSYEGGYVKEPERGLWENIVYLDFRSLYPSIIITHNVSPDTLNREGCKEYDVAPQVGHRFCKDFPGFIPSLLGDLLEERQKIKKKMKATIDPIERKLLDYRQRAIKILANSYYGYYGYARARWYCKECAESVTAWGREYITMTIKEIEEKYGFKVIYSDTDGFFATIPGADAETVKKKAMEFLKYINAKLPGALELEYEGFYKRGFFVTKKKYAVIDEEGKITTRGLEIVRRDWSEIAKETQARVLEALLKDGDVEKAVRIVKEVTEKLSKYEVPPEKLVIHEQITRDLKDYKATGPHVAVAKRLAARGVKIRPGTVISYIVLKGSGRIGDRAIPFDEFDPTKHKYDAEYYIENQVLPAVERILRAFGYRKEDLRYQKTRQVGLSAWLKPKGT

SEQ ID NO: 1389 - protein, 774 aa, synthetic construct
MILDTDYITEDGKPVWRIFKKENGEFKIEYDRTFEPYFYALLKDDSAIEEVKKITAERHGTVVTVKRVEKVQKKFLGRPVEVWKLYFTHPQDIPAIADKIREHPAVIDIYEYDIPFAKRYLIDKGLVPMEGDEELKMLAFDIETLYHEGEEFAEGPILMISYADEEGARVITWKNVDLPYVDVVSTEREMIKRFLRVVKEKDPDVLITYNGDNFDFAYLKKRCEKLGINFALGRDGSEPKIQRMGDRFAVEVKGRIHFDLYPVIRRTINLPTYTLEAVYEAVFGQPKEKVYAEEITTAWETGENLERVARYSMEDAKVTYELGKEFLPMEAQLSRLIGQSLWDVSRSSTGNLVEWFLLRKAYERNELAPNKPDEKELARRRQSYEGGYVKEPERGLWENIVYLDFRSLYPSIIITHNVSPDTLNREGCKEYDVAPQVGHRFCKDFPGFIPSLLGDLLEERQKIKKKMKATIDPIERKLLDYRQRAIKILANSYYGYYGYARARWYCKECAESVTAWGREYITMTIKEIEEKYGFKVIYSDTDGFFATIPGADAETVKKKAMEFLKYINAKLPGALELEYEGFYKRGFFVTKKKYAVIDEEGKITTRGLEIVRRDWSEIAKETQARVLEALLKDGDVEKAVRIVKEVTEKLSKYEVPPEKLVIHEQITRDLKDYKATGPHVAVAKRLAARGVKIRPGTVISYIVLKGSGRIGDRAIPFDEFDPTKHKYDAEYYIENQVLPAVERILRAFGYRKEDLRYQKTRQVGLSAWLKPKGT

SEQ ID NO: 1390 - protein, 774 aa, synthetic construct
MILDTDYITEDGKPVWRIFKKENGEFKIEYDRTFEPYFYALLKDDSAIEEVKKITAERHGTVVTVKRVEKVQKKFLGRPVEVWKLYFTHPQDIPAIFDKIREHPAVIDIYEYDIPFAKRYLIDKGLVPMEGDEELKMLAFDIETLYHEGEEFAEGPILMISYADEEGARVITWKNVDLPYVDVVSTEREMIKRFLRVVKEKDPDVLITYNGDNFDFAYLKKRCEKLGINFALGRDGSEPKIQRMGDRFAVEVKGRIHFDLYPVIRRTINLPTYTLEAVYEAVFGQPKEKVYAEEITTAWETGENLERVARYSMEDAKVTYELGKEFLPMEAQLSRLIGQSLWDVSRSSTGNLVEWFLLRKAYERNELAPNKPDEKELARRRQSYEGGYVKEPERGLWENIVYLDFRSLYPSIIITHNVSPDTLNREGCKEYDVAPQVGHRFCKDFPGFIPSLLGDLLEERQKIKKKMKATIDPIERKLLDYRQRAIKILANSYYGYYGYARARWYCKECAESVTAWGREYITMTIKEIEEKYGFKVIYSDTDGFFATIPGADAETVKKKAMEFLKYINAKLPGALELEYEGFYKRGFFVTKKKYAVIDEEGKITTRGLEIVRRDWSEIAKETQARVLEALLKDGDVEKAVRIVKEVTEKLSKYEVPPEKLVIHEQITRDLKDYKATGPHVAVAKRLAARGVKIRPGTVISYIVLKGSGRIGDRAIPFDEFDPTKHKYDAEYYIENQVLPAVERILRAFGYRKEDLRYQKTRQVGLSAWLKPKGT

SEQ ID NO: 1391 - protein, 774 aa, synthetic construct
MILDTDYITEDGKPVWRIFKKENGEFKIEYDRTFEPYFYALLKDDSAIEEVKKITAERHGTVVTVKRVEKVQKKFLGRPVEVWKLYFTHPQDIPAIHDKIREHPAVIDIYEYDIPFAKRYLIDKGLVPMEGDEELKMLAFDIETLYHEGEEFAEGPILMISYADEEGARVITWKNVDLPYVDVVSTEREMIKRFLRVVKEKDPDVLITYNGDNFDFAYLKKRCEKLGINFALGRDGSEPKIQRMGDRFAVEVKGRIHFDLYPVIRRTINLPTYTLEAVYEAVFGQPKEKVYAEEITTAWETGENLERVARYSMEDAKVTYELGKEFLPMEAQLSRLIGQSLWDVSRSSTGNLVEWFLLRKAYERNELAPNKPDEKELARRRQSYEGGYVKEPERGLWENIVYLDFRSLYPSIIITHNVSPDTLNREGCKEYDVAPQVGHRFCKDFPGFIPSLLGDLLEERQKIKKKMKATIDPIERKLLDYRQRAIKILANSYYGYYGYARARWYCKECAESVTAWGREYITMTIKEIEEKYGFKVIYSDTDGFFATIPGADAETVKKKAMEFLKYINAKLPGALELEYEGFYKRGFFVTKKKYAVIDEEGKITTRGLEIVRRDWSEIAKETQARVLEALLKDGDVEKAVRIVKEVTEKLSKYEVPPEKLVIHEQITRDLKDYKATGPHVAVAKRLAARGVKIRPGTVISYIVLKGSGRIGDRAIPFDEFDPTKHKYDAEYYIENQVLPAVERILRAFGYRKEDLRYQKTRQVGLSAWLKPKGT

SEQ ID NO: 1392 - protein, 774 aa, synthetic construct
MILDTDYITEDGKPVWRIFKKENGEFKIEYDRTFEPYFYALLKDDSAIEEVKKITAERHGTVVTVKRVEKVQKKFLGRPVEVWKLYFTHPQDIPAIWDKIREHPAVIDIYEYDIPFAKRYLIDKGLVPMEGDEELKMLAFDIETLYHEGEEFAEGPILMISYADEEGARVITWKNVDLPYVDVVSTEREMIKRFLRVVKEKDPDVLITYNGDNFDFAYLKKRCEKLGINFALGRDGSEPKIQRMGDRFAVEVKGRIHFDLYPVIRRTINLPTYTLEAVYEAVFGQPKEKVYAEEITTAWETGENLERVARYSMEDAKVTYELGKEFLPMEAQLSRLIGQSLWDVSRSSTGNLVEWFLLRKAYERNELAPNKPDEKELARRRQSYEGGYVKEPERGLWENIVYLDFRSLYPSIIITHNVSPDTLNREGCKEYDVAPQVGHRFCKDFPGFIPSLLGDLLEERQKIKKKMKATIDPIERKLLDYRQRAIKILANSYYGYYGYARARWYCKECAESVTAWGREYITMTIKEIEEKYGFKVIYSDTDGFFATIPGADAETVKKKAMEFLKYINAKLPGALELEYEGFYKRGFFVTKKKYAVIDEEGKITTRGLEIVRRDWSEIAKETQARVLEALLKDGDVEKAVRIVKEVTEKLSKYEVPPEKLVIHEQITRDLKDYKATGPHVAVAKRLAARGVKIRPGTVISYIVLKGSGRIGDRAIPFDEFDPTKHKYDAEYYIENQVLPAVERILRAFGYRKEDLRYQKTRQVGLSAWLKPKGT

SEQ ID NO: 1393 - protein, 774 aa, synthetic construct
MILDTDYITEDGKPVWRIFKKENGEFKIEYDRTFEPYFYALLKDDSAIEEVKKITAERHGTVVTVKRVEKVQKKFLGRPVEVWKLYFTHPQDQPAIRDKIREHPAVIDIYEYDIPFAKRYLIDKGLVPMEGDEELKMLAFDIETLYHEGEEFAEGPILMISYADEEGARVITWKNVDLPYVDVVSTEREMIKRFLRVVKEKDPDVLITYNGDNFDFAYLKKRCEKLGINFALGRDGSEPKIQRMGDRFAVEVKGRIHFDLYPVIRRTINLPTYTLEAVYEAVFGQPKEKVYAEEITTAWETGENLERVARYSMEDAKVTYELGKEFLPMEAQLSRLIGQSLWDVSRSSTGNLVEWFLLRKAYERNELAPNKPDEKELARRRQSYEGGYVKEPERGLWENIVYLDFRSLYPSIIITHNVSPDTLNREGCKEYDVAPQVGHRFCKDFPGFIPSLLGDLLEERQKIKKKMKATIDPIERKLLDYRQRAIKILANSYYGYYGYARARWYCKECAESVTAWGREYITMTIKEIEEKYGFKVIYSDTDGFFATIPGADAETVKKKAMEFLKYINAKLPGALELEYEGFYKRGFFVTKKKYAVIDEEGKITTRGLEIVRRDWSEIAKETQARVLEALLKDGDVEKAVRIVKEVTEKLSKYEVPPEKLVIHEQITRDLKDYKATGPHVAVAKRLAARGVKIRPGTVISYIVLKGSGRIGDRAIPFDEFDPTKHKYDAEYYIENQVLPAVERILRAFGYRKEDLRYQKTRQVGLSAWLKPKGT

SEQ ID NO: 1394 - protein, 774 aa, synthetic construct
MILDTDYITEDGKPVWRIFKKENGEFKIEYDRTFEPYFYALLKDDSAIEEVKKITAERHGTVVTVKRVEKVQKKFLGRPVEVWKLYFTHPQDQPAIADKIREHPAVIDIYEYDIPFAKRYLIDKGLVPMEGDEELKMLAFDIETLYHEGEEFAEGPILMISYADEEGARVITWKNVDLPYVDVVSTEREMIKRFLRVVKEKDPDVLITYNGDNFDFAYLKKRCEKLGINFALGRDGSEPKIQRMGDRFAVEVKGRIHFDLYPVIRRTINLPTYTLEAVYEAVFGQPKEKVYAEEITTAWETGENLERVARYSMEDAKVTYELGKEFLPMEAQLSRLIGQSLWDVSRSSTGNLVEWFLLRKAYERNELAPNKPDEKELARRRQSYEGGYVKEPERGLWENIVYLDFRSLYPSIIITHNVSPDTLNREGCKEYDVAPQVGHRFCKDFPGFIPSLLGDLLEERQKIKKKMKATIDPIERKLLDYRQRAIKILANSYYGYYGYARARWYCKECAESVTAWGREYITMTIKEIEEKYGFKVIYSDTDGFFATIPGADAETVKKKAMEFLKYINAKLPGALELEYEGFYKRGFFVTKKKYAVIDEEGKITTRGLEIVRRDWSEIAKETQARVLEALLKDGDVEKAVRIVKEVTEKLSKYEVPPEKLVIHEQITRDLKDYKATGPHVAVAKRLAARGVKIRPGTVISYIVLKGSGRIGDRAIPFDEFDPTKHKYDAEYYIENQVLPAVERILRAFGYRKEDLRYQKTRQVGLSAWLKPKGT

SEQ ID NO: 1395 - protein, 774 aa, synthetic construct
MILDTDYITEDGKPVWRIFKKENGEFKIEYDRTFEPYFYALLKDDSAIEEVKKITAERHGTVVTVKRVEKVQKKFLGRPVEVWKLYFTHPQDQPAIWDKIREHPAVIDIYEYDIPFAKRYLIDKGLVPMEGDEELKMLAFDIETLYHEGEEFAEGPILMISYADEEGARVITWKNVDLPYVDVVSTEREMIKRFLRVVKEKDPDVLITYNGDNFDFAYLKKRCEKLGINFALGRDGSEPKIQRMGDRFAVEVKGRIHFDLYPVIRRTINLPTYTLEAVYEAVFGQPKEKVYAEEITTAWETGENLERVARYSMEDAKVTYELGKEFLPMEAQLSRLIGQSLWDVSRSSTGNLVEWFLLRKAYERNELAPNKPDEKELARRRQSYEGGYVKEPERGLWENIVYLDFRSLYPSIIITHNVSPDTLNREGCKEYDVAPQVGHRFCKDFPGFIPSLLGDLLEERQKIKKKMKATIDPIERKLLDYRQRAIKILANSYYGYYGYARARWYCKECAESVTAWGREYITMTIKEIEEKYGFKVIYSDTDGFFATIPGADAETVKKKAMEFLKYINAKLPGALELEYEGFYKRGFFVTKKKYAVIDEEGKITTRGLEIVRRDWSEIAKETQARVLEALLKDGDVEKAVRIVKEVTEKLSKYEVPPEKLVIHEQITRDLKDYKATGPHVAVAKRLAARGVKIRPGTVISYIVLKGSGRIGDRAIPFDEFDPTKHKYDAEYYIENQVLPAVERILRAFGYRKEDLRYQKTRQVGLSAWLKPKGT

SEQ ID NO: 1396 - protein, 774 aa, synthetic construct
MILDTDYITEDGKPVWRIFKKENGEFKIEYDRTFEPYFYALLKDDSAIEEVKKITAERHGTVVTVKRVEKVQKKFLGRPVEVWKLYFTHPQDRPAIRDKIREHPAVIDIYEYDIPFAKRYLIDKGLVPMEGDEELKMLAFDIETLYHEGEEFAEGPILMISYADEEGARVITWKNVDLPYVDVVSTEREMIKRFLRVVKEKDPDVLITYNGDNFDFAYLKKRCEKLGINFALGRDGSEPKIQRMGDRFAVEVKGRIHFDLYPVIRRTINLPTYTLEAVYEAVFGQPKEKVYAEEITTAWETGENLERVARYSMEDAKVTYELGKEFLPMEAQLSRLIGQSLWDVSRSSTGNLVEWFLLRKAYERNELAPNKPDEKELARRRQSYEGGYVKEPERGLWENIVYLDFRSLYPSIIITHNVSPDTLNREGCKEYDVAPQVGHRFCKDFPGFIPSLLGDLLEERQKIKKKMKATIDPIERKLLDYRQRAIKILANSYYGYYGYARARWYCKECAESVTAWGREYITMTIKEIEEKYGFKVIYSDTDGFFATIPGADAETVKKKAMEFLKYINAKLPGALELEYEGFYKRGFFVTKKKYAVIDEEGKITTRGLEIVRRDWSEIAKETQARVLEALLKDGDVEKAVRIVKEVTEKLSKYEVPPEKLVIHEQITRDLKDYKATGPHVAVAKRLAARGVKIRPGTVISYIVLKGSGRIGDRAIPFDEFDPTKHKYDAEYYIENQVLPAVERILRAFGYRKEDLRYQKTRQVGLSAWLKPKGT

SEQ ID NO: 1397 - protein, 774 aa, synthetic construct
MILDTDYITEDGKPVWRIFKKENGEFKIEYDRTFEPYFYALLKDDSAIEEVKKITAERHGTVVTVKRVEKVQKKFLGRPVEVWKLYFTHPQDRPAIADKIREHPAVIDIYEYDIPFAKRYLIDKGLVPMEGDEELKMLAFDIETLYHEGEEFAEGPILMISYADEEGARVITWKNVDLPYVDVVSTEREMIKRFLRVVKEKDPDVLITYNGDNFDFAYLKKRCEKLGINFALGRDGSEPKIQRMGDRFAVEVKGRIHFDLYPVIRRTINLPTYTLEAVYEAVFGQPKEKVYAEEITTAWETGENLERVARYSMEDAKVTYELGKEFLPMEAQLSRLIGQSLWDVSRSSTGNLVEWFLLRKAYERNELAPNKPDEKELARRRQSYEGGYVKEPERGLWENIVYLDFRSLYPSIIITHNVSPDTLNREGCKEYDVAPQVGHRFCKDFPGFIPSLLGDLLEERQKIKKKMKATIDPIERKLLDYRQRAIKILANSYYGYYGYARARWYCKECAESVTAWGREYITMTIKEIEEKYGFKVIYSDTDGFFATIPGADAETVKKKAMEFLKYINAKLPGALELEYEGFYKRGFFVTKKKYAVIDEEGKITTRGLEIVRRDWSEIAKETQARVLEALLKDGDVEKAVRIVKEVTEKLSKYEVPPEKLVIHEQITRDLKDYKATGPHVAVAKRLAARGVKIRPGTVISYIVLKGSGRIGDRAIPFDEFDPTKHKYDAEYYIENQVLPAVERILRAFGYRKEDLRYQKTRQVGLSAWLKPKGT

SEQ ID NO: 1398 - protein, 774 aa, synthetic construct
MILDTDYITEDGKPVWRIFKKENGEFKIEYDRTFEPYFYALLKDDSAIEEVKKITAERHGTVVTVKRVEKVQKKFLGRPVEVWKLYFTHPQDRPAIHDKIREHPAVIDIYEYDIPFAKRYLIDKGLVPMEGDEELKMLAFDIETLYHEGEEFAEGPILMISYADEEGARVITWKNVDLPYVDVVSTEREMIKRFLRVVKEKDPDVLITYNGDNFDFAYLKKRCEKLGINFALGRDGSEPKIQRMGDRFAVEVKGRIHFDLYPVIRRTINLPTYTLEAVYEAVFGQPKEKVYAEEITTAWETGENLERVARYSMEDAKVTYELGKEFLPMEAQLSRLIGQSLWDVSRSSTGNLVEWFLLRKAYERNELAPNKPDEKELARRRQSYEGGYVKEPERGLWENIVYLDFRSLYPSIIITHNVSPDTLNREGCKEYDVAPQVGHRFCKDFPGFIPSLLGDLLEERQKIKKKMKATIDPIERKLLDYRQRAIKILANSYYGYYGYARARWYCKECAESVTAWGREYITMTIKEIEEKYGFKVIYSDTDGFFATIPGADAETVKKKAMEFLKYINAKLPGALELEYEGFYKRGFFVTKKKYAVIDEEGKITTRGLEIVRRDWSEIAKETQARVLEALLKDGDVEKAVRIVKEVTEKLSKYEVPPEKLVIHEQITRDLKDYKATGPHVAVAKRLAARGVKIRPGTVISYIVLKGSGRIGDRAIPFDEFDPTKHKYDAEYYIENQVLPAVERILRAFGYRKEDLRYQKTRQVGLSAWLKPKGT

SEQ ID NO: 1399 - protein, 774 aa, synthetic construct
MILDTDYITEDGKPVWRIFKKENGEFKIEYDRTFEPYFYALLKDDSAIEEVKKITAERHGTVVTVKRVEKVQKKFLGRPVEVWKLYFTHPQDRPAIWDKIREHPAVIDIYEYDIPFAKRYLIDKGLVPMEGDEELKMLAFDIETLYHEGEEFAEGPILMISYADEEGARVITWKNVDLPYVDVVSTEREMIKRFLRVVKEKDPDVLITYNGDNFDFAYLKKRCEKLGINFALGRDGSEPKIQRMGDRFAVEVKGRIHFDLYPVIRRTINLPTYTLEAVYEAVFGQPKEKVYAEEITTAWETGENLERVARYSMEDAKVTYELGKEFLPMEAQLSRLIGQSLWDVSRSSTGNLVEWFLLRKAYERNELAPNKPDEKELARRRQSYEGGYVKEPERGLWENIVYLDFRSLYPSIIITHNVSPDTLNREGCKEYDVAPQVGHRFCKDFPGFIPSLLGDLLEERQKIKKKMKATIDPIERKLLDYRQRAIKILANSYYGYYGYARARWYCKECAESVTAWGREYITMTIKEIEEKYGFKVIYSDTDGFFATIPGADAETVKKKAMEFLKYINAKLPGALELEYEGFYKRGFFVTKKKYAVIDEEGKITTRGLEIVRRDWSEIAKETQARVLEALLKDGDVEKAVRIVKEVTEKLSKYEVPPEKLVIHEQITRDLKDYKATGPHVAVAKRLAARGVKIRPGTVISYIVLKGSGRIGDRAIPFDEFDPTKHKYDAEYYIENQVLPAVERILRAFGYRKEDLRYQKTRQVGLSAWLKPKGT

SEQ ID NO: 1400 - protein, 774 aa, synthetic construct
MILDTDYITEDGKPVIRIFKKENGEFKIEYDRTFEAYFYALLKDDSAIEEVKKITAERHGTVVTVKRVEKVQKKFLGRPVEVWKLYFTHPQDVPAIRDKIREHPAVIDIYEYDIPFAKRYLIDKGLVPMEGDEELKMLAFDIETLYHEGEEFAEGPILMISYADEEGARVITWKNVDLPYVDVVSTEREMIKRFLRVVKEKDPDVLITYNGDNFDFAYLKKRCEKLGINFALGRDGSEPKIQRMGDRFAVEVKGRIHFDLYPVIRRTINLPTYTLEAVYEAVFGQPKEKVYAEEITTAWETGENLERVARYSMEDAKVTYELGKEFLPMEAQLSRLIGQSLWDVSRSSTGNLVEWFLLRKAYERNELAPNKPDEKELARRRQSYEGGYVKEPERGLWENIVYLDFRSLYPSIIITHNVSPDTLNREGCKEYDVAPQVGHRFCKDFPGFIPSLLGDLLEERQKIKKKMKATIDPIERKLLDYRQRAIKILANSYYGYYGYARARWYCKECAESVTAWGREYITMTIKEIEEKYGFKVIYSDTDGFFATIPGADAETVKKKAMEFLKYINAKLPGALELEYEGFYKRGFFVTKKKYAVIDEEGKITTRGLEIVRRDWSEIAKETQARVLEALLKDGDVEKAVRIVKEVTEKLSKYEVPPEKLVIHEQITRDLKDYKATGPHVAVAKRLAARGVKIRPGTVISYIVLKGSGRIGDRAIPFDEFDPTKHKYDAEYYIENQVLPAVERILRAFGYRKEDLRYQKTRQVGLSAWLKPKGT

SEQ ID NO: 1401 - protein, 774 aa, synthetic construct
MILDTDYITEDGKPVIRIFKKENGEFKIEYDRTFEAYFYALLKDDSAIEEVKKITAERHGTVVTVKRVEKVQKKFLGRPVEVWKLYFTHFQDVPAIRDKIREHPAVIDIYEYDIPFAKRYLIDKGLVPMEGDEELKMLAFDIETLYHEGEEFAEGPILMISYADEEGARVITWKNVDLPYVDVVSTEREMIKRFLRVVKEKDPDVLITYNGDNFDFAYLKKRCEKLGINFALGRDGSEPKIQRMGDRFAVEVKGRIHFDLYPVIRRTINLPTYTLEAVYEAVFGQPKEKVYAEEITTAWETGENLERVARYSMEDAKVTYELGKEFLPMEAQLSRLIGQSLWDVSRSSTGNLVEWFLLRKAYERNELAPNKPDEKELARRRQSYEGGYVKEPERGLWENIVYLDFRSLYPSIIITHNVSPDTLNREGCKEYDVAPQVGHRFCKDFPGFIPSLLGDLLEERQKIKKKMKATIDPIERKLLDYRQRAIKILANSYYGYYGYARARWYCKECAESVTAWGREYITMTIKEIEEKYGFKVIYSDTDGFFATIPGADAETVKKKAMEFLKYINAKLPGALELEYEGFYKRGFFVTKKKYAVIDEEGKITTRGLEIVRRDWSEIAKETQARVLEALLKDGDVEKAVRIVKEVTEKLSKYEVPPEKLVIHEQITRDLKDYKATGPHVAVAKRLAARGVKIRPGTVISYIVLKGSGRIGDRAIPFDEFDPTKHKYDAEYYIENQVLPAVERILRAFGYRKEDLRYQKTRQVGLSAWLKPKGT

SEQ ID NO: 1402 - protein, 774 aa, synthetic construct
MILDTDYITEDGKPVIRIFKKENGEFKIEYDRTFEAYFYALLKDDSAIEEVKKITAERHGTVVTVKRVEKVQKKFLGRPVEVWKLYFTHFQDVPAIADKIREHPAVIDIYEYDIPFAKRYLIDKGLVPMEGDEELKMLAFDIETLYHEGEEFAEGPILMISYADEEGARVITWKNVDLPYVDVVSTEREMIKRFLRVVKEKDPDVLITYNGDNFDFAYLKKRCEKLGINFALGRDGSEPKIQRMGDRFAVEVKGRIHFDLYPVIRRTINLPTYTLEAVYEAVFGQPKEKVYAEEITTAWETGENLERVARYSMEDAKVTYELGKEFLPMEAQLSRLIGQSLWDVSRSSTGNLVEWFLLRKAYERNELAPNKPDEKELARRRQSYEGGYVKEPERGLWENIVYLDFRSLYPSIIITHNVSPDTLNREGCKEYDVAPQVGHRFCKDFPGFIPSLLGDLLEERQKIKKKMKATIDPIERKLLDYRQRAIKILANSYYGYYGYARARWYCKECAESVTAWGREYITMTIKEIEEKYGFKVIYSDTDGFFATIPGADAETVKKKAMEFLKYINAKLPGALELEYEGFYKRGFFVTKKKYAVIDEEGKITTRGLEIVRRDWSEIAKETQARVLEALLKDGDVEKAVRIVKEVTEKLSKYEVPPEKLVIHEQITRDLKDYKATGPHVAVAKRLAARGVKIRPGTVISYIVLKGSGRIGDRAIPFDEFDPTKHKYDAEYYIENQVLPAVERILRAFGYRKEDLRYQKTRQVGLSAWLKPKGT

SEQ ID NO: 1403 - protein, 774 aa, synthetic construct
MILDTDYITEDGKPVIRIFKKENGEFKIEYDRTFEAYFYALLKDDSAIEEVKKITAERHGTVVTVKRVEKVQKKFLGRPVEVWKLYFTHFQDVPAIFDKIREHPAVIDIYEYDIPFAKRYLIDKGLVPMEGDEELKMLAFDIETLYHEGEEFAEGPILMISYADEEGARVITWKNVDLPYVDVVSTEREMIKRFLRVVKEKDPDVLITYNGDNFDFAYLKKRCEKLGINFALGRDGSEPKIQRMGDRFAVEVKGRIHFDLYPVIRRTINLPTYTLEAVYEAVFGQPKEKVYAEEITTAWETGENLERVARYSMEDAKVTYELGKEFLPMEAQLSRLIGQSLWDVSRSSTGNLVEWFLLRKAYERNELAPNKPDEKELARRRQSYEGGYVKEPERGLWENIVYLDFRSLYPSIIITHNVSPDTLNREGCKEYDVAPQVGHRFCKDFPGFIPSLLGDLLEERQKIKKKMKATIDPIERKLLDYRQRAIKILANSYYGYYGYARARWYCKECAESVTAWGREYITMTIKEIEEKYGFKVIYSDTDGFFATIPGADAETVKKKAMEFLKYINAKLPGALELEYEGFYKRGFFVTKKKYAVIDEEGKITTRGLEIVRRDWSEIAKETQARVLEALLKDGDVEKAVRIVKEVTEKLSKYEVPPEKLVIHEQITRDLKDYKATGPHVAVAKRLAARGVKIRPGTVISYIVLKGSGRIGDRAIPFDEFDPTKHKYDAEYYIENQVLPAVERILRAFGYRKEDLRYQKTRQVGLSAWLKPKGT

SEQ ID NO: 1404 - protein, 774 aa, synthetic construct
MILDTDYITEDGKPVIRIFKKENGEFKIEYDRTFEAYFYALLKDDSAIEEVKKITAERHGTVVTVKRVEKVQKKFLGRPVEVWKLYFTHFQDIPAIRDKIREHPAVIDIYEYDIPFAKRYLIDKGLVPMEGDEELKMLAFDIETLYHEGEEFAEGPILMISYADEEGARVITWKNVDLPYVDVVSTEREMIKRFLRVVKEKDPDVLITYNGDNFDFAYLKKRCEKLGINFALGRDGSEPKIQRMGDRFAVEVKGRIHFDLYPVIRRTINLPTYTLEAVYEAVFGQPKEKVYAEEITTAWETGENLERVARYSMEDAKVTYELGKEFLPMEAQLSRLIGQSLWDVSRSSTGNLVEWFLLRKAYERNELAPNKPDEKELARRRQSYEGGYVKEPERGLWENIVYLDFRSLYPSIIITHNVSPDTLNREGCKEYDVAPQVGHRFCKDFPGFIPSLLGDLLEERQKIKKKMKATIDPIERKLLDYRQRAIKILANSYYGYYGYARARWYCKECAESVTAWGREYITMTIKEIEEKYGFKVIYSDTDGFFATIPGADAETVKKKAMEFLKYINAKLPGALELEYEGFYKRGFFVTKKKYAVIDEEGKITTRGLEIVRRDWSEIAKETQARVLEALLKDGDVEKAVRIVKEVTEKLSKYEVPPEKLVIHEQITRDLKDYKATGPHVAVAKRLAARGVKIRPGTVISYIVLKGSGRIGDRAIPFDEFDPTKHKYDAEYYIENQVLPAVERILRAFGYRKEDLRYQKTRQVGLSAWLKPKGT

SEQ ID NO: 1405 - protein, 774 aa, synthetic construct
MILDTDYITEDGKPVIRIFKKENGEFKIEYDRTFEAYFYALLKDDSAIEEVKKITAERHGTVVTVKRVEKVQKKFLGRPVEVWKLYFTHFQDIPAIADKIREHPAVIDIYEYDIPFAKRYLIDKGLVPMEGDEELKMLAFDIETLYHEGEEFAEGPILMISYADEEGARVITWKNVDLPYVDVVSTEREMIKRFLRVVKEKDPDVLITYNGDNFDFAYLKKRCEKLGINFALGRDGSEPKIQRMGDRFAVEVKGRIHFDLYPVIRRTINLPTYTLEAVYEAVFGQPKEKVYAEEITTAWETGENLERVARYSMEDAKVTYELGKEFLPMEAQLSRLIGQSLWDVSRSSTGNLVEWFLLRKAYERNELAPNKPDEKELARRRQSYEGGYVKEPERGLWENIVYLDFRSLYPSIIITHNVSPDTLNREGCKEYDVAPQVGHRFCKDFPGFIPSLLGDLLEERQKIKKKMKATIDPIERKLLDYRQRAIKILANSYYGYYGYARARWYCKECAESVTAWGREYITMTIKEIEEKYGFKVIYSDTDGFFATIPGADAETVKKKAMEFLKYINAKLPGALELEYEGFYKRGFFVTKKKYAVIDEEGKITTRGLEIVRRDWSEIAKETQARVLEALLKDGDVEKAVRIVKEVTEKLSKYEVPPEKLVIHEQITRDLKDYKATGPHVAVAKRLAARGVKIRPGTVISYIVLKGSGRIGDRAIPFDEFDPTKHKYDAEYYIENQVLPAVERILRAFGYRKEDLRYQKTRQVGLSAWLKPKGT

SEQ ID NO: 1406 - protein, 774 aa, synthetic construct
MILDTDYITEDGKPVIRIFKKENGEFKIEYDRTFEAYFYALLKDDSAIEEVKKITAERHGTVVTVKRVEKVQKKFLGRPVEVWKLYFTHFQDIPAIFDKIREHPAVIDIYEYDIPFAKRYLIDKGLVPMEGDEELKMLAFDIETLYHEGEEFAEGPILMISYADEEGARVITWKNVDLPYVDVVSTEREMIKRFLRVVKEKDPDVLITYNGDNFDFAYLKKRCEKLGINFALGRDGSEPKIQRMGDRFAVEVKGRIHFDLYPVIRRTINLPTYTLEAVYEAVFGQPKEKVYAEEITTAWETGENLERVARYSMEDAKVTYELGKEFLPMEAQLSRLIGQSLWDVSRSSTGNLVEWFLLRKAYERNELAPNKPDEKELARRRQSYEGGYVKEPERGLWENIVYLDFRSLYPSIIITHNVSPDTLNREGCKEYDVAPQVGHRFCKDFPGFIPSLLGDLLEERQKIKKKMKATIDPIERKLLDYRQRAIKILANSYYGYYGYARARWYCKECAESVTAWGREYITMTIKEIEEKYGFKVIYSDTDGFFATIPGADAETVKKKAMEFLKYINAKLPGALELEYEGFYKRGFFVTKKKYAVIDEEGKITTRGLEIVRRDWSEIAKETQARVLEALLKDGDVEKAVRIVKEVTEKLSKYEVPPEKLVIHEQITRDLKDYKATGPHVAVAKRLAARGVKIRPGTVISYIVLKGSGRIGDRAIPFDEFDPTKHKYDAEYYIENQVLPAVERILRAFGYRKEDLRYQKTRQVGLSAWLKPKGT

SEQ ID NO: 1407 - protein, 774 aa, synthetic construct
MILDTDYITEDGKPVIRIFKKENGEFKIEYDRTFEAYFYALLKDDSAIEEVKKITAERHGTVVTVKRVEKVQKKFLGRPVEVWKLYFTHFQDIPAIHDKIREHPAVIDIYEYDIPFAKRYLIDKGLVPMEGDEELKMLAFDIETLYHEGEEFAEGPILMISYADEEGARVITWKNVDLPYVDVVSTEREMIKRFLRVVKEKDPDVLITYNGDNFDFAYLKKRCEKLGINFALGRDGSEPKIQRMGDRFAVEVKGRIHFDLYPVIRRTINLPTYTLEAVYEAVFGQPKEKVYAEEITTAWETGENLERVARYSMEDAKVTYELGKEFLPMEAQLSRLIGQSLWDVSRSSTGNLVEWFLLRKAYERNELAPNKPDEKELARRRQSYEGGYVKEPERGLWENIVYLDFRSLYPSIIITHNVSPDTLNREGCKEYDVAPQVGHRFCKDFPGFIPSLLGDLLEERQKIKKKMKATIDPIERKLLDYRQRAIKILANSYYGYYGYARARWYCKECAESVTAWGREYITMTIKEIEEKYGFKVIYSDTDGFFATIPGADAETVKKKAMEFLKYINAKLPGALELEYEGFYKRGFFVTKKKYAVIDEEGKITTRGLEIVRRDWSEIAKETQARVLEALLKDGDVEKAVRIVKEVTEKLSKYEVPPEKLVIHEQITRDLKDYKATGPHVAVAKRLAARGVKIRPGTVISYIVLKGSGRIGDRAIPFDEFDPTKHKYDAEYYIENQVLPAVERILRAFGYRKEDLRYQKTRQVGLSAWLKPKGT

SEQ ID NO: 1408 - protein, 774 aa, synthetic construct
MILDTDYITEDGKPVIRIFKKENGEFKIEYDRTFEAYFYALLKDDSAIEEVKKITAERHGTVVTVKRVEKVQKKFLGRPVEVWKLYFTHFQDIPAIWDKIREHPAVIDIYEYDIPFAKRYLIDKGLVPMEGDEELKMLAFDIETLYHEGEEFAEGPILMISYADEEGARVITWKNVDLPYVDVVSTEREMIKRFLRVVKEKDPDVLITYNGDNFDFAYLKKRCEKLGINFALGRDGSEPKIQRMGDRFAVEVKGRIHFDLYPVIRRTINLPTYTLEAVYEAVFGQPKEKVYAEEITTAWETGENLERVARYSMEDAKVTYELGKEFLPMEAQLSRLIGQSLWDVSRSSTGNLVEWFLLRKAYERNELAPNKPDEKELARRRQSYEGGYVKEPERGLWENIVYLDFRSLYPSIIITHNVSPDTLNREGCKEYDVAPQVGHRFCKDFPGFIPSLLGDLLEERQKIKKKMKATIDPIERKLLDYRQRAIKILANSYYGYYGYARARWYCKECAESVTAWGREYITMTIKEIEEKYGFKVIYSDTDGFFATIPGADAETVKKKAMEFLKYINAKLPGALELEYEGFYKRGFFVTKKKYAVIDEEGKITTRGLEIVRRDWSEIAKETQARVLEALLKDGDVEKAVRIVKEVTEKLSKYEVPPEKLVIHEQITRDLKDYKATGPHVAVAKRLAARGVKIRPGTVISYIVLKGSGRIGDRAIPFDEFDPTKHKYDAEYYIENQVLPAVERILRAFGYRKEDLRYQKTRQVGLSAWLKPKGT

SEQ ID NO: 1409 - protein, 774 aa, synthetic construct
MILDTDYITEDGKPVIRIFKKENGEFKIEYDRTFEAYFYALLKDDSAIEEVKKITAERHGTVVTVKRVEKVQKKFLGRPVEVWKLYFTHFQDKPAIRDKIREHPAVIDIYEYDIPFAKRYLIDKGLVPMEGDEELKMLAFDIETLYHEGEEFAEGPILMISYADEEGARVITWKNVDLPYVDVVSTEREMIKRFLRVVKEKDPDVLITYNGDNFDFAYLKKRCEKLGINFALGRDGSEPKIQRMGDRFAVEVKGRIHFDLYPVIRRTINLPTYTLEAVYEAVFGQPKEKVYAEEITTAWETGENLERVARYSMEDAKVTYELGKEFLPMEAQLSRLIGQSLWDVSRSSTGNLVEWFLLRKAYERNELAPNKPDEKELARRRQSYEGGYVKEPERGLWENIVYLDFRSLYPSIIITHNVSPDTLNREGCKEYDVAPQVGHRFCKDFPGFIPSLLGDLLEERQKIKKKMKATIDPIERKLLDYRQRAIKILANSYYGYYGYARARWYCKECAESVTAWGREYITMTIKEIEEKYGFKVIYSDTDGFFATIPGADAETVKKKAMEFLKYINAKLPGALELEYEGFYKRGFFVTKKKYAVIDEEGKITTRGLEIVRRDWSEIAKETQARVLEALLKDGDVEKAVRIVKEVTEKLSKYEVPPEKLVIHEQITRDLKDYKATGPHVAVAKRLAARGVKIRPGTVISYIVLKGSGRIGDRAIPFDEFDPTKHKYDAEYYIENQVLPAVERILRAFGYRKEDLRYQKTRQVGLSAWLKPKGT

SEQ ID NO: 1410 - protein, 774 aa, synthetic construct
MILDTDYITEDGKPVIRIFKKENGEFKIEYDRTFEAYFYALLKDDSAIEEVKKITAERHGTVVTVKRVEKVQKKFLGRPVEVWKLYFTHFQDQPAIRDKIREHPAVIDIYEYDIPFAKRYLIDKGLVPMEGDEELKMLAFDIETLYHEGEEFAEGPILMISYADEEGARVITWKNVDLPYVDVVSTEREMIKRFLRVVKEKDPDVLITYNGDNFDFAYLKKRCEKLGINFALGRDGSEPKIQRMGDRFAVEVKGRIHFDLYPVIRRTINLPTYTLEAVYEAVFGQPKEKVYAEEITTAWETGENLERVARYSMEDAKVTYELGKEFLPMEAQLSRLIGQSLWDVSRSSTGNLVEWFLLRKAYERNELAPNKPDEKELARRRQSYEGGYVKEPERGLWENIVYLDFRSLYPSIIITHNVSPDTLNREGCKEYDVAPQVGHRFCKDFPGFIPSLLGDLLEERQKIKKKMKATIDPIERKLLDYRQRAIKILANSYYGYYGYARARWYCKECAESVTAWGREYITMTIKEIEEKYGFKVIYSDTDGFFATIPGADAETVKKKAMEFLKYINAKLPGALELEYEGFYKRGFFVTKKKYAVIDEEGKITTRGLEIVRRDWSEIAKETQARVLEALLKDGDVEKAVRIVKEVTEKLSKYEVPPEKLVIHEQITRDLKDYKATGPHVAVAKRLAARGVKIRPGTVISYIVLKGSGRIGDRAIPFDEFDPTKHKYDAEYYIENQVLPAVERILRAFGYRKEDLRYQKTRQVGLSAWLKPKGT

SEQ ID NO: 1411 - protein, 774 aa, synthetic construct
MILDTDYITEDGKPVIRIFKKENGEFKIEYDRTFEAYFYALLKDDSAIEEVKKITAERHGTVVTVKRVEKVQKKFLGRPVEVWKLYFTHFQDRPAIRDKIREHPAVIDIYEYDIPFAKRYLIDKGLVPMEGDEELKMLAFDIETLYHEGEEFAEGPILMISYADEEGARVITWKNVDLPYVDVVSTEREMIKRFLRVVKEKDPDVLITYNGDNFDFAYLKKRCEKLGINFALGRDGSEPKIQRMGDRFAVEVKGRIHFDLYPVIRRTINLPTYTLEAVYEAVFGQPKEKVYAEEITTAWETGENLERVARYSMEDAKVTYELGKEFLPMEAQLSRLIGQSLWDVSRSSTGNLVEWFLLRKAYERNELAPNKPDEKELARRRQSYEGGYVKEPERGLWENIVYLDFRSLYPSIIITHNVSPDTLNREGCKEYDVAPQVGHRFCKDFPGFIPSLLGDLLEERQKIKKKMKATIDPIERKLLDYRQRAIKILANSYYGYYGYARARWYCKECAESVTAWGREYITMTIKEIEEKYGFKVIYSDTDGFFATIPGADAETVKKKAMEFLKYINAKLPGALELEYEGFYKRGFFVTKKKYAVIDEEGKITTRGLEIVRRDWSEIAKETQARVLEALLKDGDVEKAVRIVKEVTEKLSKYEVPPEKLVIHEQITRDLKDYKATGPHVAVAKRLAARGVKIRPGTVISYIVLKGSGRIGDRAIPFDEFDPTKHKYDAEYYIENQVLPAVERILRAFGYRKEDLRYQKTRQVGLSAWLKPKGT

SEQ ID NO: 1412 - protein, 774 aa, synthetic construct
MILDTDYITEDGKPVIRIFKKENGEFKIEYDRTFEAYFYALLKDDSAIEEVKKITAERHGTVVTVKRVEKVQKKFLGRPVEVWKLYFTHFQDRPAIADKIREHPAVIDIYEYDIPFAKRYLIDKGLVPMEGDEELKMLAFDIETLYHEGEEFAEGPILMISYADEEGARVITWKNVDLPYVDVVSTEREMIKRFLRVVKEKDPDVLITYNGDNFDFAYLKKRCEKLGINFALGRDGSEPKIQRMGDRFAVEVKGRIHFDLYPVIRRTINLPTYTLEAVYEAVFGQPKEKVYAEEITTAWETGENLERVARYSMEDAKVTYELGKEFLPMEAQLSRLIGQSLWDVSRSSTGNLVEWFLLRKAYERNELAPNKPDEKELARRRQSYEGGYVKEPERGLWENIVYLDFRSLYPSIIITHNVSPDTLNREGCKEYDVAPQVGHRFCKDFPGFIPSLLGDLLEERQKIKKKMKATIDPIERKLLDYRQRAIKILANSYYGYYGYARARWYCKECAESVTAWGREYITMTIKEIEEKYGFKVIYSDTDGFFATIPGADAETVKKKAMEFLKYINAKLPGALELEYEGFYKRGFFVTKKKYAVIDEEGKITTRGLEIVRRDWSEIAKETQARVLEALLKDGDVEKAVRIVKEVTEKLSKYEVPPEKLVIHEQITRDLKDYKATGPHVAVAKRLAARGVKIRPGTVISYIVLKGSGRIGDRAIPFDEFDPTKHKYDAEYYIENQVLPAVERILRAFGYRKEDLRYQKTRQVGLSAWLKPKGT

SEQ ID NO: 1413 - protein, 774 aa, synthetic construct
MILDTDYITEDGKPVIRIFKKENGEFKIEYDRTFEAYFYALLKDDSAIEEVKKITAERHGTVVTVKRVEKVQKKFLGRPVEVWKLYFTHFQDRPAIFDKIREHPAVIDIYEYDIPFAKRYLIDKGLVPMEGDEELKMLAFDIETLYHEGEEFAEGPILMISYADEEGARVITWKNVDLPYVDVVSTEREMIKRFLRVVKEKDPDVLITYNGDNFDFAYLKKRCEKLGINFALGRDGSEPKIQRMGDRFAVEVKGRIHFDLYPVIRRTINLPTYTLEAVYEAVFGQPKEKVYAEEITTAWETGENLERVARYSMEDAKVTYELGKEFLPMEAQLSRLIGQSLWDVSRSSTGNLVEWFLLRKAYERNELAPNKPDEKELARRRQSYEGGYVKEPERGLWENIVYLDFRSLYPSIIITHNVSPDTLNREGCKEYDVAPQVGHRFCKDFPGFIPSLLGDLLEERQKIKKKMKATIDPIERKLLDYRQRAIKILANSYYGYYGYARARWYCKECAESVTAWGREYITMTIKEIEEKYGFKVIYSDTDGFFATIPGADAETVKKKAMEFLKYINAKLPGALELEYEGFYKRGFFVTKKKYAVIDEEGKITTRGLEIVRRDWSEIAKETQARVLEALLKDGDVEKAVRIVKEVTEKLSKYEVPPEKLVIHEQITRDLKDYKATGPHVAVAKRLAARGVKIRPGTVISYIVLKGSGRIGDRAIPFDEFDPTKHKYDAEYYIENQVLPAVERILRAFGYRKEDLRYQKTRQVGLSAWLKPKGT

SEQ ID NO: 1414 - protein, 774 aa, synthetic construct
MILDTDYITEDGKPVIRIFKKENGEFKIEYDRTFEAYFYALLKDDSAIEEVKKITAERHGTVVTVKRVEKVQKKFLGRPVEVWKLYFTHIQDVPAIRDKIREHPAVIDIYEYDIPFAKRYLIDKGLVPMEGDEELKMLAFDIETLYHEGEEFAEGPILMISYADEEGARVITWKNVDLPYVDVVSTEREMIKRFLRVVKEKDPDVLITYNGDNFDFAYLKKRCEKLGINFALGRDGSEPKIQRMGDRFAVEVKGRIHFDLYPVIRRTINLPTYTLEAVYEAVFGQPKEKVYAEEITTAWETGENLERVARYSMEDAKVTYELGKEFLPMEAQLSRLIGQSLWDVSRSSTGNLVEWFLLRKAYERNELAPNKPDEKELARRRQSYEGGYVKEPERGLWENIVYLDFRSLYPSIIITHNVSPDTLNREGCKEYDVAPQVGHRFCKDFPGFIPSLLGDLLEERQKIKKKMKATIDPIERKLLDYRQRAIKILANSYYGYYGYARARWYCKECAESVTAWGREYITMTIKEIEEKYGFKVIYSDTDGFFATIPGADAETVKKKAMEFLKYINAKLPGALELEYEGFYKRGFFVTKKKYAVIDEEGKITTRGLEIVRRDWSEIAKETQARVLEALLKDGDVEKAVRIVKEVTEKLSKYEVPPEKLVIHEQITRDLKDYKATGPHVAVAKRLAARGVKIRPGTVISYIVLKGSGRIGDRAIPFDEFDPTKHKYDAEYYIENQVLPAVERILRAFGYRKEDLRYQKTRQVGLSAWLKPKGT

SEQ ID NO: 1415 - protein, 774 aa, synthetic construct
MILDTDYITEDGKPVIRIFKKENGEFKIEYDRTFEAYFYALLKDDSAIEEVKKITAERHGTVVTVKRVEKVQKKFLGRPVEVWKLYFTHIQDVPAIADKIREHPAVIDIYEYDIPFAKRYLIDKGLVPMEGDEELKMLAFDIETLYHEGEEFAEGPILMISYADEEGARVITWKNVDLPYVDVVSTEREMIKRFLRVVKEKDPDVLITYNGDNFDFAYLKKRCEKLGINFALGRDGSEPKIQRMGDRFAVEVKGRIHFDLYPVIRRTINLPTYTLEAVYEAVFGQPKEKVYAEEITTAWETGENLERVARYSMEDAKVTYELGKEFLPMEAQLSRLIGQSLWDVSRSSTGNLVEWFLLRKAYERNELAPNKPDEKELARRRQSYEGGYVKEPERGLWENIVYLDFRSLYPSIIITHNVSPDTLNREGCKEYDVAPQVGHRFCKDFPGFIPSLLGDLLEERQKIKKKMKATIDPIERKLLDYRQRAIKILANSYYGYYGYARARWYCKECAESVTAWGREYITMTIKEIEEKYGFKVIYSDTDGFFATIPGADAETVKKKAMEFLKYINAKLPGALELEYEGFYKRGFFVTKKKYAVIDEEGKITTRGLEIVRRDWSEIAKETQARVLEALLKDGDVEKAVRIVKEVTEKLSKYEVPPEKLVIHEQITRDLKDYKATGPHVAVAKRLAARGVKIRPGTVISYIVLKGSGRIGDRAIPFDEFDPTKHKYDAEYYIENQVLPAVERILRAFGYRKEDLRYQKTRQVGLSAWLKPKGT

SEQ ID NO: 1416 - protein, 774 aa, synthetic construct
MILDTDYITEDGKPVIRIFKKENGEFKIEYDRTFEAYFYALLKDDSAIEEVKKITAERHGTVVTVKRVEKVQKKFLGRPVEVWKLYFTHIQDVPAIFDKIREHPAVIDIYEYDIPFAKRYLIDKGLVPMEGDEELKMLAFDIETLYHEGEEFAEGPILMISYADEEGARVITWKNVDLPYVDVVSTEREMIKRFLRVVKEKDPDVLITYNGDNFDFAYLKKRCEKLGINFALGRDGSEPKIQRMGDRFAVEVKGRIHFDLYPVIRRTINLPTYTLEAVYEAVFGQPKEKVYAEEITTAWETGENLERVARYSMEDAKVTYELGKEFLPMEAQLSRLIGQSLWDVSRSSTGNLVEWFLLRKAYERNELAPNKPDEKELARRRQSYEGGYVKEPERGLWENIVYLDFRSLYPSIIITHNVSPDTLNREGCKEYDVAPQVGHRFCKDFPGFIPSLLGDLLEERQKIKKKMKATIDPIERKLLDYRQRAIKILANSYYGYYGYARARWYCKECAESVTAWGREYITMTIKEIEEKYGFKVIYSDTDGFFATIPGADAETVKKKAMEFLKYINAKLPGALELEYEGFYKRGFFVTKKKYAVIDEEGKITTRGLEIVRRDWSEIAKETQARVLEALLKDGDVEKAVRIVKEVTEKLSKYEVPPEKLVIHEQITRDLKDYKATGPHVAVAKRLAARGVKIRPGTVISYIVLKGSGRIGDRAIPFDEFDPTKHKYDAEYYIENQVLPAVERILRAFGYRKEDLRYQKTRQVGLSAWLKPKGT

SEQ ID NO: 1417 - protein, 774 aa, synthetic construct
MILDTDYITEDGKPVIRIFKKENGEFKIEYDRTFEAYFYALLKDDSAIEEVKKITAERHGTVVTVKRVEKVQKKFLGRPVEVWKLYFTHIQDIPAIRDKIREHPAVIDIYEYDIPFAKRYLIDKGLVPMEGDEELKMLAFDIETLYHEGEEFAEGPILMISYADEEGARVITWKNVDLPYVDVVSTEREMIKRFLRVVKEKDPDVLITYNGDNFDFAYLKKRCEKLGINFALGRDGSEPKIQRMGDRFAVEVKGRIHFDLYPVIRRTINLPTYTLEAVYEAVFGQPKEKVYAEEITTAWETGENLERVARYSMEDAKVTYELGKEFLPMEAQLSRLIGQSLWDVSRSSTGNLVEWFLLRKAYERNELAPNKPDEKELARRRQSYEGGYVKEPERGLWENIVYLDFRSLYPSIIITHNVSPDTLNREGCKEYDVAPQVGHRFCKDFPGFIPSLLGDLLEERQKIKKKMKATIDPIERKLLDYRQRAIKILANSYYGYYGYARARWYCKECAESVTAWGREYITMTIKEIEEKYGFKVIYSDTDGFFATIPGADAETVKKKAMEFLKYINAKLPGALELEYEGFYKRGFFVTKKKYAVIDEEGKITTRGLEIVRRDWSEIAKETQARVLEALLKDGDVEKAVRIVKEVTEKLSKYEVPPEKLVIHEQITRDLKDYKATGPHVAVAKRLAARGVKIRPGTVISYIVLKGSGRIGDRAIPFDEFDPTKHKYDAEYYIENQVLPAVERILRAFGYRKEDLRYQKTRQVGLSAWLKPKGT

SEQ ID NO: 1418 - protein, 774 aa, synthetic construct
MILDTDYITEDGKPVIRIFKKENGEFKIEYDRTFEAYFYALLKDDSAIEEVKKITAERHGTVVTVKRVEKVQKKFLGRPVEVWKLYFTHIQDIPAIADKIREHPAVIDIYEYDIPFAKRYLIDKGLVPMEGDEELKMLAFDIETLYHEGEEFAEGPILMISYADEEGARVITWKNVDLPYVDVVSTEREMIKRFLRVVKEKDPDVLITYNGDNFDFAYLKKRCEKLGINFALGRDGSEPKIQRMGDRFAVEVKGRIHFDLYPVIRRTINLPTYTLEAVYEAVFGQPKEKVYAEEITTAWETGENLERVARYSMEDAKVTYELGKEFLPMEAQLSRLIGQSLWDVSRSSTGNLVEWFLLRKAYERNELAPNKPDEKELARRRQSYEGGYVKEPERGLWENIVYLDFRSLYPSIIITHNVSPDTLNREGCKEYDVAPQVGHRFCKDFPGFIPSLLGDLLEERQKIKKKMKATIDPIERKLLDYRQRAIKILANSYYGYYGYARARWYCKECAESVTAWGREYITMTIKEIEEKYGFKVIYSDTDGFFATIPGADAETVKKKAMEFLKYINAKLPGALELEYEGFYKRGFFVTKKKYAVIDEEGKITTRGLEIVRRDWSEIAKETQARVLEALLKDGDVEKAVRIVKEVTEKLSKYEVPPEKLVIHEQITRDLKDYKATGPHVAVAKRLAARGVKIRPGTVISYIVLKGSGRIGDRAIPFDEFDPTKHKYDAEYYIENQVLPAVERILRAFGYRKEDLRYQKTRQVGLSAWLKPKGT

SEQ ID NO: 1419 - protein, 774 aa, synthetic construct
MILDTDYITEDGKPVIRIFKKENGEFKIEYDRTFEAYFYALLKDDSAIEEVKKITAERHGTVVTVKRVEKVQKKFLGRPVEVWKLYFTHIQDIPAIFDKIREHPAVIDIYEYDIPFAKRYLIDKGLVPMEGDEELKMLAFDIETLYHEGEEFAEGPILMISYADEEGARVITWKNVDLPYVDVVSTEREMIKRFLRVVKEKDPDVLITYNGDNFDFAYLKKRCEKLGINFALGRDGSEPKIQRMGDRFAVEVKGRIHFDLYPVIRRTINLPTYTLEAVYEAVFGQPKEKVYAEEITTAWETGENLERVARYSMEDAKVTYELGKEFLPMEAQLSRLIGQSLWDVSRSSTGNLVEWFLLRKAYERNELAPNKPDEKELARRRQSYEGGYVKEPERGLWENIVYLDFRSLYPSIIITHNVSPDTLNREGCKEYDVAPQVGHRFCKDFPGFIPSLLGDLLEERQKIKKKMKATIDPIERKLLDYRQRAIKILANSYYGYYGYARARWYCKECAESVTAWGREYITMTIKEIEEKYGFKVIYSDTDGFFATIPGADAETVKKKAMEFLKYINAKLPGALELEYEGFYKRGFFVTKKKYAVIDEEGKITTRGLEIVRRDWSEIAKETQARVLEALLKDGDVEKAVRIVKEVTEKLSKYEVPPEKLVIHEQITRDLKDYKATGPHVAVAKRLAARGVKIRPGTVISYIVLKGSGRIGDRAIPFDEFDPTKHKYDAEYYIENQVLPAVERILRAFGYRKEDLRYQKTRQVGLSAWLKPKGT

SEQ ID NO: 1420 - protein, 774 aa, synthetic construct
MILDTDYITEDGKPVIRIFKKENGEFKIEYDRTFEAYFYALLKDDSAIEEVKKITAERHGTVVTVKRVEKVQKKFLGRPVEVWKLYFTHIQDIPAIHDKIREHPAVIDIYEYDIPFAKRYLIDKGLVPMEGDEELKMLAFDIETLYHEGEEFAEGPILMISYADEEGARVITWKNVDLPYVDVVSTEREMIKRFLRVVKEKDPDVLITYNGDNFDFAYLKKRCEKLGINFALGRDGSEPKIQRMGDRFAVEVKGRIHFDLYPVIRRTINLPTYTLEAVYEAVFGQPKEKVYAEEITTAWETGENLERVARYSMEDAKVTYELGKEFLPMEAQLSRLIGQSLWDVSRSSTGNLVEWFLLRKAYERNELAPNKPDEKELARRRQSYEGGYVKEPERGLWENIVYLDFRSLYPSIIITHNVSPDTLNREGCKEYDVAPQVGHRFCKDFPGFIPSLLGDLLEERQKIKKKMKATIDPIERKLLDYRQRAIKILANSYYGYYGYARARWYCKECAESVTAWGREYITMTIKEIEEKYGFKVIYSDTDGFFATIPGADAETVKKKAMEFLKYINAKLPGALELEYEGFYKRGFFVTKKKYAVIDEEGKITTRGLEIVRRDWSEIAKETQARVLEALLKDGDVEKAVRIVKEVTEKLSKYEVPPEKLVIHEQITRDLKDYKATGPHVAVAKRLAARGVKIRPGTVISYIVLKGSGRIGDRAIPFDEFDPTKHKYDAEYYIENQVLPAVERILRAFGYRKEDLRYQKTRQVGLSAWLKPKGT

SEQ ID NO: 1421 - protein, 774 aa, synthetic construct
MILDTDYITEDGKPVIRIFKKENGEFKIEYDRTFEAYFYALLKDDSAIEEVKKITAERHGTVVTVKRVEKVQKKFLGRPVEVWKLYFTHIQDIPAIWDKIREHPAVIDIYEYDIPFAKRYLIDKGLVPMEGDEELKMLAFDIETLYHEGEEFAEGPILMISYADEEGARVITWKNVDLPYVDVVSTEREMIKRFLRVVKEKDPDVLITYNGDNFDFAYLKKRCEKLGINFALGRDGSEPKIQRMGDRFAVEVKGRIHFDLYPVIRRTINLPTYTLEAVYEAVFGQPKEKVYAEEITTAWETGENLERVARYSMEDAKVTYELGKEFLPMEAQLSRLIGQSLWDVSRSSTGNLVEWFLLRKAYERNELAPNKPDEKELARRRQSYEGGYVKEPERGLWENIVYLDFRSLYPSIIITHNVSPDTLNREGCKEYDVAPQVGHRFCKDFPGFIPSLLGDLLEERQKIKKKMKATIDPIERKLLDYRQRAIKILANSYYGYYGYARARWYCKECAESVTAWGREYITMTIKEIEEKYGFKVIYSDTDGFFATIPGADAETVKKKAMEFLKYINAKLPGALELEYEGFYKRGFFVTKKKYAVIDEEGKITTRGLEIVRRDWSEIAKETQARVLEALLKDGDVEKAVRIVKEVTEKLSKYEVPPEKLVIHEQITRDLKDYKATGPHVAVAKRLAARGVKIRPGTVISYIVLKGSGRIGDRAIPFDEFDPTKHKYDAEYYIENQVLPAVERILRAFGYRKEDLRYQKTRQVGLSAWLKPKGT

SEQ ID NO: 1422 - protein, 774 aa, synthetic construct
MILDTDYITEDGKPVIRIFKKENGEFKIEYDRTFEAYFYALLKDDSAIEEVKKITAERHGTVVTVKRVEKVQKKFLGRPVEVWKLYFTHIQDKPAIRDKIREHPAVIDIYEYDIPFAKRYLIDKGLVPMEGDEELKMLAFDIETLYHEGEEFAEGPILMISYADEEGARVITWKNVDLPYVDVVSTEREMIKRFLRVVKEKDPDVLITYNGDNFDFAYLKKRCEKLGINFALGRDGSEPKIQRMGDRFAVEVKGRIHFDLYPVIRRTINLPTYTLEAVYEAVFGQPKEKVYAEEITTAWETGENLERVARYSMEDAKVTYELGKEFLPMEAQLSRLIGQSLWDVSRSSTGNLVEWFLLRKAYERNELAPNKPDEKELARRRQSYEGGYVKEPERGLWENIVYLDFRSLYPSIIITHNVSPDTLNREGCKEYDVAPQVGHRFCKDFPGFIPSLLGDLLEERQKIKKKMKATIDPIERKLLDYRQRAIKILANSYYGYYGYARARWYCKECAESVTAWGREYITMTIKEIEEKYGFKVIYSDTDGFFATIPGADAETVKKKAMEFLKYINAKLPGALELEYEGFYKRGFFVTKKKYAVIDEEGKITTRGLEIVRRDWSEIAKETQARVLEALLKDGDVEKAVRIVKEVTEKLSKYEVPPEKLVIHEQITRDLKDYKATGPHVAVAKRLAARGVKIRPGTVISYIVLKGSGRIGDRAIPFDEFDPTKHKYDAEYYIENQVLPAVERILRAFGYRKEDLRYQKTRQVGLSAWLKPKGT

SEQ ID NO: 1423 - protein, 774 aa, synthetic construct
MILDTDYITEDGKPVIRIFKKENGEFKIEYDRTFEAYFYALLKDDSAIEEVKKITAERHGTVVTVKRVEKVQKKFLGRPVEVWKLYFTHIQDKPAIFDKIREHPAVIDIYEYDIPFAKRYLIDKGLVPMEGDEELKMLAFDIETLYHEGEEFAEGPILMISYADEEGARVITWKNVDLPYVDVVSTEREMIKRFLRVVKEKDPDVLITYNGDNFDFAYLKKRCEKLGINFALGRDGSEPKIQRMGDRFAVEVKGRIHFDLYPVIRRTINLPTYTLEAVYEAVFGQPKEKVYAEEITTAWETGENLERVARYSMEDAKVTYELGKEFLPMEAQLSRLIGQSLWDVSRSSTGNLVEWFLLRKAYERNELAPNKPDEKELARRRQSYEGGYVKEPERGLWENIVYLDFRSLYPSIIITHNVSPDTLNREGCKEYDVAPQVGHRFCKDFPGFIPSLLGDLLEERQKIKKKMKATIDPIERKLLDYRQRAIKILANSYYGYYGYARARWYCKECAESVTAWGREYITMTIKEIEEKYGFKVIYSDTDGFFATIPGADAETVKKKAMEFLKYINAKLPGALELEYEGFYKRGFFVTKKKYAVIDEEGKITTRGLEIVRRDWSEIAKETQARVLEALLKDGDVEKAVRIVKEVTEKLSKYEVPPEKLVIHEQITRDLKDYKATGPHVAVAKRLAARGVKIRPGTVISYIVLKGSGRIGDRAIPFDEFDPTKHKYDAEYYIENQVLPAVERILRAFGYRKEDLRYQKTRQVGLSAWLKPKGT

SEQ ID NO: 1424 - protein, 774 aa, synthetic construct
MILDTDYITEDGKPVIRIFKKENGEFKIEYDRTFEAYFYALLKDDSAIEEVKKITAERHGTVVTVKRVEKVQKKFLGRPVEVWKLYFTHIQDQPAIRDKIREHPAVIDIYEYDIPFAKRYLIDKGLVPMEGDEELKMLAFDIETLYHEGEEFAEGPILMISYADEEGARVITWKNVDLPYVDVVSTEREMIKRFLRVVKEKDPDVLITYNGDNFDFAYLKKRCEKLGINFALGRDGSEPKIQRMGDRFAVEVKGRIHFDLYPVIRRTINLPTYTLEAVYEAVFGQPKEKVYAEEITTAWETGENLERVARYSMEDAKVTYELGKEFLPMEAQLSRLIGQSLWDVSRSSTGNLVEWFLLRKAYERNELAPNKPDEKELARRRQSYEGGYVKEPERGLWENIVYLDFRSLYPSIIITHNVSPDTLNREGCKEYDVAPQVGHRFCKDFPGFIPSLLGDLLEERQKIKKKMKATIDPIERKLLDYRQRAIKILANSYYGYYGYARARWYCKECAESVTAWGREYITMTIKEIEEKYGFKVIYSDTDGFFATIPGADAETVKKKAMEFLKYINAKLPGALELEYEGFYKRGFFVTKKKYAVIDEEGKITTRGLEIVRRDWSEIAKETQARVLEALLKDGDVEKAVRIVKEVTEKLSKYEVPPEKLVIHEQITRDLKDYKATGPHVAVAKRLAARGVKIRPGTVISYIVLKGSGRIGDRAIPFDEFDPTKHKYDAEYYIENQVLPAVERILRAFGYRKEDLRYQKTRQVGLSAWLKPKGT

SEQ ID NO: 1425 - protein, 774 aa, synthetic construct
MILDTDYITEDGKPVIRIFKKENGEFKIEYDRTFEAYFYALLKDDSAIEEVKKITAERHGTVVTVKRVEKVQKKFLGRPVEVWKLYFTHIQDRPAIRDKIREHPAVIDIYEYDIPFAKRYLIDKGLVPMEGDEELKMLAFDIETLYHEGEEFAEGPILMISYADEEGARVITWKNVDLPYVDVVSTEREMIKRFLRVVKEKDPDVLITYNGDNFDFAYLKKRCEKLGINFALGRDGSEPKIQRMGDRFAVEVKGRIHFDLYPVIRRTINLPTYTLEAVYEAVFGQPKEKVYAEEITTAWETGENLERVARYSMEDAKVTYELGKEFLPMEAQLSRLIGQSLWDVSRSSTGNLVEWFLLRKAYERNELAPNKPDEKELARRRQSYEGGYVKEPERGLWENIVYLDFRSLYPSIIITHNVSPDTLNREGCKEYDVAPQVGHRFCKDFPGFIPSLLGDLLEERQKIKKKMKATIDPIERKLLDYRQRAIKILANSYYGYYGYARARWYCKECAESVTAWGREYITMTIKEIEEKYGFKVIYSDTDGFFATIPGADAETVKKKAMEFLKYINAKLPGALELEYEGFYKRGFFVTKKKYAVIDEEGKITTRGLEIVRRDWSEIAKETQARVLEALLKDGDVEKAVRIVKEVTEKLSKYEVPPEKLVIHEQITRDLKDYKATGPHVAVAKRLAARGVKIRPGTVISYIVLKGSGRIGDRAIPFDEFDPTKHKYDAEYYIENQVLPAVERILRAFGYRKEDLRYQKTRQVGLSAWLKPKGT

SEQ ID NO: 1426 - protein, 774 aa, synthetic construct
MILDTDYITEDGKPVIRIFKKENGEFKIEYDRTFEAYFYALLKDDSAIEEVKKITAERHGTVVTVKRVEKVQKKFLGRPVEVWKLYFTHIQDRPAIADKIREHPAVIDIYEYDIPFAKRYLIDKGLVPMEGDEELKMLAFDIETLYHEGEEFAEGPILMISYADEEGARVITWKNVDLPYVDVVSTEREMIKRFLRVVKEKDPDVLITYNGDNFDFAYLKKRCEKLGINFALGRDGSEPKIQRMGDRFAVEVKGRIHFDLYPVIRRTINLPTYTLEAVYEAVFGQPKEKVYAEEITTAWETGENLERVARYSMEDAKVTYELGKEFLPMEAQLSRLIGQSLWDVSRSSTGNLVEWFLLRKAYERNELAPNKPDEKELARRRQSYEGGYVKEPERGLWENIVYLDFRSLYPSIIITHNVSPDTLNREGCKEYDVAPQVGHRFCKDFPGFIPSLLGDLLEERQKIKKKMKATIDPIERKLLDYRQRAIKILANSYYGYYGYARARWYCKECAESVTAWGREYITMTIKEIEEKYGFKVIYSDTDGFFATIPGADAETVKKKAMEFLKYINAKLPGALELEYEGFYKRGFFVTKKKYAVIDEEGKITTRGLEIVRRDWSEIAKETQARVLEALLKDGDVEKAVRIVKEVTEKLSKYEVPPEKLVIHEQITRDLKDYKATGPHVAVAKRLAARGVKIRPGTVISYIVLKGSGRIGDRAIPFDEFDPTKHKYDAEYYIENQVLPAVERILRAFGYRKEDLRYQKTRQVGLSAWLKPKGT

SEQ ID NO: 1427 - protein, 774 aa, synthetic construct
MILDTDYITEDGKPVIRIFKKENGEFKIEYDRTFEAYFYALLKDDSAIEEVKKITAERHGTVVTVKRVEKVQKKFLGRPVEVWKLYFTHIQDRPAIHDKIREHPAVIDIYEYDIPFAKRYLIDKGLVPMEGDEELKMLAFDIETLYHEGEEFAEGPILMISYADEEGARVITWKNVDLPYVDVVSTEREMIKRFLRVVKEKDPDVLITYNGDNFDFAYLKKRCEKLGINFALGRDGSEPKIQRMGDRFAVEVKGRIHFDLYPVIRRTINLPTYTLEAVYEAVFGQPKEKVYAEEITTAWETGENLERVARYSMEDAKVTYELGKEFLPMEAQLSRLIGQSLWDVSRSSTGNLVEWFLLRKAYERNELAPNKPDEKELARRRQSYEGGYVKEPERGLWENIVYLDFRSLYPSIIITHNVSPDTLNREGCKEYDVAPQVGHRFCKDFPGFIPSLLGDLLEERQKIKKKMKATIDPIERKLLDYRQRAIKILANSYYGYYGYARARWYCKECAESVTAWGREYITMTIKEIEEKYGFKVIYSDTDGFFATIPGADAETVKKKAMEFLKYINAKLPGALELEYEGFYKRGFFVTKKKYAVIDEEGKITTRGLEIVRRDWSEIAKETQARVLEALLKDGDVEKAVRIVKEVTEKLSKYEVPPEKLVIHEQITRDLKDYKATGPHVAVAKRLAARGVKIRPGTVISYIVLKGSGRIGDRAIPFDEFDPTKHKYDAEYYIENQVLPAVERILRAFGYRKEDLRYQKTRQVGLSAWLKPKGT

SEQ ID NO: 1428 - protein, 774 aa, synthetic construct
MILDTDYITEDGKPVIRIFKKENGEFKIEYDRTFEAYFYALLKDDSAIEEVKKITAERHGTVVTVKRVEKVQKKFLGRPVEVWKLYFTHSQDVPAIADKIREHPAVIDIYEYDIPFAKRYLIDKGLVPMEGDEELKMLAFDIETLYHEGEEFAEGPILMISYADEEGARVITWKNVDLPYVDVVSTEREMIKRFLRVVKEKDPDVLITYNGDNFDFAYLKKRCEKLGINFALGRDGSEPKIQRMGDRFAVEVKGRIHFDLYPVIRRTINLPTYTLEAVYEAVFGQPKEKVYAEEITTAWETGENLERVARYSMEDAKVTYELGKEFLPMEAQLSRLIGQSLWDVSRSSTGNLVEWFLLRKAYERNELAPNKPDEKELARRRQSYEGGYVKEPERGLWENIVYLDFRSLYPSIIITHNVSPDTLNREGCKEYDVAPQVGHRFCKDFPGFIPSLLGDLLEERQKIKKKMKATIDPIERKLLDYRQRAIKILANSYYGYYGYARARWYCKECAESVTAWGREYITMTIKEIEEKYGFKVIYSDTDGFFATIPGADAETVKKKAMEFLKYINAKLPGALELEYEGFYKRGFFVTKKKYAVIDEEGKITTRGLEIVRRDWSEIAKETQARVLEALLKDGDVEKAVRIVKEVTEKLSKYEVPPEKLVIHEQITRDLKDYKATGPHVAVAKRLAARGVKIRPGTVISYIVLKGSGRIGDRAIPFDEFDPTKHKYDAEYYIENQVLPAVERILRAFGYRKEDLRYQKTRQVGLSAWLKPKGT

SEQ ID NO: 1429 - protein, 774 aa, synthetic construct
MILDTDYITEDGKPVIRIFKKENGEFKIEYDRTFEAYFYALLKDDSAIEEVKKITAERHGTVVTVKRVEKVQKKFLGRPVEVWKLYFTHSQDVPAIFDKIREHPAVIDIYEYDIPFAKRYLIDKGLVPMEGDEELKMLAFDIETLYHEGEEFAEGPILMISYADEEGARVITWKNVDLPYVDVVSTEREMIKRFLRVVKEKDPDVLITYNGDNFDFAYLKKRCEKLGINFALGRDGSEPKIQRMGDRFAVEVKGRIHFDLYPVIRRTINLPTYTLEAVYEAVFGQPKEKVYAEEITTAWETGENLERVARYSMEDAKVTYELGKEFLPMEAQLSRLIGQSLWDVSRSSTGNLVEWFLLRKAYERNELAPNKPDEKELARRRQSYEGGYVKEPERGLWENIVYLDFRSLYPSIIITHNVSPDTLNREGCKEYDVAPQVGHRFCKDFPGFIPSLLGDLLEERQKIKKKMKATIDPIERKLLDYRQRAIKILANSYYGYYGYARARWYCKECAESVTAWGREYITMTIKEIEEKYGFKVIYSDTDGFFATIPGADAETVKKKAMEFLKYINAKLPGALELEYEGFYKRGFFVTKKKYAVIDEEGKITTRGLEIVRRDWSEIAKETQARVLEALLKDGDVEKAVRIVKEVTEKLSKYEVPPEKLVIHEQITRDLKDYKATGPHVAVAKRLAARGVKIRPGTVISYIVLKGSGRIGDRAIPFDEFDPTKHKYDAEYYIENQVLPAVERILRAFGYRKEDLRYQKTRQVGLSAWLKPKGT

SEQ ID NO: 1430 - protein, 774 aa, synthetic construct
MILDTDYITEDGKPVIRIFKKENGEFKIEYDRTFEAYFYALLKDDSAIEEVKKITAERHGTVVTVKRVEKVQKKFLGRPVEVWKLYFTHSQDIPAIADKIREHPAVIDIYEYDIPFAKRYLIDKGLVPMEGDEELKMLAFDIETLYHEGEEFAEGPILMISYADEEGARVITWKNVDLPYVDVVSTEREMIKRFLRVVKEKDPDVLITYNGDNFDFAYLKKRCEKLGINFALGRDGSEPKIQRMGDRFAVEVKGRIHFDLYPVIRRTINLPTYTLEAVYEAVFGQPKEKVYAEEITTAWETGENLERVARYSMEDAKVTYELGKEFLPMEAQLSRLIGQSLWDVSRSSTGNLVEWFLLRKAYERNELAPNKPDEKELARRRQSYEGGYVKEPERGLWENIVYLDFRSLYPSIIITHNVSPDTLNREGCKEYDVAPQVGHRFCKDFPGFIPSLLGDLLEERQKIKKKMKATIDPIERKLLDYRQRAIKILANSYYGYYGYARARWYCKECAESVTAWGREYITMTIKEIEEKYGFKVIYSDTDGFFATIPGADAETVKKKAMEFLKYINAKLPGALELEYEGFYKRGFFVTKKKYAVIDEEGKITTRGLEIVRRDWSEIAKETQARVLEALLKDGDVEKAVRIVKEVTEKLSKYEVPPEKLVIHEQITRDLKDYKATGPHVAVAKRLAARGVKIRPGTVISYIVLKGSGRIGDRAIPFDEFDPTKHKYDAEYYIENQVLPAVERILRAFGYRKEDLRYQKTRQVGLSAWLKPKGT

SEQ ID NO: 1431 - protein, 774 aa, synthetic construct
MILDTDYITEDGKPVIRIFKKENGEFKIEYDRTFEAYFYALLKDDSAIEEVKKITAERHGTVVTVKRVEKVQKKFLGRPVEVWKLYFTHSQDIPAIFDKIREHPAVIDIYEYDIPFAKRYLIDKGLVPMEGDEELKMLAFDIETLYHEGEEFAEGPILMISYADEEGARVITWKNVDLPYVDVVSTEREMIKRFLRVVKEKDPDVLITYNGDNFDFAYLKKRCEKLGINFALGRDGSEPKIQRMGDRFAVEVKGRIHFDLYPVIRRTINLPTYTLEAVYEAVFGQPKEKVYAEEITTAWETGENLERVARYSMEDAKVTYELGKEFLPMEAQLSRLIGQSLWDVSRSSTGNLVEWFLLRKAYERNELAPNKPDEKELARRRQSYEGGYVKEPERGLWENIVYLDFRSLYPSIIITHNVSPDTLNREGCKEYDVAPQVGHRFCKDFPGFIPSLLGDLLEERQKIKKKMKATIDPIERKLLDYRQRAIKILANSYYGYYGYARARWYCKECAESVTAWGREYITMTIKEIEEKYGFKVIYSDTDGFFATIPGADAETVKKKAMEFLKYINAKLPGALELEYEGFYKRGFFVTKKKYAVIDEEGKITTRGLEIVRRDWSEIAKETQARVLEALLKDGDVEKAVRIVKEVTEKLSKYEVPPEKLVIHEQITRDLKDYKATGPHVAVAKRLAARGVKIRPGTVISYIVLKGSGRIGDRAIPFDEFDPTKHKYDAEYYIENQVLPAVERILRAFGYRKEDLRYQKTRQVGLSAWLKPKGT

SEQ ID NO: 1432 - protein, 774 aa, synthetic construct
MILDTDYITEDGKPVIRIFKKENGEFKIEYDRTFEAYFYALLKDDSAIEEVKKITAERHGTVVTVKRVEKVQKKFLGRPVEVWKLYFTHSQDIPAIHDKIREHPAVIDIYEYDIPFAKRYLIDKGLVPMEGDEELKMLAFDIETLYHEGEEFAEGPILMISYADEEGARVITWKNVDLPYVDVVSTEREMIKRFLRVVKEKDPDVLITYNGDNFDFAYLKKRCEKLGINFALGRDGSEPKIQRMGDRFAVEVKGRIHFDLYPVIRRTINLPTYTLEAVYEAVFGQPKEKVYAEEITTAWETGENLERVARYSMEDAKVTYELGKEFLPMEAQLSRLIGQSLWDVSRSSTGNLVEWFLLRKAYERNELAPNKPDEKELARRRQSYEGGYVKEPERGLWENIVYLDFRSLYPSIIITHNVSPDTLNREGCKEYDVAPQVGHRFCKDFPGFIPSLLGDLLEERQKIKKKMKATIDPIERKLLDYRQRAIKILANSYYGYYGYARARWYCKECAESVTAWGREYITMTIKEIEEKYGFKVIYSDTDGFFATIPGADAETVKKKAMEFLKYINAKLPGALELEYEGFYKRGFFVTKKKYAVIDEEGKITTRGLEIVRRDWSEIAKETQARVLEALLKDGDVEKAVRIVKEVTEKLSKYEVPPEKLVIHEQITRDLKDYKATGPHVAVAKRLAARGVKIRPGTVISYIVLKGSGRIGDRAIPFDEFDPTKHKYDAEYYIENQVLPAVERILRAFGYRKEDLRYQKTRQVGLSAWLKPKGT

SEQ ID NO: 1433 - protein, 774 aa, synthetic construct
MILDTDYITEDGKPVIRIFKKENGEFKIEYDRTFEAYFYALLKDDSAIEEVKKITAERHGTVVTVKRVEKVQKKFLGRPVEVWKLYFTHSQDRPAIFDKIREHPAVIDIYEYDIPFAKRYLIDKGLVPMEGDEELKMLAFDIETLYHEGEEFAEGPILMISYADEEGARVITWKNVDLPYVDVVSTEREMIKRFLRVVKEKDPDVLITYNGDNFDFAYLKKRCEKLGINFALGRDGSEPKIQRMGDRFAVEVKGRIHFDLYPVIRRTINLPTYTLEAVYEAVFGQPKEKVYAEEITTAWETGENLERVARYSMEDAKVTYELGKEFLPMEAQLSRLIGQSLWDVSRSSTGNLVEWFLLRKAYERNELAPNKPDEKELARRRQSYEGGYVKEPERGLWENIVYLDFRSLYPSIIITHNVSPDTLNREGCKEYDVAPQVGHRFCKDFPGFIPSLLGDLLEERQKIKKKMKATIDPIERKLLDYRQRAIKILANSYYGYYGYARARWYCKECAESVTAWGREYITMTIKEIEEKYGFKVIYSDTDGFFATIPGADAETVKKKAMEFLKYINAKLPGALELEYEGFYKRGFFVTKKKYAVIDEEGKITTRGLEIVRRDWSEIAKETQARVLEALLKDGDVEKAVRIVKEVTEKLSKYEVPPEKLVIHEQITRDLKDYKATGPHVAVAKRLAARGVKIRPGTVISYIVLKGSGRIGDRAIPFDEFDPTKHKYDAEYYIENQVLPAVERILRAFGYRKEDLRYQKTRQVGLSAWLKPKGT

SEQ ID NO: 1434 - protein, 774 aa, synthetic construct
MILDTDYITEDGKPVIRIFKKENGEFKIEYDRTFEAYFYALLKDDSAIEEVKKITAERHGTVVTVKRVEKVQKKFLGRPVEVWKLYFTHWQDVPAIRDKIREHPAVIDIYEYDIPFAKRYLIDKGLVPMEGDEELKMLAFDIETLYHEGEEFAEGPILMISYADEEGARVITWKNVDLPYVDVVSTEREMIKRFLRVVKEKDPDVLITYNGDNFDFAYLKKRCEKLGINFALGRDGSEPKIQRMGDRFAVEVKGRIHFDLYPVIRRTINLPTYTLEAVYEAVFGQPKEKVYAEEITTAWETGENLERVARYSMEDAKVTYELGKEFLPMEAQLSRLIGQSLWDVSRSSTGNLVEWFLLRKAYERNELAPNKPDEKELARRRQSYEGGYVKEPERGLWENIVYLDFRSLYPSIIITHNVSPDTLNREGCKEYDVAPQVGHRFCKDFPGFIPSLLGDLLEERQKIKKKMKATIDPIERKLLDYRQRAIKILANSYYGYYGYARARWYCKECAESVTAWGREYITMTIKEIEEKYGFKVIYSDTDGFFATIPGADAETVKKKAMEFLKYINAKLPGALELEYEGFYKRGFFVTKKKYAVIDEEGKITTRGLEIVRRDWSEIAKETQARVLEALLKDGDVEKAVRIVKEVTEKLSKYEVPPEKLVIHEQITRDLKDYKATGPHVAVAKRLAARGVKIRPGTVISYIVLKGSGRIGDRAIPFDEFDPTKHKYDAEYYIENQVLPAVERILRAFGYRKEDLRYQKTRQVGLSAWLKPKGT

SEQ ID NO: 1435 - protein, 774 aa, synthetic construct
MILDTDYITEDGKPVIRIFKKENGEFKIEYDRTFEAYFYALLKDDSAIEEVKKITAERHGTVVTVKRVEKVQKKFLGRPVEVWKLYFTHWQDVPAIFDKIREHPAVIDIYEYDIPFAKRYLIDKGLVPMEGDEELKMLAFDIETLYHEGEEFAEGPILMISYADEEGARVITWKNVDLPYVDVVSTEREMIKRFLRVVKEKDPDVLITYNGDNFDFAYLKKRCEKLGINFALGRDGSEPKIQRMGDRFAVEVKGRIHFDLYPVIRRTINLPTYTLEAVYEAVFGQPKEKVYAEEITTAWETGENLERVARYSMEDAKVTYELGKEFLPMEAQLSRLIGQSLWDVSRSSTGNLVEWFLLRKAYERNELAPNKPDEKELARRRQSYEGGYVKEPERGLWENIVYLDFRSLYPSIIITHNVSPDTLNREGCKEYDVAPQVGHRFCKDFPGFIPSLLGDLLEERQKIKKKMKATIDPIERKLLDYRQRAIKILANSYYGYYGYARARWYCKECAESVTAWGREYITMTIKEIEEKYGFKVIYSDTDGFFATIPGADAETVKKKAMEFLKYINAKLPGALELEYEGFYKRGFFVTKKKYAVIDEEGKITTRGLEIVRRDWSEIAKETQARVLEALLKDGDVEKAVRIVKEVTEKLSKYEVPPEKLVIHEQITRDLKDYKATGPHVAVAKRLAARGVKIRPGTVISYIVLKGSGRIGDRAIPFDEFDPTKHKYDAEYYIENQVLPAVERILRAFGYRKEDLRYQKTRQVGLSAWLKPKGT

SEQ ID NO: 1436 - protein, 774 aa, synthetic construct
MILDTDYITEDGKPVIRIFKKENGEFKIEYDRTFEAYFYALLKDDSAIEEVKKITAERHGTVVTVKRVEKVQKKFLGRPVEVWKLYFTHWQDIPAIRDKIREHPAVIDIYEYDIPFAKRYLIDKGLVPMEGDEELKMLAFDIETLYHEGEEFAEGPILMISYADEEGARVITWKNVDLPYVDVVSTEREMIKRFLRVVKEKDPDVLITYNGDNFDFAYLKKRCEKLGINFALGRDGSEPKIQRMGDRFAVEVKGRIHFDLYPVIRRTINLPTYTLEAVYEAVFGQPKEKVYAEEITTAWETGENLERVARYSMEDAKVTYELGKEFLPMEAQLSRLIGQSLWDVSRSSTGNLVEWFLLRKAYERNELAPNKPDEKELARRRQSYEGGYVKEPERGLWENIVYLDFRSLYPSIIITHNVSPDTLNREGCKEYDVAPQVGHRFCKDFPGFIPSLLGDLLEERQKIKKKMKATIDPIERKLLDYRQRAIKILANSYYGYYGYARARWYCKECAESVTAWGREYITMTIKEIEEKYGFKVIYSDTDGFFATIPGADAETVKKKAMEFLKYINAKLPGALELEYEGFYKRGFFVTKKKYAVIDEEGKITTRGLEIVRRDWSEIAKETQARVLEALLKDGDVEKAVRIVKEVTEKLSKYEVPPEKLVIHEQITRDLKDYKATGPHVAVAKRLAARGVKIRPGTVISYIVLKGSGRIGDRAIPFDEFDPTKHKYDAEYYIENQVLPAVERILRAFGYRKEDLRYQKTRQVGLSAWLKPKGT

SEQ ID NO: 1437 - protein, 774 aa, synthetic construct
MILDTDYITEDGKPVIRIFKKENGEFKIEYDRTFEAYFYALLKDDSAIEEVKKITAERHGTVVTVKRVEKVQKKFLGRPVEVWKLYFTHWQDIPAIADKIREHPAVIDIYEYDIPFAKRYLIDKGLVPMEGDEELKMLAFDIETLYHEGEEFAEGPILMISYADEEGARVITWKNVDLPYVDVVSTEREMIKRFLRVVKEKDPDVLITYNGDNFDFAYLKKRCEKLGINFALGRDGSEPKIQRMGDRFAVEVKGRIHFDLYPVIRRTINLPTYTLEAVYEAVFGQPKEKVYAEEITTAWETGENLERVARYSMEDAKVTYELGKEFLPMEAQLSRLIGQSLWDVSRSSTGNLVEWFLLRKAYERNELAPNKPDEKELARRRQSYEGGYVKEPERGLWENIVYLDFRSLYPSIIITHNVSPDTLNREGCKEYDVAPQVGHRFCKDFPGFIPSLLGDLLEERQKIKKKMKATIDPIERKLLDYRQRAIKILANSYYGYYGYARARWYCKECAESVTAWGREYITMTIKEIEEKYGFKVIYSDTDGFFATIPGADAETVKKKAMEFLKYINAKLPGALELEYEGFYKRGFFVTKKKYAVIDEEGKITTRGLEIVRRDWSEIAKETQARVLEALLKDGDVEKAVRIVKEVTEKLSKYEVPPEKLVIHEQITRDLKDYKATGPHVAVAKRLAARGVKIRPGTVISYIVLKGSGRIGDRAIPFDEFDPTKHKYDAEYYIENQVLPAVERILRAFGYRKEDLRYQKTRQVGLSAWLKPKGT

SEQ ID NO: 1438 - protein, 774 aa, synthetic construct
MILDTDYITEDGKPVIRIFKKENGEFKIEYDRTFEAYFYALLKDDSAIEEVKKITAERHGTVVTVKRVEKVQKKFLGRPVEVWKLYFTHWQDIPAIFDKIREHPAVIDIYEYDIPFAKRYLIDKGLVPMEGDEELKMLAFDIETLYHEGEEFAEGPILMISYADEEGARVITWKNVDLPYVDVVSTEREMIKRFLRVVKEKDPDVLITYNGDNFDFAYLKKRCEKLGINFALGRDGSEPKIQRMGDRFAVEVKGRIHFDLYPVIRRTINLPTYTLEAVYEAVFGQPKEKVYAEEITTAWETGENLERVARYSMEDAKVTYELGKEFLPMEAQLSRLIGQSLWDVSRSSTGNLVEWFLLRKAYERNELAPNKPDEKELARRRQSYEGGYVKEPERGLWENIVYLDFRSLYPSIIITHNVSPDTLNREGCKEYDVAPQVGHRFCKDFPGFIPSLLGDLLEERQKIKKKMKATIDPIERKLLDYRQRAIKILANSYYGYYGYARARWYCKECAESVTAWGREYITMTIKEIEEKYGFKVIYSDTDGFFATIPGADAETVKKKAMEFLKYINAKLPGALELEYEGFYKRGFFVTKKKYAVIDEEGKITTRGLEIVRRDWSEIAKETQARVLEALLKDGDVEKAVRIVKEVTEKLSKYEVPPEKLVIHEQITRDLKDYKATGPHVAVAKRLAARGVKIRPGTVISYIVLKGSGRIGDRAIPFDEFDPTKHKYDAEYYIENQVLPAVERILRAFGYRKEDLRYQKTRQVGLSAWLKPKGT

SEQ ID NO: 1439 - protein, 774 aa, synthetic construct
MILDTDYITEDGKPVIRIFKKENGEFKIEYDRTFEAYFYALLKDDSAIEEVKKITAERHGTVVTVKRVEKVQKKFLGRPVEVWKLYFTHWQDIPAIHDKIREHPAVIDIYEYDIPFAKRYLIDKGLVPMEGDEELKMLAFDIETLYHEGEEFAEGPILMISYADEEGARVITWKNVDLPYVDVVSTEREMIKRFLRVVKEKDPDVLITYNGDNFDFAYLKKRCEKLGINFALGRDGSEPKIQRMGDRFAVEVKGRIHFDLYPVIRRTINLPTYTLEAVYEAVFGQPKEKVYAEEITTAWETGENLERVARYSMEDAKVTYELGKEFLPMEAQLSRLIGQSLWDVSRSSTGNLVEWFLLRKAYERNELAPNKPDEKELARRRQSYEGGYVKEPERGLWENIVYLDFRSLYPSIIITHNVSPDTLNREGCKEYDVAPQVGHRFCKDFPGFIPSLLGDLLEERQKIKKKMKATIDPIERKLLDYRQRAIKILANSYYGYYGYARARWYCKECAESVTAWGREYITMTIKEIEEKYGFKVIYSDTDGFFATIPGADAETVKKKAMEFLKYINAKLPGALELEYEGFYKRGFFVTKKKYAVIDEEGKITTRGLEIVRRDWSEIAKETQARVLEALLKDGDVEKAVRIVKEVTEKLSKYEVPPEKLVIHEQITRDLKDYKATGPHVAVAKRLAARGVKIRPGTVISYIVLKGSGRIGDRAIPFDEFDPTKHKYDAEYYIENQVLPAVERILRAFGYRKEDLRYQKTRQVGLSAWLKPKGT

SEQ ID NO: 1440 - protein, 774 aa, synthetic construct
MILDTDYITEDGKPVIRIFKKENGEFKIEYDRTFEAYFYALLKDDSAIEEVKKITAERHGTVVTVKRVEKVQKKFLGRPVEVWKLYFTHWQDKPAIFDKIREHPAVIDIYEYDIPFAKRYLIDKGLVPMEGDEELKMLAFDIETLYHEGEEFAEGPILMISYADEEGARVITWKNVDLPYVDVVSTEREMIKRFLRVVKEKDPDVLITYNGDNFDFAYLKKRCEKLGINFALGRDGSEPKIQRMGDRFAVEVKGRIHFDLYPVIRRTINLPTYTLEAVYEAVFGQPKEKVYAEEITTAWETGENLERVARYSMEDAKVTYELGKEFLPMEAQLSRLIGQSLWDVSRSSTGNLVEWFLLRKAYERNELAPNKPDEKELARRRQSYEGGYVKEPERGLWENIVYLDFRSLYPSIIITHNVSPDTLNREGCKEYDVAPQVGHRFCKDFPGFIPSLLGDLLEERQKIKKKMKATIDPIERKLLDYRQRAIKILANSYYGYYGYARARWYCKECAESVTAWGREYITMTIKEIEEKYGFKVIYSDTDGFFATIPGADAETVKKKAMEFLKYINAKLPGALELEYEGFYKRGFFVTKKKYAVIDEEGKITTRGLEIVRRDWSEIAKETQARVLEALLKDGDVEKAVRIVKEVTEKLSKYEVPPEKLVIHEQITRDLKDYKATGPHVAVAKRLAARGVKIRPGTVISYIVLKGSGRIGDRAIPFDEFDPTKHKYDAEYYIENQVLPAVERILRAFGYRKEDLRYQKTRQVGLSAWLKPKGT

SEQ ID NO: 1441 - protein, 774 aa, synthetic construct
MILDTDYITEDGKPVIRIFKKENGEFKIEYDRTFEAYFYALLKDDSAIEEVKKITAERHGTVVTVKRVEKVQKKFLGRPVEVWKLYFTHWQDKPAIWDKIREHPAVIDIYEYDIPFAKRYLIDKGLVPMEGDEELKMLAFDIETLYHEGEEFAEGPILMISYADEEGARVITWKNVDLPYVDVVSTEREMIKRFLRVVKEKDPDVLITYNGDNFDFAYLKKRCEKLGINFALGRDGSEPKIQRMGDRFAVEVKGRIHFDLYPVIRRTINLPTYTLEAVYEAVFGQPKEKVYAEEITTAWETGENLERVARYSMEDAKVTYELGKEFLPMEAQLSRLIGQSLWDVSRSSTGNLVEWFLLRKAYERNELAPNKPDEKELARRRQSYEGGYVKEPERGLWENIVYLDFRSLYPSIIITHNVSPDTLNREGCKEYDVAPQVGHRFCKDFPGFIPSLLGDLLEERQKIKKKMKATIDPIERKLLDYRQRAIKILANSYYGYYGYARARWYCKECAESVTAWGREYITMTIKEIEEKYGFKVIYSDTDGFFATIPGADAETVKKKAMEFLKYINAKLPGALELEYEGFYKRGFFVTKKKYAVIDEEGKITTRGLEIVRRDWSEIAKETQARVLEALLKDGDVEKAVRIVKEVTEKLSKYEVPPEKLVIHEQITRDLKDYKATGPHVAVAKRLAARGVKIRPGTVISYIVLKGSGRIGDRAIPFDEFDPTKHKYDAEYYIENQVLPAVERILRAFGYRKEDLRYQKTRQVGLSAWLKPKGT

SEQ ID NO: 1442 - protein, 774 aa, synthetic construct
MILDTDYITEDGKPVIRIFKKENGEFKIEYDRTFEAYFYALLKDDSAIEEVKKITAERHGTVVTVKRVEKVQKKFLGRPVEVWKLYFTHWQDQPAIRDKIREHPAVIDIYEYDIPFAKRYLIDKGLVPMEGDEELKMLAFDIETLYHEGEEFAEGPILMISYADEEGARVITWKNVDLPYVDVVSTEREMIKRFLRVVKEKDPDVLITYNGDNFDFAYLKKRCEKLGINFALGRDGSEPKIQRMGDRFAVEVKGRIHFDLYPVIRRTINLPTYTLEAVYEAVFGQPKEKVYAEEITTAWETGENLERVARYSMEDAKVTYELGKEFLPMEAQLSRLIGQSLWDVSRSSTGNLVEWFLLRKAYERNELAPNKPDEKELARRRQSYEGGYVKEPERGLWENIVYLDFRSLYPSIIITHNVSPDTLNREGCKEYDVAPQVGHRFCKDFPGFIPSLLGDLLEERQKIKKKMKATIDPIERKLLDYRQRAIKILANSYYGYYGYARARWYCKECAESVTAWGREYITMTIKEIEEKYGFKVIYSDTDGFFATIPGADAETVKKKAMEFLKYINAKLPGALELEYEGFYKRGFFVTKKKYAVIDEEGKITTRGLEIVRRDWSEIAKETQARVLEALLKDGDVEKAVRIVKEVTEKLSKYEVPPEKLVIHEQITRDLKDYKATGPHVAVAKRLAARGVKIRPGTVISYIVLKGSGRIGDRAIPFDEFDPTKHKYDAEYYIENQVLPAVERILRAFGYRKEDLRYQKTRQVGLSAWLKPKGT

SEQ ID NO: 1443 - protein, 774 aa, synthetic construct
MILDTDYITEDGKPVIRIFKKENGEFKIEYDRTFEAYFYALLKDDSAIEEVKKITAERHGTVVTVKRVEKVQKKFLGRPVEVWKLYFTHWQDQPAIWDKIREHPAVIDIYEYDIPFAKRYLIDKGLVPMEGDEELKMLAFDIETLYHEGEEFAEGPILMISYADEEGARVITWKNVDLPYVDVVSTEREMIKRFLRVVKEKDPDVLITYNGDNFDFAYLKKRCEKLGINFALGRDGSEPKIQRMGDRFAVEVKGRIHFDLYPVIRRTINLPTYTLEAVYEAVFGQPKEKVYAEEITTAWETGENLERVARYSMEDAKVTYELGKEFLPMEAQLSRLIGQSLWDVSRSSTGNLVEWFLLRKAYERNELAPNKPDEKELARRRQSYEGGYVKEPERGLWENIVYLDFRSLYPSIIITHNVSPDTLNREGCKEYDVAPQVGHRFCKDFPGFIPSLLGDLLEERQKIKKKMKATIDPIERKLLDYRQRAIKILANSYYGYYGYARARWYCKECAESVTAWGREYITMTIKEIEEKYGFKVIYSDTDGFFATIPGADAETVKKKAMEFLKYINAKLPGALELEYEGFYKRGFFVTKKKYAVIDEEGKITTRGLEIVRRDWSEIAKETQARVLEALLKDGDVEKAVRIVKEVTEKLSKYEVPPEKLVIHEQITRDLKDYKATGPHVAVAKRLAARGVKIRPGTVISYIVLKGSGRIGDRAIPFDEFDPTKHKYDAEYYIENQVLPAVERILRAFGYRKEDLRYQKTRQVGLSAWLKPKGT

SEQ ID NO: 1444 - protein, 774 aa, synthetic construct
MILDTDYITEDGKPVIRIFKKENGEFKIEYDRTFEAYFYALLKDDSAIEEVKKITAERHGTVVTVKRVEKVQKKFLGRPVEVWKLYFTHWQDRPAIADKIREHPAVIDIYEYDIPFAKRYLIDKGLVPMEGDEELKMLAFDIETLYHEGEEFAEGPILMISYADEEGARVITWKNVDLPYVDVVSTEREMIKRFLRVVKEKDPDVLITYNGDNFDFAYLKKRCEKLGINFALGRDGSEPKIQRMGDRFAVEVKGRIHFDLYPVIRRTINLPTYTLEAVYEAVFGQPKEKVYAEEITTAWETGENLERVARYSMEDAKVTYELGKEFLPMEAQLSRLIGQSLWDVSRSSTGNLVEWFLLRKAYERNELAPNKPDEKELARRRQSYEGGYVKEPERGLWENIVYLDFRSLYPSIIITHNVSPDTLNREGCKEYDVAPQVGHRFCKDFPGFIPSLLGDLLEERQKIKKKMKATIDPIERKLLDYRQRAIKILANSYYGYYGYARARWYCKECAESVTAWGREYITMTIKEIEEKYGFKVIYSDTDGFFATIPGADAETVKKKAMEFLKYINAKLPGALELEYEGFYKRGFFVTKKKYAVIDEEGKITTRGLEIVRRDWSEIAKETQARVLEALLKDGDVEKAVRIVKEVTEKLSKYEVPPEKLVIHEQITRDLKDYKATGPHVAVAKRLAARGVKIRPGTVISYIVLKGSGRIGDRAIPFDEFDPTKHKYDAEYYIENQVLPAVERILRAFGYRKEDLRYQKTRQVGLSAWLKPKGT

SEQ ID NO: 1445 - protein, 774 aa, synthetic construct
MILDTDYITEDGKPVIRIFKKENGEFKIEYDRTFEAYFYALLKDDSAIEEVKKITAERHGTVVTVKRVEKVQKKFLGRPVEVWKLYFTHWQDRPAIWDKIREHPAVIDIYEYDIPFAKRYLIDKGLVPMEGDEELKMLAFDIETLYHEGEEFAEGPILMISYADEEGARVITWKNVDLPYVDVVSTEREMIKRFLRVVKEKDPDVLITYNGDNFDFAYLKKRCEKLGINFALGRDGSEPKIQRMGDRFAVEVKGRIHFDLYPVIRRTINLPTYTLEAVYEAVFGQPKEKVYAEEITTAWETGENLERVARYSMEDAKVTYELGKEFLPMEAQLSRLIGQSLWDVSRSSTGNLVEWFLLRKAYERNELAPNKPDEKELARRRQSYEGGYVKEPERGLWENIVYLDFRSLYPSIIITHNVSPDTLNREGCKEYDVAPQVGHRFCKDFPGFIPSLLGDLLEERQKIKKKMKATIDPIERKLLDYRQRAIKILANSYYGYYGYARARWYCKECAESVTAWGREYITMTIKEIEEKYGFKVIYSDTDGFFATIPGADAETVKKKAMEFLKYINAKLPGALELEYEGFYKRGFFVTKKKYAVIDEEGKITTRGLEIVRRDWSEIAKETQARVLEALLKDGDVEKAVRIVKEVTEKLSKYEVPPEKLVIHEQITRDLKDYKATGPHVAVAKRLAARGVKIRPGTVISYIVLKGSGRIGDRAIPFDEFDPTKHKYDAEYYIENQVLPAVERILRAFGYRKEDLRYQKTRQVGLSAWLKPKGT

SEQ ID NO: 1446 - protein, 774 aa, synthetic construct
MILDTDYITEDGKPVIRIFKKENGEFKIEYDRTFEAYFYALLKDDSAIEEVKKITAERHGTVVTVKRVEKVQKKFLGRPVEVWKLYFTHYQDVPAIRDKIREHPAVIDIYEYDIPFAKRYLIDKGLVPMEGDEELKMLAFDIETLYHEGEEFAEGPILMISYADEEGARVITWKNVDLPYVDVVSTEREMIKRFLRVVKEKDPDVLITYNGDNFDFAYLKKRCEKLGINFALGRDGSEPKIQRMGDRFAVEVKGRIHFDLYPVIRRTINLPTYTLEAVYEAVFGQPKEKVYAEEITTAWETGENLERVARYSMEDAKVTYELGKEFLPMEAQLSRLIGQSLWDVSRSSTGNLVEWFLLRKAYERNELAPNKPDEKELARRRQSYEGGYVKEPERGLWENIVYLDFRSLYPSIIITHNVSPDTLNREGCKEYDVAPQVGHRFCKDFPGFIPSLLGDLLEERQKIKKKMKATIDPIERKLLDYRQRAIKILANSYYGYYGYARARWYCKECAESVTAWGREYITMTIKEIEEKYGFKVIYSDTDGFFATIPGADAETVKKKAMEFLKYINAKLPGALELEYEGFYKRGFFVTKKKYAVIDEEGKITTRGLEIVRRDWSEIAKETQARVLEALLKDGDVEKAVRIVKEVTEKLSKYEVPPEKLVIHEQITRDLKDYKATGPHVAVAKRLAARGVKIRPGTVISYIVLKGSGRIGDRAIPFDEFDPTKHKYDAEYYIENQVLPAVERILRAFGYRKEDLRYQKTRQVGLSAWLKPKGT

SEQ ID NO: 1447 - protein, 774 aa, synthetic construct
MILDTDYITEDGKPVIRIFKKENGEFKIEYDRTFEAYFYALLKDDSAIEEVKKITAERHGTVVTVKRVEKVQKKFLGRPVEVWKLYFTHYQDVPAIFDKIREHPAVIDIYEYDIPFAKRYLIDKGLVPMEGDEELKMLAFDIETLYHEGEEFAEGPILMISYADEEGARVITWKNVDLPYVDVVSTEREMIKRFLRVVKEKDPDVLITYNGDNFDFAYLKKRCEKLGINFALGRDGSEPKIQRMGDRFAVEVKGRIHFDLYPVIRRTINLPTYTLEAVYEAVFGQPKEKVYAEEITTAWETGENLERVARYSMEDAKVTYELGKEFLPMEAQLSRLIGQSLWDVSRSSTGNLVEWFLLRKAYERNELAPNKPDEKELARRRQSYEGGYVKEPERGLWENIVYLDFRSLYPSIIITHNVSPDTLNREGCKEYDVAPQVGHRFCKDFPGFIPSLLGDLLEERQKIKKKMKATIDPIERKLLDYRQRAIKILANSYYGYYGYARARWYCKECAESVTAWGREYITMTIKEIEEKYGFKVIYSDTDGFFATIPGADAETVKKKAMEFLKYINAKLPGALELEYEGFYKRGFFVTKKKYAVIDEEGKITTRGLEIVRRDWSEIAKETQARVLEALLKDGDVEKAVRIVKEVTEKLSKYEVPPEKLVIHEQITRDLKDYKATGPHVAVAKRLAARGVKIRPGTVISYIVLKGSGRIGDRAIPFDEFDPTKHKYDAEYYIENQVLPAVERILRAFGYRKEDLRYQKTRQVGLSAWLKPKGT

SEQ ID NO: 1448 - protein, 774 aa, synthetic construct
MILDTDYITEDGKPVIRIFKKENGEFKIEYDRTFEAYFYALLKDDSAIEEVKKITAERHGTVVTVKRVEKVQKKFLGRPVEVWKLYFTHYQDVPAIHDKIREHPAVIDIYEYDIPFAKRYLIDKGLVPMEGDEELKMLAFDIETLYHEGEEFAEGPILMISYADEEGARVITWKNVDLPYVDVVSTEREMIKRFLRVVKEKDPDVLITYNGDNFDFAYLKKRCEKLGINFALGRDGSEPKIQRMGDRFAVEVKGRIHFDLYPVIRRTINLPTYTLEAVYEAVFGQPKEKVYAEEITTAWETGENLERVARYSMEDAKVTYELGKEFLPMEAQLSRLIGQSLWDVSRSSTGNLVEWFLLRKAYERNELAPNKPDEKELARRRQSYEGGYVKEPERGLWENIVYLDFRSLYPSIIITHNVSPDTLNREGCKEYDVAPQVGHRFCKDFPGFIPSLLGDLLEERQKIKKKMKATIDPIERKLLDYRQRAIKILANSYYGYYGYARARWYCKECAESVTAWGREYITMTIKEIEEKYGFKVIYSDTDGFFATIPGADAETVKKKAMEFLKYINAKLPGALELEYEGFYKRGFFVTKKKYAVIDEEGKITTRGLEIVRRDWSEIAKETQARVLEALLKDGDVEKAVRIVKEVTEKLSKYEVPPEKLVIHEQITRDLKDYKATGPHVAVAKRLAARGVKIRPGTVISYIVLKGSGRIGDRAIPFDEFDPTKHKYDAEYYIENQVLPAVERILRAFGYRKEDLRYQKTRQVGLSAWLKPKGT

SEQ ID NO: 1449 - protein, 774 aa, synthetic construct
MILDTDYITEDGKPVIRIFKKENGEFKIEYDRTFEAYFYALLKDDSAIEEVKKITAERHGTVVTVKRVEKVQKKFLGRPVEVWKLYFTHYQDIPAIRDKIREHPAVIDIYEYDIPFAKRYLIDKGLVPMEGDEELKMLAFDIETLYHEGEEFAEGPILMISYADEEGARVITWKNVDLPYVDVVSTEREMIKRFLRVVKEKDPDVLITYNGDNFDFAYLKKRCEKLGINFALGRDGSEPKIQRMGDRFAVEVKGRIHFDLYPVIRRTINLPTYTLEAVYEAVFGQPKEKVYAEEITTAWETGENLERVARYSMEDAKVTYELGKEFLPMEAQLSRLIGQSLWDVSRSSTGNLVEWFLLRKAYERNELAPNKPDEKELARRRQSYEGGYVKEPERGLWENIVYLDFRSLYPSIIITHNVSPDTLNREGCKEYDVAPQVGHRFCKDFPGFIPSLLGDLLEERQKIKKKMKATIDPIERKLLDYRQRAIKILANSYYGYYGYARARWYCKECAESVTAWGREYITMTIKEIEEKYGFKVIYSDTDGFFATIPGADAETVKKKAMEFLKYINAKLPGALELEYEGFYKRGFFVTKKKYAVIDEEGKITTRGLEIVRRDWSEIAKETQARVLEALLKDGDVEKAVRIVKEVTEKLSKYEVPPEKLVIHEQITRDLKDYKATGPHVAVAKRLAARGVKIRPGTVISYIVLKGSGRIGDRAIPFDEFDPTKHKYDAEYYIENQVLPAVERILRAFGYRKEDLRYQKTRQVGLSAWLKPKGT

SEQ ID NO: 1450 - protein, 774 aa, synthetic construct
MILDTDYITEDGKPVIRIFKKENGEFKIEYDRTFEAYFYALLKDDSAIEEVKKITAERHGTVVTVKRVEKVQKKFLGRPVEVWKLYFTHYQDIPAIADKIREHPAVIDIYEYDIPFAKRYLIDKGLVPMEGDEELKMLAFDIETLYHEGEEFAEGPILMISYADEEGARVITWKNVDLPYVDVVSTEREMIKRFLRVVKEKDPDVLITYNGDNFDFAYLKKRCEKLGINFALGRDGSEPKIQRMGDRFAVEVKGRIHFDLYPVIRRTINLPTYTLEAVYEAVFGQPKEKVYAEEITTAWETGENLERVARYSMEDAKVTYELGKEFLPMEAQLSRLIGQSLWDVSRSSTGNLVEWFLLRKAYERNELAPNKPDEKELARRRQSYEGGYVKEPERGLWENIVYLDFRSLYPSIIITHNVSPDTLNREGCKEYDVAPQVGHRFCKDFPGFIPSLLGDLLEERQKIKKKMKATIDPIERKLLDYRQRAIKILANSYYGYYGYARARWYCKECAESVTAWGREYITMTIKEIEEKYGFKVIYSDTDGFFATIPGADAETVKKKAMEFLKYINAKLPGALELEYEGFYKRGFFVTKKKYAVIDEEGKITTRGLEIVRRDWSEIAKETQARVLEALLKDGDVEKAVRIVKEVTEKLSKYEVPPEKLVIHEQITRDLKDYKATGPHVAVAKRLAARGVKIRPGTVISYIVLKGSGRIGDRAIPFDEFDPTKHKYDAEYYIENQVLPAVERILRAFGYRKEDLRYQKTRQVGLSAWLKPKGT

SEQ ID NO: 1451 - protein, 774 aa, synthetic construct
MILDTDYITEDGKPVIRIFKKENGEFKIEYDRTFEAYFYALLKDDSAIEEVKKITAERHGTVVTVKRVEKVQKKFLGRPVEVWKLYFTHYQDIPAIFDKIREHPAVIDIYEYDIPFAKRYLIDKGLVPMEGDEELKMLAFDIETLYHEGEEFAEGPILMISYADEEGARVITWKNVDLPYVDVVSTEREMIKRFLRVVKEKDPDVLITYNGDNFDFAYLKKRCEKLGINFALGRDGSEPKIQRMGDRFAVEVKGRIHFDLYPVIRRTINLPTYTLEAVYEAVFGQPKEKVYAEEITTAWETGENLERVARYSMEDAKVTYELGKEFLPMEAQLSRLIGQSLWDVSRSSTGNLVEWFLLRKAYERNELAPNKPDEKELARRRQSYEGGYVKEPERGLWENIVYLDFRSLYPSIIITHNVSPDTLNREGCKEYDVAPQVGHRFCKDFPGFIPSLLGDLLEERQKIKKKMKATIDPIERKLLDYRQRAIKILANSYYGYYGYARARWYCKECAESVTAWGREYITMTIKEIEEKYGFKVIYSDTDGFFATIPGADAETVKKKAMEFLKYINAKLPGALELEYEGFYKRGFFVTKKKYAVIDEEGKITTRGLEIVRRDWSEIAKETQARVLEALLKDGDVEKAVRIVKEVTEKLSKYEVPPEKLVIHEQITRDLKDYKATGPHVAVAKRLAARGVKIRPGTVISYIVLKGSGRIGDRAIPFDEFDPTKHKYDAEYYIENQVLPAVERILRAFGYRKEDLRYQKTRQVGLSAWLKPKGT

SEQ ID NO: 1452 - protein, 774 aa, synthetic construct
MILDTDYITEDGKPVIRIFKKENGEFKIEYDRTFEAYFYALLKDDSAIEEVKKITAERHGTVVTVKRVEKVQKKFLGRPVEVWKLYFTHYQDIPAIHDKIREHPAVIDIYEYDIPFAKRYLIDKGLVPMEGDEELKMLAFDIETLYHEGEEFAEGPILMISYADEEGARVITWKNVDLPYVDVVSTEREMIKRFLRVVKEKDPDVLITYNGDNFDFAYLKKRCEKLGINFALGRDGSEPKIQRMGDRFAVEVKGRIHFDLYPVIRRTINLPTYTLEAVYEAVFGQPKEKVYAEEITTAWETGENLERVARYSMEDAKVTYELGKEFLPMEAQLSRLIGQSLWDVSRSSTGNLVEWFLLRKAYERNELAPNKPDEKELARRRQSYEGGYVKEPERGLWENIVYLDFRSLYPSIIITHNVSPDTLNREGCKEYDVAPQVGHRFCKDFPGFIPSLLGDLLEERQKIKKKMKATIDPIERKLLDYRQRAIKILANSYYGYYGYARARWYCKECAESVTAWGREYITMTIKEIEEKYGFKVIYSDTDGFFATIPGADAETVKKKAMEFLKYINAKLPGALELEYEGFYKRGFFVTKKKYAVIDEEGKITTRGLEIVRRDWSEIAKETQARVLEALLKDGDVEKAVRIVKEVTEKLSKYEVPPEKLVIHEQITRDLKDYKATGPHVAVAKRLAARGVKIRPGTVISYIVLKGSGRIGDRAIPFDEFDPTKHKYDAEYYIENQVLPAVERILRAFGYRKEDLRYQKTRQVGLSAWLKPKGT

SEQ ID NO: 1453 - protein, 774 aa, synthetic construct
MILDTDYITEDGKPVIRIFKKENGEFKIEYDRTFEAYFYALLKDDSAIEEVKKITAERHGTVVTVKRVEKVQKKFLGRPVEVWKLYFTHYQDRPAIRDKIREHPAVIDIYEYDIPFAKRYLIDKGLVPMEGDEELKMLAFDIETLYHEGEEFAEGPILMISYADEEGARVITWKNVDLPYVDVVSTEREMIKRFLRVVKEKDPDVLITYNGDNFDFAYLKKRCEKLGINFALGRDGSEPKIQRMGDRFAVEVKGRIHFDLYPVIRRTINLPTYTLEAVYEAVFGQPKEKVYAEEITTAWETGENLERVARYSMEDAKVTYELGKEFLPMEAQLSRLIGQSLWDVSRSSTGNLVEWFLLRKAYERNELAPNKPDEKELARRRQSYEGGYVKEPERGLWENIVYLDFRSLYPSIIITHNVSPDTLNREGCKEYDVAPQVGHRFCKDFPGFIPSLLGDLLEERQKIKKKMKATIDPIERKLLDYRQRAIKILANSYYGYYGYARARWYCKECAESVTAWGREYITMTIKEIEEKYGFKVIYSDTDGFFATIPGADAETVKKKAMEFLKYINAKLPGALELEYEGFYKRGFFVTKKKYAVIDEEGKITTRGLEIVRRDWSEIAKETQARVLEALLKDGDVEKAVRIVKEVTEKLSKYEVPPEKLVIHEQITRDLKDYKATGPHVAVAKRLAARGVKIRPGTVISYIVLKGSGRIGDRAIPFDEFDPTKHKYDAEYYIENQVLPAVERILRAFGYRKEDLRYQKTRQVGLSAWLKPKGT

SEQ ID NO: 1454 - protein, 774 aa, synthetic construct
MILDTDYITEDGKPVIRIFKKENGEFKIEYDRTFEAYFYALLKDDSAIEEVKKITAERHGTVVTVKRVEKVQKKFLGRPVEVWKLYFTHPQDVPAIADKIREHPAVIDIYEYDIPFAKRYLIDKGLVPMEGDEELKMLAFDIETLYHEGEEFAEGPILMISYADEEGARVITWKNVDLPYVDVVSTEREMIKRFLRVVKEKDPDVLITYNGDNFDFAYLKKRCEKLGINFALGRDGSEPKIQRMGDRFAVEVKGRIHFDLYPVIRRTINLPTYTLEAVYEAVFGQPKEKVYAEEITTAWETGENLERVARYSMEDAKVTYELGKEFLPMEAQLSRLIGQSLWDVSRSSTGNLVEWFLLRKAYERNELAPNKPDEKELARRRQSYEGGYVKEPERGLWENIVYLDFRSLYPSIIITHNVSPDTLNREGCKEYDVAPQVGHRFCKDFPGFIPSLLGDLLEERQKIKKKMKATIDPIERKLLDYRQRAIKILANSYYGYYGYARARWYCKECAESVTAWGREYITMTIKEIEEKYGFKVIYSDTDGFFATIPGADAETVKKKAMEFLKYINAKLPGALELEYEGFYKRGFFVTKKKYAVIDEEGKITTRGLEIVRRDWSEIAKETQARVLEALLKDGDVEKAVRIVKEVTEKLSKYEVPPEKLVIHEQITRDLKDYKATGPHVAVAKRLAARGVKIRPGTVISYIVLKGSGRIGDRAIPFDEFDPTKHKYDAEYYIENQVLPAVERILRAFGYRKEDLRYQKTRQVGLSAWLKPKGT

SEQ ID NO: 1455 - protein, 774 aa, synthetic construct
MILDTDYITEDGKPVIRIFKKENGEFKIEYDRTFEAYFYALLKDDSAIEEVKKITAERHGTVVTVKRVEKVQKKFLGRPVEVWKLYFTHPQDVPAIFDKIREHPAVIDIYEYDIPFAKRYLIDKGLVPMEGDEELKMLAFDIETLYHEGEEFAEGPILMISYADEEGARVITWKNVDLPYVDVVSTEREMIKRFLRVVKEKDPDVLITYNGDNFDFAYLKKRCEKLGINFALGRDGSEPKIQRMGDRFAVEVKGRIHFDLYPVIRRTINLPTYTLEAVYEAVFGQPKEKVYAEEITTAWETGENLERVARYSMEDAKVTYELGKEFLPMEAQLSRLIGQSLWDVSRSSTGNLVEWFLLRKAYERNELAPNKPDEKELARRRQSYEGGYVKEPERGLWENIVYLDFRSLYPSIIITHNVSPDTLNREGCKEYDVAPQVGHRFCKDFPGFIPSLLGDLLEERQKIKKKMKATIDPIERKLLDYRQRAIKILANSYYGYYGYARARWYCKECAESVTAWGREYITMTIKEIEEKYGFKVIYSDTDGFFATIPGADAETVKKKAMEFLKYINAKLPGALELEYEGFYKRGFFVTKKKYAVIDEEGKITTRGLEIVRRDWSEIAKETQARVLEALLKDGDVEKAVRIVKEVTEKLSKYEVPPEKLVIHEQITRDLKDYKATGPHVAVAKRLAARGVKIRPGTVISYIVLKGSGRIGDRAIPFDEFDPTKHKYDAEYYIENQVLPAVERILRAFGYRKEDLRYQKTRQVGLSAWLKPKGT

SEQ ID NO: 1456 - protein, 774 aa, synthetic construct
MILDTDYITEDGKPVIRIFKKENGEFKIEYDRTFEAYFYALLKDDSAIEEVKKITAERHGTVVTVKRVEKVQKKFLGRPVEVWKLYFTHPQDEPAIRDKIREHPAVIDIYEYDIPFAKRYLIDKGLVPMEGDEELKMLAFDIETLYHEGEEFAEGPILMISYADEEGARVITWKNVDLPYVDVVSTEREMIKRFLRVVKEKDPDVLITYNGDNFDFAYLKKRCEKLGINFALGRDGSEPKIQRMGDRFAVEVKGRIHFDLYPVIRRTINLPTYTLEAVYEAVFGQPKEKVYAEEITTAWETGENLERVARYSMEDAKVTYELGKEFLPMEAQLSRLIGQSLWDVSRSSTGNLVEWFLLRKAYERNELAPNKPDEKELARRRQSYEGGYVKEPERGLWENIVYLDFRSLYPSIIITHNVSPDTLNREGCKEYDVAPQVGHRFCKDFPGFIPSLLGDLLEERQKIKKKMKATIDPIERKLLDYRQRAIKILANSYYGYYGYARARWYCKECAESVTAWGREYITMTIKEIEEKYGFKVIYSDTDGFFATIPGADAETVKKKAMEFLKYINAKLPGALELEYEGFYKRGFFVTKKKYAVIDEEGKITTRGLEIVRRDWSEIAKETQARVLEALLKDGDVEKAVRIVKEVTEKLSKYEVPPEKLVIHEQITRDLKDYKATGPHVAVAKRLAARGVKIRPGTVISYIVLKGSGRIGDRAIPFDEFDPTKHKYDAEYYIENQVLPAVERILRAFGYRKEDLRYQKTRQVGLSAWLKPKGT

SEQ ID NO: 1457 - protein, 774 aa, synthetic construct
MILDTDYITEDGKPVIRIFKKENGEFKIEYDRTFEAYFYALLKDDSAIEEVKKITAERHGTVVTVKRVEKVQKKFLGRPVEVWKLYFTHPQDIPAIRDKIREHPAVIDIYEYDIPFAKRYLIDKGLVPMEGDEELKMLAFDIETLYHEGEEFAEGPILMISYADEEGARVITWKNVDLPYVDVVSTEREMIKRFLRVVKEKDPDVLITYNGDNFDFAYLKKRCEKLGINFALGRDGSEPKIQRMGDRFAVEVKGRIHFDLYPVIRRTINLPTYTLEAVYEAVFGQPKEKVYAEEITTAWETGENLERVARYSMEDAKVTYELGKEFLPMEAQLSRLIGQSLWDVSRSSTGNLVEWFLLRKAYERNELAPNKPDEKELARRRQSYEGGYVKEPERGLWENIVYLDFRSLYPSIIITHNVSPDTLNREGCKEYDVAPQVGHRFCKDFPGFIPSLLGDLLEERQKIKKKMKATIDPIERKLLDYRQRAIKILANSYYGYYGYARARWYCKECAESVTAWGREYITMTIKEIEEKYGFKVIYSDTDGFFATIPGADAETVKKKAMEFLKYINAKLPGALELEYEGFYKRGFFVTKKKYAVIDEEGKITTRGLEIVRRDWSEIAKETQARVLEALLKDGDVEKAVRIVKEVTEKLSKYEVPPEKLVIHEQITRDLKDYKATGPHVAVAKRLAARGVKIRPGTVISYIVLKGSGRIGDRAIPFDEFDPTKHKYDAEYYIENQVLPAVERILRAFGYRKEDLRYQKTRQVGLSAWLKPKGT

SEQ ID NO: 1458 - protein, 774 aa, synthetic construct
MILDTDYITEDGKPVIRIFKKENGEFKIEYDRTFEAYFYALLKDDSAIEEVKKITAERHGTVVTVKRVEKVQKKFLGRPVEVWKLYFTHPQDIPAIADKIREHPAVIDIYEYDIPFAKRYLIDKGLVPMEGDEELKMLAFDIETLYHEGEEFAEGPILMISYADEEGARVITWKNVDLPYVDVVSTEREMIKRFLRVVKEKDPDVLITYNGDNFDFAYLKKRCEKLGINFALGRDGSEPKIQRMGDRFAVEVKGRIHFDLYPVIRRTINLPTYTLEAVYEAVFGQPKEKVYAEEITTAWETGENLERVARYSMEDAKVTYELGKEFLPMEAQLSRLIGQSLWDVSRSSTGNLVEWFLLRKAYERNELAPNKPDEKELARRRQSYEGGYVKEPERGLWENIVYLDFRSLYPSIIITHNVSPDTLNREGCKEYDVAPQVGHRFCKDFPGFIPSLLGDLLEERQKIKKKMKATIDPIERKLLDYRQRAIKILANSYYGYYGYARARWYCKECAESVTAWGREYITMTIKEIEEKYGFKVIYSDTDGFFATIPGADAETVKKKAMEFLKYINAKLPGALELEYEGFYKRGFFVTKKKYAVIDEEGKITTRGLEIVRRDWSEIAKETQARVLEALLKDGDVEKAVRIVKEVTEKLSKYEVPPEKLVIHEQITRDLKDYKATGPHVAVAKRLAARGVKIRPGTVISYIVLKGSGRIGDRAIPFDEFDPTKHKYDAEYYIENQVLPAVERILRAFGYRKEDLRYQKTRQVGLSAWLKPKGT

SEQ ID NO: 1459 - protein, 774 aa, synthetic construct
MILDTDYITEDGKPVIRIFKKENGEFKIEYDRTFEAYFYALLKDDSAIEEVKKITAERHGTVVTVKRVEKVQKKFLGRPVEVWKLYFTHPQDIPAIFDKIREHPAVIDIYEYDIPFAKRYLIDKGLVPMEGDEELKMLAFDIETLYHEGEEFAEGPILMISYADEEGARVITWKNVDLPYVDVVSTEREMIKRFLRVVKEKDPDVLITYNGDNFDFAYLKKRCEKLGINFALGRDGSEPKIQRMGDRFAVEVKGRIHFDLYPVIRRTINLPTYTLEAVYEAVFGQPKEKVYAEEITTAWETGENLERVARYSMEDAKVTYELGKEFLPMEAQLSRLIGQSLWDVSRSSTGNLVEWFLLRKAYERNELAPNKPDEKELARRRQSYEGGYVKEPERGLWENIVYLDFRSLYPSIIITHNVSPDTLNREGCKEYDVAPQVGHRFCKDFPGFIPSLLGDLLEERQKIKKKMKATIDPIERKLLDYRQRAIKILANSYYGYYGYARARWYCKECAESVTAWGREYITMTIKEIEEKYGFKVIYSDTDGFFATIPGADAETVKKKAMEFLKYINAKLPGALELEYEGFYKRGFFVTKKKYAVIDEEGKITTRGLEIVRRDWSEIAKETQARVLEALLKDGDVEKAVRIVKEVTEKLSKYEVPPEKLVIHEQITRDLKDYKATGPHVAVAKRLAARGVKIRPGTVISYIVLKGSGRIGDRAIPFDEFDPTKHKYDAEYYIENQVLPAVERILRAFGYRKEDLRYQKTRQVGLSAWLKPKGT

SEQ ID NO: 1460 - protein, 774 aa, synthetic construct
MILDTDYITEDGKPVIRIFKKENGEFKIEYDRTFEAYFYALLKDDSAIEEVKKITAERHGTVVTVKRVEKVQKKFLGRPVEVWKLYFTHPQDIPAIWDKIREHPAVIDIYEYDIPFAKRYLIDKGLVPMEGDEELKMLAFDIETLYHEGEEFAEGPILMISYADEEGARVITWKNVDLPYVDVVSTEREMIKRFLRVVKEKDPDVLITYNGDNFDFAYLKKRCEKLGINFALGRDGSEPKIQRMGDRFAVEVKGRIHFDLYPVIRRTINLPTYTLEAVYEAVFGQPKEKVYAEEITTAWETGENLERVARYSMEDAKVTYELGKEFLPMEAQLSRLIGQSLWDVSRSSTGNLVEWFLLRKAYERNELAPNKPDEKELARRRQSYEGGYVKEPERGLWENIVYLDFRSLYPSIIITHNVSPDTLNREGCKEYDVAPQVGHRFCKDFPGFIPSLLGDLLEERQKIKKKMKATIDPIERKLLDYRQRAIKILANSYYGYYGYARARWYCKECAESVTAWGREYITMTIKEIEEKYGFKVIYSDTDGFFATIPGADAETVKKKAMEFLKYINAKLPGALELEYEGFYKRGFFVTKKKYAVIDEEGKITTRGLEIVRRDWSEIAKETQARVLEALLKDGDVEKAVRIVKEVTEKLSKYEVPPEKLVIHEQITRDLKDYKATGPHVAVAKRLAARGVKIRPGTVISYIVLKGSGRIGDRAIPFDEFDPTKHKYDAEYYIENQVLPAVERILRAFGYRKEDLRYQKTRQVGLSAWLKPKGT

SEQ ID NO: 1461 - protein, 774 aa, synthetic construct
MILDTDYITEDGKPVIRIFKKENGEFKIEYDRTFEAYFYALLKDDSAIEEVKKITAERHGTVVTVKRVEKVQKKFLGRPVEVWKLYFTHPQDIPAIRDKIREHPAVIDIYEYDIPFAKQYLIDKGLVPMEGDEELKMLAFDIETLYHEGEEFAEGPILMISYADEEGARVITWKNVDLPYVDVVSTEREMIKRFLRVVKEKDPDVLITYNGDNFDFAYLKKRCEKLGINFALGRDGSEPKIQRMGDRFAVEVKGRIHFDLYPVIRRTINLPTYTLEAVYEAVFGQPKEKVYAEEITTAWETGENLERVARYSMEDAKVTYELGKEFLPMEAQLSRLIGQSLWDVSRSSTGNLVEWFLLRKAYERNELAPNKPDEKELARRRQSYEGGYVKEPERGLWENIVYLDFRSLYPSIIITHNVSPDTLNREGCKEYDVAPQVGHRFCKDFPGFIPSLLGDLLEERQKIKKKMKATIDPIERKLLDYRQRAIKILANSYYGYYGYARARWYCKECAESVTAWGREYITMTIKEIEEKYGFKVIYSDTDGFFATIPGADAETVKKKAMEFLKYINAKLPGALELEYEGFYKRGFFVTKKKYAVIDEEGKITTRGLEIVRRDWSEIAKETQARVLEALLKDGDVEKAVRIVKEVTEKLSKYEVPPEKLVIHEQITRDLKDYKATGPHVAVAKRLAARGVKIRPGTVISYIVLKGSGRIGDRAIPFDEFDPTKHKYDAEYYIENQVLPAVERILRAFGYRKEDLRYQKTRQVGLSAWLKPKGT

SEQ ID NO: 1462 - protein, 774 aa, synthetic construct
MILDTDYITEDGKPVIRIFKKENGEFKIEYDRTFEAYFYALLKDDSAIEEVKKITAERHGTVVTVKRVEKVQKKFLGRPVEVWKLYFTHPQDKPAIRDKIREHPAVIDIYEYDIPFAKRYLIDKGLVPMEGDEELKMLAFDIETLYHEGEEFAEGPILMISYADEEGARVITWKNVDLPYVDVVSTEREMIKRFLRVVKEKDPDVLITYNGDNFDFAYLKKRCEKLGINFALGRDGSEPKIQRMGDRFAVEVKGRIHFDLYPVIRRTINLPTYTLEAVYEAVFGQPKEKVYAEEITTAWETGENLERVARYSMEDAKVTYELGKEFLPMEAQLSRLIGQSLWDVSRSSTGNLVEWFLLRKAYERNELAPNKPDEKELARRRQSYEGGYVKEPERGLWENIVYLDFRSLYPSIIITHNVSPDTLNREGCKEYDVAPQVGHRFCKDFPGFIPSLLGDLLEERQKIKKKMKATIDPIERKLLDYRQRAIKILANSYYGYYGYARARWYCKECAESVTAWGREYITMTIKEIEEKYGFKVIYSDTDGFFATIPGADAETVKKKAMEFLKYINAKLPGALELEYEGFYKRGFFVTKKKYAVIDEEGKITTRGLEIVRRDWSEIAKETQARVLEALLKDGDVEKAVRIVKEVTEKLSKYEVPPEKLVIHEQITRDLKDYKATGPHVAVAKRLAARGVKIRPGTVISYIVLKGSGRIGDRAIPFDEFDPTKHKYDAEYYIENQVLPAVERILRAFGYRKEDLRYQKTRQVGLSAWLKPKGT

SEQ ID NO: 1463 - protein, 774 aa, synthetic construct
MILDTDYITEDGKPVIRIFKKENGEFKIEYDRTFEAYFYALLKDDSAIEEVKKITAERHGTVVTVKRVEKVQKKFLGRPVEVWKLYFTHPQDKPAIADKIREHPAVIDIYEYDIPFAKRYLIDKGLVPMEGDEELKMLAFDIETLYHEGEEFAEGPILMISYADEEGARVITWKNVDLPYVDVVSTEREMIKRFLRVVKEKDPDVLITYNGDNFDFAYLKKRCEKLGINFALGRDGSEPKIQRMGDRFAVEVKGRIHFDLYPVIRRTINLPTYTLEAVYEAVFGQPKEKVYAEEITTAWETGENLERVARYSMEDAKVTYELGKEFLPMEAQLSRLIGQSLWDVSRSSTGNLVEWFLLRKAYERNELAPNKPDEKELARRRQSYEGGYVKEPERGLWENIVYLDFRSLYPSIIITHNVSPDTLNREGCKEYDVAPQVGHRFCKDFPGFIPSLLGDLLEERQKIKKKMKATIDPIERKLLDYRQRAIKILANSYYGYYGYARARWYCKECAESVTAWGREYITMTIKEIEEKYGFKVIYSDTDGFFATIPGADAETVKKKAMEFLKYINAKLPGALELEYEGFYKRGFFVTKKKYAVIDEEGKITTRGLEIVRRDWSEIAKETQARVLEALLKDGDVEKAVRIVKEVTEKLSKYEVPPEKLVIHEQITRDLKDYKATGPHVAVAKRLAARGVKIRPGTVISYIVLKGSGRIGDRAIPFDEFDPTKHKYDAEYYIENQVLPAVERILRAFGYRKEDLRYQKTRQVGLSAWLKPKGT

SEQ ID NO: 1464 - protein, 774 aa, synthetic construct
MILDTDYITEDGKPVIRIFKKENGEFKIEYDRTFEAYFYALLKDDSAIEEVKKITAERHGTVVTVKRVEKVQKKFLGRPVEVWKLYFTHPQDKPAIADKIREHPAVIDIYEYDIPFAKQYLIDKGLVPMEGDEELKMLAFDIETLYHEGEEFAEGPILMISYADEEGARVITWKNVDLPYVDVVSTEREMIKRFLRVVKEKDPDVLITYNGDNFDFAYLKKRCEKLGINFALGRDGSEPKIQRMGDRFAVEVKGRIHFDLYPVIRRTINLPTYTLEAVYEAVFGQPKEKVYAEEITTAWETGENLERVARYSMEDAKVTYELGKEFLPMEAQLSRLIGQSLWDVSRSSTGNLVEWFLLRKAYERNELAPNKPDEKELARRRQSYEGGYVKEPERGLWENIVYLDFRSLYPSIIITHNVSPDTLNREGCKEYDVAPQVGHRFCKDFPGFIPSLLGDLLEERQKIKKKMKATIDPIERKLLDYRQRAIKILANSYYGYYGYARARWYCKECAESVTAWGREYITMTIKEIEEKYGFKVIYSDTDGFFATIPGADAETVKKKAMEFLKYINAKLPGALELEYEGFYKRGFFVTKKKYAVIDEEGKITTRGLEIVRRDWSEIAKETQARVLEALLKDGDVEKAVRIVKEVTEKLSKYEVPPEKLVIHEQITRDLKDYKATGPHVAVAKRLAARGVKIRPGTVISYIVLKGSGRIGDRAIPFDEFDPTKHKYDAEYYIENQVLPAVERILRAFGYRKEDLRYQKTRQVGLSAWLKPKGT

SEQ ID NO: 1465 - protein, 774 aa, synthetic construct
MILDTDYITEDGKPVIRIFKKENGEFKIEYDRTFEAYFYALLKDDSAIEEVKKITAERHGTVVTVKRVEKVQKKFLGRPVEVWKLYFTHPQDKPAIHDKIREHPAVIDIYEYDIPFAKRYLIDKGLVPMEGDEELKMLAFDIETLYHEGEEFAEGPILMISYADEEGARVITWKNVDLPYVDVVSTEREMIKRFLRVVKEKDPDVLITYNGDNFDFAYLKKRCEKLGINFALGRDGSEPKIQRMGDRFAVEVKGRIHFDLYPVIRRTINLPTYTLEAVYEAVFGQPKEKVYAEEITTAWETGENLERVARYSMEDAKVTYELGKEFLPMEAQLSRLIGQSLWDVSRSSTGNLVEWFLLRKAYERNELAPNKPDEKELARRRQSYEGGYVKEPERGLWENIVYLDFRSLYPSIIITHNVSPDTLNREGCKEYDVAPQVGHRFCKDFPGFIPSLLGDLLEERQKIKKKMKATIDPIERKLLDYRQRAIKILANSYYGYYGYARARWYCKECAESVTAWGREYITMTIKEIEEKYGFKVIYSDTDGFFATIPGADAETVKKKAMEFLKYINAKLPGALELEYEGFYKRGFFVTKKKYAVIDEEGKITTRGLEIVRRDWSEIAKETQARVLEALLKDGDVEKAVRIVKEVTEKLSKYEVPPEKLVIHEQITRDLKDYKATGPHVAVAKRLAARGVKIRPGTVISYIVLKGSGRIGDRAIPFDEFDPTKHKYDAEYYIENQVLPAVERILRAFGYRKEDLRYQKTRQVGLSAWLKPKGT

SEQ ID NO: 1466 - protein, 774 aa, synthetic construct
MILDTDYITEDGKPVIRIFKKENGEFKIEYDRTFEAYFYALLKDDSAIEEVKKITAERHGTVVTVKRVEKVQKKFLGRPVEVWKLYFTHPQDKPAIRDKIREHPAVIDIYEYDIPFAKQYLIDKGLVPMEGDEELKMLAFDIETLYHEGEEFAEGPILMISYADEEGARVITWKNVDLPYVDVVSTEREMIKRFLRVVKEKDPDVLITYNGDNFDFAYLKKRCEKLGINFALGRDGSEPKIQRMGDRFAVEVKGRIHFDLYPVIRRTINLPTYTLEAVYEAVFGQPKEKVYAEEITTAWETGENLERVARYSMEDAKVTYELGKEFLPMEAQLSRLIGQSLWDVSRSSTGNLVEWFLLRKAYERNELAPNKPDEKELARRRQSYEGGYVKEPERGLWENIVYLDFRSLYPSIIITHNVSPDTLNREGCKEYDVAPQVGHRFCKDFPGFIPSLLGDLLEERQKIKKKMKATIDPIERKLLDYRQRAIKILANSYYGYYGYARARWYCKECAESVTAWGREYITMTIKEIEEKYGFKVIYSDTDGFFATIPGADAETVKKKAMEFLKYINAKLPGALELEYEGFYKRGFFVTKKKYAVIDEEGKITTRGLEIVRRDWSEIAKETQARVLEALLKDGDVEKAVRIVKEVTEKLSKYEVPPEKLVIHEQITRDLKDYKATGPHVAVAKRLAARGVKIRPGTVISYIVLKGSGRIGDRAIPFDEFDPTKHKYDAEYYIENQVLPAVERILRAFGYRKEDLRYQKTRQVGLSAWLKPKGT

SEQ ID NO: 1467 - protein, 774 aa, synthetic construct
MILDTDYITEDGKPVIRIFKKENGEFKIEYDRTFEAYFYALLKDDSAIEEVKKITAERHGTVVTVKRVEKVQKKFLGRPVEVWKLYFTHPQDQPAIRDKIREHPAVIDIYEYDIPFAKRYLIDKGLVPMEGDEELKMLAFDIETLYHEGEEFAEGPILMISYADEEGARVITWKNVDLPYVDVVSTEREMIKRFLRVVKEKDPDVLITYNGDNFDFAYLKKRCEKLGINFALGRDGSEPKIQRMGDRFAVEVKGRIHFDLYPVIRRTINLPTYTLEAVYEAVFGQPKEKVYAEEITTAWETGENLERVARYSMEDAKVTYELGKEFLPMEAQLSRLIGQSLWDVSRSSTGNLVEWFLLRKAYERNELAPNKPDEKELARRRQSYEGGYVKEPERGLWENIVYLDFRSLYPSIIITHNVSPDTLNREGCKEYDVAPQVGHRFCKDFPGFIPSLLGDLLEERQKIKKKMKATIDPIERKLLDYRQRAIKILANSYYGYYGYARARWYCKECAESVTAWGREYITMTIKEIEEKYGFKVIYSDTDGFFATIPGADAETVKKKAMEFLKYINAKLPGALELEYEGFYKRGFFVTKKKYAVIDEEGKITTRGLEIVRRDWSEIAKETQARVLEALLKDGDVEKAVRIVKEVTEKLSKYEVPPEKLVIHEQITRDLKDYKATGPHVAVAKRLAARGVKIRPGTVISYIVLKGSGRIGDRAIPFDEFDPTKHKYDAEYYIENQVLPAVERILRAFGYRKEDLRYQKTRQVGLSAWLKPKGT

SEQ ID NO: 1468 - protein, 774 aa, synthetic construct
MILDTDYITEDGKPVIRIFKKENGEFKIEYDRTFEAYFYALLKDDSAIEEVKKITAERHGTVVTVKRVEKVQKKFLGRPVEVWKLYFTHPQDQPAIWDKIREHPAVIDIYEYDIPFAKRYLIDKGLVPMEGDEELKMLAFDIETLYHEGEEFAEGPILMISYADEEGARVITWKNVDLPYVDVVSTEREMIKRFLRVVKEKDPDVLITYNGDNFDFAYLKKRCEKLGINFALGRDGSEPKIQRMGDRFAVEVKGRIHFDLYPVIRRTINLPTYTLEAVYEAVFGQPKEKVYAEEITTAWETGENLERVARYSMEDAKVTYELGKEFLPMEAQLSRLIGQSLWDVSRSSTGNLVEWFLLRKAYERNELAPNKPDEKELARRRQSYEGGYVKEPERGLWENIVYLDFRSLYPSIIITHNVSPDTLNREGCKEYDVAPQVGHRFCKDFPGFIPSLLGDLLEERQKIKKKMKATIDPIERKLLDYRQRAIKILANSYYGYYGYARARWYCKECAESVTAWGREYITMTIKEIEEKYGFKVIYSDTDGFFATIPGADAETVKKKAMEFLKYINAKLPGALELEYEGFYKRGFFVTKKKYAVIDEEGKITTRGLEIVRRDWSEIAKETQARVLEALLKDGDVEKAVRIVKEVTEKLSKYEVPPEKLVIHEQITRDLKDYKATGPHVAVAKRLAARGVKIRPGTVISYIVLKGSGRIGDRAIPFDEFDPTKHKYDAEYYIENQVLPAVERILRAFGYRKEDLRYQKTRQVGLSAWLKPKGT

SEQ ID NO: 1469 - protein, 774 aa, synthetic construct
MILDTDYITEDGKPVIRIFKKENGEFKIEYDRTFEAYFYALLKDDSAIEEVKKITAERHGTVVTVKRVEKVQKKFLGRPVEVWKLYFTHPQDRPAIRDKIREHPAVIDIYEYDIPFAKRYLIDKGLVPMEGDEELKMLAFDIETLYHEGEEFAEGPILMISYADEEGARVITWKNVDLPYVDVVSTEREMIKRFLRVVKEKDPDVLITYNGDNFDFAYLKKRCEKLGINFALGRDGSEPKIQRMGDRFAVEVKGRIHFDLYPVIRRTINLPTYTLEAVYEAVFGQPKEKVYAEEITTAWETGENLERVARYSMEDAKVTYELGKEFLPMEAQLSRLIGQSLWDVSRSSTGNLVEWFLLRKAYERNELAPNKPDEKELARRRQSYEGGYVKEPERGLWENIVYLDFRSLYPSIIITHNVSPDTLNREGCKEYDVAPQVGHRFCKDFPGFIPSLLGDLLEERQKIKKKMKATIDPIERKLLDYRQRAIKILANSYYGYYGYARARWYCKECAESVTAWGREYITMTIKEIEEKYGFKVIYSDTDGFFATIPGADAETVKKKAMEFLKYINAKLPGALELEYEGFYKRGFFVTKKKYAVIDEEGKITTRGLEIVRRDWSEIAKETQARVLEALLKDGDVEKAVRIVKEVTEKLSKYEVPPEKLVIHEQITRDLKDYKATGPHVAVAKRLAARGVKIRPGTVISYIVLKGSGRIGDRAIPFDEFDPTKHKYDAEYYIENQVLPAVERILRAFGYRKEDLRYQKTRQVGLSAWLKPKGT

SEQ ID NO: 1470 - protein, 774 aa, synthetic construct
MILDTDYITEDGKPVIRIFKKENGEFKIEYDRTFEAYFYALLKDDSAIEEVKKITAERHGTVVTVKRVEKVQKKFLGRPVEVWKLYFTHPQDRPAIADKIREHPAVIDIYEYDIPFAKRYLIDKGLVPMEGDEELKMLAFDIETLYHEGEEFAEGPILMISYADEEGARVITWKNVDLPYVDVVSTEREMIKRFLRVVKEKDPDVLITYNGDNFDFAYLKKRCEKLGINFALGRDGSEPKIQRMGDRFAVEVKGRIHFDLYPVIRRTINLPTYTLEAVYEAVFGQPKEKVYAEEITTAWETGENLERVARYSMEDAKVTYELGKEFLPMEAQLSRLIGQSLWDVSRSSTGNLVEWFLLRKAYERNELAPNKPDEKELARRRQSYEGGYVKEPERGLWENIVYLDFRSLYPSIIITHNVSPDTLNREGCKEYDVAPQVGHRFCKDFPGFIPSLLGDLLEERQKIKKKMKATIDPIERKLLDYRQRAIKILANSYYGYYGYARARWYCKECAESVTAWGREYITMTIKEIEEKYGFKVIYSDTDGFFATIPGADAETVKKKAMEFLKYINAKLPGALELEYEGFYKRGFFVTKKKYAVIDEEGKITTRGLEIVRRDWSEIAKETQARVLEALLKDGDVEKAVRIVKEVTEKLSKYEVPPEKLVIHEQITRDLKDYKATGPHVAVAKRLAARGVKIRPGTVISYIVLKGSGRIGDRAIPFDEFDPTKHKYDAEYYIENQVLPAVERILRAFGYRKEDLRYQKTRQVGLSAWLKPKGT

SEQ ID NO: 1471 - protein, 774 aa, synthetic construct
MILDTDYITEDGKPVIRIFKKENGEFKIEYDRTFEAYFYALLKDDSAIEEVKKITAERHGTVVTVKRVEKVQKKFLGRPVEVWKLYFTHPQDRPAIADKIREHPAVIDIYEYDIPFAKMYLIDKGLVPMEGDEELKMLAFDIETLYHEGEEFAEGPILMISYADEEGARVITWKNVDLPYVDVVSTEREMIKRFLRVVKEKDPDVLITYNGDNFDFAYLKKRCEKLGINFALGRDGSEPKIQRMGDRFAVEVKGRIHFDLYPVIRRTINLPTYTLEAVYEAVFGQPKEKVYAEEITTAWETGENLERVARYSMEDAKVTYELGKEFLPMEAQLSRLIGQSLWDVSRSSTGNLVEWFLLRKAYERNELAPNKPDEKELARRRQSYEGGYVKEPERGLWENIVYLDFRSLYPSIIITHNVSPDTLNREGCKEYDVAPQVGHRFCKDFPGFIPSLLGDLLEERQKIKKKMKATIDPIERKLLDYRQRAIKILANSYYGYYGYARARWYCKECAESVTAWGREYITMTIKEIEEKYGFKVIYSDTDGFFATIPGADAETVKKKAMEFLKYINAKLPGALELEYEGFYKRGFFVTKKKYAVIDEEGKITTRGLEIVRRDWSEIAKETQARVLEALLKDGDVEKAVRIVKEVTEKLSKYEVPPEKLVIHEQITRDLKDYKATGPHVAVAKRLAARGVKIRPGTVISYIVLKGSGRIGDRAIPFDEFDPTKHKYDAEYYIENQVLPAVERILRAFGYRKEDLRYQKTRQVGLSAWLKPKGT

SEQ ID NO: 1472 - protein, 774 aa, synthetic construct
MILDTDYITEDGKPVIRIFKKENGEFKIEYDRTFEAYFYALLKDDSAIEEVKKITAERHGTVVTVKRVEKVQKKFLGRPVEVWKLYFTHPQDRPAIFDKIREHPAVIDIYEYDIPFAKRYLIDKGLVPMEGDEELKMLAFDIETLYHEGEEFAEGPILMISYADEEGARVITWKNVDLPYVDVVSTEREMIKRFLRVVKEKDPDVLITYNGDNFDFAYLKKRCEKLGINFALGRDGSEPKIQRMGDRFAVEVKGRIHFDLYPVIRRTINLPTYTLEAVYEAVFGQPKEKVYAEEITTAWETGENLERVARYSMEDAKVTYELGKEFLPMEAQLSRLIGQSLWDVSRSSTGNLVEWFLLRKAYERNELAPNKPDEKELARRRQSYEGGYVKEPERGLWENIVYLDFRSLYPSIIITHNVSPDTLNREGCKEYDVAPQVGHRFCKDFPGFIPSLLGDLLEERQKIKKKMKATIDPIERKLLDYRQRAIKILANSYYGYYGYARARWYCKECAESVTAWGREYITMTIKEIEEKYGFKVIYSDTDGFFATIPGADAETVKKKAMEFLKYINAKLPGALELEYEGFYKRGFFVTKKKYAVIDEEGKITTRGLEIVRRDWSEIAKETQARVLEALLKDGDVEKAVRIVKEVTEKLSKYEVPPEKLVIHEQITRDLKDYKATGPHVAVAKRLAARGVKIRPGTVISYIVLKGSGRIGDRAIPFDEFDPTKHKYDAEYYIENQVLPAVERILRAFGYRKEDLRYQKTRQVGLSAWLKPKGT

SEQ ID NO: 1473 - protein, 774 aa, synthetic construct
MILDTDYITEDGKPVIRIFKKENGEFKIEYDRTFEAYFYALLKDDSAIEEVKKITAERHGTVVTVKRVEKVQKKFLGRPVEVWKLYFTHPQDRPAIHDKIREHPAVIDIYEYDIPFAKRYLIDKGLVPMEGDEELKMLAFDIETLYHEGEEFAEGPILMISYADEEGARVITWKNVDLPYVDVVSTEREMIKRFLRVVKEKDPDVLITYNGDNFDFAYLKKRCEKLGINFALGRDGSEPKIQRMGDRFAVEVKGRIHFDLYPVIRRTINLPTYTLEAVYEAVFGQPKEKVYAEEITTAWETGENLERVARYSMEDAKVTYELGKEFLPMEAQLSRLIGQSLWDVSRSSTGNLVEWFLLRKAYERNELAPNKPDEKELARRRQSYEGGYVKEPERGLWENIVYLDFRSLYPSIIITHNVSPDTLNREGCKEYDVAPQVGHRFCKDFPGFIPSLLGDLLEERQKIKKKMKATIDPIERKLLDYRQRAIKILANSYYGYYGYARARWYCKECAESVTAWGREYITMTIKEIEEKYGFKVIYSDTDGFFATIPGADAETVKKKAMEFLKYINAKLPGALELEYEGFYKRGFFVTKKKYAVIDEEGKITTRGLEIVRRDWSEIAKETQARVLEALLKDGDVEKAVRIVKEVTEKLSKYEVPPEKLVIHEQITRDLKDYKATGPHVAVAKRLAARGVKIRPGTVISYIVLKGSGRIGDRAIPFDEFDPTKHKYDAEYYIENQVLPAVERILRAFGYRKEDLRYQKTRQVGLSAWLKPKGT

SEQ ID NO: 1474 - protein, 774 aa, synthetic construct
MILDTDYITEDGKPVIRIFKKENGEFKIEYDRTFEAYFYALLKDDSAIEEVKKITAERHGTVVTVKRVEKVQKKFLGRPVEVWKLYFTHPQDRPAIWDKIREHPAVIDIYEYDIPFAKRYLIDKGLVPMEGDEELKMLAFDIETLYHEGEEFAEGPILMISYADEEGARVITWKNVDLPYVDVVSTEREMIKRFLRVVKEKDPDVLITYNGDNFDFAYLKKRCEKLGINFALGRDGSEPKIQRMGDRFAVEVKGRIHFDLYPVIRRTINLPTYTLEAVYEAVFGQPKEKVYAEEITTAWETGENLERVARYSMEDAKVTYELGKEFLPMEAQLSRLIGQSLWDVSRSSTGNLVEWFLLRKAYERNELAPNKPDEKELARRRQSYEGGYVKEPERGLWENIVYLDFRSLYPSIIITHNVSPDTLNREGCKEYDVAPQVGHRFCKDFPGFIPSLLGDLLEERQKIKKKMKATIDPIERKLLDYRQRAIKILANSYYGYYGYARARWYCKECAESVTAWGREYITMTIKEIEEKYGFKVIYSDTDGFFATIPGADAETVKKKAMEFLKYINAKLPGALELEYEGFYKRGFFVTKKKYAVIDEEGKITTRGLEIVRRDWSEIAKETQARVLEALLKDGDVEKAVRIVKEVTEKLSKYEVPPEKLVIHEQITRDLKDYKATGPHVAVAKRLAARGVKIRPGTVISYIVLKGSGRIGDRAIPFDEFDPTKHKYDAEYYIENQVLPAVERILRAFGYRKEDLRYQKTRQVGLSAWLKPKGT

SEQ ID NO: 1475 - protein, 774 aa, synthetic construct
MILDTDYITEDGKPVIRIFKKENGEFKIEYDRTFEAYFYALLKDDSAIEEVKKITAERHGTVVTVKRVEKVQKKFLGRPVEVWKLYFTHPQDRPAIRDKIREHPAVIDIYEYDIPFAKQYLIDKGLVPMEGDEELKMLAFDIETLYHEGEEFAEGPILMISYADEEGARVITWKNVDLPYVDVVSTEREMIKRFLRVVKEKDPDVLITYNGDNFDFAYLKKRCEKLGINFALGRDGSEPKIQRMGDRFAVEVKGRIHFDLYPVIRRTINLPTYTLEAVYEAVFGQPKEKVYAEEITTAWETGENLERVARYSMEDAKVTYELGKEFLPMEAQLSRLIGQSLWDVSRSSTGNLVEWFLLRKAYERNELAPNKPDEKELARRRQSYEGGYVKEPERGLWENIVYLDFRSLYPSIIITHNVSPDTLNREGCKEYDVAPQVGHRFCKDFPGFIPSLLGDLLEERQKIKKKMKATIDPIERKLLDYRQRAIKILANSYYGYYGYARARWYCKECAESVTAWGREYITMTIKEIEEKYGFKVIYSDTDGFFATIPGADAETVKKKAMEFLKYINAKLPGALELEYEGFYKRGFFVTKKKYAVIDEEGKITTRGLEIVRRDWSEIAKETQARVLEALLKDGDVEKAVRIVKEVTEKLSKYEVPPEKLVIHEQITRDLKDYKATGPHVAVAKRLAARGVKIRPGTVISYIVLKGSGRIGDRAIPFDEFDPTKHKYDAEYYIENQVLPAVERILRAFGYRKEDLRYQKTRQVGLSAWLKPKGT

SEQ ID NO: 1476 - protein, 774 aa, synthetic construct
MILDTDYITEDGKPVIRIFKKENGEFKIEYDRTFEHYFYALLKDDSAIEEVKKITAERHGTVVTVKRVEKVQKKFLGRPVEVWKLYFTHFQDVPAIRDKIREHPAVIDIYEYDIPFAKRYLIDKGLVPMEGDEELKMLAFDIETLYHEGEEFAEGPILMISYADEEGARVITWKNVDLPYVDVVSTEREMIKRFLRVVKEKDPDVLITYNGDNFDFAYLKKRCEKLGINFALGRDGSEPKIQRMGDRFAVEVKGRIHFDLYPVIRRTINLPTYTLEAVYEAVFGQPKEKVYAEEITTAWETGENLERVARYSMEDAKVTYELGKEFLPMEAQLSRLIGQSLWDVSRSSTGNLVEWFLLRKAYERNELAPNKPDEKELARRRQSYEGGYVKEPERGLWENIVYLDFRSLYPSIIITHNVSPDTLNREGCKEYDVAPQVGHRFCKDFPGFIPSLLGDLLEERQKIKKKMKATIDPIERKLLDYRQRAIKILANSYYGYYGYARARWYCKECAESVTAWGREYITMTIKEIEEKYGFKVIYSDTDGFFATIPGADAETVKKKAMEFLKYINAKLPGALELEYEGFYKRGFFVTKKKYAVIDEEGKITTRGLEIVRRDWSEIAKETQARVLEALLKDGDVEKAVRIVKEVTEKLSKYEVPPEKLVIHEQITRDLKDYKATGPHVAVAKRLAARGVKIRPGTVISYIVLKGSGRIGDRAIPFDEFDPTKHKYDAEYYIENQVLPAVERILRAFGYRKEDLRYQKTRQVGLSAWLKPKGT

SEQ ID NO: 1477 - protein, 774 aa, synthetic construct
MILDTDYITEDGKPVIRIFKKENGEFKIEYDRTFEHYFYALLKDDSAIEEVKKITAERHGTVVTVKRVEKVQKKFLGRPVEVWKLYFTHFQDVPAIFDKIREHPAVIDIYEYDIPFAKRYLIDKGLVPMEGDEELKMLAFDIETLYHEGEEFAEGPILMISYADEEGARVITWKNVDLPYVDVVSTEREMIKRFLRVVKEKDPDVLITYNGDNFDFAYLKKRCEKLGINFALGRDGSEPKIQRMGDRFAVEVKGRIHFDLYPVIRRTINLPTYTLEAVYEAVFGQPKEKVYAEEITTAWETGENLERVARYSMEDAKVTYELGKEFLPMEAQLSRLIGQSLWDVSRSSTGNLVEWFLLRKAYERNELAPNKPDEKELARRRQSYEGGYVKEPERGLWENIVYLDFRSLYPSIIITHNVSPDTLNREGCKEYDVAPQVGHRFCKDFPGFIPSLLGDLLEERQKIKKKMKATIDPIERKLLDYRQRAIKILANSYYGYYGYARARWYCKECAESVTAWGREYITMTIKEIEEKYGFKVIYSDTDGFFATIPGADAETVKKKAMEFLKYINAKLPGALELEYEGFYKRGFFVTKKKYAVIDEEGKITTRGLEIVRRDWSEIAKETQARVLEALLKDGDVEKAVRIVKEVTEKLSKYEVPPEKLVIHEQITRDLKDYKATGPHVAVAKRLAARGVKIRPGTVISYIVLKGSGRIGDRAIPFDEFDPTKHKYDAEYYIENQVLPAVERILRAFGYRKEDLRYQKTRQVGLSAWLKPKGT

SEQ ID NO: 1478 - protein, 774 aa, synthetic construct
MILDTDYITEDGKPVIRIFKKENGEFKIEYDRTFEHYFYALLKDDSAIEEVKKITAERHGTVVTVKRVEKVQKKFLGRPVEVWKLYFTHFQDIPAIRDKIREHPAVIDIYEYDIPFAKRYLIDKGLVPMEGDEELKMLAFDIETLYHEGEEFAEGPILMISYADEEGARVITWKNVDLPYVDVVSTEREMIKRFLRVVKEKDPDVLITYNGDNFDFAYLKKRCEKLGINFALGRDGSEPKIQRMGDRFAVEVKGRIHFDLYPVIRRTINLPTYTLEAVYEAVFGQPKEKVYAEEITTAWETGENLERVARYSMEDAKVTYELGKEFLPMEAQLSRLIGQSLWDVSRSSTGNLVEWFLLRKAYERNELAPNKPDEKELARRRQSYEGGYVKEPERGLWENIVYLDFRSLYPSIIITHNVSPDTLNREGCKEYDVAPQVGHRFCKDFPGFIPSLLGDLLEERQKIKKKMKATIDPIERKLLDYRQRAIKILANSYYGYYGYARARWYCKECAESVTAWGREYITMTIKEIEEKYGFKVIYSDTDGFFATIPGADAETVKKKAMEFLKYINAKLPGALELEYEGFYKRGFFVTKKKYAVIDEEGKITTRGLEIVRRDWSEIAKETQARVLEALLKDGDVEKAVRIVKEVTEKLSKYEVPPEKLVIHEQITRDLKDYKATGPHVAVAKRLAARGVKIRPGTVISYIVLKGSGRIGDRAIPFDEFDPTKHKYDAEYYIENQVLPAVERILRAFGYRKEDLRYQKTRQVGLSAWLKPKGT

SEQ ID NO: 1479 - protein, 774 aa, synthetic construct
MILDTDYITEDGKPVIRIFKKENGEFKIEYDRTFEHYFYALLKDDSAIEEVKKITAERHGTVVTVKRVEKVQKKFLGRPVEVWKLYFTHFQDIPAIADKIREHPAVIDIYEYDIPFAKRYLIDKGLVPMEGDEELKMLAFDIETLYHEGEEFAEGPILMISYADEEGARVITWKNVDLPYVDVVSTEREMIKRFLRVVKEKDPDVLITYNGDNFDFAYLKKRCEKLGINFALGRDGSEPKIQRMGDRFAVEVKGRIHFDLYPVIRRTINLPTYTLEAVYEAVFGQPKEKVYAEEITTAWETGENLERVARYSMEDAKVTYELGKEFLPMEAQLSRLIGQSLWDVSRSSTGNLVEWFLLRKAYERNELAPNKPDEKELARRRQSYEGGYVKEPERGLWENIVYLDFRSLYPSIIITHNVSPDTLNREGCKEYDVAPQVGHRFCKDFPGFIPSLLGDLLEERQKIKKKMKATIDPIERKLLDYRQRAIKILANSYYGYYGYARARWYCKECAESVTAWGREYITMTIKEIEEKYGFKVIYSDTDGFFATIPGADAETVKKKAMEFLKYINAKLPGALELEYEGFYKRGFFVTKKKYAVIDEEGKITTRGLEIVRRDWSEIAKETQARVLEALLKDGDVEKAVRIVKEVTEKLSKYEVPPEKLVIHEQITRDLKDYKATGPHVAVAKRLAARGVKIRPGTVISYIVLKGSGRIGDRAIPFDEFDPTKHKYDAEYYIENQVLPAVERILRAFGYRKEDLRYQKTRQVGLSAWLKPKGT

SEQ ID NO: 1480 - protein, 774 aa, synthetic construct
MILDTDYITEDGKPVIRIFKKENGEFKIEYDRTFEHYFYALLKDDSAIEEVKKITAERHGTVVTVKRVEKVQKKFLGRPVEVWKLYFTHFQDIPAIWDKIREHPAVIDIYEYDIPFAKRYLIDKGLVPMEGDEELKMLAFDIETLYHEGEEFAEGPILMISYADEEGARVITWKNVDLPYVDVVSTEREMIKRFLRVVKEKDPDVLITYNGDNFDFAYLKKRCEKLGINFALGRDGSEPKIQRMGDRFAVEVKGRIHFDLYPVIRRTINLPTYTLEAVYEAVFGQPKEKVYAEEITTAWETGENLERVARYSMEDAKVTYELGKEFLPMEAQLSRLIGQSLWDVSRSSTGNLVEWFLLRKAYERNELAPNKPDEKELARRRQSYEGGYVKEPERGLWENIVYLDFRSLYPSIIITHNVSPDTLNREGCKEYDVAPQVGHRFCKDFPGFIPSLLGDLLEERQKIKKKMKATIDPIERKLLDYRQRAIKILANSYYGYYGYARARWYCKECAESVTAWGREYITMTIKEIEEKYGFKVIYSDTDGFFATIPGADAETVKKKAMEFLKYINAKLPGALELEYEGFYKRGFFVTKKKYAVIDEEGKITTRGLEIVRRDWSEIAKETQARVLEALLKDGDVEKAVRIVKEVTEKLSKYEVPPEKLVIHEQITRDLKDYKATGPHVAVAKRLAARGVKIRPGTVISYIVLKGSGRIGDRAIPFDEFDPTKHKYDAEYYIENQVLPAVERILRAFGYRKEDLRYQKTRQVGLSAWLKPKGT

SEQ ID NO: 1481 - protein, 774 aa, synthetic construct
MILDTDYITEDGKPVIRIFKKENGEFKIEYDRTFEHYFYALLKDDSAIEEVKKITAERHGTVVTVKRVEKVQKKFLGRPVEVWKLYFTHIQDVPAIRDKIREHPAVIDIYEYDIPFAKRYLIDKGLVPMEGDEELKMLAFDIETLYHEGEEFAEGPILMISYADEEGARVITWKNVDLPYVDVVSTEREMIKRFLRVVKEKDPDVLITYNGDNFDFAYLKKRCEKLGINFALGRDGSEPKIQRMGDRFAVEVKGRIHFDLYPVIRRTINLPTYTLEAVYEAVFGQPKEKVYAEEITTAWETGENLERVARYSMEDAKVTYELGKEFLPMEAQLSRLIGQSLWDVSRSSTGNLVEWFLLRKAYERNELAPNKPDEKELARRRQSYEGGYVKEPERGLWENIVYLDFRSLYPSIIITHNVSPDTLNREGCKEYDVAPQVGHRFCKDFPGFIPSLLGDLLEERQKIKKKMKATIDPIERKLLDYRQRAIKILANSYYGYYGYARARWYCKECAESVTAWGREYITMTIKEIEEKYGFKVIYSDTDGFFATIPGADAETVKKKAMEFLKYINAKLPGALELEYEGFYKRGFFVTKKKYAVIDEEGKITTRGLEIVRRDWSEIAKETQARVLEALLKDGDVEKAVRIVKEVTEKLSKYEVPPEKLVIHEQITRDLKDYKATGPHVAVAKRLAARGVKIRPGTVISYIVLKGSGRIGDRAIPFDEFDPTKHKYDAEYYIENQVLPAVERILRAFGYRKEDLRYQKTRQVGLSAWLKPKGT

SEQ ID NO: 1482 - protein, 774 aa, synthetic construct
MILDTDYITEDGKPVIRIFKKENGEFKIEYDRTFEHYFYALLKDDSAIEEVKKITAERHGTVVTVKRVEKVQKKFLGRPVEVWKLYFTHIQDVPAIADKIREHPAVIDIYEYDIPFAKRYLIDKGLVPMEGDEELKMLAFDIETLYHEGEEFAEGPILMISYADEEGARVITWKNVDLPYVDVVSTEREMIKRFLRVVKEKDPDVLITYNGDNFDFAYLKKRCEKLGINFALGRDGSEPKIQRMGDRFAVEVKGRIHFDLYPVIRRTINLPTYTLEAVYEAVFGQPKEKVYAEEITTAWETGENLERVARYSMEDAKVTYELGKEFLPMEAQLSRLIGQSLWDVSRSSTGNLVEWFLLRKAYERNELAPNKPDEKELARRRQSYEGGYVKEPERGLWENIVYLDFRSLYPSIIITHNVSPDTLNREGCKEYDVAPQVGHRFCKDFPGFIPSLLGDLLEERQKIKKKMKATIDPIERKLLDYRQRAIKILANSYYGYYGYARARWYCKECAESVTAWGREYITMTIKEIEEKYGFKVIYSDTDGFFATIPGADAETVKKKAMEFLKYINAKLPGALELEYEGFYKRGFFVTKKKYAVIDEEGKITTRGLEIVRRDWSEIAKETQARVLEALLKDGDVEKAVRIVKEVTEKLSKYEVPPEKLVIHEQITRDLKDYKATGPHVAVAKRLAARGVKIRPGTVISYIVLKGSGRIGDRAIPFDEFDPTKHKYDAEYYIENQVLPAVERILRAFGYRKEDLRYQKTRQVGLSAWLKPKGT

SEQ ID NO: 1483 - protein, 774 aa, synthetic construct
MILDTDYITEDGKPVIRIFKKENGEFKIEYDRTFEHYFYALLKDDSAIEEVKKITAERHGTVVTVKRVEKVQKKFLGRPVEVWKLYFTHIQDIPAIRDKIREHPAVIDIYEYDIPFAKRYLIDKGLVPMEGDEELKMLAFDIETLYHEGEEFAEGPILMISYADEEGARVITWKNVDLPYVDVVSTEREMIKRFLRVVKEKDPDVLITYNGDNFDFAYLKKRCEKLGINFALGRDGSEPKIQRMGDRFAVEVKGRIHFDLYPVIRRTINLPTYTLEAVYEAVFGQPKEKVYAEEITTAWETGENLERVARYSMEDAKVTYELGKEFLPMEAQLSRLIGQSLWDVSRSSTGNLVEWFLLRKAYERNELAPNKPDEKELARRRQSYEGGYVKEPERGLWENIVYLDFRSLYPSIIITHNVSPDTLNREGCKEYDVAPQVGHRFCKDFPGFIPSLLGDLLEERQKIKKKMKATIDPIERKLLDYRQRAIKILANSYYGYYGYARARWYCKECAESVTAWGREYITMTIKEIEEKYGFKVIYSDTDGFFATIPGADAETVKKKAMEFLKYINAKLPGALELEYEGFYKRGFFVTKKKYAVIDEEGKITTRGLEIVRRDWSEIAKETQARVLEALLKDGDVEKAVRIVKEVTEKLSKYEVPPEKLVIHEQITRDLKDYKATGPHVAVAKRLAARGVKIRPGTVISYIVLKGSGRIGDRAIPFDEFDPTKHKYDAEYYIENQVLPAVERILRAFGYRKEDLRYQKTRQVGLSAWLKPKGT

SEQ ID NO: 1484 - protein, 774 aa, synthetic construct
MILDTDYITEDGKPVIRIFKKENGEFKIEYDRTFEHYFYALLKDDSAIEEVKKITAERHGTVVTVKRVEKVQKKFLGRPVEVWKLYFTHIQDIPAIHDKIREHPAVIDIYEYDIPFAKRYLIDKGLVPMEGDEELKMLAFDIETLYHEGEEFAEGPILMISYADEEGARVITWKNVDLPYVDVVSTEREMIKRFLRVVKEKDPDVLITYNGDNFDFAYLKKRCEKLGINFALGRDGSEPKIQRMGDRFAVEVKGRIHFDLYPVIRRTINLPTYTLEAVYEAVFGQPKEKVYAEEITTAWETGENLERVARYSMEDAKVTYELGKEFLPMEAQLSRLIGQSLWDVSRSSTGNLVEWFLLRKAYERNELAPNKPDEKELARRRQSYEGGYVKEPERGLWENIVYLDFRSLYPSIIITHNVSPDTLNREGCKEYDVAPQVGHRFCKDFPGFIPSLLGDLLEERQKIKKKMKATIDPIERKLLDYRQRAIKILANSYYGYYGYARARWYCKECAESVTAWGREYITMTIKEIEEKYGFKVIYSDTDGFFATIPGADAETVKKKAMEFLKYINAKLPGALELEYEGFYKRGFFVTKKKYAVIDEEGKITTRGLEIVRRDWSEIAKETQARVLEALLKDGDVEKAVRIVKEVTEKLSKYEVPPEKLVIHEQITRDLKDYKATGPHVAVAKRLAARGVKIRPGTVISYIVLKGSGRIGDRAIPFDEFDPTKHKYDAEYYIENQVLPAVERILRAFGYRKEDLRYQKTRQVGLSAWLKPKGT

SEQ ID NO: 1485 - protein, 774 aa, synthetic construct
MILDTDYITEDGKPVIRIFKKENGEFKIEYDRTFEHYFYALLKDDSAIEEVKKITAERHGTVVTVKRVEKVQKKFLGRPVEVWKLYFTHIQDIPAIWDKIREHPAVIDIYEYDIPFAKRYLIDKGLVPMEGDEELKMLAFDIETLYHEGEEFAEGPILMISYADEEGARVITWKNVDLPYVDVVSTEREMIKRFLRVVKEKDPDVLITYNGDNFDFAYLKKRCEKLGINFALGRDGSEPKIQRMGDRFAVEVKGRIHFDLYPVIRRTINLPTYTLEAVYEAVFGQPKEKVYAEEITTAWETGENLERVARYSMEDAKVTYELGKEFLPMEAQLSRLIGQSLWDVSRSSTGNLVEWFLLRKAYERNELAPNKPDEKELARRRQSYEGGYVKEPERGLWENIVYLDFRSLYPSIIITHNVSPDTLNREGCKEYDVAPQVGHRFCKDFPGFIPSLLGDLLEERQKIKKKMKATIDPIERKLLDYRQRAIKILANSYYGYYGYARARWYCKECAESVTAWGREYITMTIKEIEEKYGFKVIYSDTDGFFATIPGADAETVKKKAMEFLKYINAKLPGALELEYEGFYKRGFFVTKKKYAVIDEEGKITTRGLEIVRRDWSEIAKETQARVLEALLKDGDVEKAVRIVKEVTEKLSKYEVPPEKLVIHEQITRDLKDYKATGPHVAVAKRLAARGVKIRPGTVISYIVLKGSGRIGDRAIPFDEFDPTKHKYDAEYYIENQVLPAVERILRAFGYRKEDLRYQKTRQVGLSAWLKPKGT

SEQ ID NO: 1486 - protein, 774 aa, synthetic construct
MILDTDYITEDGKPVIRIFKKENGEFKIEYDRTFEHYFYALLKDDSAIEEVKKITAERHGTVVTVKRVEKVQKKFLGRPVEVWKLYFTHIQDKPAIADKIREHPAVIDIYEYDIPFAKRYLIDKGLVPMEGDEELKMLAFDIETLYHEGEEFAEGPILMISYADEEGARVITWKNVDLPYVDVVSTEREMIKRFLRVVKEKDPDVLITYNGDNFDFAYLKKRCEKLGINFALGRDGSEPKIQRMGDRFAVEVKGRIHFDLYPVIRRTINLPTYTLEAVYEAVFGQPKEKVYAEEITTAWETGENLERVARYSMEDAKVTYELGKEFLPMEAQLSRLIGQSLWDVSRSSTGNLVEWFLLRKAYERNELAPNKPDEKELARRRQSYEGGYVKEPERGLWENIVYLDFRSLYPSIIITHNVSPDTLNREGCKEYDVAPQVGHRFCKDFPGFIPSLLGDLLEERQKIKKKMKATIDPIERKLLDYRQRAIKILANSYYGYYGYARARWYCKECAESVTAWGREYITMTIKEIEEKYGFKVIYSDTDGFFATIPGADAETVKKKAMEFLKYINAKLPGALELEYEGFYKRGFFVTKKKYAVIDEEGKITTRGLEIVRRDWSEIAKETQARVLEALLKDGDVEKAVRIVKEVTEKLSKYEVPPEKLVIHEQITRDLKDYKATGPHVAVAKRLAARGVKIRPGTVISYIVLKGSGRIGDRAIPFDEFDPTKHKYDAEYYIENQVLPAVERILRAFGYRKEDLRYQKTRQVGLSAWLKPKGT

SEQ ID NO: 1487 - protein, 774 aa, synthetic construct
MILDTDYITEDGKPVIRIFKKENGEFKIEYDRTFEHYFYALLKDDSAIEEVKKITAERHGTVVTVKRVEKVQKKFLGRPVEVWKLYFTHIQDRPAIFDKIREHPAVIDIYEYDIPFAKRYLIDKGLVPMEGDEELKMLAFDIETLYHEGEEFAEGPILMISYADEEGARVITWKNVDLPYVDVVSTEREMIKRFLRVVKEKDPDVLITYNGDNFDFAYLKKRCEKLGINFALGRDGSEPKIQRMGDRFAVEVKGRIHFDLYPVIRRTINLPTYTLEAVYEAVFGQPKEKVYAEEITTAWETGENLERVARYSMEDAKVTYELGKEFLPMEAQLSRLIGQSLWDVSRSSTGNLVEWFLLRKAYERNELAPNKPDEKELARRRQSYEGGYVKEPERGLWENIVYLDFRSLYPSIIITHNVSPDTLNREGCKEYDVAPQVGHRFCKDFPGFIPSLLGDLLEERQKIKKKMKATIDPIERKLLDYRQRAIKILANSYYGYYGYARARWYCKECAESVTAWGREYITMTIKEIEEKYGFKVIYSDTDGFFATIPGADAETVKKKAMEFLKYINAKLPGALELEYEGFYKRGFFVTKKKYAVIDEEGKITTRGLEIVRRDWSEIAKETQARVLEALLKDGDVEKAVRIVKEVTEKLSKYEVPPEKLVIHEQITRDLKDYKATGPHVAVAKRLAARGVKIRPGTVISYIVLKGSGRIGDRAIPFDEFDPTKHKYDAEYYIENQVLPAVERILRAFGYRKEDLRYQKTRQVGLSAWLKPKGT

SEQ ID NO: 1488 - protein, 774 aa, synthetic construct
MILDTDYITEDGKPVIRIFKKENGEFKIEYDRTFEHYFYALLKDDSAIEEVKKITAERHGTVVTVKRVEKVQKKFLGRPVEVWKLYFTHSQDVPAIADKIREHPAVIDIYEYDIPFAKRYLIDKGLVPMEGDEELKMLAFDIETLYHEGEEFAEGPILMISYADEEGARVITWKNVDLPYVDVVSTEREMIKRFLRVVKEKDPDVLITYNGDNFDFAYLKKRCEKLGINFALGRDGSEPKIQRMGDRFAVEVKGRIHFDLYPVIRRTINLPTYTLEAVYEAVFGQPKEKVYAEEITTAWETGENLERVARYSMEDAKVTYELGKEFLPMEAQLSRLIGQSLWDVSRSSTGNLVEWFLLRKAYERNELAPNKPDEKELARRRQSYEGGYVKEPERGLWENIVYLDFRSLYPSIIITHNVSPDTLNREGCKEYDVAPQVGHRFCKDFPGFIPSLLGDLLEERQKIKKKMKATIDPIERKLLDYRQRAIKILANSYYGYYGYARARWYCKECAESVTAWGREYITMTIKEIEEKYGFKVIYSDTDGFFATIPGADAETVKKKAMEFLKYINAKLPGALELEYEGFYKRGFFVTKKKYAVIDEEGKITTRGLEIVRRDWSEIAKETQARVLEALLKDGDVEKAVRIVKEVTEKLSKYEVPPEKLVIHEQITRDLKDYKATGPHVAVAKRLAARGVKIRPGTVISYIVLKGSGRIGDRAIPFDEFDPTKHKYDAEYYIENQVLPAVERILRAFGYRKEDLRYQKTRQVGLSAWLKPKGT

SEQ ID NO: 1489 - protein, 774 aa, synthetic construct
MILDTDYITEDGKPVIRIFKKENGEFKIEYDRTFEHYFYALLKDDSAIEEVKKITAERHGTVVTVKRVEKVQKKFLGRPVEVWKLYFTHSQDIPAIRDKIREHPAVIDIYEYDIPFAKRYLIDKGLVPMEGDEELKMLAFDIETLYHEGEEFAEGPILMISYADEEGARVITWKNVDLPYVDVVSTEREMIKRFLRVVKEKDPDVLITYNGDNFDFAYLKKRCEKLGINFALGRDGSEPKIQRMGDRFAVEVKGRIHFDLYPVIRRTINLPTYTLEAVYEAVFGQPKEKVYAEEITTAWETGENLERVARYSMEDAKVTYELGKEFLPMEAQLSRLIGQSLWDVSRSSTGNLVEWFLLRKAYERNELAPNKPDEKELARRRQSYEGGYVKEPERGLWENIVYLDFRSLYPSIIITHNVSPDTLNREGCKEYDVAPQVGHRFCKDFPGFIPSLLGDLLEERQKIKKKMKATIDPIERKLLDYRQRAIKILANSYYGYYGYARARWYCKECAESVTAWGREYITMTIKEIEEKYGFKVIYSDTDGFFATIPGADAETVKKKAMEFLKYINAKLPGALELEYEGFYKRGFFVTKKKYAVIDEEGKITTRGLEIVRRDWSEIAKETQARVLEALLKDGDVEKAVRIVKEVTEKLSKYEVPPEKLVIHEQITRDLKDYKATGPHVAVAKRLAARGVKIRPGTVISYIVLKGSGRIGDRAIPFDEFDPTKHKYDAEYYIENQVLPAVERILRAFGYRKEDLRYQKTRQVGLSAWLKPKGT

SEQ ID NO: 1490 - protein, 774 aa, synthetic construct
MILDTDYITEDGKPVIRIFKKENGEFKIEYDRTFEHYFYALLKDDSAIEEVKKITAERHGTVVTVKRVEKVQKKFLGRPVEVWKLYFTHSQDIPAIADKIREHPAVIDIYEYDIPFAKRYLIDKGLVPMEGDEELKMLAFDIETLYHEGEEFAEGPILMISYADEEGARVITWKNVDLPYVDVVSTEREMIKRFLRVVKEKDPDVLITYNGDNFDFAYLKKRCEKLGINFALGRDGSEPKIQRMGDRFAVEVKGRIHFDLYPVIRRTINLPTYTLEAVYEAVFGQPKEKVYAEEITTAWETGENLERVARYSMEDAKVTYELGKEFLPMEAQLSRLIGQSLWDVSRSSTGNLVEWFLLRKAYERNELAPNKPDEKELARRRQSYEGGYVKEPERGLWENIVYLDFRSLYPSIIITHNVSPDTLNREGCKEYDVAPQVGHRFCKDFPGFIPSLLGDLLEERQKIKKKMKATIDPIERKLLDYRQRAIKILANSYYGYYGYARARWYCKECAESVTAWGREYITMTIKEIEEKYGFKVIYSDTDGFFATIPGADAETVKKKAMEFLKYINAKLPGALELEYEGFYKRGFFVTKKKYAVIDEEGKITTRGLEIVRRDWSEIAKETQARVLEALLKDGDVEKAVRIVKEVTEKLSKYEVPPEKLVIHEQITRDLKDYKATGPHVAVAKRLAARGVKIRPGTVISYIVLKGSGRIGDRAIPFDEFDPTKHKYDAEYYIENQVLPAVERILRAFGYRKEDLRYQKTRQVGLSAWLKPKGT

SEQ ID NO: 1491 - protein, 774 aa, synthetic construct
MILDTDYITEDGKPVIRIFKKENGEFKIEYDRTFEHYFYALLKDDSAIEEVKKITAERHGTVVTVKRVEKVQKKFLGRPVEVWKLYFTHSQDIPAIWDKIREHPAVIDIYEYDIPFAKRYLIDKGLVPMEGDEELKMLAFDIETLYHEGEEFAEGPILMISYADEEGARVITWKNVDLPYVDVVSTEREMIKRFLRVVKEKDPDVLITYNGDNFDFAYLKKRCEKLGINFALGRDGSEPKIQRMGDRFAVEVKGRIHFDLYPVIRRTINLPTYTLEAVYEAVFGQPKEKVYAEEITTAWETGENLERVARYSMEDAKVTYELGKEFLPMEAQLSRLIGQSLWDVSRSSTGNLVEWFLLRKAYERNELAPNKPDEKELARRRQSYEGGYVKEPERGLWENIVYLDFRSLYPSIIITHNVSPDTLNREGCKEYDVAPQVGHRFCKDFPGFIPSLLGDLLEERQKIKKKMKATIDPIERKLLDYRQRAIKILANSYYGYYGYARARWYCKECAESVTAWGREYITMTIKEIEEKYGFKVIYSDTDGFFATIPGADAETVKKKAMEFLKYINAKLPGALELEYEGFYKRGFFVTKKKYAVIDEEGKITTRGLEIVRRDWSEIAKETQARVLEALLKDGDVEKAVRIVKEVTEKLSKYEVPPEKLVIHEQITRDLKDYKATGPHVAVAKRLAARGVKIRPGTVISYIVLKGSGRIGDRAIPFDEFDPTKHKYDAEYYIENQVLPAVERILRAFGYRKEDLRYQKTRQVGLSAWLKPKGT

SEQ ID NO: 1492 - protein, 774 aa, synthetic construct
MILDTDYITEDGKPVIRIFKKENGEFKIEYDRTFEHYFYALLKDDSAIEEVKKITAERHGTVVTVKRVEKVQKKFLGRPVEVWKLYFTHWQDVPAIRDKIREHPAVIDIYEYDIPFAKRYLIDKGLVPMEGDEELKMLAFDIETLYHEGEEFAEGPILMISYADEEGARVITWKNVDLPYVDVVSTEREMIKRFLRVVKEKDPDVLITYNGDNFDFAYLKKRCEKLGINFALGRDGSEPKIQRMGDRFAVEVKGRIHFDLYPVIRRTINLPTYTLEAVYEAVFGQPKEKVYAEEITTAWETGENLERVARYSMEDAKVTYELGKEFLPMEAQLSRLIGQSLWDVSRSSTGNLVEWFLLRKAYERNELAPNKPDEKELARRRQSYEGGYVKEPERGLWENIVYLDFRSLYPSIIITHNVSPDTLNREGCKEYDVAPQVGHRFCKDFPGFIPSLLGDLLEERQKIKKKMKATIDPIERKLLDYRQRAIKILANSYYGYYGYARARWYCKECAESVTAWGREYITMTIKEIEEKYGFKVIYSDTDGFFATIPGADAETVKKKAMEFLKYINAKLPGALELEYEGFYKRGFFVTKKKYAVIDEEGKITTRGLEIVRRDWSEIAKETQARVLEALLKDGDVEKAVRIVKEVTEKLSKYEVPPEKLVIHEQITRDLKDYKATGPHVAVAKRLAARGVKIRPGTVISYIVLKGSGRIGDRAIPFDEFDPTKHKYDAEYYIENQVLPAVERILRAFGYRKEDLRYQKTRQVGLSAWLKPKGT

SEQ ID NO: 1493 - protein, 774 aa, synthetic construct
MILDTDYITEDGKPVIRIFKKENGEFKIEYDRTFEHYFYALLKDDSAIEEVKKITAERHGTVVTVKRVEKVQKKFLGRPVEVWKLYFTHWQDVPAIFDKIREHPAVIDIYEYDIPFAKRYLIDKGLVPMEGDEELKMLAFDIETLYHEGEEFAEGPILMISYADEEGARVITWKNVDLPYVDVVSTEREMIKRFLRVVKEKDPDVLITYNGDNFDFAYLKKRCEKLGINFALGRDGSEPKIQRMGDRFAVEVKGRIHFDLYPVIRRTINLPTYTLEAVYEAVFGQPKEKVYAEEITTAWETGENLERVARYSMEDAKVTYELGKEFLPMEAQLSRLIGQSLWDVSRSSTGNLVEWFLLRKAYERNELAPNKPDEKELARRRQSYEGGYVKEPERGLWENIVYLDFRSLYPSIIITHNVSPDTLNREGCKEYDVAPQVGHRFCKDFPGFIPSLLGDLLEERQKIKKKMKATIDPIERKLLDYRQRAIKILANSYYGYYGYARARWYCKECAESVTAWGREYITMTIKEIEEKYGFKVIYSDTDGFFATIPGADAETVKKKAMEFLKYINAKLPGALELEYEGFYKRGFFVTKKKYAVIDEEGKITTRGLEIVRRDWSEIAKETQARVLEALLKDGDVEKAVRIVKEVTEKLSKYEVPPEKLVIHEQITRDLKDYKATGPHVAVAKRLAARGVKIRPGTVISYIVLKGSGRIGDRAIPFDEFDPTKHKYDAEYYIENQVLPAVERILRAFGYRKEDLRYQKTRQVGLSAWLKPKGT

SEQ ID NO: 1494 - protein, 774 aa, synthetic construct
MILDTDYITEDGKPVIRIFKKENGEFKIEYDRTFEHYFYALLKDDSAIEEVKKITAERHGTVVTVKRVEKVQKKFLGRPVEVWKLYFTHWQDVPAIHDKIREHPAVIDIYEYDIPFAKRYLIDKGLVPMEGDEELKMLAFDIETLYHEGEEFAEGPILMISYADEEGARVITWKNVDLPYVDVVSTEREMIKRFLRVVKEKDPDVLITYNGDNFDFAYLKKRCEKLGINFALGRDGSEPKIQRMGDRFAVEVKGRIHFDLYPVIRRTINLPTYTLEAVYEAVFGQPKEKVYAEEITTAWETGENLERVARYSMEDAKVTYELGKEFLPMEAQLSRLIGQSLWDVSRSSTGNLVEWFLLRKAYERNELAPNKPDEKELARRRQSYEGGYVKEPERGLWENIVYLDFRSLYPSIIITHNVSPDTLNREGCKEYDVAPQVGHRFCKDFPGFIPSLLGDLLEERQKIKKKMKATIDPIERKLLDYRQRAIKILANSYYGYYGYARARWYCKECAESVTAWGREYITMTIKEIEEKYGFKVIYSDTDGFFATIPGADAETVKKKAMEFLKYINAKLPGALELEYEGFYKRGFFVTKKKYAVIDEEGKITTRGLEIVRRDWSEIAKETQARVLEALLKDGDVEKAVRIVKEVTEKLSKYEVPPEKLVIHEQITRDLKDYKATGPHVAVAKRLAARGVKIRPGTVISYIVLKGSGRIGDRAIPFDEFDPTKHKYDAEYYIENQVLPAVERILRAFGYRKEDLRYQKTRQVGLSAWLKPKGT

SEQ ID NO: 1495 - protein, 774 aa, synthetic construct
MILDTDYITEDGKPVIRIFKKENGEFKIEYDRTFEHYFYALLKDDSAIEEVKKITAERHGTVVTVKRVEKVQKKFLGRPVEVWKLYFTHWQDVPAIWDKIREHPAVIDIYEYDIPFAKRYLIDKGLVPMEGDEELKMLAFDIETLYHEGEEFAEGPILMISYADEEGARVITWKNVDLPYVDVVSTEREMIKRFLRVVKEKDPDVLITYNGDNFDFAYLKKRCEKLGINFALGRDGSEPKIQRMGDRFAVEVKGRIHFDLYPVIRRTINLPTYTLEAVYEAVFGQPKEKVYAEEITTAWETGENLERVARYSMEDAKVTYELGKEFLPMEAQLSRLIGQSLWDVSRSSTGNLVEWFLLRKAYERNELAPNKPDEKELARRRQSYEGGYVKEPERGLWENIVYLDFRSLYPSIIITHNVSPDTLNREGCKEYDVAPQVGHRFCKDFPGFIPSLLGDLLEERQKIKKKMKATIDPIERKLLDYRQRAIKILANSYYGYYGYARARWYCKECAESVTAWGREYITMTIKEIEEKYGFKVIYSDTDGFFATIPGADAETVKKKAMEFLKYINAKLPGALELEYEGFYKRGFFVTKKKYAVIDEEGKITTRGLEIVRRDWSEIAKETQARVLEALLKDGDVEKAVRIVKEVTEKLSKYEVPPEKLVIHEQITRDLKDYKATGPHVAVAKRLAARGVKIRPGTVISYIVLKGSGRIGDRAIPFDEFDPTKHKYDAEYYIENQVLPAVERILRAFGYRKEDLRYQKTRQVGLSAWLKPKGT

SEQ ID NO: 1496 - protein, 774 aa, synthetic construct
MILDTDYITEDGKPVIRIFKKENGEFKIEYDRTFEHYFYALLKDDSAIEEVKKITAERHGTVVTVKRVEKVQKKFLGRPVEVWKLYFTHWQDIPAIRDKIREHPAVIDIYEYDIPFAKRYLIDKGLVPMEGDEELKMLAFDIETLYHEGEEFAEGPILMISYADEEGARVITWKNVDLPYVDVVSTEREMIKRFLRVVKEKDPDVLITYNGDNFDFAYLKKRCEKLGINFALGRDGSEPKIQRMGDRFAVEVKGRIHFDLYPVIRRTINLPTYTLEAVYEAVFGQPKEKVYAEEITTAWETGENLERVARYSMEDAKVTYELGKEFLPMEAQLSRLIGQSLWDVSRSSTGNLVEWFLLRKAYERNELAPNKPDEKELARRRQSYEGGYVKEPERGLWENIVYLDFRSLYPSIIITHNVSPDTLNREGCKEYDVAPQVGHRFCKDFPGFIPSLLGDLLEERQKIKKKMKATIDPIERKLLDYRQRAIKILANSYYGYYGYARARWYCKECAESVTAWGREYITMTIKEIEEKYGFKVIYSDTDGFFATIPGADAETVKKKAMEFLKYINAKLPGALELEYEGFYKRGFFVTKKKYAVIDEEGKITTRGLEIVRRDWSEIAKETQARVLEALLKDGDVEKAVRIVKEVTEKLSKYEVPPEKLVIHEQITRDLKDYKATGPHVAVAKRLAARGVKIRPGTVISYIVLKGSGRIGDRAIPFDEFDPTKHKYDAEYYIENQVLPAVERILRAFGYRKEDLRYQKTRQVGLSAWLKPKGT

SEQ ID NO: 1497 - protein, 774 aa, synthetic construct
MILDTDYITEDGKPVIRIFKKENGEFKIEYDRTFEHYFYALLKDDSAIEEVKKITAERHGTVVTVKRVEKVQKKFLGRPVEVWKLYFTHWQDIPAIHDKIREHPAVIDIYEYDIPFAKRYLIDKGLVPMEGDEELKMLAFDIETLYHEGEEFAEGPILMISYADEEGARVITWKNVDLPYVDVVSTEREMIKRFLRVVKEKDPDVLITYNGDNFDFAYLKKRCEKLGINFALGRDGSEPKIQRMGDRFAVEVKGRIHFDLYPVIRRTINLPTYTLEAVYEAVFGQPKEKVYAEEITTAWETGENLERVARYSMEDAKVTYELGKEFLPMEAQLSRLIGQSLWDVSRSSTGNLVEWFLLRKAYERNELAPNKPDEKELARRRQSYEGGYVKEPERGLWENIVYLDFRSLYPSIIITHNVSPDTLNREGCKEYDVAPQVGHRFCKDFPGFIPSLLGDLLEERQKIKKKMKATIDPIERKLLDYRQRAIKILANSYYGYYGYARARWYCKECAESVTAWGREYITMTIKEIEEKYGFKVIYSDTDGFFATIPGADAETVKKKAMEFLKYINAKLPGALELEYEGFYKRGFFVTKKKYAVIDEEGKITTRGLEIVRRDWSEIAKETQARVLEALLKDGDVEKAVRIVKEVTEKLSKYEVPPEKLVIHEQITRDLKDYKATGPHVAVAKRLAARGVKIRPGTVISYIVLKGSGRIGDRAIPFDEFDPTKHKYDAEYYIENQVLPAVERILRAFGYRKEDLRYQKTRQVGLSAWLKPKGT

SEQ ID NO: 1498 - protein, 774 aa, synthetic construct
MILDTDYITEDGKPVIRIFKKENGEFKIEYDRTFEHYFYALLKDDSAIEEVKKITAERHGTVVTVKRVEKVQKKFLGRPVEVWKLYFTHYQDVPAIRDKIREHPAVIDIYEYDIPFAKRYLIDKGLVPMEGDEELKMLAFDIETLYHEGEEFAEGPILMISYADEEGARVITWKNVDLPYVDVVSTEREMIKRFLRVVKEKDPDVLITYNGDNFDFAYLKKRCEKLGINFALGRDGSEPKIQRMGDRFAVEVKGRIHFDLYPVIRRTINLPTYTLEAVYEAVFGQPKEKVYAEEITTAWETGENLERVARYSMEDAKVTYELGKEFLPMEAQLSRLIGQSLWDVSRSSTGNLVEWFLLRKAYERNELAPNKPDEKELARRRQSYEGGYVKEPERGLWENIVYLDFRSLYPSIIITHNVSPDTLNREGCKEYDVAPQVGHRFCKDFPGFIPSLLGDLLEERQKIKKKMKATIDPIERKLLDYRQRAIKILANSYYGYYGYARARWYCKECAESVTAWGREYITMTIKEIEEKYGFKVIYSDTDGFFATIPGADAETVKKKAMEFLKYINAKLPGALELEYEGFYKRGFFVTKKKYAVIDEEGKITTRGLEIVRRDWSEIAKETQARVLEALLKDGDVEKAVRIVKEVTEKLSKYEVPPEKLVIHEQITRDLKDYKATGPHVAVAKRLAARGVKIRPGTVISYIVLKGSGRIGDRAIPFDEFDPTKHKYDAEYYIENQVLPAVERILRAFGYRKEDLRYQKTRQVGLSAWLKPKGT

SEQ ID NO: 1499 - protein, 774 aa, synthetic construct
MILDTDYITEDGKPVIRIFKKENGEFKIEYDRTFEHYFYALLKDDSAIEEVKKITAERHGTVVTVKRVEKVQKKFLGRPVEVWKLYFTHYQDIPAIRDKIREHPAVIDIYEYDIPFAKRYLIDKGLVPMEGDEELKMLAFDIETLYHEGEEFAEGPILMISYADEEGARVITWKNVDLPYVDVVSTEREMIKRFLRVVKEKDPDVLITYNGDNFDFAYLKKRCEKLGINFALGRDGSEPKIQRMGDRFAVEVKGRIHFDLYPVIRRTINLPTYTLEAVYEAVFGQPKEKVYAEEITTAWETGENLERVARYSMEDAKVTYELGKEFLPMEAQLSRLIGQSLWDVSRSSTGNLVEWFLLRKAYERNELAPNKPDEKELARRRQSYEGGYVKEPERGLWENIVYLDFRSLYPSIIITHNVSPDTLNREGCKEYDVAPQVGHRFCKDFPGFIPSLLGDLLEERQKIKKKMKATIDPIERKLLDYRQRAIKILANSYYGYYGYARARWYCKECAESVTAWGREYITMTIKEIEEKYGFKVIYSDTDGFFATIPGADAETVKKKAMEFLKYINAKLPGALELEYEGFYKRGFFVTKKKYAVIDEEGKITTRGLEIVRRDWSEIAKETQARVLEALLKDGDVEKAVRIVKEVTEKLSKYEVPPEKLVIHEQITRDLKDYKATGPHVAVAKRLAARGVKIRPGTVISYIVLKGSGRIGDRAIPFDEFDPTKHKYDAEYYIENQVLPAVERILRAFGYRKEDLRYQKTRQVGLSAWLKPKGT

SEQ ID NO: 1500 - protein, 774 aa, synthetic construct
MILDTDYITEDGKPVIRIFKKENGEFKIEYDRTFEHYFYALLKDDSAIEEVKKITAERHGTVVTVKRVEKVQKKFLGRPVEVWKLYFTHYQDIPAIADKIREHPAVIDIYEYDIPFAKRYLIDKGLVPMEGDEELKMLAFDIETLYHEGEEFAEGPILMISYADEEGARVITWKNVDLPYVDVVSTEREMIKRFLRVVKEKDPDVLITYNGDNFDFAYLKKRCEKLGINFALGRDGSEPKIQRMGDRFAVEVKGRIHFDLYPVIRRTINLPTYTLEAVYEAVFGQPKEKVYAEEITTAWETGENLERVARYSMEDAKVTYELGKEFLPMEAQLSRLIGQSLWDVSRSSTGNLVEWFLLRKAYERNELAPNKPDEKELARRRQSYEGGYVKEPERGLWENIVYLDFRSLYPSIIITHNVSPDTLNREGCKEYDVAPQVGHRFCKDFPGFIPSLLGDLLEERQKIKKKMKATIDPIERKLLDYRQRAIKILANSYYGYYGYARARWYCKECAESVTAWGREYITMTIKEIEEKYGFKVIYSDTDGFFATIPGADAETVKKKAMEFLKYINAKLPGALELEYEGFYKRGFFVTKKKYAVIDEEGKITTRGLEIVRRDWSEIAKETQARVLEALLKDGDVEKAVRIVKEVTEKLSKYEVPPEKLVIHEQITRDLKDYKATGPHVAVAKRLAARGVKIRPGTVISYIVLKGSGRIGDRAIPFDEFDPTKHKYDAEYYIENQVLPAVERILRAFGYRKEDLRYQKTRQVGLSAWLKPKGT

SEQ ID NO: 1501 - protein, 774 aa, synthetic construct
MILDTDYITEDGKPVIRIFKKENGEFKIEYDRTFEHYFYALLKDDSAIEEVKKITAERHGTVVTVKRVEKVQKKFLGRPVEVWKLYFTHPQDVPAIADKIREHPAVIDIYEYDIPFAKRYLIDKGLVPMEGDEELKMLAFDIETLYHEGEEFAEGPILMISYADEEGARVITWKNVDLPYVDVVSTEREMIKRFLRVVKEKDPDVLITYNGDNFDFAYLKKRCEKLGINFALGRDGSEPKIQRMGDRFAVEVKGRIHFDLYPVIRRTINLPTYTLEAVYEAVFGQPKEKVYAEEITTAWETGENLERVARYSMEDAKVTYELGKEFLPMEAQLSRLIGQSLWDVSRSSTGNLVEWFLLRKAYERNELAPNKPDEKELARRRQSYEGGYVKEPERGLWENIVYLDFRSLYPSIIITHNVSPDTLNREGCKEYDVAPQVGHRFCKDFPGFIPSLLGDLLEERQKIKKKMKATIDPIERKLLDYRQRAIKILANSYYGYYGYARARWYCKECAESVTAWGREYITMTIKEIEEKYGFKVIYSDTDGFFATIPGADAETVKKKAMEFLKYINAKLPGALELEYEGFYKRGFFVTKKKYAVIDEEGKITTRGLEIVRRDWSEIAKETQARVLEALLKDGDVEKAVRIVKEVTEKLSKYEVPPEKLVIHEQITRDLKDYKATGPHVAVAKRLAARGVKIRPGTVISYIVLKGSGRIGDRAIPFDEFDPTKHKYDAEYYIENQVLPAVERILRAFGYRKEDLRYQKTRQVGLSAWLKPKGT

SEQ ID NO: 1502 - protein, 774 aa, synthetic construct
MILDTDYITEDGKPVIRIFKKENGEFKIEYDRTFEHYFYALLKDDSAIEEVKKITAERHGTVVTVKRVEKVQKKFLGRPVEVWKLYFTHPQDVPAIFDKIREHPAVIDIYEYDIPFAKRYLIDKGLVPMEGDEELKMLAFDIETLYHEGEEFAEGPILMISYADEEGARVITWKNVDLPYVDVVSTEREMIKRFLRVVKEKDPDVLITYNGDNFDFAYLKKRCEKLGINFALGRDGSEPKIQRMGDRFAVEVKGRIHFDLYPVIRRTINLPTYTLEAVYEAVFGQPKEKVYAEEITTAWETGENLERVARYSMEDAKVTYELGKEFLPMEAQLSRLIGQSLWDVSRSSTGNLVEWFLLRKAYERNELAPNKPDEKELARRRQSYEGGYVKEPERGLWENIVYLDFRSLYPSIIITHNVSPDTLNREGCKEYDVAPQVGHRFCKDFPGFIPSLLGDLLEERQKIKKKMKATIDPIERKLLDYRQRAIKILANSYYGYYGYARARWYCKECAESVTAWGREYITMTIKEIEEKYGFKVIYSDTDGFFATIPGADAETVKKKAMEFLKYINAKLPGALELEYEGFYKRGFFVTKKKYAVIDEEGKITTRGLEIVRRDWSEIAKETQARVLEALLKDGDVEKAVRIVKEVTEKLSKYEVPPEKLVIHEQITRDLKDYKATGPHVAVAKRLAARGVKIRPGTVISYIVLKGSGRIGDRAIPFDEFDPTKHKYDAEYYIENQVLPAVERILRAFGYRKEDLRYQKTRQVGLSAWLKPKGT

SEQ ID NO: 1503 - protein, 774 aa, synthetic construct
MILDTDYITEDGKPVIRIFKKENGEFKIEYDRTFEHYFYALLKDDSAIEEVKKITAERHGTVVTVKRVEKVQKKFLGRPVEVWKLYFTHPQDVPAIHDKIREHPAVIDIYEYDIPFAKRYLIDKGLVPMEGDEELKMLAFDIETLYHEGEEFAEGPILMISYADEEGARVITWKNVDLPYVDVVSTEREMIKRFLRVVKEKDPDVLITYNGDNFDFAYLKKRCEKLGINFALGRDGSEPKIQRMGDRFAVEVKGRIHFDLYPVIRRTINLPTYTLEAVYEAVFGQPKEKVYAEEITTAWETGENLERVARYSMEDAKVTYELGKEFLPMEAQLSRLIGQSLWDVSRSSTGNLVEWFLLRKAYERNELAPNKPDEKELARRRQSYEGGYVKEPERGLWENIVYLDFRSLYPSIIITHNVSPDTLNREGCKEYDVAPQVGHRFCKDFPGFIPSLLGDLLEERQKIKKKMKATIDPIERKLLDYRQRAIKILANSYYGYYGYARARWYCKECAESVTAWGREYITMTIKEIEEKYGFKVIYSDTDGFFATIPGADAETVKKKAMEFLKYINAKLPGALELEYEGFYKRGFFVTKKKYAVIDEEGKITTRGLEIVRRDWSEIAKETQARVLEALLKDGDVEKAVRIVKEVTEKLSKYEVPPEKLVIHEQITRDLKDYKATGPHVAVAKRLAARGVKIRPGTVISYIVLKGSGRIGDRAIPFDEFDPTKHKYDAEYYIENQVLPAVERILRAFGYRKEDLRYQKTRQVGLSAWLKPKGT

SEQ ID NO: 1504 - protein, 774 aa, synthetic construct
MILDTDYITEDGKPVIRIFKKENGEFKIEYDRTFEHYFYALLKDDSAIEEVKKITAERHGTVVTVKRVEKVQKKFLGRPVEVWKLYFTHPQDVPAIWDKIREHPAVIDIYEYDIPFAKRYLIDKGLVPMEGDEELKMLAFDIETLYHEGEEFAEGPILMISYADEEGARVITWKNVDLPYVDVVSTEREMIKRFLRVVKEKDPDVLITYNGDNFDFAYLKKRCEKLGINFALGRDGSEPKIQRMGDRFAVEVKGRIHFDLYPVIRRTINLPTYTLEAVYEAVFGQPKEKVYAEEITTAWETGENLERVARYSMEDAKVTYELGKEFLPMEAQLSRLIGQSLWDVSRSSTGNLVEWFLLRKAYERNELAPNKPDEKELARRRQSYEGGYVKEPERGLWENIVYLDFRSLYPSIIITHNVSPDTLNREGCKEYDVAPQVGHRFCKDFPGFIPSLLGDLLEERQKIKKKMKATIDPIERKLLDYRQRAIKILANSYYGYYGYARARWYCKECAESVTAWGREYITMTIKEIEEKYGFKVIYSDTDGFFATIPGADAETVKKKAMEFLKYINAKLPGALELEYEGFYKRGFFVTKKKYAVIDEEGKITTRGLEIVRRDWSEIAKETQARVLEALLKDGDVEKAVRIVKEVTEKLSKYEVPPEKLVIHEQITRDLKDYKATGPHVAVAKRLAARGVKIRPGTVISYIVLKGSGRIGDRAIPFDEFDPTKHKYDAEYYIENQVLPAVERILRAFGYRKEDLRYQKTRQVGLSAWLKPKGT

SEQ ID NO: 1505 - protein, 774 aa, synthetic construct
MILDTDYITEDGKPVIRIFKKENGEFKIEYDRTFEHYFYALLKDDSAIEEVKKITAERHGTVVTVKRVEKVQKKFLGRPVEVWKLYFTHPQDIPAIRDKIREHPAVIDIYEYDIPFAKRYLIDKGLVPMEGDEELKMLAFDIETLYHEGEEFAEGPILMISYADEEGARVITWKNVDLPYVDVVSTEREMIKRFLRVVKEKDPDVLITYNGDNFDFAYLKKRCEKLGINFALGRDGSEPKIQRMGDRFAVEVKGRIHFDLYPVIRRTINLPTYTLEAVYEAVFGQPKEKVYAEEITTAWETGENLERVARYSMEDAKVTYELGKEFLPMEAQLSRLIGQSLWDVSRSSTGNLVEWFLLRKAYERNELAPNKPDEKELARRRQSYEGGYVKEPERGLWENIVYLDFRSLYPSIIITHNVSPDTLNREGCKEYDVAPQVGHRFCKDFPGFIPSLLGDLLEERQKIKKKMKATIDPIERKLLDYRQRAIKILANSYYGYYGYARARWYCKECAESVTAWGREYITMTIKEIEEKYGFKVIYSDTDGFFATIPGADAETVKKKAMEFLKYINAKLPGALELEYEGFYKRGFFVTKKKYAVIDEEGKITTRGLEIVRRDWSEIAKETQARVLEALLKDGDVEKAVRIVKEVTEKLSKYEVPPEKLVIHEQITRDLKDYKATGPHVAVAKRLAARGVKIRPGTVISYIVLKGSGRIGDRAIPFDEFDPTKHKYDAEYYIENQVLPAVERILRAFGYRKEDLRYQKTRQVGLSAWLKPKGT

SEQ ID NO: 1506 - protein, 774 aa, synthetic construct
MILDTDYITEDGKPVIRIFKKENGEFKIEYDRTFEHYFYALLKDDSAIEEVKKITAERHGTVVTVKRVEKVQKKFLGRPVEVWKLYFTHPQDIPAIADKIREHPAVIDIYEYDIPFAKRYLIDKGLVPMEGDEELKMLAFDIETLYHEGEEFAEGPILMISYADEEGARVITWKNVDLPYVDVVSTEREMIKRFLRVVKEKDPDVLITYNGDNFDFAYLKKRCEKLGINFALGRDGSEPKIQRMGDRFAVEVKGRIHFDLYPVIRRTINLPTYTLEAVYEAVFGQPKEKVYAEEITTAWETGENLERVARYSMEDAKVTYELGKEFLPMEAQLSRLIGQSLWDVSRSSTGNLVEWFLLRKAYERNELAPNKPDEKELARRRQSYEGGYVKEPERGLWENIVYLDFRSLYPSIIITHNVSPDTLNREGCKEYDVAPQVGHRFCKDFPGFIPSLLGDLLEERQKIKKKMKATIDPIERKLLDYRQRAIKILANSYYGYYGYARARWYCKECAESVTAWGREYITMTIKEIEEKYGFKVIYSDTDGFFATIPGADAETVKKKAMEFLKYINAKLPGALELEYEGFYKRGFFVTKKKYAVIDEEGKITTRGLEIVRRDWSEIAKETQARVLEALLKDGDVEKAVRIVKEVTEKLSKYEVPPEKLVIHEQITRDLKDYKATGPHVAVAKRLAARGVKIRPGTVISYIVLKGSGRIGDRAIPFDEFDPTKHKYDAEYYIENQVLPAVERILRAFGYRKEDLRYQKTRQVGLSAWLKPKGT

SEQ ID NO: 1507 - protein, 774 aa, synthetic construct
MILDTDYITEDGKPVIRIFKKENGEFKIEYDRTFEHYFYALLKDDSAIEEVKKITAERHGTVVTVKRVEKVQKKFLGRPVEVWKLYFTHPQDIPAIFDKIREHPAVIDIYEYDIPFAKRYLIDKGLVPMEGDEELKMLAFDIETLYHEGEEFAEGPILMISYADEEGARVITWKNVDLPYVDVVSTEREMIKRFLRVVKEKDPDVLITYNGDNFDFAYLKKRCEKLGINFALGRDGSEPKIQRMGDRFAVEVKGRIHFDLYPVIRRTINLPTYTLEAVYEAVFGQPKEKVYAEEITTAWETGENLERVARYSMEDAKVTYELGKEFLPMEAQLSRLIGQSLWDVSRSSTGNLVEWFLLRKAYERNELAPNKPDEKELARRRQSYEGGYVKEPERGLWENIVYLDFRSLYPSIIITHNVSPDTLNREGCKEYDVAPQVGHRFCKDFPGFIPSLLGDLLEERQKIKKKMKATIDPIERKLLDYRQRAIKILANSYYGYYGYARARWYCKECAESVTAWGREYITMTIKEIEEKYGFKVIYSDTDGFFATIPGADAETVKKKAMEFLKYINAKLPGALELEYEGFYKRGFFVTKKKYAVIDEEGKITTRGLEIVRRDWSEIAKETQARVLEALLKDGDVEKAVRIVKEVTEKLSKYEVPPEKLVIHEQITRDLKDYKATGPHVAVAKRLAARGVKIRPGTVISYIVLKGSGRIGDRAIPFDEFDPTKHKYDAEYYIENQVLPAVERILRAFGYRKEDLRYQKTRQVGLSAWLKPKGT

SEQ ID NO: 1508 - protein, 774 aa, synthetic construct
MILDTDYITEDGKPVIRIFKKENGEFKIEYDRTFEHYFYALLKDDSAIEEVKKITAERHGTVVTVKRVEKVQKKFLGRPVEVWKLYFTHPQDIPAIHDKIREHPAVIDIYEYDIPFAKRYLIDKGLVPMEGDEELKMLAFDIETLYHEGEEFAEGPILMISYADEEGARVITWKNVDLPYVDVVSTEREMIKRFLRVVKEKDPDVLITYNGDNFDFAYLKKRCEKLGINFALGRDGSEPKIQRMGDRFAVEVKGRIHFDLYPVIRRTINLPTYTLEAVYEAVFGQPKEKVYAEEITTAWETGENLERVARYSMEDAKVTYELGKEFLPMEAQLSRLIGQSLWDVSRSSTGNLVEWFLLRKAYERNELAPNKPDEKELARRRQSYEGGYVKEPERGLWENIVYLDFRSLYPSIIITHNVSPDTLNREGCKEYDVAPQVGHRFCKDFPGFIPSLLGDLLEERQKIKKKMKATIDPIERKLLDYRQRAIKILANSYYGYYGYARARWYCKECAESVTAWGREYITMTIKEIEEKYGFKVIYSDTDGFFATIPGADAETVKKKAMEFLKYINAKLPGALELEYEGFYKRGFFVTKKKYAVIDEEGKITTRGLEIVRRDWSEIAKETQARVLEALLKDGDVEKAVRIVKEVTEKLSKYEVPPEKLVIHEQITRDLKDYKATGPHVAVAKRLAARGVKIRPGTVISYIVLKGSGRIGDRAIPFDEFDPTKHKYDAEYYIENQVLPAVERILRAFGYRKEDLRYQKTRQVGLSAWLKPKGT

SEQ ID NO: 1509 - protein, 774 aa, synthetic construct
MILDTDYITEDGKPVIRIFKKENGEFKIEYDRTFEHYFYALLKDDSAIEEVKKITAERHGTVVTVKRVEKVQKKFLGRPVEVWKLYFTHPQDIPAIWDKIREHPAVIDIYEYDIPFAKRYLIDKGLVPMEGDEELKMLAFDIETLYHEGEEFAEGPILMISYADEEGARVITWKNVDLPYVDVVSTEREMIKRFLRVVKEKDPDVLITYNGDNFDFAYLKKRCEKLGINFALGRDGSEPKIQRMGDRFAVEVKGRIHFDLYPVIRRTINLPTYTLEAVYEAVFGQPKEKVYAEEITTAWETGENLERVARYSMEDAKVTYELGKEFLPMEAQLSRLIGQSLWDVSRSSTGNLVEWFLLRKAYERNELAPNKPDEKELARRRQSYEGGYVKEPERGLWENIVYLDFRSLYPSIIITHNVSPDTLNREGCKEYDVAPQVGHRFCKDFPGFIPSLLGDLLEERQKIKKKMKATIDPIERKLLDYRQRAIKILANSYYGYYGYARARWYCKECAESVTAWGREYITMTIKEIEEKYGFKVIYSDTDGFFATIPGADAETVKKKAMEFLKYINAKLPGALELEYEGFYKRGFFVTKKKYAVIDEEGKITTRGLEIVRRDWSEIAKETQARVLEALLKDGDVEKAVRIVKEVTEKLSKYEVPPEKLVIHEQITRDLKDYKATGPHVAVAKRLAARGVKIRPGTVISYIVLKGSGRIGDRAIPFDEFDPTKHKYDAEYYIENQVLPAVERILRAFGYRKEDLRYQKTRQVGLSAWLKPKGT

SEQ ID NO: 1510 - protein, 774 aa, synthetic construct
MILDTDYITEDGKPVIRIFKKENGEFKIEYDRTFEHYFYALLKDDSAIEEVKKITAERHGTVVTVKRVEKVQKKFLGRPVEVWKLYFTHPQDKPAIRDKIREHPAVIDIYEYDIPFAKRYLIDKGLVPMEGDEELKMLAFDIETLYHEGEEFAEGPILMISYADEEGARVITWKNVDLPYVDVVSTEREMIKRFLRVVKEKDPDVLITYNGDNFDFAYLKKRCEKLGINFALGRDGSEPKIQRMGDRFAVEVKGRIHFDLYPVIRRTINLPTYTLEAVYEAVFGQPKEKVYAEEITTAWETGENLERVARYSMEDAKVTYELGKEFLPMEAQLSRLIGQSLWDVSRSSTGNLVEWFLLRKAYERNELAPNKPDEKELARRRQSYEGGYVKEPERGLWENIVYLDFRSLYPSIIITHNVSPDTLNREGCKEYDVAPQVGHRFCKDFPGFIPSLLGDLLEERQKIKKKMKATIDPIERKLLDYRQRAIKILANSYYGYYGYARARWYCKECAESVTAWGREYITMTIKEIEEKYGFKVIYSDTDGFFATIPGADAETVKKKAMEFLKYINAKLPGALELEYEGFYKRGFFVTKKKYAVIDEEGKITTRGLEIVRRDWSEIAKETQARVLEALLKDGDVEKAVRIVKEVTEKLSKYEVPPEKLVIHEQITRDLKDYKATGPHVAVAKRLAARGVKIRPGTVISYIVLKGSGRIGDRAIPFDEFDPTKHKYDAEYYIENQVLPAVERILRAFGYRKEDLRYQKTRQVGLSAWLKPKGT

SEQ ID NO: 1511 - protein, 774 aa, synthetic construct
MILDTDYITEDGKPVIRIFKKENGEFKIEYDRTFEHYFYALLKDDSAIEEVKKITAERHGTVVTVKRVEKVQKKFLGRPVEVWKLYFTHPQDKPAIHDKIREHPAVIDIYEYDIPFAKRYLIDKGLVPMEGDEELKMLAFDIETLYHEGEEFAEGPILMISYADEEGARVITWKNVDLPYVDVVSTEREMIKRFLRVVKEKDPDVLITYNGDNFDFAYLKKRCEKLGINFALGRDGSEPKIQRMGDRFAVEVKGRIHFDLYPVIRRTINLPTYTLEAVYEAVFGQPKEKVYAEEITTAWETGENLERVARYSMEDAKVTYELGKEFLPMEAQLSRLIGQSLWDVSRSSTGNLVEWFLLRKAYERNELAPNKPDEKELARRRQSYEGGYVKEPERGLWENIVYLDFRSLYPSIIITHNVSPDTLNREGCKEYDVAPQVGHRFCKDFPGFIPSLLGDLLEERQKIKKKMKATIDPIERKLLDYRQRAIKILANSYYGYYGYARARWYCKECAESVTAWGREYITMTIKEIEEKYGFKVIYSDTDGFFATIPGADAETVKKKAMEFLKYINAKLPGALELEYEGFYKRGFFVTKKKYAVIDEEGKITTRGLEIVRRDWSEIAKETQARVLEALLKDGDVEKAVRIVKEVTEKLSKYEVPPEKLVIHEQITRDLKDYKATGPHVAVAKRLAARGVKIRPGTVISYIVLKGSGRIGDRAIPFDEFDPTKHKYDAEYYIENQVLPAVERILRAFGYRKEDLRYQKTRQVGLSAWLKPKGT

SEQ ID NO: 1512 - protein, 774 aa, synthetic construct
MILDTDYITEDGKPVIRIFKKENGEFKIEYDRTFEHYFYALLKDDSAIEEVKKITAERHGTVVTVKRVEKVQKKFLGRPVEVWKLYFTHPQDQPAIRDKIREHPAVIDIYEYDIPFAKRYLIDKGLVPMEGDEELKMLAFDIETLYHEGEEFAEGPILMISYADEEGARVITWKNVDLPYVDVVSTEREMIKRFLRVVKEKDPDVLITYNGDNFDFAYLKKRCEKLGINFALGRDGSEPKIQRMGDRFAVEVKGRIHFDLYPVIRRTINLPTYTLEAVYEAVFGQPKEKVYAEEITTAWETGENLERVARYSMEDAKVTYELGKEFLPMEAQLSRLIGQSLWDVSRSSTGNLVEWFLLRKAYERNELAPNKPDEKELARRRQSYEGGYVKEPERGLWENIVYLDFRSLYPSIIITHNVSPDTLNREGCKEYDVAPQVGHRFCKDFPGFIPSLLGDLLEERQKIKKKMKATIDPIERKLLDYRQRAIKILANSYYGYYGYARARWYCKECAESVTAWGREYITMTIKEIEEKYGFKVIYSDTDGFFATIPGADAETVKKKAMEFLKYINAKLPGALELEYEGFYKRGFFVTKKKYAVIDEEGKITTRGLEIVRRDWSEIAKETQARVLEALLKDGDVEKAVRIVKEVTEKLSKYEVPPEKLVIHEQITRDLKDYKATGPHVAVAKRLAARGVKIRPGTVISYIVLKGSGRIGDRAIPFDEFDPTKHKYDAEYYIENQVLPAVERILRAFGYRKEDLRYQKTRQVGLSAWLKPKGT

SEQ ID NO: 1513 - protein, 774 aa, synthetic construct
MILDTDYITEDGKPVIRIFKKENGEFKIEYDRTFEHYFYALLKDDSAIEEVKKITAERHGTVVTVKRVEKVQKKFLGRPVEVWKLYFTHPQDQPAIWDKIREHPAVIDIYEYDIPFAKRYLIDKGLVPMEGDEELKMLAFDIETLYHEGEEFAEGPILMISYADEEGARVITWKNVDLPYVDVVSTEREMIKRFLRVVKEKDPDVLITYNGDNFDFAYLKKRCEKLGINFALGRDGSEPKIQRMGDRFAVEVKGRIHFDLYPVIRRTINLPTYTLEAVYEAVFGQPKEKVYAEEITTAWETGENLERVARYSMEDAKVTYELGKEFLPMEAQLSRLIGQSLWDVSRSSTGNLVEWFLLRKAYERNELAPNKPDEKELARRRQSYEGGYVKEPERGLWENIVYLDFRSLYPSIIITHNVSPDTLNREGCKEYDVAPQVGHRFCKDFPGFIPSLLGDLLEERQKIKKKMKATIDPIERKLLDYRQRAIKILANSYYGYYGYARARWYCKECAESVTAWGREYITMTIKEIEEKYGFKVIYSDTDGFFATIPGADAETVKKKAMEFLKYINAKLPGALELEYEGFYKRGFFVTKKKYAVIDEEGKITTRGLEIVRRDWSEIAKETQARVLEALLKDGDVEKAVRIVKEVTEKLSKYEVPPEKLVIHEQITRDLKDYKATGPHVAVAKRLAARGVKIRPGTVISYIVLKGSGRIGDRAIPFDEFDPTKHKYDAEYYIENQVLPAVERILRAFGYRKEDLRYQKTRQVGLSAWLKPKGT

SEQ ID NO: 1514 - protein, 774 aa, synthetic construct
MILDTDYITEDGKPVIRIFKKENGEFKIEYDRTFEHYFYALLKDDSAIEEVKKITAERHGTVVTVKRVEKVQKKFLGRPVEVWKLYFTHPQDRPAIRDKIREHPAVIDIYEYDIPFAKRYLIDKGLVPMEGDEELKMLAFDIETLYHEGEEFAEGPILMISYADEEGARVITWKNVDLPYVDVVSTEREMIKRFLRVVKEKDPDVLITYNGDNFDFAYLKKRCEKLGINFALGRDGSEPKIQRMGDRFAVEVKGRIHFDLYPVIRRTINLPTYTLEAVYEAVFGQPKEKVYAEEITTAWETGENLERVARYSMEDAKVTYELGKEFLPMEAQLSRLIGQSLWDVSRSSTGNLVEWFLLRKAYERNELAPNKPDEKELARRRQSYEGGYVKEPERGLWENIVYLDFRSLYPSIIITHNVSPDTLNREGCKEYDVAPQVGHRFCKDFPGFIPSLLGDLLEERQKIKKKMKATIDPIERKLLDYRQRAIKILANSYYGYYGYARARWYCKECAESVTAWGREYITMTIKEIEEKYGFKVIYSDTDGFFATIPGADAETVKKKAMEFLKYINAKLPGALELEYEGFYKRGFFVTKKKYAVIDEEGKITTRGLEIVRRDWSEIAKETQARVLEALLKDGDVEKAVRIVKEVTEKLSKYEVPPEKLVIHEQITRDLKDYKATGPHVAVAKRLAARGVKIRPGTVISYIVLKGSGRIGDRAIPFDEFDPTKHKYDAEYYIENQVLPAVERILRAFGYRKEDLRYQKTRQVGLSAWLKPKGT

SEQ ID NO: 1515 - protein, 774 aa, synthetic construct
MILDTDYITEDGKPVIRIFKKENGEFKIEYDRTFEHYFYALLKDDSAIEEVKKITAERHGTVVTVKRVEKVQKKFLGRPVEVWKLYFTHPQDRPAIADKIREHPAVIDIYEYDIPFAKRYLIDKGLVPMEGDEELKMLAFDIETLYHEGEEFAEGPILMISYADEEGARVITWKNVDLPYVDVVSTEREMIKRFLRVVKEKDPDVLITYNGDNFDFAYLKKRCEKLGINFALGRDGSEPKIQRMGDRFAVEVKGRIHFDLYPVIRRTINLPTYTLEAVYEAVFGQPKEKVYAEEITTAWETGENLERVARYSMEDAKVTYELGKEFLPMEAQLSRLIGQSLWDVSRSSTGNLVEWFLLRKAYERNELAPNKPDEKELARRRQSYEGGYVKEPERGLWENIVYLDFRSLYPSIIITHNVSPDTLNREGCKEYDVAPQVGHRFCKDFPGFIPSLLGDLLEERQKIKKKMKATIDPIERKLLDYRQRAIKILANSYYGYYGYARARWYCKECAESVTAWGREYITMTIKEIEEKYGFKVIYSDTDGFFATIPGADAETVKKKAMEFLKYINAKLPGALELEYEGFYKRGFFVTKKKYAVIDEEGKITTRGLEIVRRDWSEIAKETQARVLEALLKDGDVEKAVRIVKEVTEKLSKYEVPPEKLVIHEQITRDLKDYKATGPHVAVAKRLAARGVKIRPGTVISYIVLKGSGRIGDRAIPFDEFDPTKHKYDAEYYIENQVLPAVERILRAFGYRKEDLRYQKTRQVGLSAWLKPKGT

SEQ ID NO: 1516 - protein, 774 aa, synthetic construct
MILDTDYITEDGKPVIRIFKKENGEFKIEYDRTFEHYFYALLKDDSAIEEVKKITAERHGTVVTVKRVEKVQKKFLGRPVEVWKLYFTHPQDRPAIFDKIREHPAVIDIYEYDIPFAKRYLIDKGLVPMEGDEELKMLAFDIETLYHEGEEFAEGPILMISYADEEGARVITWKNVDLPYVDVVSTEREMIKRFLRVVKEKDPDVLITYNGDNFDFAYLKKRCEKLGINFALGRDGSEPKIQRMGDRFAVEVKGRIHFDLYPVIRRTINLPTYTLEAVYEAVFGQPKEKVYAEEITTAWETGENLERVARYSMEDAKVTYELGKEFLPMEAQLSRLIGQSLWDVSRSSTGNLVEWFLLRKAYERNELAPNKPDEKELARRRQSYEGGYVKEPERGLWENIVYLDFRSLYPSIIITHNVSPDTLNREGCKEYDVAPQVGHRFCKDFPGFIPSLLGDLLEERQKIKKKMKATIDPIERKLLDYRQRAIKILANSYYGYYGYARARWYCKECAESVTAWGREYITMTIKEIEEKYGFKVIYSDTDGFFATIPGADAETVKKKAMEFLKYINAKLPGALELEYEGFYKRGFFVTKKKYAVIDEEGKITTRGLEIVRRDWSEIAKETQARVLEALLKDGDVEKAVRIVKEVTEKLSKYEVPPEKLVIHEQITRDLKDYKATGPHVAVAKRLAARGVKIRPGTVISYIVLKGSGRIGDRAIPFDEFDPTKHKYDAEYYIENQVLPAVERILRAFGYRKEDLRYQKTRQVGLSAWLKPKGT

SEQ ID NO: 1517 - protein, 774 aa, synthetic construct
MILDTDYITEDGKPVIRIFKKENGEFKIEYDRTFEHYFYALLKDDSAIEEVKKITAERHGTVVTVKRVEKVQKKFLGRPVEVWKLYFTHPQDRPAIWDKIREHPAVIDIYEYDIPFAKRYLIDKGLVPMEGDEELKMLAFDIETLYHEGEEFAEGPILMISYADEEGARVITWKNVDLPYVDVVSTEREMIKRFLRVVKEKDPDVLITYNGDNFDFAYLKKRCEKLGINFALGRDGSEPKIQRMGDRFAVEVKGRIHFDLYPVIRRTINLPTYTLEAVYEAVFGQPKEKVYAEEITTAWETGENLERVARYSMEDAKVTYELGKEFLPMEAQLSRLIGQSLWDVSRSSTGNLVEWFLLRKAYERNELAPNKPDEKELARRRQSYEGGYVKEPERGLWENIVYLDFRSLYPSIIITHNVSPDTLNREGCKEYDVAPQVGHRFCKDFPGFIPSLLGDLLEERQKIKKKMKATIDPIERKLLDYRQRAIKILANSYYGYYGYARARWYCKECAESVTAWGREYITMTIKEIEEKYGFKVIYSDTDGFFATIPGADAETVKKKAMEFLKYINAKLPGALELEYEGFYKRGFFVTKKKYAVIDEEGKITTRGLEIVRRDWSEIAKETQARVLEALLKDGDVEKAVRIVKEVTEKLSKYEVPPEKLVIHEQITRDLKDYKATGPHVAVAKRLAARGVKIRPGTVISYIVLKGSGRIGDRAIPFDEFDPTKHKYDAEYYIENQVLPAVERILRAFGYRKEDLRYQKTRQVGLSAWLKPKGT

SEQ ID NO: 1518 - protein, 774 aa, synthetic construct
MILDTDYITEDGKPVIRIFKKENGEFKIEYDRTFERYFYALLKDDSAIEEVKKITAERHGTVVTVKRVEKVQKKFLGRPVEVWKLYFTHFQDVPAIRDKIREHPAVIDIYEYDIPFAKRYLIDKGLVPMEGDEELKMLAFDIETLYHEGEEFAEGPILMISYADEEGARVITWKNVDLPYVDVVSTEREMIKRFLRVVKEKDPDVLITYNGDNFDFAYLKKRCEKLGINFALGRDGSEPKIQRMGDRFAVEVKGRIHFDLYPVIRRTINLPTYTLEAVYEAVFGQPKEKVYAEEITTAWETGENLERVARYSMEDAKVTYELGKEFLPMEAQLSRLIGQSLWDVSRSSTGNLVEWFLLRKAYERNELAPNKPDEKELARRRQSYEGGYVKEPERGLWENIVYLDFRSLYPSIIITHNVSPDTLNREGCKEYDVAPQVGHRFCKDFPGFIPSLLGDLLEERQKIKKKMKATIDPIERKLLDYRQRAIKILANSYYGYYGYARARWYCKECAESVTAWGREYITMTIKEIEEKYGFKVIYSDTDGFFATIPGADAETVKKKAMEFLKYINAKLPGALELEYEGFYKRGFFVTKKKYAVIDEEGKITTRGLEIVRRDWSEIAKETQARVLEALLKDGDVEKAVRIVKEVTEKLSKYEVPPEKLVIHEQITRDLKDYKATGPHVAVAKRLAARGVKIRPGTVISYIVLKGSGRIGDRAIPFDEFDPTKHKYDAEYYIENQVLPAVERILRAFGYRKEDLRYQKTRQVGLSAWLKPKGT

SEQ ID NO: 1519 - protein, 774 aa, synthetic construct
MILDTDYITEDGKPVIRIFKKENGEFKIEYDRTFERYFYALLKDDSAIEEVKKITAERHGTVVTVKRVEKVQKKFLGRPVEVWKLYFTHIQDVPAIRDKIREHPAVIDIYEYDIPFAKRYLIDKGLVPMEGDEELKMLAFDIETLYHEGEEFAEGPILMISYADEEGARVITWKNVDLPYVDVVSTEREMIKRFLRVVKEKDPDVLITYNGDNFDFAYLKKRCEKLGINFALGRDGSEPKIQRMGDRFAVEVKGRIHFDLYPVIRRTINLPTYTLEAVYEAVFGQPKEKVYAEEITTAWETGENLERVARYSMEDAKVTYELGKEFLPMEAQLSRLIGQSLWDVSRSSTGNLVEWFLLRKAYERNELAPNKPDEKELARRRQSYEGGYVKEPERGLWENIVYLDFRSLYPSIIITHNVSPDTLNREGCKEYDVAPQVGHRFCKDFPGFIPSLLGDLLEERQKIKKKMKATIDPIERKLLDYRQRAIKILANSYYGYYGYARARWYCKECAESVTAWGREYITMTIKEIEEKYGFKVIYSDTDGFFATIPGADAETVKKKAMEFLKYINAKLPGALELEYEGFYKRGFFVTKKKYAVIDEEGKITTRGLEIVRRDWSEIAKETQARVLEALLKDGDVEKAVRIVKEVTEKLSKYEVPPEKLVIHEQITRDLKDYKATGPHVAVAKRLAARGVKIRPGTVISYIVLKGSGRIGDRAIPFDEFDPTKHKYDAEYYIENQVLPAVERILRAFGYRKEDLRYQKTRQVGLSAWLKPKGT

SEQ ID NO: 1520 - protein, 774 aa, synthetic construct
MILDTDYITEDGKPVIRIFKKENGEFKIEYDRTFERYFYALLKDDSAIEEVKKITAERHGTVVTVKRVEKVQKKFLGRPVEVWKLYFTHIQDIPAIRDKIREHPAVIDIYEYDIPFAKRYLIDKGLVPMEGDEELKMLAFDIETLYHEGEEFAEGPILMISYADEEGARVITWKNVDLPYVDVVSTEREMIKRFLRVVKEKDPDVLITYNGDNFDFAYLKKRCEKLGINFALGRDGSEPKIQRMGDRFAVEVKGRIHFDLYPVIRRTINLPTYTLEAVYEAVFGQPKEKVYAEEITTAWETGENLERVARYSMEDAKVTYELGKEFLPMEAQLSRLIGQSLWDVSRSSTGNLVEWFLLRKAYERNELAPNKPDEKELARRRQSYEGGYVKEPERGLWENIVYLDFRSLYPSIIITHNVSPDTLNREGCKEYDVAPQVGHRFCKDFPGFIPSLLGDLLEERQKIKKKMKATIDPIERKLLDYRQRAIKILANSYYGYYGYARARWYCKECAESVTAWGREYITMTIKEIEEKYGFKVIYSDTDGFFATIPGADAETVKKKAMEFLKYINAKLPGALELEYEGFYKRGFFVTKKKYAVIDEEGKITTRGLEIVRRDWSEIAKETQARVLEALLKDGDVEKAVRIVKEVTEKLSKYEVPPEKLVIHEQITRDLKDYKATGPHVAVAKRLAARGVKIRPGTVISYIVLKGSGRIGDRAIPFDEFDPTKHKYDAEYYIENQVLPAVERILRAFGYRKEDLRYQKTRQVGLSAWLKPKGT

SEQ ID NO: 1521 - protein, 774 aa, synthetic construct
MILDTDYITEDGKPVIRIFKKENGEFKIEYDRTFERYFYALLKDDSAIEEVKKITAERHGTVVTVKRVEKVQKKFLGRPVEVWKLYFTHIQDQPAIRDKIREHPAVIDIYEYDIPFAKRYLIDKGLVPMEGDEELKMLAFDIETLYHEGEEFAEGPILMISYADEEGARVITWKNVDLPYVDVVSTEREMIKRFLRVVKEKDPDVLITYNGDNFDFAYLKKRCEKLGINFALGRDGSEPKIQRMGDRFAVEVKGRIHFDLYPVIRRTINLPTYTLEAVYEAVFGQPKEKVYAEEITTAWETGENLERVARYSMEDAKVTYELGKEFLPMEAQLSRLIGQSLWDVSRSSTGNLVEWFLLRKAYERNELAPNKPDEKELARRRQSYEGGYVKEPERGLWENIVYLDFRSLYPSIIITHNVSPDTLNREGCKEYDVAPQVGHRFCKDFPGFIPSLLGDLLEERQKIKKKMKATIDPIERKLLDYRQRAIKILANSYYGYYGYARARWYCKECAESVTAWGREYITMTIKEIEEKYGFKVIYSDTDGFFATIPGADAETVKKKAMEFLKYINAKLPGALELEYEGFYKRGFFVTKKKYAVIDEEGKITTRGLEIVRRDWSEIAKETQARVLEALLKDGDVEKAVRIVKEVTEKLSKYEVPPEKLVIHEQITRDLKDYKATGPHVAVAKRLAARGVKIRPGTVISYIVLKGSGRIGDRAIPFDEFDPTKHKYDAEYYIENQVLPAVERILRAFGYRKEDLRYQKTRQVGLSAWLKPKGT

SEQ ID NO: 1522 - protein, 774 aa, synthetic construct
MILDTDYITEDGKPVIRIFKKENGEFKIEYDRTFERYFYALLKDDSAIEEVKKITAERHGTVVTVKRVEKVQKKFLGRPVEVWKLYFTHSQDIPAIFDKIREHPAVIDIYEYDIPFAKRYLIDKGLVPMEGDEELKMLAFDIETLYHEGEEFAEGPILMISYADEEGARVITWKNVDLPYVDVVSTEREMIKRFLRVVKEKDPDVLITYNGDNFDFAYLKKRCEKLGINFALGRDGSEPKIQRMGDRFAVEVKGRIHFDLYPVIRRTINLPTYTLEAVYEAVFGQPKEKVYAEEITTAWETGENLERVARYSMEDAKVTYELGKEFLPMEAQLSRLIGQSLWDVSRSSTGNLVEWFLLRKAYERNELAPNKPDEKELARRRQSYEGGYVKEPERGLWENIVYLDFRSLYPSIIITHNVSPDTLNREGCKEYDVAPQVGHRFCKDFPGFIPSLLGDLLEERQKIKKKMKATIDPIERKLLDYRQRAIKILANSYYGYYGYARARWYCKECAESVTAWGREYITMTIKEIEEKYGFKVIYSDTDGFFATIPGADAETVKKKAMEFLKYINAKLPGALELEYEGFYKRGFFVTKKKYAVIDEEGKITTRGLEIVRRDWSEIAKETQARVLEALLKDGDVEKAVRIVKEVTEKLSKYEVPPEKLVIHEQITRDLKDYKATGPHVAVAKRLAARGVKIRPGTVISYIVLKGSGRIGDRAIPFDEFDPTKHKYDAEYYIENQVLPAVERILRAFGYRKEDLRYQKTRQVGLSAWLKPKGT

SEQ ID NO: 1523 - protein, 774 aa, synthetic construct
MILDTDYITEDGKPVIRIFKKENGEFKIEYDRTFERYFYALLKDDSAIEEVKKITAERHGTVVTVKRVEKVQKKFLGRPVEVWKLYFTHYQDIPAIRDKIREHPAVIDIYEYDIPFAKRYLIDKGLVPMEGDEELKMLAFDIETLYHEGEEFAEGPILMISYADEEGARVITWKNVDLPYVDVVSTEREMIKRFLRVVKEKDPDVLITYNGDNFDFAYLKKRCEKLGINFALGRDGSEPKIQRMGDRFAVEVKGRIHFDLYPVIRRTINLPTYTLEAVYEAVFGQPKEKVYAEEITTAWETGENLERVARYSMEDAKVTYELGKEFLPMEAQLSRLIGQSLWDVSRSSTGNLVEWFLLRKAYERNELAPNKPDEKELARRRQSYEGGYVKEPERGLWENIVYLDFRSLYPSIIITHNVSPDTLNREGCKEYDVAPQVGHRFCKDFPGFIPSLLGDLLEERQKIKKKMKATIDPIERKLLDYRQRAIKILANSYYGYYGYARARWYCKECAESVTAWGREYITMTIKEIEEKYGFKVIYSDTDGFFATIPGADAETVKKKAMEFLKYINAKLPGALELEYEGFYKRGFFVTKKKYAVIDEEGKITTRGLEIVRRDWSEIAKETQARVLEALLKDGDVEKAVRIVKEVTEKLSKYEVPPEKLVIHEQITRDLKDYKATGPHVAVAKRLAARGVKIRPGTVISYIVLKGSGRIGDRAIPFDEFDPTKHKYDAEYYIENQVLPAVERILRAFGYRKEDLRYQKTRQVGLSAWLKPKGT

SEQ ID NO: 1524 - protein, 774 aa, synthetic construct
MILDTDYITEDGKPVIRIFKKENGEFKIEYDRTFERYFYALLKDDSAIEEVKKITAERHGTVVTVKRVEKVQKKFLGRPVEVWKLYFTHPQDVPAIADKIREHPAVIDIYEYDIPFAKRYLIDKGLVPMEGDEELKMLAFDIETLYHEGEEFAEGPILMISYADEEGARVITWKNVDLPYVDVVSTEREMIKRFLRVVKEKDPDVLITYNGDNFDFAYLKKRCEKLGINFALGRDGSEPKIQRMGDRFAVEVKGRIHFDLYPVIRRTINLPTYTLEAVYEAVFGQPKEKVYAEEITTAWETGENLERVARYSMEDAKVTYELGKEFLPMEAQLSRLIGQSLWDVSRSSTGNLVEWFLLRKAYERNELAPNKPDEKELARRRQSYEGGYVKEPERGLWENIVYLDFRSLYPSIIITHNVSPDTLNREGCKEYDVAPQVGHRFCKDFPGFIPSLLGDLLEERQKIKKKMKATIDPIERKLLDYRQRAIKILANSYYGYYGYARARWYCKECAESVTAWGREYITMTIKEIEEKYGFKVIYSDTDGFFATIPGADAETVKKKAMEFLKYINAKLPGALELEYEGFYKRGFFVTKKKYAVIDEEGKITTRGLEIVRRDWSEIAKETQARVLEALLKDGDVEKAVRIVKEVTEKLSKYEVPPEKLVIHEQITRDLKDYKATGPHVAVAKRLAARGVKIRPGTVISYIVLKGSGRIGDRAIPFDEFDPTKHKYDAEYYIENQVLPAVERILRAFGYRKEDLRYQKTRQVGLSAWLKPKGT

SEQ ID NO: 1525 - protein, 774 aa, synthetic construct
MILDTDYITEDGKPVIRIFKKENGEFKIEYDRTFERYFYALLKDDSAIEEVKKITAERHGTVVTVKRVEKVQKKFLGRPVEVWKLYFTHPQDVPAIFDKIREHPAVIDIYEYDIPFAKRYLIDKGLVPMEGDEELKMLAFDIETLYHEGEEFAEGPILMISYADEEGARVITWKNVDLPYVDVVSTEREMIKRFLRVVKEKDPDVLITYNGDNFDFAYLKKRCEKLGINFALGRDGSEPKIQRMGDRFAVEVKGRIHFDLYPVIRRTINLPTYTLEAVYEAVFGQPKEKVYAEEITTAWETGENLERVARYSMEDAKVTYELGKEFLPMEAQLSRLIGQSLWDVSRSSTGNLVEWFLLRKAYERNELAPNKPDEKELARRRQSYEGGYVKEPERGLWENIVYLDFRSLYPSIIITHNVSPDTLNREGCKEYDVAPQVGHRFCKDFPGFIPSLLGDLLEERQKIKKKMKATIDPIERKLLDYRQRAIKILANSYYGYYGYARARWYCKECAESVTAWGREYITMTIKEIEEKYGFKVIYSDTDGFFATIPGADAETVKKKAMEFLKYINAKLPGALELEYEGFYKRGFFVTKKKYAVIDEEGKITTRGLEIVRRDWSEIAKETQARVLEALLKDGDVEKAVRIVKEVTEKLSKYEVPPEKLVIHEQITRDLKDYKATGPHVAVAKRLAARGVKIRPGTVISYIVLKGSGRIGDRAIPFDEFDPTKHKYDAEYYIENQVLPAVERILRAFGYRKEDLRYQKTRQVGLSAWLKPKGT

SEQ ID NO: 1526 - protein, 774 aa, synthetic construct
MILDTDYITEDGKPVIRIFKKENGEFKIEYDRTFERYFYALLKDDSAIEEVKKITAERHGTVVTVKRVEKVQKKFLGRPVEVWKLYFTHPQDVPAIWDKIREHPAVIDIYEYDIPFAKRYLIDKGLVPMEGDEELKMLAFDIETLYHEGEEFAEGPILMISYADEEGARVITWKNVDLPYVDVVSTEREMIKRFLRVVKEKDPDVLITYNGDNFDFAYLKKRCEKLGINFALGRDGSEPKIQRMGDRFAVEVKGRIHFDLYPVIRRTINLPTYTLEAVYEAVFGQPKEKVYAEEITTAWETGENLERVARYSMEDAKVTYELGKEFLPMEAQLSRLIGQSLWDVSRSSTGNLVEWFLLRKAYERNELAPNKPDEKELARRRQSYEGGYVKEPERGLWENIVYLDFRSLYPSIIITHNVSPDTLNREGCKEYDVAPQVGHRFCKDFPGFIPSLLGDLLEERQKIKKKMKATIDPIERKLLDYRQRAIKILANSYYGYYGYARARWYCKECAESVTAWGREYITMTIKEIEEKYGFKVIYSDTDGFFATIPGADAETVKKKAMEFLKYINAKLPGALELEYEGFYKRGFFVTKKKYAVIDEEGKITTRGLEIVRRDWSEIAKETQARVLEALLKDGDVEKAVRIVKEVTEKLSKYEVPPEKLVIHEQITRDLKDYKATGPHVAVAKRLAARGVKIRPGTVISYIVLKGSGRIGDRAIPFDEFDPTKHKYDAEYYIENQVLPAVERILRAFGYRKEDLRYQKTRQVGLSAWLKPKGT

SEQ ID NO: 1527 - protein, 774 aa, synthetic construct
MILDTDYITEDGKPVIRIFKKENGEFKIEYDRTFERYFYALLKDDSAIEEVKKITAERHGTVVTVKRVEKVQKKFLGRPVEVWKLYFTHPQDVPAIRDKIREHPAVIDIYEYDIPFAKQYLIDKGLVPMEGDEELKMLAFDIETLYHEGEEFAEGPILMISYADEEGARVITWKNVDLPYVDVVSTEREMIKRFLRVVKEKDPDVLITYNGDNFDFAYLKKRCEKLGINFALGRDGSEPKIQRMGDRFAVEVKGRIHFDLYPVIRRTINLPTYTLEAVYEAVFGQPKEKVYAEEITTAWETGENLERVARYSMEDAKVTYELGKEFLPMEAQLSRLIGQSLWDVSRSSTGNLVEWFLLRKAYERNELAPNKPDEKELARRRQSYEGGYVKEPERGLWENIVYLDFRSLYPSIIITHNVSPDTLNREGCKEYDVAPQVGHRFCKDFPGFIPSLLGDLLEERQKIKKKMKATIDPIERKLLDYRQRAIKILANSYYGYYGYARARWYCKECAESVTAWGREYITMTIKEIEEKYGFKVIYSDTDGFFATIPGADAETVKKKAMEFLKYINAKLPGALELEYEGFYKRGFFVTKKKYAVIDEEGKITTRGLEIVRRDWSEIAKETQARVLEALLKDGDVEKAVRIVKEVTEKLSKYEVPPEKLVIHEQITRDLKDYKATGPHVAVAKRLAARGVKIRPGTVISYIVLKGSGRIGDRAIPFDEFDPTKHKYDAEYYIENQVLPAVERILRAFGYRKEDLRYQKTRQVGLSAWLKPKGT

SEQ ID NO: 1528 - protein, 774 aa, synthetic construct
MILDTDYITEDGKPVIRIFKKENGEFKIEYDRTFERYFYALLKDDSAIEEVKKITAERHGTVVTVKRVEKVQKKFLGRPVEVWKLYFTHPQDEPAIRDKIREHPAVIDIYEYDIPFAKRYLIDKGLVPMEGDEELKMLAFDIETLYHEGEEFAEGPILMISYADEEGARVITWKNVDLPYVDVVSTEREMIKRFLRVVKEKDPDVLITYNGDNFDFAYLKKRCEKLGINFALGRDGSEPKIQRMGDRFAVEVKGRIHFDLYPVIRRTINLPTYTLEAVYEAVFGQPKEKVYAEEITTAWETGENLERVARYSMEDAKVTYELGKEFLPMEAQLSRLIGQSLWDVSRSSTGNLVEWFLLRKAYERNELAPNKPDEKELARRRQSYEGGYVKEPERGLWENIVYLDFRSLYPSIIITHNVSPDTLNREGCKEYDVAPQVGHRFCKDFPGFIPSLLGDLLEERQKIKKKMKATIDPIERKLLDYRQRAIKILANSYYGYYGYARARWYCKECAESVTAWGREYITMTIKEIEEKYGFKVIYSDTDGFFATIPGADAETVKKKAMEFLKYINAKLPGALELEYEGFYKRGFFVTKKKYAVIDEEGKITTRGLEIVRRDWSEIAKETQARVLEALLKDGDVEKAVRIVKEVTEKLSKYEVPPEKLVIHEQITRDLKDYKATGPHVAVAKRLAARGVKIRPGTVISYIVLKGSGRIGDRAIPFDEFDPTKHKYDAEYYIENQVLPAVERILRAFGYRKEDLRYQKTRQVGLSAWLKPKGT

SEQ ID NO: 1529 - protein, 774 aa, synthetic construct
MILDTDYITEDGKPVIRIFKKENGEFKIEYDRTFERYFYALLKDDSAIEEVKKITAERHGTVVTVKRVEKVQKKFLGRPVEVWKLYFTHPQDIPAIRDKIREHPAVIDIYEYDIPFAKRYLIDKGLVPMEGDEELKMLAFDIETLYHEGEEFAEGPILMISYADEEGARVITWKNVDLPYVDVVSTEREMIKRFLRVVKEKDPDVLITYNGDNFDFAYLKKRCEKLGINFALGRDGSEPKIQRMGDRFAVEVKGRIHFDLYPVIRRTINLPTYTLEAVYEAVFGQPKEKVYAEEITTAWETGENLERVARYSMEDAKVTYELGKEFLPMEAQLSRLIGQSLWDVSRSSTGNLVEWFLLRKAYERNELAPNKPDEKELARRRQSYEGGYVKEPERGLWENIVYLDFRSLYPSIIITHNVSPDTLNREGCKEYDVAPQVGHRFCKDFPGFIPSLLGDLLEERQKIKKKMKATIDPIERKLLDYRQRAIKILANSYYGYYGYARARWYCKECAESVTAWGREYITMTIKEIEEKYGFKVIYSDTDGFFATIPGADAETVKKKAMEFLKYINAKLPGALELEYEGFYKRGFFVTKKKYAVIDEEGKITTRGLEIVRRDWSEIAKETQARVLEALLKDGDVEKAVRIVKEVTEKLSKYEVPPEKLVIHEQITRDLKDYKATGPHVAVAKRLAARGVKIRPGTVISYIVLKGSGRIGDRAIPFDEFDPTKHKYDAEYYIENQVLPAVERILRAFGYRKEDLRYQKTRQVGLSAWLKPKGT

SEQ ID NO: 1530 - protein, 774 aa, synthetic construct
MILDTDYITEDGKPVIRIFKKENGEFKIEYDRTFERYFYALLKDDSAIEEVKKITAERHGTVVTVKRVEKVQKKFLGRPVEVWKLYFTHPQDIPAIADKIREHPAVIDIYEYDIPFAKRYLIDKGLVPMEGDEELKMLAFDIETLYHEGEEFAEGPILMISYADEEGARVITWKNVDLPYVDVVSTEREMIKRFLRVVKEKDPDVLITYNGDNFDFAYLKKRCEKLGINFALGRDGSEPKIQRMGDRFAVEVKGRIHFDLYPVIRRTINLPTYTLEAVYEAVFGQPKEKVYAEEITTAWETGENLERVARYSMEDAKVTYELGKEFLPMEAQLSRLIGQSLWDVSRSSTGNLVEWFLLRKAYERNELAPNKPDEKELARRRQSYEGGYVKEPERGLWENIVYLDFRSLYPSIIITHNVSPDTLNREGCKEYDVAPQVGHRFCKDFPGFIPSLLGDLLEERQKIKKKMKATIDPIERKLLDYRQRAIKILANSYYGYYGYARARWYCKECAESVTAWGREYITMTIKEIEEKYGFKVIYSDTDGFFATIPGADAETVKKKAMEFLKYINAKLPGALELEYEGFYKRGFFVTKKKYAVIDEEGKITTRGLEIVRRDWSEIAKETQARVLEALLKDGDVEKAVRIVKEVTEKLSKYEVPPEKLVIHEQITRDLKDYKATGPHVAVAKRLAARGVKIRPGTVISYIVLKGSGRIGDRAIPFDEFDPTKHKYDAEYYIENQVLPAVERILRAFGYRKEDLRYQKTRQVGLSAWLKPKGT

SEQ ID NO: 1531 - protein, 774 aa, synthetic construct
MILDTDYITEDGKPVIRIFKKENGEFKIEYDRTFERYFYALLKDDSAIEEVKKITAERHGTVVTVKRVEKVQKKFLGRPVEVWKLYFTHPQDIPAIFDKIREHPAVIDIYEYDIPFAKRYLIDKGLVPMEGDEELKMLAFDIETLYHEGEEFAEGPILMISYADEEGARVITWKNVDLPYVDVVSTEREMIKRFLRVVKEKDPDVLITYNGDNFDFAYLKKRCEKLGINFALGRDGSEPKIQRMGDRFAVEVKGRIHFDLYPVIRRTINLPTYTLEAVYEAVFGQPKEKVYAEEITTAWETGENLERVARYSMEDAKVTYELGKEFLPMEAQLSRLIGQSLWDVSRSSTGNLVEWFLLRKAYERNELAPNKPDEKELARRRQSYEGGYVKEPERGLWENIVYLDFRSLYPSIIITHNVSPDTLNREGCKEYDVAPQVGHRFCKDFPGFIPSLLGDLLEERQKIKKKMKATIDPIERKLLDYRQRAIKILANSYYGYYGYARARWYCKECAESVTAWGREYITMTIKEIEEKYGFKVIYSDTDGFFATIPGADAETVKKKAMEFLKYINAKLPGALELEYEGFYKRGFFVTKKKYAVIDEEGKITTRGLEIVRRDWSEIAKETQARVLEALLKDGDVEKAVRIVKEVTEKLSKYEVPPEKLVIHEQITRDLKDYKATGPHVAVAKRLAARGVKIRPGTVISYIVLKGSGRIGDRAIPFDEFDPTKHKYDAEYYIENQVLPAVERILRAFGYRKEDLRYQKTRQVGLSAWLKPKGT

SEQ ID NO: 1532 - protein, 774 aa, synthetic construct
MILDTDYITEDGKPVIRIFKKENGEFKIEYDRTFERYFYALLKDDSAIEEVKKITAERHGTVVTVKRVEKVQKKFLGRPVEVWKLYFTHPQDIPAIHDKIREHPAVIDIYEYDIPFAKRYLIDKGLVPMEGDEELKMLAFDIETLYHEGEEFAEGPILMISYADEEGARVITWKNVDLPYVDVVSTEREMIKRFLRVVKEKDPDVLITYNGDNFDFAYLKKRCEKLGINFALGRDGSEPKIQRMGDRFAVEVKGRIHFDLYPVIRRTINLPTYTLEAVYEAVFGQPKEKVYAEEITTAWETGENLERVARYSMEDAKVTYELGKEFLPMEAQLSRLIGQSLWDVSRSSTGNLVEWFLLRKAYERNELAPNKPDEKELARRRQSYEGGYVKEPERGLWENIVYLDFRSLYPSIIITHNVSPDTLNREGCKEYDVAPQVGHRFCKDFPGFIPSLLGDLLEERQKIKKKMKATIDPIERKLLDYRQRAIKILANSYYGYYGYARARWYCKECAESVTAWGREYITMTIKEIEEKYGFKVIYSDTDGFFATIPGADAETVKKKAMEFLKYINAKLPGALELEYEGFYKRGFFVTKKKYAVIDEEGKITTRGLEIVRRDWSEIAKETQARVLEALLKDGDVEKAVRIVKEVTEKLSKYEVPPEKLVIHEQITRDLKDYKATGPHVAVAKRLAARGVKIRPGTVISYIVLKGSGRIGDRAIPFDEFDPTKHKYDAEYYIENQVLPAVERILRAFGYRKEDLRYQKTRQVGLSAWLKPKGT

SEQ ID NO: 1533 - protein, 774 aa, synthetic construct
MILDTDYITEDGKPVIRIFKKENGEFKIEYDRTFERYFYALLKDDSAIEEVKKITAERHGTVVTVKRVEKVQKKFLGRPVEVWKLYFTHPQDIPAIWDKIREHPAVIDIYEYDIPFAKRYLIDKGLVPMEGDEELKMLAFDIETLYHEGEEFAEGPILMISYADEEGARVITWKNVDLPYVDVVSTEREMIKRFLRVVKEKDPDVLITYNGDNFDFAYLKKRCEKLGINFALGRDGSEPKIQRMGDRFAVEVKGRIHFDLYPVIRRTINLPTYTLEAVYEAVFGQPKEKVYAEEITTAWETGENLERVARYSMEDAKVTYELGKEFLPMEAQLSRLIGQSLWDVSRSSTGNLVEWFLLRKAYERNELAPNKPDEKELARRRQSYEGGYVKEPERGLWENIVYLDFRSLYPSIIITHNVSPDTLNREGCKEYDVAPQVGHRFCKDFPGFIPSLLGDLLEERQKIKKKMKATIDPIERKLLDYRQRAIKILANSYYGYYGYARARWYCKECAESVTAWGREYITMTIKEIEEKYGFKVIYSDTDGFFATIPGADAETVKKKAMEFLKYINAKLPGALELEYEGFYKRGFFVTKKKYAVIDEEGKITTRGLEIVRRDWSEIAKETQARVLEALLKDGDVEKAVRIVKEVTEKLSKYEVPPEKLVIHEQITRDLKDYKATGPHVAVAKRLAARGVKIRPGTVISYIVLKGSGRIGDRAIPFDEFDPTKHKYDAEYYIENQVLPAVERILRAFGYRKEDLRYQKTRQVGLSAWLKPKGT

SEQ ID NO: 1534 - protein, 774 aa, synthetic construct
MILDTDYITEDGKPVIRIFKKENGEFKIEYDRTFESYFYALLKDDSAIEEVKKITAERHGTVVTVKRVEKVQKKFLGRPVEVWKLYFTHPQDVPAIRDKIREHPAVIDIYEYDIPFAKRYLIDKGLVPMEGDEELKMLAFDIETLYHEGEEFAEGPILMISYADEEGARVITWKNVDLPYVDVVSTEREMIKRFLRVVKEKDPDVLITYNGDNFDFAYLKKRCEKLGINFALGRDGSEPKIQRMGDRFAVEVKGRIHFDLYPVIRRTINLPTYTLEAVYEAVFGQPKEKVYAEEITTAWETGENLERVARYSMEDAKVTYELGKEFLPMEAQLSRLIGQSLWDVSRSSTGNLVEWFLLRKAYERNELAPNKPDEKELARRRQSYEGGYVKEPERGLWENIVYLDFRSLYPSIIITHNVSPDTLNREGCKEYDVAPQVGHRFCKDFPGFIPSLLGDLLEERQKIKKKMKATIDPIERKLLDYRQRAIKILANSYYGYYGYARARWYCKECAESVTAWGREYITMTIKEIEEKYGFKVIYSDTDGFFATIPGADAETVKKKAMEFLKYINAKLPGALELEYEGFYKRGFFVTKKKYAVIDEEGKITTRGLEIVRRDWSEIAKETQARVLEALLKDGDVEKAVRIVKEVTEKLSKYEVPPEKLVIHEQITRDLKDYKATGPHVAVAKRLAARGVKIRPGTVISYIVLKGSGRIGDRAIPFDEFDPTKHKYDAEYYIENQVLPAVERILRAFGYRKEDLRYQKTRQVGLSAWLKPKGT

SEQ ID NO: 1535 - protein, 774 aa, synthetic construct
MILDTDYITEDGKPVIRIFKKENGEFKIEYDRTFESYFYALLKDDSAIEEVKKITAERHGTVVTVKRVEKVQKKFLGRPVEVWKLYFTHFQDVPAIRDKIREHPAVIDIYEYDIPFAKRYLIDKGLVPMEGDEELKMLAFDIETLYHEGEEFAEGPILMISYADEEGARVITWKNVDLPYVDVVSTEREMIKRFLRVVKEKDPDVLITYNGDNFDFAYLKKRCEKLGINFALGRDGSEPKIQRMGDRFAVEVKGRIHFDLYPVIRRTINLPTYTLEAVYEAVFGQPKEKVYAEEITTAWETGENLERVARYSMEDAKVTYELGKEFLPMEAQLSRLIGQSLWDVSRSSTGNLVEWFLLRKAYERNELAPNKPDEKELARRRQSYEGGYVKEPERGLWENIVYLDFRSLYPSIIITHNVSPDTLNREGCKEYDVAPQVGHRFCKDFPGFIPSLLGDLLEERQKIKKKMKATIDPIERKLLDYRQRAIKILANSYYGYYGYARARWYCKECAESVTAWGREYITMTIKEIEEKYGFKVIYSDTDGFFATIPGADAETVKKKAMEFLKYINAKLPGALELEYEGFYKRGFFVTKKKYAVIDEEGKITTRGLEIVRRDWSEIAKETQARVLEALLKDGDVEKAVRIVKEVTEKLSKYEVPPEKLVIHEQITRDLKDYKATGPHVAVAKRLAARGVKIRPGTVISYIVLKGSGRIGDRAIPFDEFDPTKHKYDAEYYIENQVLPAVERILRAFGYRKEDLRYQKTRQVGLSAWLKPKGT

SEQ ID NO: 1536 - protein, 774 aa, synthetic construct
MILDTDYITEDGKPVIRIFKKENGEFKIEYDRTFESYFYALLKDDSAIEEVKKITAERHGTVVTVKRVEKVQKKFLGRPVEVWKLYFTHFQDIPAIRDKIREHPAVIDIYEYDIPFAKRYLIDKGLVPMEGDEELKMLAFDIETLYHEGEEFAEGPILMISYADEEGARVITWKNVDLPYVDVVSTEREMIKRFLRVVKEKDPDVLITYNGDNFDFAYLKKRCEKLGINFALGRDGSEPKIQRMGDRFAVEVKGRIHFDLYPVIRRTINLPTYTLEAVYEAVFGQPKEKVYAEEITTAWETGENLERVARYSMEDAKVTYELGKEFLPMEAQLSRLIGQSLWDVSRSSTGNLVEWFLLRKAYERNELAPNKPDEKELARRRQSYEGGYVKEPERGLWENIVYLDFRSLYPSIIITHNVSPDTLNREGCKEYDVAPQVGHRFCKDFPGFIPSLLGDLLEERQKIKKKMKATIDPIERKLLDYRQRAIKILANSYYGYYGYARARWYCKECAESVTAWGREYITMTIKEIEEKYGFKVIYSDTDGFFATIPGADAETVKKKAMEFLKYINAKLPGALELEYEGFYKRGFFVTKKKYAVIDEEGKITTRGLEIVRRDWSEIAKETQARVLEALLKDGDVEKAVRIVKEVTEKLSKYEVPPEKLVIHEQITRDLKDYKATGPHVAVAKRLAARGVKIRPGTVISYIVLKGSGRIGDRAIPFDEFDPTKHKYDAEYYIENQVLPAVERILRAFGYRKEDLRYQKTRQVGLSAWLKPKGT

SEQ ID NO: 1537 - protein, 774 aa, synthetic construct
MILDTDYITEDGKPVIRIFKKENGEFKIEYDRTFESYFYALLKDDSAIEEVKKITAERHGTVVTVKRVEKVQKKFLGRPVEVWKLYFTHFQDIPAIADKIREHPAVIDIYEYDIPFAKRYLIDKGLVPMEGDEELKMLAFDIETLYHEGEEFAEGPILMISYADEEGARVITWKNVDLPYVDVVSTEREMIKRFLRVVKEKDPDVLITYNGDNFDFAYLKKRCEKLGINFALGRDGSEPKIQRMGDRFAVEVKGRIHFDLYPVIRRTINLPTYTLEAVYEAVFGQPKEKVYAEEITTAWETGENLERVARYSMEDAKVTYELGKEFLPMEAQLSRLIGQSLWDVSRSSTGNLVEWFLLRKAYERNELAPNKPDEKELARRRQSYEGGYVKEPERGLWENIVYLDFRSLYPSIIITHNVSPDTLNREGCKEYDVAPQVGHRFCKDFPGFIPSLLGDLLEERQKIKKKMKATIDPIERKLLDYRQRAIKILANSYYGYYGYARARWYCKECAESVTAWGREYITMTIKEIEEKYGFKVIYSDTDGFFATIPGADAETVKKKAMEFLKYINAKLPGALELEYEGFYKRGFFVTKKKYAVIDEEGKITTRGLEIVRRDWSEIAKETQARVLEALLKDGDVEKAVRIVKEVTEKLSKYEVPPEKLVIHEQITRDLKDYKATGPHVAVAKRLAARGVKIRPGTVISYIVLKGSGRIGDRAIPFDEFDPTKHKYDAEYYIENQVLPAVERILRAFGYRKEDLRYQKTRQVGLSAWLKPKGT

SEQ ID NO: 1538 - protein, 774 aa, synthetic construct
MILDTDYITEDGKPVIRIFKKENGEFKIEYDRTFESYFYALLKDDSAIEEVKKITAERHGTVVTVKRVEKVQKKFLGRPVEVWKLYFTHFQDIPAIFDKIREHPAVIDIYEYDIPFAKRYLIDKGLVPMEGDEELKMLAFDIETLYHEGEEFAEGPILMISYADEEGARVITWKNVDLPYVDVVSTEREMIKRFLRVVKEKDPDVLITYNGDNFDFAYLKKRCEKLGINFALGRDGSEPKIQRMGDRFAVEVKGRIHFDLYPVIRRTINLPTYTLEAVYEAVFGQPKEKVYAEEITTAWETGENLERVARYSMEDAKVTYELGKEFLPMEAQLSRLIGQSLWDVSRSSTGNLVEWFLLRKAYERNELAPNKPDEKELARRRQSYEGGYVKEPERGLWENIVYLDFRSLYPSIIITHNVSPDTLNREGCKEYDVAPQVGHRFCKDFPGFIPSLLGDLLEERQKIKKKMKATIDPIERKLLDYRQRAIKILANSYYGYYGYARARWYCKECAESVTAWGREYITMTIKEIEEKYGFKVIYSDTDGFFATIPGADAETVKKKAMEFLKYINAKLPGALELEYEGFYKRGFFVTKKKYAVIDEEGKITTRGLEIVRRDWSEIAKETQARVLEALLKDGDVEKAVRIVKEVTEKLSKYEVPPEKLVIHEQITRDLKDYKATGPHVAVAKRLAARGVKIRPGTVISYIVLKGSGRIGDRAIPFDEFDPTKHKYDAEYYIENQVLPAVERILRAFGYRKEDLRYQKTRQVGLSAWLKPKGT

SEQ ID NO: 1539 - protein, 774 aa, synthetic construct
MILDTDYITEDGKPVIRIFKKENGEFKIEYDRTFESYFYALLKDDSAIEEVKKITAERHGTVVTVKRVEKVQKKFLGRPVEVWKLYFTHFQDIPAIHDKIREHPAVIDIYEYDIPFAKRYLIDKGLVPMEGDEELKMLAFDIETLYHEGEEFAEGPILMISYADEEGARVITWKNVDLPYVDVVSTEREMIKRFLRVVKEKDPDVLITYNGDNFDFAYLKKRCEKLGINFALGRDGSEPKIQRMGDRFAVEVKGRIHFDLYPVIRRTINLPTYTLEAVYEAVFGQPKEKVYAEEITTAWETGENLERVARYSMEDAKVTYELGKEFLPMEAQLSRLIGQSLWDVSRSSTGNLVEWFLLRKAYERNELAPNKPDEKELARRRQSYEGGYVKEPERGLWENIVYLDFRSLYPSIIITHNVSPDTLNREGCKEYDVAPQVGHRFCKDFPGFIPSLLGDLLEERQKIKKKMKATIDPIERKLLDYRQRAIKILANSYYGYYGYARARWYCKECAESVTAWGREYITMTIKEIEEKYGFKVIYSDTDGFFATIPGADAETVKKKAMEFLKYINAKLPGALELEYEGFYKRGFFVTKKKYAVIDEEGKITTRGLEIVRRDWSEIAKETQARVLEALLKDGDVEKAVRIVKEVTEKLSKYEVPPEKLVIHEQITRDLKDYKATGPHVAVAKRLAARGVKIRPGTVISYIVLKGSGRIGDRAIPFDEFDPTKHKYDAEYYIENQVLPAVERILRAFGYRKEDLRYQKTRQVGLSAWLKPKGT

SEQ ID NO: 1540 - protein, 774 aa, synthetic construct
MILDTDYITEDGKPVIRIFKKENGEFKIEYDRTFESYFYALLKDDSAIEEVKKITAERHGTVVTVKRVEKVQKKFLGRPVEVWKLYFTHFQDIPAIWDKIREHPAVIDIYEYDIPFAKRYLIDKGLVPMEGDEELKMLAFDIETLYHEGEEFAEGPILMISYADEEGARVITWKNVDLPYVDVVSTEREMIKRFLRVVKEKDPDVLITYNGDNFDFAYLKKRCEKLGINFALGRDGSEPKIQRMGDRFAVEVKGRIHFDLYPVIRRTINLPTYTLEAVYEAVFGQPKEKVYAEEITTAWETGENLERVARYSMEDAKVTYELGKEFLPMEAQLSRLIGQSLWDVSRSSTGNLVEWFLLRKAYERNELAPNKPDEKELARRRQSYEGGYVKEPERGLWENIVYLDFRSLYPSIIITHNVSPDTLNREGCKEYDVAPQVGHRFCKDFPGFIPSLLGDLLEERQKIKKKMKATIDPIERKLLDYRQRAIKILANSYYGYYGYARARWYCKECAESVTAWGREYITMTIKEIEEKYGFKVIYSDTDGFFATIPGADAETVKKKAMEFLKYINAKLPGALELEYEGFYKRGFFVTKKKYAVIDEEGKITTRGLEIVRRDWSEIAKETQARVLEALLKDGDVEKAVRIVKEVTEKLSKYEVPPEKLVIHEQITRDLKDYKATGPHVAVAKRLAARGVKIRPGTVISYIVLKGSGRIGDRAIPFDEFDPTKHKYDAEYYIENQVLPAVERILRAFGYRKEDLRYQKTRQVGLSAWLKPKGT

SEQ ID NO: 1541 - protein, 774 aa, synthetic construct
MILDTDYITEDGKPVIRIFKKENGEFKIEYDRTFESYFYALLKDDSAIEEVKKITAERHGTVVTVKRVEKVQKKFLGRPVEVWKLYFTHIQDVPAIRDKIREHPAVIDIYEYDIPFAKRYLIDKGLVPMEGDEELKMLAFDIETLYHEGEEFAEGPILMISYADEEGARVITWKNVDLPYVDVVSTEREMIKRFLRVVKEKDPDVLITYNGDNFDFAYLKKRCEKLGINFALGRDGSEPKIQRMGDRFAVEVKGRIHFDLYPVIRRTINLPTYTLEAVYEAVFGQPKEKVYAEEITTAWETGENLERVARYSMEDAKVTYELGKEFLPMEAQLSRLIGQSLWDVSRSSTGNLVEWFLLRKAYERNELAPNKPDEKELARRRQSYEGGYVKEPERGLWENIVYLDFRSLYPSIIITHNVSPDTLNREGCKEYDVAPQVGHRFCKDFPGFIPSLLGDLLEERQKIKKKMKATIDPIERKLLDYRQRAIKILANSYYGYYGYARARWYCKECAESVTAWGREYITMTIKEIEEKYGFKVIYSDTDGFFATIPGADAETVKKKAMEFLKYINAKLPGALELEYEGFYKRGFFVTKKKYAVIDEEGKITTRGLEIVRRDWSEIAKETQARVLEALLKDGDVEKAVRIVKEVTEKLSKYEVPPEKLVIHEQITRDLKDYKATGPHVAVAKRLAARGVKIRPGTVISYIVLKGSGRIGDRAIPFDEFDPTKHKYDAEYYIENQVLPAVERILRAFGYRKEDLRYQKTRQVGLSAWLKPKGT

SEQ ID NO: 1542 - protein, 774 aa, synthetic construct
MILDTDYITEDGKPVIRIFKKENGEFKIEYDRTFESYFYALLKDDSAIEEVKKITAERHGTVVTVKRVEKVQKKFLGRPVEVWKLYFTHIQDVPAIHDKIREHPAVIDIYEYDIPFAKRYLIDKGLVPMEGDEELKMLAFDIETLYHEGEEFAEGPILMISYADEEGARVITWKNVDLPYVDVVSTEREMIKRFLRVVKEKDPDVLITYNGDNFDFAYLKKRCEKLGINFALGRDGSEPKIQRMGDRFAVEVKGRIHFDLYPVIRRTINLPTYTLEAVYEAVFGQPKEKVYAEEITTAWETGENLERVARYSMEDAKVTYELGKEFLPMEAQLSRLIGQSLWDVSRSSTGNLVEWFLLRKAYERNELAPNKPDEKELARRRQSYEGGYVKEPERGLWENIVYLDFRSLYPSIIITHNVSPDTLNREGCKEYDVAPQVGHRFCKDFPGFIPSLLGDLLEERQKIKKKMKATIDPIERKLLDYRQRAIKILANSYYGYYGYARARWYCKECAESVTAWGREYITMTIKEIEEKYGFKVIYSDTDGFFATIPGADAETVKKKAMEFLKYINAKLPGALELEYEGFYKRGFFVTKKKYAVIDEEGKITTRGLEIVRRDWSEIAKETQARVLEALLKDGDVEKAVRIVKEVTEKLSKYEVPPEKLVIHEQITRDLKDYKATGPHVAVAKRLAARGVKIRPGTVISYIVLKGSGRIGDRAIPFDEFDPTKHKYDAEYYIENQVLPAVERILRAFGYRKEDLRYQKTRQVGLSAWLKPKGT

SEQ ID NO: 1543 - protein, 774 aa, synthetic construct
MILDTDYITEDGKPVIRIFKKENGEFKIEYDRTFESYFYALLKDDSAIEEVKKITAERHGTVVTVKRVEKVQKKFLGRPVEVWKLYFTHIQDIPAIRDKIREHPAVIDIYEYDIPFAKRYLIDKGLVPMEGDEELKMLAFDIETLYHEGEEFAEGPILMISYADEEGARVITWKNVDLPYVDVVSTEREMIKRFLRVVKEKDPDVLITYNGDNFDFAYLKKRCEKLGINFALGRDGSEPKIQRMGDRFAVEVKGRIHFDLYPVIRRTINLPTYTLEAVYEAVFGQPKEKVYAEEITTAWETGENLERVARYSMEDAKVTYELGKEFLPMEAQLSRLIGQSLWDVSRSSTGNLVEWFLLRKAYERNELAPNKPDEKELARRRQSYEGGYVKEPERGLWENIVYLDFRSLYPSIIITHNVSPDTLNREGCKEYDVAPQVGHRFCKDFPGFIPSLLGDLLEERQKIKKKMKATIDPIERKLLDYRQRAIKILANSYYGYYGYARARWYCKECAESVTAWGREYITMTIKEIEEKYGFKVIYSDTDGFFATIPGADAETVKKKAMEFLKYINAKLPGALELEYEGFYKRGFFVTKKKYAVIDEEGKITTRGLEIVRRDWSEIAKETQARVLEALLKDGDVEKAVRIVKEVTEKLSKYEVPPEKLVIHEQITRDLKDYKATGPHVAVAKRLAARGVKIRPGTVISYIVLKGSGRIGDRAIPFDEFDPTKHKYDAEYYIENQVLPAVERILRAFGYRKEDLRYQKTRQVGLSAWLKPKGT

SEQ ID NO: 1544 - protein, 774 aa, synthetic construct
MILDTDYITEDGKPVIRIFKKENGEFKIEYDRTFESYFYALLKDDSAIEEVKKITAERHGTVVTVKRVEKVQKKFLGRPVEVWKLYFTHIQDIPAIFDKIREHPAVIDIYEYDIPFAKRYLIDKGLVPMEGDEELKMLAFDIETLYHEGEEFAEGPILMISYADEEGARVITWKNVDLPYVDVVSTEREMIKRFLRVVKEKDPDVLITYNGDNFDFAYLKKRCEKLGINFALGRDGSEPKIQRMGDRFAVEVKGRIHFDLYPVIRRTINLPTYTLEAVYEAVFGQPKEKVYAEEITTAWETGENLERVARYSMEDAKVTYELGKEFLPMEAQLSRLIGQSLWDVSRSSTGNLVEWFLLRKAYERNELAPNKPDEKELARRRQSYEGGYVKEPERGLWENIVYLDFRSLYPSIIITHNVSPDTLNREGCKEYDVAPQVGHRFCKDFPGFIPSLLGDLLEERQKIKKKMKATIDPIERKLLDYRQRAIKILANSYYGYYGYARARWYCKECAESVTAWGREYITMTIKEIEEKYGFKVIYSDTDGFFATIPGADAETVKKKAMEFLKYINAKLPGALELEYEGFYKRGFFVTKKKYAVIDEEGKITTRGLEIVRRDWSEIAKETQARVLEALLKDGDVEKAVRIVKEVTEKLSKYEVPPEKLVIHEQITRDLKDYKATGPHVAVAKRLAARGVKIRPGTVISYIVLKGSGRIGDRAIPFDEFDPTKHKYDAEYYIENQVLPAVERILRAFGYRKEDLRYQKTRQVGLSAWLKPKGT

SEQ ID NO: 1545 - protein, 774 aa, synthetic construct
MILDTDYITEDGKPVIRIFKKENGEFKIEYDRTFESYFYALLKDDSAIEEVKKITAERHGTVVTVKRVEKVQKKFLGRPVEVWKLYFTHIQDQPAIRDKIREHPAVIDIYEYDIPFAKRYLIDKGLVPMEGDEELKMLAFDIETLYHEGEEFAEGPILMISYADEEGARVITWKNVDLPYVDVVSTEREMIKRFLRVVKEKDPDVLITYNGDNFDFAYLKKRCEKLGINFALGRDGSEPKIQRMGDRFAVEVKGRIHFDLYPVIRRTINLPTYTLEAVYEAVFGQPKEKVYAEEITTAWETGENLERVARYSMEDAKVTYELGKEFLPMEAQLSRLIGQSLWDVSRSSTGNLVEWFLLRKAYERNELAPNKPDEKELARRRQSYEGGYVKEPERGLWENIVYLDFRSLYPSIIITHNVSPDTLNREGCKEYDVAPQVGHRFCKDFPGFIPSLLGDLLEERQKIKKKMKATIDPIERKLLDYRQRAIKILANSYYGYYGYARARWYCKECAESVTAWGREYITMTIKEIEEKYGFKVIYSDTDGFFATIPGADAETVKKKAMEFLKYINAKLPGALELEYEGFYKRGFFVTKKKYAVIDEEGKITTRGLEIVRRDWSEIAKETQARVLEALLKDGDVEKAVRIVKEVTEKLSKYEVPPEKLVIHEQITRDLKDYKATGPHVAVAKRLAARGVKIRPGTVISYIVLKGSGRIGDRAIPFDEFDPTKHKYDAEYYIENQVLPAVERILRAFGYRKEDLRYQKTRQVGLSAWLKPKGT

SEQ ID NO: 1546 - protein, 774 aa, synthetic construct
MILDTDYITEDGKPVIRIFKKENGEFKIEYDRTFESYFYALLKDDSAIEEVKKITAERHGTVVTVKRVEKVQKKFLGRPVEVWKLYFTHIQDRPAIRDKIREHPAVIDIYEYDIPFAKRYLIDKGLVPMEGDEELKMLAFDIETLYHEGEEFAEGPILMISYADEEGARVITWKNVDLPYVDVVSTEREMIKRFLRVVKEKDPDVLITYNGDNFDFAYLKKRCEKLGINFALGRDGSEPKIQRMGDRFAVEVKGRIHFDLYPVIRRTINLPTYTLEAVYEAVFGQPKEKVYAEEITTAWETGENLERVARYSMEDAKVTYELGKEFLPMEAQLSRLIGQSLWDVSRSSTGNLVEWFLLRKAYERNELAPNKPDEKELARRRQSYEGGYVKEPERGLWENIVYLDFRSLYPSIIITHNVSPDTLNREGCKEYDVAPQVGHRFCKDFPGFIPSLLGDLLEERQKIKKKMKATIDPIERKLLDYRQRAIKILANSYYGYYGYARARWYCKECAESVTAWGREYITMTIKEIEEKYGFKVIYSDTDGFFATIPGADAETVKKKAMEFLKYINAKLPGALELEYEGFYKRGFFVTKKKYAVIDEEGKITTRGLEIVRRDWSEIAKETQARVLEALLKDGDVEKAVRIVKEVTEKLSKYEVPPEKLVIHEQITRDLKDYKATGPHVAVAKRLAARGVKIRPGTVISYIVLKGSGRIGDRAIPFDEFDPTKHKYDAEYYIENQVLPAVERILRAFGYRKEDLRYQKTRQVGLSAWLKPKGT

SEQ ID NO: 1547 - protein, 774 aa, synthetic construct
MILDTDYITEDGKPVIRIFKKENGEFKIEYDRTFESYFYALLKDDSAIEEVKKITAERHGTVVTVKRVEKVQKKFLGRPVEVWKLYFTHSQDRPAIFDKIREHPAVIDIYEYDIPFAKRYLIDKGLVPMEGDEELKMLAFDIETLYHEGEEFAEGPILMISYADEEGARVITWKNVDLPYVDVVSTEREMIKRFLRVVKEKDPDVLITYNGDNFDFAYLKKRCEKLGINFALGRDGSEPKIQRMGDRFAVEVKGRIHFDLYPVIRRTINLPTYTLEAVYEAVFGQPKEKVYAEEITTAWETGENLERVARYSMEDAKVTYELGKEFLPMEAQLSRLIGQSLWDVSRSSTGNLVEWFLLRKAYERNELAPNKPDEKELARRRQSYEGGYVKEPERGLWENIVYLDFRSLYPSIIITHNVSPDTLNREGCKEYDVAPQVGHRFCKDFPGFIPSLLGDLLEERQKIKKKMKATIDPIERKLLDYRQRAIKILANSYYGYYGYARARWYCKECAESVTAWGREYITMTIKEIEEKYGFKVIYSDTDGFFATIPGADAETVKKKAMEFLKYINAKLPGALELEYEGFYKRGFFVTKKKYAVIDEEGKITTRGLEIVRRDWSEIAKETQARVLEALLKDGDVEKAVRIVKEVTEKLSKYEVPPEKLVIHEQITRDLKDYKATGPHVAVAKRLAARGVKIRPGTVISYIVLKGSGRIGDRAIPFDEFDPTKHKYDAEYYIENQVLPAVERILRAFGYRKEDLRYQKTRQVGLSAWLKPKGT

SEQ ID NO: 1548 - protein, 774 aa, synthetic construct
MILDTDYITEDGKPVIRIFKKENGEFKIEYDRTFESYFYALLKDDSAIEEVKKITAERHGTVVTVKRVEKVQKKFLGRPVEVWKLYFTHWQDVPAIRDKIREHPAVIDIYEYDIPFAKRYLIDKGLVPMEGDEELKMLAFDIETLYHEGEEFAEGPILMISYADEEGARVITWKNVDLPYVDVVSTEREMIKRFLRVVKEKDPDVLITYNGDNFDFAYLKKRCEKLGINFALGRDGSEPKIQRMGDRFAVEVKGRIHFDLYPVIRRTINLPTYTLEAVYEAVFGQPKEKVYAEEITTAWETGENLERVARYSMEDAKVTYELGKEFLPMEAQLSRLIGQSLWDVSRSSTGNLVEWFLLRKAYERNELAPNKPDEKELARRRQSYEGGYVKEPERGLWENIVYLDFRSLYPSIIITHNVSPDTLNREGCKEYDVAPQVGHRFCKDFPGFIPSLLGDLLEERQKIKKKMKATIDPIERKLLDYRQRAIKILANSYYGYYGYARARWYCKECAESVTAWGREYITMTIKEIEEKYGFKVIYSDTDGFFATIPGADAETVKKKAMEFLKYINAKLPGALELEYEGFYKRGFFVTKKKYAVIDEEGKITTRGLEIVRRDWSEIAKETQARVLEALLKDGDVEKAVRIVKEVTEKLSKYEVPPEKLVIHEQITRDLKDYKATGPHVAVAKRLAARGVKIRPGTVISYIVLKGSGRIGDRAIPFDEFDPTKHKYDAEYYIENQVLPAVERILRAFGYRKEDLRYQKTRQVGLSAWLKPKGT

SEQ ID NO: 1549 - protein, 774 aa, synthetic construct
MILDTDYITEDGKPVIRIFKKENGEFKIEYDRTFESYFYALLKDDSAIEEVKKITAERHGTVVTVKRVEKVQKKFLGRPVEVWKLYFTHWQDVPAIADKIREHPAVIDIYEYDIPFAKRYLIDKGLVPMEGDEELKMLAFDIETLYHEGEEFAEGPILMISYADEEGARVITWKNVDLPYVDVVSTEREMIKRFLRVVKEKDPDVLITYNGDNFDFAYLKKRCEKLGINFALGRDGSEPKIQRMGDRFAVEVKGRIHFDLYPVIRRTINLPTYTLEAVYEAVFGQPKEKVYAEEITTAWETGENLERVARYSMEDAKVTYELGKEFLPMEAQLSRLIGQSLWDVSRSSTGNLVEWFLLRKAYERNELAPNKPDEKELARRRQSYEGGYVKEPERGLWENIVYLDFRSLYPSIIITHNVSPDTLNREGCKEYDVAPQVGHRFCKDFPGFIPSLLGDLLEERQKIKKKMKATIDPIERKLLDYRQRAIKILANSYYGYYGYARARWYCKECAESVTAWGREYITMTIKEIEEKYGFKVIYSDTDGFFATIPGADAETVKKKAMEFLKYINAKLPGALELEYEGFYKRGFFVTKKKYAVIDEEGKITTRGLEIVRRDWSEIAKETQARVLEALLKDGDVEKAVRIVKEVTEKLSKYEVPPEKLVIHEQITRDLKDYKATGPHVAVAKRLAARGVKIRPGTVISYIVLKGSGRIGDRAIPFDEFDPTKHKYDAEYYIENQVLPAVERILRAFGYRKEDLRYQKTRQVGLSAWLKPKGT

SEQ ID NO: 1550 - protein, 774 aa, synthetic construct
MILDTDYITEDGKPVIRIFKKENGEFKIEYDRTFESYFYALLKDDSAIEEVKKITAERHGTVVTVKRVEKVQKKFLGRPVEVWKLYFTHWQDIPAIRDKIREHPAVIDIYEYDIPFAKRYLIDKGLVPMEGDEELKMLAFDIETLYHEGEEFAEGPILMISYADEEGARVITWKNVDLPYVDVVSTEREMIKRFLRVVKEKDPDVLITYNGDNFDFAYLKKRCEKLGINFALGRDGSEPKIQRMGDRFAVEVKGRIHFDLYPVIRRTINLPTYTLEAVYEAVFGQPKEKVYAEEITTAWETGENLERVARYSMEDAKVTYELGKEFLPMEAQLSRLIGQSLWDVSRSSTGNLVEWFLLRKAYERNELAPNKPDEKELARRRQSYEGGYVKEPERGLWENIVYLDFRSLYPSIIITHNVSPDTLNREGCKEYDVAPQVGHRFCKDFPGFIPSLLGDLLEERQKIKKKMKATIDPIERKLLDYRQRAIKILANSYYGYYGYARARWYCKECAESVTAWGREYITMTIKEIEEKYGFKVIYSDTDGFFATIPGADAETVKKKAMEFLKYINAKLPGALELEYEGFYKRGFFVTKKKYAVIDEEGKITTRGLEIVRRDWSEIAKETQARVLEALLKDGDVEKAVRIVKEVTEKLSKYEVPPEKLVIHEQITRDLKDYKATGPHVAVAKRLAARGVKIRPGTVISYIVLKGSGRIGDRAIPFDEFDPTKHKYDAEYYIENQVLPAVERILRAFGYRKEDLRYQKTRQVGLSAWLKPKGT

SEQ ID NO: 1551 - protein, 774 aa, synthetic construct
MILDTDYITEDGKPVIRIFKKENGEFKIEYDRTFESYFYALLKDDSAIEEVKKITAERHGTVVTVKRVEKVQKKFLGRPVEVWKLYFTHWQDIPAIADKIREHPAVIDIYEYDIPFAKRYLIDKGLVPMEGDEELKMLAFDIETLYHEGEEFAEGPILMISYADEEGARVITWKNVDLPYVDVVSTEREMIKRFLRVVKEKDPDVLITYNGDNFDFAYLKKRCEKLGINFALGRDGSEPKIQRMGDRFAVEVKGRIHFDLYPVIRRTINLPTYTLEAVYEAVFGQPKEKVYAEEITTAWETGENLERVARYSMEDAKVTYELGKEFLPMEAQLSRLIGQSLWDVSRSSTGNLVEWFLLRKAYERNELAPNKPDEKELARRRQSYEGGYVKEPERGLWENIVYLDFRSLYPSIIITHNVSPDTLNREGCKEYDVAPQVGHRFCKDFPGFIPSLLGDLLEERQKIKKKMKATIDPIERKLLDYRQRAIKILANSYYGYYGYARARWYCKECAESVTAWGREYITMTIKEIEEKYGFKVIYSDTDGFFATIPGADAETVKKKAMEFLKYINAKLPGALELEYEGFYKRGFFVTKKKYAVIDEEGKITTRGLEIVRRDWSEIAKETQARVLEALLKDGDVEKAVRIVKEVTEKLSKYEVPPEKLVIHEQITRDLKDYKATGPHVAVAKRLAARGVKIRPGTVISYIVLKGSGRIGDRAIPFDEFDPTKHKYDAEYYIENQVLPAVERILRAFGYRKEDLRYQKTRQVGLSAWLKPKGT

SEQ ID NO: 1552 - protein, 774 aa, synthetic construct
MILDTDYITEDGKPVIRIFKKENGEFKIEYDRTFESYFYALLKDDSAIEEVKKITAERHGTVVTVKRVEKVQKKFLGRPVEVWKLYFTHWQDIPAIHDKIREHPAVIDIYEYDIPFAKRYLIDKGLVPMEGDEELKMLAFDIETLYHEGEEFAEGPILMISYADEEGARVITWKNVDLPYVDVVSTEREMIKRFLRVVKEKDPDVLITYNGDNFDFAYLKKRCEKLGINFALGRDGSEPKIQRMGDRFAVEVKGRIHFDLYPVIRRTINLPTYTLEAVYEAVFGQPKEKVYAEEITTAWETGENLERVARYSMEDAKVTYELGKEFLPMEAQLSRLIGQSLWDVSRSSTGNLVEWFLLRKAYERNELAPNKPDEKELARRRQSYEGGYVKEPERGLWENIVYLDFRSLYPSIIITHNVSPDTLNREGCKEYDVAPQVGHRFCKDFPGFIPSLLGDLLEERQKIKKKMKATIDPIERKLLDYRQRAIKILANSYYGYYGYARARWYCKECAESVTAWGREYITMTIKEIEEKYGFKVIYSDTDGFFATIPGADAETVKKKAMEFLKYINAKLPGALELEYEGFYKRGFFVTKKKYAVIDEEGKITTRGLEIVRRDWSEIAKETQARVLEALLKDGDVEKAVRIVKEVTEKLSKYEVPPEKLVIHEQITRDLKDYKATGPHVAVAKRLAARGVKIRPGTVISYIVLKGSGRIGDRAIPFDEFDPTKHKYDAEYYIENQVLPAVERILRAFGYRKEDLRYQKTRQVGLSAWLKPKGT

SEQ ID NO: 1553 - protein, 774 aa, synthetic construct
MILDTDYITEDGKPVIRIFKKENGEFKIEYDRTFESYFYALLKDDSAIEEVKKITAERHGTVVTVKRVEKVQKKFLGRPVEVWKLYFTHWQDIPAIWDKIREHPAVIDIYEYDIPFAKRYLIDKGLVPMEGDEELKMLAFDIETLYHEGEEFAEGPILMISYADEEGARVITWKNVDLPYVDVVSTEREMIKRFLRVVKEKDPDVLITYNGDNFDFAYLKKRCEKLGINFALGRDGSEPKIQRMGDRFAVEVKGRIHFDLYPVIRRTINLPTYTLEAVYEAVFGQPKEKVYAEEITTAWETGENLERVARYSMEDAKVTYELGKEFLPMEAQLSRLIGQSLWDVSRSSTGNLVEWFLLRKAYERNELAPNKPDEKELARRRQSYEGGYVKEPERGLWENIVYLDFRSLYPSIIITHNVSPDTLNREGCKEYDVAPQVGHRFCKDFPGFIPSLLGDLLEERQKIKKKMKATIDPIERKLLDYRQRAIKILANSYYGYYGYARARWYCKECAESVTAWGREYITMTIKEIEEKYGFKVIYSDTDGFFATIPGADAETVKKKAMEFLKYINAKLPGALELEYEGFYKRGFFVTKKKYAVIDEEGKITTRGLEIVRRDWSEIAKETQARVLEALLKDGDVEKAVRIVKEVTEKLSKYEVPPEKLVIHEQITRDLKDYKATGPHVAVAKRLAARGVKIRPGTVISYIVLKGSGRIGDRAIPFDEFDPTKHKYDAEYYIENQVLPAVERILRAFGYRKEDLRYQKTRQVGLSAWLKPKGT

SEQ ID NO: 1554 - protein, 774 aa, synthetic construct
MILDTDYITEDGKPVIRIFKKENGEFKIEYDRTFESYFYALLKDDSAIEEVKKITAERHGTVVTVKRVEKVQKKFLGRPVEVWKLYFTHYQDVPAIRDKIREHPAVIDIYEYDIPFAKRYLIDKGLVPMEGDEELKMLAFDIETLYHEGEEFAEGPILMISYADEEGARVITWKNVDLPYVDVVSTEREMIKRFLRVVKEKDPDVLITYNGDNFDFAYLKKRCEKLGINFALGRDGSEPKIQRMGDRFAVEVKGRIHFDLYPVIRRTINLPTYTLEAVYEAVFGQPKEKVYAEEITTAWETGENLERVARYSMEDAKVTYELGKEFLPMEAQLSRLIGQSLWDVSRSSTGNLVEWFLLRKAYERNELAPNKPDEKELARRRQSYEGGYVKEPERGLWENIVYLDFRSLYPSIIITHNVSPDTLNREGCKEYDVAPQVGHRFCKDFPGFIPSLLGDLLEERQKIKKKMKATIDPIERKLLDYRQRAIKILANSYYGYYGYARARWYCKECAESVTAWGREYITMTIKEIEEKYGFKVIYSDTDGFFATIPGADAETVKKKAMEFLKYINAKLPGALELEYEGFYKRGFFVTKKKYAVIDEEGKITTRGLEIVRRDWSEIAKETQARVLEALLKDGDVEKAVRIVKEVTEKLSKYEVPPEKLVIHEQITRDLKDYKATGPHVAVAKRLAARGVKIRPGTVISYIVLKGSGRIGDRAIPFDEFDPTKHKYDAEYYIENQVLPAVERILRAFGYRKEDLRYQKTRQVGLSAWLKPKGT

SEQ ID NO: 1555 - protein, 774 aa, synthetic construct
MILDTDYITEDGKPVIRIFKKENGEFKIEYDRTFESYFYALLKDDSAIEEVKKITAERHGTVVTVKRVEKVQKKFLGRPVEVWKLYFTHYQDIPAIRDKIREHPAVIDIYEYDIPFAKRYLIDKGLVPMEGDEELKMLAFDIETLYHEGEEFAEGPILMISYADEEGARVITWKNVDLPYVDVVSTEREMIKRFLRVVKEKDPDVLITYNGDNFDFAYLKKRCEKLGINFALGRDGSEPKIQRMGDRFAVEVKGRIHFDLYPVIRRTINLPTYTLEAVYEAVFGQPKEKVYAEEITTAWETGENLERVARYSMEDAKVTYELGKEFLPMEAQLSRLIGQSLWDVSRSSTGNLVEWFLLRKAYERNELAPNKPDEKELARRRQSYEGGYVKEPERGLWENIVYLDFRSLYPSIIITHNVSPDTLNREGCKEYDVAPQVGHRFCKDFPGFIPSLLGDLLEERQKIKKKMKATIDPIERKLLDYRQRAIKILANSYYGYYGYARARWYCKECAESVTAWGREYITMTIKEIEEKYGFKVIYSDTDGFFATIPGADAETVKKKAMEFLKYINAKLPGALELEYEGFYKRGFFVTKKKYAVIDEEGKITTRGLEIVRRDWSEIAKETQARVLEALLKDGDVEKAVRIVKEVTEKLSKYEVPPEKLVIHEQITRDLKDYKATGPHVAVAKRLAARGVKIRPGTVISYIVLKGSGRIGDRAIPFDEFDPTKHKYDAEYYIENQVLPAVERILRAFGYRKEDLRYQKTRQVGLSAWLKPKGT

SEQ ID NO: 1556 - protein, 774 aa, synthetic construct
MILDTDYITEDGKPVIRIFKKENGEFKIEYDRTFESYFYALLKDDSAIEEVKKITAERHGTVVTVKRVEKVQKKFLGRPVEVWKLYFTHYQDIPAIADKIREHPAVIDIYEYDIPFAKRYLIDKGLVPMEGDEELKMLAFDIETLYHEGEEFAEGPILMISYADEEGARVITWKNVDLPYVDVVSTEREMIKRFLRVVKEKDPDVLITYNGDNFDFAYLKKRCEKLGINFALGRDGSEPKIQRMGDRFAVEVKGRIHFDLYPVIRRTINLPTYTLEAVYEAVFGQPKEKVYAEEITTAWETGENLERVARYSMEDAKVTYELGKEFLPMEAQLSRLIGQSLWDVSRSSTGNLVEWFLLRKAYERNELAPNKPDEKELARRRQSYEGGYVKEPERGLWENIVYLDFRSLYPSIIITHNVSPDTLNREGCKEYDVAPQVGHRFCKDFPGFIPSLLGDLLEERQKIKKKMKATIDPIERKLLDYRQRAIKILANSYYGYYGYARARWYCKECAESVTAWGREYITMTIKEIEEKYGFKVIYSDTDGFFATIPGADAETVKKKAMEFLKYINAKLPGALELEYEGFYKRGFFVTKKKYAVIDEEGKITTRGLEIVRRDWSEIAKETQARVLEALLKDGDVEKAVRIVKEVTEKLSKYEVPPEKLVIHEQITRDLKDYKATGPHVAVAKRLAARGVKIRPGTVISYIVLKGSGRIGDRAIPFDEFDPTKHKYDAEYYIENQVLPAVERILRAFGYRKEDLRYQKTRQVGLSAWLKPKGT

SEQ ID NO: 1557 - protein, 774 aa, synthetic construct
MILDTDYITEDGKPVIRIFKKENGEFKIEYDRTFESYFYALLKDDSAIEEVKKITAERHGTVVTVKRVEKVQKKFLGRPVEVWKLYFTHYQDIPAIHDKIREHPAVIDIYEYDIPFAKRYLIDKGLVPMEGDEELKMLAFDIETLYHEGEEFAEGPILMISYADEEGARVITWKNVDLPYVDVVSTEREMIKRFLRVVKEKDPDVLITYNGDNFDFAYLKKRCEKLGINFALGRDGSEPKIQRMGDRFAVEVKGRIHFDLYPVIRRTINLPTYTLEAVYEAVFGQPKEKVYAEEITTAWETGENLERVARYSMEDAKVTYELGKEFLPMEAQLSRLIGQSLWDVSRSSTGNLVEWFLLRKAYERNELAPNKPDEKELARRRQSYEGGYVKEPERGLWENIVYLDFRSLYPSIIITHNVSPDTLNREGCKEYDVAPQVGHRFCKDFPGFIPSLLGDLLEERQKIKKKMKATIDPIERKLLDYRQRAIKILANSYYGYYGYARARWYCKECAESVTAWGREYITMTIKEIEEKYGFKVIYSDTDGFFATIPGADAETVKKKAMEFLKYINAKLPGALELEYEGFYKRGFFVTKKKYAVIDEEGKITTRGLEIVRRDWSEIAKETQARVLEALLKDGDVEKAVRIVKEVTEKLSKYEVPPEKLVIHEQITRDLKDYKATGPHVAVAKRLAARGVKIRPGTVISYIVLKGSGRIGDRAIPFDEFDPTKHKYDAEYYIENQVLPAVERILRAFGYRKEDLRYQKTRQVGLSAWLKPKGT

SEQ ID NO: 1558 - protein, 774 aa, synthetic construct
MILDTDYITEDGKPVIRIFKKENGEFKIEYDRTFESYFYALLKDDSAIEEVKKITAERHGTVVTVKRVEKVQKKFLGRPVEVWKLYFTHYQDQPAIRDKIREHPAVIDIYEYDIPFAKRYLIDKGLVPMEGDEELKMLAFDIETLYHEGEEFAEGPILMISYADEEGARVITWKNVDLPYVDVVSTEREMIKRFLRVVKEKDPDVLITYNGDNFDFAYLKKRCEKLGINFALGRDGSEPKIQRMGDRFAVEVKGRIHFDLYPVIRRTINLPTYTLEAVYEAVFGQPKEKVYAEEITTAWETGENLERVARYSMEDAKVTYELGKEFLPMEAQLSRLIGQSLWDVSRSSTGNLVEWFLLRKAYERNELAPNKPDEKELARRRQSYEGGYVKEPERGLWENIVYLDFRSLYPSIIITHNVSPDTLNREGCKEYDVAPQVGHRFCKDFPGFIPSLLGDLLEERQKIKKKMKATIDPIERKLLDYRQRAIKILANSYYGYYGYARARWYCKECAESVTAWGREYITMTIKEIEEKYGFKVIYSDTDGFFATIPGADAETVKKKAMEFLKYINAKLPGALELEYEGFYKRGFFVTKKKYAVIDEEGKITTRGLEIVRRDWSEIAKETQARVLEALLKDGDVEKAVRIVKEVTEKLSKYEVPPEKLVIHEQITRDLKDYKATGPHVAVAKRLAARGVKIRPGTVISYIVLKGSGRIGDRAIPFDEFDPTKHKYDAEYYIENQVLPAVERILRAFGYRKEDLRYQKTRQVGLSAWLKPKGT

SEQ ID NO: 1559 - protein, 774 aa, synthetic construct
MILDTDYITEDGKPVIRIFKKENGEFKIEYDRTFESYFYALLKDDSAIEEVKKITAERHGTVVTVKRVEKVQKKFLGRPVEVWKLYFTHYQDRPAIADKIREHPAVIDIYEYDIPFAKRYLIDKGLVPMEGDEELKMLAFDIETLYHEGEEFAEGPILMISYADEEGARVITWKNVDLPYVDVVSTEREMIKRFLRVVKEKDPDVLITYNGDNFDFAYLKKRCEKLGINFALGRDGSEPKIQRMGDRFAVEVKGRIHFDLYPVIRRTINLPTYTLEAVYEAVFGQPKEKVYAEEITTAWETGENLERVARYSMEDAKVTYELGKEFLPMEAQLSRLIGQSLWDVSRSSTGNLVEWFLLRKAYERNELAPNKPDEKELARRRQSYEGGYVKEPERGLWENIVYLDFRSLYPSIIITHNVSPDTLNREGCKEYDVAPQVGHRFCKDFPGFIPSLLGDLLEERQKIKKKMKATIDPIERKLLDYRQRAIKILANSYYGYYGYARARWYCKECAESVTAWGREYITMTIKEIEEKYGFKVIYSDTDGFFATIPGADAETVKKKAMEFLKYINAKLPGALELEYEGFYKRGFFVTKKKYAVIDEEGKITTRGLEIVRRDWSEIAKETQARVLEALLKDGDVEKAVRIVKEVTEKLSKYEVPPEKLVIHEQITRDLKDYKATGPHVAVAKRLAARGVKIRPGTVISYIVLKGSGRIGDRAIPFDEFDPTKHKYDAEYYIENQVLPAVERILRAFGYRKEDLRYQKTRQVGLSAWLKPKGT

SEQ ID NO: 1560 - protein, 774 aa, synthetic construct
MILDTDYITEDGKPVIRIFKKENGEFKIEYDRTFESYFYALLKDDSAIEEVKKITAERHGTVVTVKRVEKVQKKFLGRPVEVWKLYFTHPQDVPAIADKIREHPAVIDIYEYDIPFAKRYLIDKGLVPMEGDEELKMLAFDIETLYHEGEEFAEGPILMISYADEEGARVITWKNVDLPYVDVVSTEREMIKRFLRVVKEKDPDVLITYNGDNFDFAYLKKRCEKLGINFALGRDGSEPKIQRMGDRFAVEVKGRIHFDLYPVIRRTINLPTYTLEAVYEAVFGQPKEKVYAEEITTAWETGENLERVARYSMEDAKVTYELGKEFLPMEAQLSRLIGQSLWDVSRSSTGNLVEWFLLRKAYERNELAPNKPDEKELARRRQSYEGGYVKEPERGLWENIVYLDFRSLYPSIIITHNVSPDTLNREGCKEYDVAPQVGHRFCKDFPGFIPSLLGDLLEERQKIKKKMKATIDPIERKLLDYRQRAIKILANSYYGYYGYARARWYCKECAESVTAWGREYITMTIKEIEEKYGFKVIYSDTDGFFATIPGADAETVKKKAMEFLKYINAKLPGALELEYEGFYKRGFFVTKKKYAVIDEEGKITTRGLEIVRRDWSEIAKETQARVLEALLKDGDVEKAVRIVKEVTEKLSKYEVPPEKLVIHEQITRDLKDYKATGPHVAVAKRLAARGVKIRPGTVISYIVLKGSGRIGDRAIPFDEFDPTKHKYDAEYYIENQVLPAVERILRAFGYRKEDLRYQKTRQVGLSAWLKPKGT

SEQ ID NO: 1561 - protein, 774 aa, synthetic construct
MILDTDYITEDGKPVIRIFKKENGEFKIEYDRTFESYFYALLKDDSAIEEVKKITAERHGTVVTVKRVEKVQKKFLGRPVEVWKLYFTHPQDVPAIFDKIREHPAVIDIYEYDIPFAKRYLIDKGLVPMEGDEELKMLAFDIETLYHEGEEFAEGPILMISYADEEGARVITWKNVDLPYVDVVSTEREMIKRFLRVVKEKDPDVLITYNGDNFDFAYLKKRCEKLGINFALGRDGSEPKIQRMGDRFAVEVKGRIHFDLYPVIRRTINLPTYTLEAVYEAVFGQPKEKVYAEEITTAWETGENLERVARYSMEDAKVTYELGKEFLPMEAQLSRLIGQSLWDVSRSSTGNLVEWFLLRKAYERNELAPNKPDEKELARRRQSYEGGYVKEPERGLWENIVYLDFRSLYPSIIITHNVSPDTLNREGCKEYDVAPQVGHRFCKDFPGFIPSLLGDLLEERQKIKKKMKATIDPIERKLLDYRQRAIKILANSYYGYYGYARARWYCKECAESVTAWGREYITMTIKEIEEKYGFKVIYSDTDGFFATIPGADAETVKKKAMEFLKYINAKLPGALELEYEGFYKRGFFVTKKKYAVIDEEGKITTRGLEIVRRDWSEIAKETQARVLEALLKDGDVEKAVRIVKEVTEKLSKYEVPPEKLVIHEQITRDLKDYKATGPHVAVAKRLAARGVKIRPGTVISYIVLKGSGRIGDRAIPFDEFDPTKHKYDAEYYIENQVLPAVERILRAFGYRKEDLRYQKTRQVGLSAWLKPKGT

SEQ ID NO: 1562 - protein, 774 aa, synthetic construct
MILDTDYITEDGKPVIRIFKKENGEFKIEYDRTFESYFYALLKDDSAIEEVKKITAERHGTVVTVKRVEKVQKKFLGRPVEVWKLYFTHPQDIPAIRDKIREHPAVIDIYEYDIPFAKRYLIDKGLVPMEGDEELKMLAFDIETLYHEGEEFAEGPILMISYADEEGARVITWKNVDLPYVDVVSTEREMIKRFLRVVKEKDPDVLITYNGDNFDFAYLKKRCEKLGINFALGRDGSEPKIQRMGDRFAVEVKGRIHFDLYPVIRRTINLPTYTLEAVYEAVFGQPKEKVYAEEITTAWETGENLERVARYSMEDAKVTYELGKEFLPMEAQLSRLIGQSLWDVSRSSTGNLVEWFLLRKAYERNELAPNKPDEKELARRRQSYEGGYVKEPERGLWENIVYLDFRSLYPSIIITHNVSPDTLNREGCKEYDVAPQVGHRFCKDFPGFIPSLLGDLLEERQKIKKKMKATIDPIERKLLDYRQRAIKILANSYYGYYGYARARWYCKECAESVTAWGREYITMTIKEIEEKYGFKVIYSDTDGFFATIPGADAETVKKKAMEFLKYINAKLPGALELEYEGFYKRGFFVTKKKYAVIDEEGKITTRGLEIVRRDWSEIAKETQARVLEALLKDGDVEKAVRIVKEVTEKLSKYEVPPEKLVIHEQITRDLKDYKATGPHVAVAKRLAARGVKIRPGTVISYIVLKGSGRIGDRAIPFDEFDPTKHKYDAEYYIENQVLPAVERILRAFGYRKEDLRYQKTRQVGLSAWLKPKGT

SEQ ID NO: 1563 - protein, 774 aa, synthetic construct
MILDTDYITEDGKPVIRIFKKENGEFKIEYDRTFESYFYALLKDDSAIEEVKKITAERHGTVVTVKRVEKVQKKFLGRPVEVWKLYFTHPQDIPAIFDKIREHPAVIDIYEYDIPFAKRYLIDKGLVPMEGDEELKMLAFDIETLYHEGEEFAEGPILMISYADEEGARVITWKNVDLPYVDVVSTEREMIKRFLRVVKEKDPDVLITYNGDNFDFAYLKKRCEKLGINFALGRDGSEPKIQRMGDRFAVEVKGRIHFDLYPVIRRTINLPTYTLEAVYEAVFGQPKEKVYAEEITTAWETGENLERVARYSMEDAKVTYELGKEFLPMEAQLSRLIGQSLWDVSRSSTGNLVEWFLLRKAYERNELAPNKPDEKELARRRQSYEGGYVKEPERGLWENIVYLDFRSLYPSIIITHNVSPDTLNREGCKEYDVAPQVGHRFCKDFPGFIPSLLGDLLEERQKIKKKMKATIDPIERKLLDYRQRAIKILANSYYGYYGYARARWYCKECAESVTAWGREYITMTIKEIEEKYGFKVIYSDTDGFFATIPGADAETVKKKAMEFLKYINAKLPGALELEYEGFYKRGFFVTKKKYAVIDEEGKITTRGLEIVRRDWSEIAKETQARVLEALLKDGDVEKAVRIVKEVTEKLSKYEVPPEKLVIHEQITRDLKDYKATGPHVAVAKRLAARGVKIRPGTVISYIVLKGSGRIGDRAIPFDEFDPTKHKYDAEYYIENQVLPAVERILRAFGYRKEDLRYQKTRQVGLSAWLKPKGT

SEQ ID NO: 1564 - protein, 774 aa, synthetic construct
MILDTDYITEDGKPVIRIFKKENGEFKIEYDRTFESYFYALLKDDSAIEEVKKITAERHGTVVTVKRVEKVQKKFLGRPVEVWKLYFTHPQDIPAIRDKIREHPAVIDIYEYDIPFAKQYLIDKGLVPMEGDEELKMLAFDIETLYHEGEEFAEGPILMISYADEEGARVITWKNVDLPYVDVVSTEREMIKRFLRVVKEKDPDVLITYNGDNFDFAYLKKRCEKLGINFALGRDGSEPKIQRMGDRFAVEVKGRIHFDLYPVIRRTINLPTYTLEAVYEAVFGQPKEKVYAEEITTAWETGENLERVARYSMEDAKVTYELGKEFLPMEAQLSRLIGQSLWDVSRSSTGNLVEWFLLRKAYERNELAPNKPDEKELARRRQSYEGGYVKEPERGLWENIVYLDFRSLYPSIIITHNVSPDTLNREGCKEYDVAPQVGHRFCKDFPGFIPSLLGDLLEERQKIKKKMKATIDPIERKLLDYRQRAIKILANSYYGYYGYARARWYCKECAESVTAWGREYITMTIKEIEEKYGFKVIYSDTDGFFATIPGADAETVKKKAMEFLKYINAKLPGALELEYEGFYKRGFFVTKKKYAVIDEEGKITTRGLEIVRRDWSEIAKETQARVLEALLKDGDVEKAVRIVKEVTEKLSKYEVPPEKLVIHEQITRDLKDYKATGPHVAVAKRLAARGVKIRPGTVISYIVLKGSGRIGDRAIPFDEFDPTKHKYDAEYYIENQVLPAVERILRAFGYRKEDLRYQKTRQVGLSAWLKPKGT

SEQ ID NO: 1565 - protein, 774 aa, synthetic construct
MILDTDYITEDGKPVIRIFKKENGEFKIEYDRTFESYFYALLKDDSAIEEVKKITAERHGTVVTVKRVEKVQKKFLGRPVEVWKLYFTHPQDKPAIRDKIREHPAVIDIYEYDIPFAKRYLIDKGLVPMEGDEELKMLAFDIETLYHEGEEFAEGPILMISYADEEGARVITWKNVDLPYVDVVSTEREMIKRFLRVVKEKDPDVLITYNGDNFDFAYLKKRCEKLGINFALGRDGSEPKIQRMGDRFAVEVKGRIHFDLYPVIRRTINLPTYTLEAVYEAVFGQPKEKVYAEEITTAWETGENLERVARYSMEDAKVTYELGKEFLPMEAQLSRLIGQSLWDVSRSSTGNLVEWFLLRKAYERNELAPNKPDEKELARRRQSYEGGYVKEPERGLWENIVYLDFRSLYPSIIITHNVSPDTLNREGCKEYDVAPQVGHRFCKDFPGFIPSLLGDLLEERQKIKKKMKATIDPIERKLLDYRQRAIKILANSYYGYYGYARARWYCKECAESVTAWGREYITMTIKEIEEKYGFKVIYSDTDGFFATIPGADAETVKKKAMEFLKYINAKLPGALELEYEGFYKRGFFVTKKKYAVIDEEGKITTRGLEIVRRDWSEIAKETQARVLEALLKDGDVEKAVRIVKEVTEKLSKYEVPPEKLVIHEQITRDLKDYKATGPHVAVAKRLAARGVKIRPGTVISYIVLKGSGRIGDRAIPFDEFDPTKHKYDAEYYIENQVLPAVERILRAFGYRKEDLRYQKTRQVGLSAWLKPKGT

SEQ ID NO: 1566 - protein, 774 aa, synthetic construct
MILDTDYITEDGKPVIRIFKKENGEFKIEYDRTFESYFYALLKDDSAIEEVKKITAERHGTVVTVKRVEKVQKKFLGRPVEVWKLYFTHPQDKPAIADKIREHPAVIDIYEYDIPFAKRYLIDKGLVPMEGDEELKMLAFDIETLYHEGEEFAEGPILMISYADEEGARVITWKNVDLPYVDVVSTEREMIKRFLRVVKEKDPDVLITYNGDNFDFAYLKKRCEKLGINFALGRDGSEPKIQRMGDRFAVEVKGRIHFDLYPVIRRTINLPTYTLEAVYEAVFGQPKEKVYAEEITTAWETGENLERVARYSMEDAKVTYELGKEFLPMEAQLSRLIGQSLWDVSRSSTGNLVEWFLLRKAYERNELAPNKPDEKELARRRQSYEGGYVKEPERGLWENIVYLDFRSLYPSIIITHNVSPDTLNREGCKEYDVAPQVGHRFCKDFPGFIPSLLGDLLEERQKIKKKMKATIDPIERKLLDYRQRAIKILANSYYGYYGYARARWYCKECAESVTAWGREYITMTIKEIEEKYGFKVIYSDTDGFFATIPGADAETVKKKAMEFLKYINAKLPGALELEYEGFYKRGFFVTKKKYAVIDEEGKITTRGLEIVRRDWSEIAKETQARVLEALLKDGDVEKAVRIVKEVTEKLSKYEVPPEKLVIHEQITRDLKDYKATGPHVAVAKRLAARGVKIRPGTVISYIVLKGSGRIGDRAIPFDEFDPTKHKYDAEYYIENQVLPAVERILRAFGYRKEDLRYQKTRQVGLSAWLKPKGT

SEQ ID NO: 1567 - protein, 774 aa, synthetic construct
MILDTDYITEDGKPVIRIFKKENGEFKIEYDRTFESYFYALLKDDSAIEEVKKITAERHGTVVTVKRVEKVQKKFLGRPVEVWKLYFTHPQDQPAIRDKIREHPAVIDIYEYDIPFAKRYLIDKGLVPMEGDEELKMLAFDIETLYHEGEEFAEGPILMISYADEEGARVITWKNVDLPYVDVVSTEREMIKRFLRVVKEKDPDVLITYNGDNFDFAYLKKRCEKLGINFALGRDGSEPKIQRMGDRFAVEVKGRIHFDLYPVIRRTINLPTYTLEAVYEAVFGQPKEKVYAEEITTAWETGENLERVARYSMEDAKVTYELGKEFLPMEAQLSRLIGQSLWDVSRSSTGNLVEWFLLRKAYERNELAPNKPDEKELARRRQSYEGGYVKEPERGLWENIVYLDFRSLYPSIIITHNVSPDTLNREGCKEYDVAPQVGHRFCKDFPGFIPSLLGDLLEERQKIKKKMKATIDPIERKLLDYRQRAIKILANSYYGYYGYARARWYCKECAESVTAWGREYITMTIKEIEEKYGFKVIYSDTDGFFATIPGADAETVKKKAMEFLKYINAKLPGALELEYEGFYKRGFFVTKKKYAVIDEEGKITTRGLEIVRRDWSEIAKETQARVLEALLKDGDVEKAVRIVKEVTEKLSKYEVPPEKLVIHEQITRDLKDYKATGPHVAVAKRLAARGVKIRPGTVISYIVLKGSGRIGDRAIPFDEFDPTKHKYDAEYYIENQVLPAVERILRAFGYRKEDLRYQKTRQVGLSAWLKPKGT

SEQ ID NO: 1568 - protein, 774 aa, synthetic construct
MILDTDYITEDGKPVIRIFKKENGEFKIEYDRTFESYFYALLKDDSAIEEVKKITAERHGTVVTVKRVEKVQKKFLGRPVEVWKLYFTHPQDQPAIADKIREHPAVIDIYEYDIPFAKRYLIDKGLVPMEGDEELKMLAFDIETLYHEGEEFAEGPILMISYADEEGARVITWKNVDLPYVDVVSTEREMIKRFLRVVKEKDPDVLITYNGDNFDFAYLKKRCEKLGINFALGRDGSEPKIQRMGDRFAVEVKGRIHFDLYPVIRRTINLPTYTLEAVYEAVFGQPKEKVYAEEITTAWETGENLERVARYSMEDAKVTYELGKEFLPMEAQLSRLIGQSLWDVSRSSTGNLVEWFLLRKAYERNELAPNKPDEKELARRRQSYEGGYVKEPERGLWENIVYLDFRSLYPSIIITHNVSPDTLNREGCKEYDVAPQVGHRFCKDFPGFIPSLLGDLLEERQKIKKKMKATIDPIERKLLDYRQRAIKILANSYYGYYGYARARWYCKECAESVTAWGREYITMTIKEIEEKYGFKVIYSDTDGFFATIPGADAETVKKKAMEFLKYINAKLPGALELEYEGFYKRGFFVTKKKYAVIDEEGKITTRGLEIVRRDWSEIAKETQARVLEALLKDGDVEKAVRIVKEVTEKLSKYEVPPEKLVIHEQITRDLKDYKATGPHVAVAKRLAARGVKIRPGTVISYIVLKGSGRIGDRAIPFDEFDPTKHKYDAEYYIENQVLPAVERILRAFGYRKEDLRYQKTRQVGLSAWLKPKGT

SEQ ID NO: 1569 - protein, 774 aa, synthetic construct
MILDTDYITEDGKPVIRIFKKENGEFKIEYDRTFESYFYALLKDDSAIEEVKKITAERHGTVVTVKRVEKVQKKFLGRPVEVWKLYFTHPQDQPAIWDKIREHPAVIDIYEYDIPFAKRYLIDKGLVPMEGDEELKMLAFDIETLYHEGEEFAEGPILMISYADEEGARVITWKNVDLPYVDVVSTEREMIKRFLRVVKEKDPDVLITYNGDNFDFAYLKKRCEKLGINFALGRDGSEPKIQRMGDRFAVEVKGRIHFDLYPVIRRTINLPTYTLEAVYEAVFGQPKEKVYAEEITTAWETGENLERVARYSMEDAKVTYELGKEFLPMEAQLSRLIGQSLWDVSRSSTGNLVEWFLLRKAYERNELAPNKPDEKELARRRQSYEGGYVKEPERGLWENIVYLDFRSLYPSIIITHNVSPDTLNREGCKEYDVAPQVGHRFCKDFPGFIPSLLGDLLEERQKIKKKMKATIDPIERKLLDYRQRAIKILANSYYGYYGYARARWYCKECAESVTAWGREYITMTIKEIEEKYGFKVIYSDTDGFFATIPGADAETVKKKAMEFLKYINAKLPGALELEYEGFYKRGFFVTKKKYAVIDEEGKITTRGLEIVRRDWSEIAKETQARVLEALLKDGDVEKAVRIVKEVTEKLSKYEVPPEKLVIHEQITRDLKDYKATGPHVAVAKRLAARGVKIRPGTVISYIVLKGSGRIGDRAIPFDEFDPTKHKYDAEYYIENQVLPAVERILRAFGYRKEDLRYQKTRQVGLSAWLKPKGT

SEQ ID NO: 1570 - protein, 774 aa, synthetic construct
MILDTDYITEDGKPVIRIFKKENGEFKIEYDRTFESYFYALLKDDSAIEEVKKITAERHGTVVTVKRVEKVQKKFLGRPVEVWKLYFTHPQDRPAIRDKIREHPAVIDIYEYDIPFAKRYLIDKGLVPMEGDEELKMLAFDIETLYHEGEEFAEGPILMISYADEEGARVITWKNVDLPYVDVVSTEREMIKRFLRVVKEKDPDVLITYNGDNFDFAYLKKRCEKLGINFALGRDGSEPKIQRMGDRFAVEVKGRIHFDLYPVIRRTINLPTYTLEAVYEAVFGQPKEKVYAEEITTAWETGENLERVARYSMEDAKVTYELGKEFLPMEAQLSRLIGQSLWDVSRSSTGNLVEWFLLRKAYERNELAPNKPDEKELARRRQSYEGGYVKEPERGLWENIVYLDFRSLYPSIIITHNVSPDTLNREGCKEYDVAPQVGHRFCKDFPGFIPSLLGDLLEERQKIKKKMKATIDPIERKLLDYRQRAIKILANSYYGYYGYARARWYCKECAESVTAWGREYITMTIKEIEEKYGFKVIYSDTDGFFATIPGADAETVKKKAMEFLKYINAKLPGALELEYEGFYKRGFFVTKKKYAVIDEEGKITTRGLEIVRRDWSEIAKETQARVLEALLKDGDVEKAVRIVKEVTEKLSKYEVPPEKLVIHEQITRDLKDYKATGPHVAVAKRLAARGVKIRPGTVISYIVLKGSGRIGDRAIPFDEFDPTKHKYDAEYYIENQVLPAVERILRAFGYRKEDLRYQKTRQVGLSAWLKPKGT

SEQ ID NO: 1571 - protein, 774 aa, synthetic construct
MILDTDYITEDGKPVIRIFKKENGEFKIEYDRTFESYFYALLKDDSAIEEVKKITAERHGTVVTVKRVEKVQKKFLGRPVEVWKLYFTHPQDRPAIADKIREHPAVIDIYEYDIPFAKRYLIDKGLVPMEGDEELKMLAFDIETLYHEGEEFAEGPILMISYADEEGARVITWKNVDLPYVDVVSTEREMIKRFLRVVKEKDPDVLITYNGDNFDFAYLKKRCEKLGINFALGRDGSEPKIQRMGDRFAVEVKGRIHFDLYPVIRRTINLPTYTLEAVYEAVFGQPKEKVYAEEITTAWETGENLERVARYSMEDAKVTYELGKEFLPMEAQLSRLIGQSLWDVSRSSTGNLVEWFLLRKAYERNELAPNKPDEKELARRRQSYEGGYVKEPERGLWENIVYLDFRSLYPSIIITHNVSPDTLNREGCKEYDVAPQVGHRFCKDFPGFIPSLLGDLLEERQKIKKKMKATIDPIERKLLDYRQRAIKILANSYYGYYGYARARWYCKECAESVTAWGREYITMTIKEIEEKYGFKVIYSDTDGFFATIPGADAETVKKKAMEFLKYINAKLPGALELEYEGFYKRGFFVTKKKYAVIDEEGKITTRGLEIVRRDWSEIAKETQARVLEALLKDGDVEKAVRIVKEVTEKLSKYEVPPEKLVIHEQITRDLKDYKATGPHVAVAKRLAARGVKIRPGTVISYIVLKGSGRIGDRAIPFDEFDPTKHKYDAEYYIENQVLPAVERILRAFGYRKEDLRYQKTRQVGLSAWLKPKGT

SEQ ID NO: 1572 - protein, 774 aa, synthetic construct
MILDTDYITEDGKPVIRIFKKENGEFKIEYDRTFESYFYALLKDDSAIEEVKKITAERHGTVVTVKRVEKVQKKFLGRPVEVWKLYFTHPQDRPAIWDKIREHPAVIDIYEYDIPFAKRYLIDKGLVPMEGDEELKMLAFDIETLYHEGEEFAEGPILMISYADEEGARVITWKNVDLPYVDVVSTEREMIKRFLRVVKEKDPDVLITYNGDNFDFAYLKKRCEKLGINFALGRDGSEPKIQRMGDRFAVEVKGRIHFDLYPVIRRTINLPTYTLEAVYEAVFGQPKEKVYAEEITTAWETGENLERVARYSMEDAKVTYELGKEFLPMEAQLSRLIGQSLWDVSRSSTGNLVEWFLLRKAYERNELAPNKPDEKELARRRQSYEGGYVKEPERGLWENIVYLDFRSLYPSIIITHNVSPDTLNREGCKEYDVAPQVGHRFCKDFPGFIPSLLGDLLEERQKIKKKMKATIDPIERKLLDYRQRAIKILANSYYGYYGYARARWYCKECAESVTAWGREYITMTIKEIEEKYGFKVIYSDTDGFFATIPGADAETVKKKAMEFLKYINAKLPGALELEYEGFYKRGFFVTKKKYAVIDEEGKITTRGLEIVRRDWSEIAKETQARVLEALLKDGDVEKAVRIVKEVTEKLSKYEVPPEKLVIHEQITRDLKDYKATGPHVAVAKRLAARGVKIRPGTVISYIVLKGSGRIGDRAIPFDEFDPTKHKYDAEYYIENQVLPAVERILRAFGYRKEDLRYQKTRQVGLSAWLKPKGT

SEQ ID NO: 1573 - protein, 774 aa, synthetic construct
MILDTDYITEDGKPVIRIFKKENGEFKIEYDRTFEWYFYALLKDDSAIEEVKKITAERHGTVVTVKRVEKVQKKFLGRPVEVWKLYFTHFQDVPAIRDKIREHPAVIDIYEYDIPFAKRYLIDKGLVPMEGDEELKMLAFDIETLYHEGEEFAEGPILMISYADEEGARVITWKNVDLPYVDVVSTEREMIKRFLRVVKEKDPDVLITYNGDNFDFAYLKKRCEKLGINFALGRDGSEPKIQRMGDRFAVEVKGRIHFDLYPVIRRTINLPTYTLEAVYEAVFGQPKEKVYAEEITTAWETGENLERVARYSMEDAKVTYELGKEFLPMEAQLSRLIGQSLWDVSRSSTGNLVEWFLLRKAYERNELAPNKPDEKELARRRQSYEGGYVKEPERGLWENIVYLDFRSLYPSIIITHNVSPDTLNREGCKEYDVAPQVGHRFCKDFPGFIPSLLGDLLEERQKIKKKMKATIDPIERKLLDYRQRAIKILANSYYGYYGYARARWYCKECAESVTAWGREYITMTIKEIEEKYGFKVIYSDTDGFFATIPGADAETVKKKAMEFLKYINAKLPGALELEYEGFYKRGFFVTKKKYAVIDEEGKITTRGLEIVRRDWSEIAKETQARVLEALLKDGDVEKAVRIVKEVTEKLSKYEVPPEKLVIHEQITRDLKDYKATGPHVAVAKRLAARGVKIRPGTVISYIVLKGSGRIGDRAIPFDEFDPTKHKYDAEYYIENQVLPAVERILRAFGYRKEDLRYQKTRQVGLSAWLKPKGT

SEQ ID NO: 1574 - protein, 774 aa, synthetic construct
MILDTDYITEDGKPVIRIFKKENGEFKIEYDRTFEWYFYALLKDDSAIEEVKKITAERHGTVVTVKRVEKVQKKFLGRPVEVWKLYFTHFQDVPAIADKIREHPAVIDIYEYDIPFAKRYLIDKGLVPMEGDEELKMLAFDIETLYHEGEEFAEGPILMISYADEEGARVITWKNVDLPYVDVVSTEREMIKRFLRVVKEKDPDVLITYNGDNFDFAYLKKRCEKLGINFALGRDGSEPKIQRMGDRFAVEVKGRIHFDLYPVIRRTINLPTYTLEAVYEAVFGQPKEKVYAEEITTAWETGENLERVARYSMEDAKVTYELGKEFLPMEAQLSRLIGQSLWDVSRSSTGNLVEWFLLRKAYERNELAPNKPDEKELARRRQSYEGGYVKEPERGLWENIVYLDFRSLYPSIIITHNVSPDTLNREGCKEYDVAPQVGHRFCKDFPGFIPSLLGDLLEERQKIKKKMKATIDPIERKLLDYRQRAIKILANSYYGYYGYARARWYCKECAESVTAWGREYITMTIKEIEEKYGFKVIYSDTDGFFATIPGADAETVKKKAMEFLKYINAKLPGALELEYEGFYKRGFFVTKKKYAVIDEEGKITTRGLEIVRRDWSEIAKETQARVLEALLKDGDVEKAVRIVKEVTEKLSKYEVPPEKLVIHEQITRDLKDYKATGPHVAVAKRLAARGVKIRPGTVISYIVLKGSGRIGDRAIPFDEFDPTKHKYDAEYYIENQVLPAVERILRAFGYRKEDLRYQKTRQVGLSAWLKPKGT

SEQ ID NO: 1575 - protein, 774 aa, synthetic construct
MILDTDYITEDGKPVIRIFKKENGEFKIEYDRTFEWYFYALLKDDSAIEEVKKITAERHGTVVTVKRVEKVQKKFLGRPVEVWKLYFTHFQDVPAIFDKIREHPAVIDIYEYDIPFAKRYLIDKGLVPMEGDEELKMLAFDIETLYHEGEEFAEGPILMISYADEEGARVITWKNVDLPYVDVVSTEREMIKRFLRVVKEKDPDVLITYNGDNFDFAYLKKRCEKLGINFALGRDGSEPKIQRMGDRFAVEVKGRIHFDLYPVIRRTINLPTYTLEAVYEAVFGQPKEKVYAEEITTAWETGENLERVARYSMEDAKVTYELGKEFLPMEAQLSRLIGQSLWDVSRSSTGNLVEWFLLRKAYERNELAPNKPDEKELARRRQSYEGGYVKEPERGLWENIVYLDFRSLYPSIIITHNVSPDTLNREGCKEYDVAPQVGHRFCKDFPGFIPSLLGDLLEERQKIKKKMKATIDPIERKLLDYRQRAIKILANSYYGYYGYARARWYCKECAESVTAWGREYITMTIKEIEEKYGFKVIYSDTDGFFATIPGADAETVKKKAMEFLKYINAKLPGALELEYEGFYKRGFFVTKKKYAVIDEEGKITTRGLEIVRRDWSEIAKETQARVLEALLKDGDVEKAVRIVKEVTEKLSKYEVPPEKLVIHEQITRDLKDYKATGPHVAVAKRLAARGVKIRPGTVISYIVLKGSGRIGDRAIPFDEFDPTKHKYDAEYYIENQVLPAVERILRAFGYRKEDLRYQKTRQVGLSAWLKPKGT

SEQ ID NO: 1576 - protein, 774 aa, synthetic construct
MILDTDYITEDGKPVIRIFKKENGEFKIEYDRTFEWYFYALLKDDSAIEEVKKITAERHGTVVTVKRVEKVQKKFLGRPVEVWKLYFTHFQDVPAIHDKIREHPAVIDIYEYDIPFAKRYLIDKGLVPMEGDEELKMLAFDIETLYHEGEEFAEGPILMISYADEEGARVITWKNVDLPYVDVVSTEREMIKRFLRVVKEKDPDVLITYNGDNFDFAYLKKRCEKLGINFALGRDGSEPKIQRMGDRFAVEVKGRIHFDLYPVIRRTINLPTYTLEAVYEAVFGQPKEKVYAEEITTAWETGENLERVARYSMEDAKVTYELGKEFLPMEAQLSRLIGQSLWDVSRSSTGNLVEWFLLRKAYERNELAPNKPDEKELARRRQSYEGGYVKEPERGLWENIVYLDFRSLYPSIIITHNVSPDTLNREGCKEYDVAPQVGHRFCKDFPGFIPSLLGDLLEERQKIKKKMKATIDPIERKLLDYRQRAIKILANSYYGYYGYARARWYCKECAESVTAWGREYITMTIKEIEEKYGFKVIYSDTDGFFATIPGADAETVKKKAMEFLKYINAKLPGALELEYEGFYKRGFFVTKKKYAVIDEEGKITTRGLEIVRRDWSEIAKETQARVLEALLKDGDVEKAVRIVKEVTEKLSKYEVPPEKLVIHEQITRDLKDYKATGPHVAVAKRLAARGVKIRPGTVISYIVLKGSGRIGDRAIPFDEFDPTKHKYDAEYYIENQVLPAVERILRAFGYRKEDLRYQKTRQVGLSAWLKPKGT

SEQ ID NO: 1577 - protein, 774 aa, synthetic construct
MILDTDYITEDGKPVIRIFKKENGEFKIEYDRTFEWYFYALLKDDSAIEEVKKITAERHGTVVTVKRVEKVQKKFLGRPVEVWKLYFTHFQDIPAIRDKIREHPAVIDIYEYDIPFAKRYLIDKGLVPMEGDEELKMLAFDIETLYHEGEEFAEGPILMISYADEEGARVITWKNVDLPYVDVVSTEREMIKRFLRVVKEKDPDVLITYNGDNFDFAYLKKRCEKLGINFALGRDGSEPKIQRMGDRFAVEVKGRIHFDLYPVIRRTINLPTYTLEAVYEAVFGQPKEKVYAEEITTAWETGENLERVARYSMEDAKVTYELGKEFLPMEAQLSRLIGQSLWDVSRSSTGNLVEWFLLRKAYERNELAPNKPDEKELARRRQSYEGGYVKEPERGLWENIVYLDFRSLYPSIIITHNVSPDTLNREGCKEYDVAPQVGHRFCKDFPGFIPSLLGDLLEERQKIKKKMKATIDPIERKLLDYRQRAIKILANSYYGYYGYARARWYCKECAESVTAWGREYITMTIKEIEEKYGFKVIYSDTDGFFATIPGADAETVKKKAMEFLKYINAKLPGALELEYEGFYKRGFFVTKKKYAVIDEEGKITTRGLEIVRRDWSEIAKETQARVLEALLKDGDVEKAVRIVKEVTEKLSKYEVPPEKLVIHEQITRDLKDYKATGPHVAVAKRLAARGVKIRPGTVISYIVLKGSGRIGDRAIPFDEFDPTKHKYDAEYYIENQVLPAVERILRAFGYRKEDLRYQKTRQVGLSAWLKPKGT

SEQ ID NO: 1578 - protein, 774 aa, synthetic construct
MILDTDYITEDGKPVIRIFKKENGEFKIEYDRTFEWYFYALLKDDSAIEEVKKITAERHGTVVTVKRVEKVQKKFLGRPVEVWKLYFTHFQDIPAIADKIREHPAVIDIYEYDIPFAKRYLIDKGLVPMEGDEELKMLAFDIETLYHEGEEFAEGPILMISYADEEGARVITWKNVDLPYVDVVSTEREMIKRFLRVVKEKDPDVLITYNGDNFDFAYLKKRCEKLGINFALGRDGSEPKIQRMGDRFAVEVKGRIHFDLYPVIRRTINLPTYTLEAVYEAVFGQPKEKVYAEEITTAWETGENLERVARYSMEDAKVTYELGKEFLPMEAQLSRLIGQSLWDVSRSSTGNLVEWFLLRKAYERNELAPNKPDEKELARRRQSYEGGYVKEPERGLWENIVYLDFRSLYPSIIITHNVSPDTLNREGCKEYDVAPQVGHRFCKDFPGFIPSLLGDLLEERQKIKKKMKATIDPIERKLLDYRQRAIKILANSYYGYYGYARARWYCKECAESVTAWGREYITMTIKEIEEKYGFKVIYSDTDGFFATIPGADAETVKKKAMEFLKYINAKLPGALELEYEGFYKRGFFVTKKKYAVIDEEGKITTRGLEIVRRDWSEIAKETQARVLEALLKDGDVEKAVRIVKEVTEKLSKYEVPPEKLVIHEQITRDLKDYKATGPHVAVAKRLAARGVKIRPGTVISYIVLKGSGRIGDRAIPFDEFDPTKHKYDAEYYIENQVLPAVERILRAFGYRKEDLRYQKTRQVGLSAWLKPKGT

SEQ ID NO: 1579 - protein, 774 aa, synthetic construct
MILDTDYITEDGKPVIRIFKKENGEFKIEYDRTFEWYFYALLKDDSAIEEVKKITAERHGTVVTVKRVEKVQKKFLGRPVEVWKLYFTHFQDIPAIFDKIREHPAVIDIYEYDIPFAKRYLIDKGLVPMEGDEELKMLAFDIETLYHEGEEFAEGPILMISYADEEGARVITWKNVDLPYVDVVSTEREMIKRFLRVVKEKDPDVLITYNGDNFDFAYLKKRCEKLGINFALGRDGSEPKIQRMGDRFAVEVKGRIHFDLYPVIRRTINLPTYTLEAVYEAVFGQPKEKVYAEEITTAWETGENLERVARYSMEDAKVTYELGKEFLPMEAQLSRLIGQSLWDVSRSSTGNLVEWFLLRKAYERNELAPNKPDEKELARRRQSYEGGYVKEPERGLWENIVYLDFRSLYPSIIITHNVSPDTLNREGCKEYDVAPQVGHRFCKDFPGFIPSLLGDLLEERQKIKKKMKATIDPIERKLLDYRQRAIKILANSYYGYYGYARARWYCKECAESVTAWGREYITMTIKEIEEKYGFKVIYSDTDGFFATIPGADAETVKKKAMEFLKYINAKLPGALELEYEGFYKRGFFVTKKKYAVIDEEGKITTRGLEIVRRDWSEIAKETQARVLEALLKDGDVEKAVRIVKEVTEKLSKYEVPPEKLVIHEQITRDLKDYKATGPHVAVAKRLAARGVKIRPGTVISYIVLKGSGRIGDRAIPFDEFDPTKHKYDAEYYIENQVLPAVERILRAFGYRKEDLRYQKTRQVGLSAWLKPKGT

SEQ ID NO: 1580 - protein, 774 aa, synthetic construct
MILDTDYITEDGKPVIRIFKKENGEFKIEYDRTFEWYFYALLKDDSAIEEVKKITAERHGTVVTVKRVEKVQKKFLGRPVEVWKLYFTHFQDIPAIWDKIREHPAVIDIYEYDIPFAKRYLIDKGLVPMEGDEELKMLAFDIETLYHEGEEFAEGPILMISYADEEGARVITWKNVDLPYVDVVSTEREMIKRFLRVVKEKDPDVLITYNGDNFDFAYLKKRCEKLGINFALGRDGSEPKIQRMGDRFAVEVKGRIHFDLYPVIRRTINLPTYTLEAVYEAVFGQPKEKVYAEEITTAWETGENLERVARYSMEDAKVTYELGKEFLPMEAQLSRLIGQSLWDVSRSSTGNLVEWFLLRKAYERNELAPNKPDEKELARRRQSYEGGYVKEPERGLWENIVYLDFRSLYPSIIITHNVSPDTLNREGCKEYDVAPQVGHRFCKDFPGFIPSLLGDLLEERQKIKKKMKATIDPIERKLLDYRQRAIKILANSYYGYYGYARARWYCKECAESVTAWGREYITMTIKEIEEKYGFKVIYSDTDGFFATIPGADAETVKKKAMEFLKYINAKLPGALELEYEGFYKRGFFVTKKKYAVIDEEGKITTRGLEIVRRDWSEIAKETQARVLEALLKDGDVEKAVRIVKEVTEKLSKYEVPPEKLVIHEQITRDLKDYKATGPHVAVAKRLAARGVKIRPGTVISYIVLKGSGRIGDRAIPFDEFDPTKHKYDAEYYIENQVLPAVERILRAFGYRKEDLRYQKTRQVGLSAWLKPKGT

SEQ ID NO: 1581 - protein, 774 aa, synthetic construct
MILDTDYITEDGKPVIRIFKKENGEFKIEYDRTFEWYFYALLKDDSAIEEVKKITAERHGTVVTVKRVEKVQKKFLGRPVEVWKLYFTHFQDKPAIRDKIREHPAVIDIYEYDIPFAKRYLIDKGLVPMEGDEELKMLAFDIETLYHEGEEFAEGPILMISYADEEGARVITWKNVDLPYVDVVSTEREMIKRFLRVVKEKDPDVLITYNGDNFDFAYLKKRCEKLGINFALGRDGSEPKIQRMGDRFAVEVKGRIHFDLYPVIRRTINLPTYTLEAVYEAVFGQPKEKVYAEEITTAWETGENLERVARYSMEDAKVTYELGKEFLPMEAQLSRLIGQSLWDVSRSSTGNLVEWFLLRKAYERNELAPNKPDEKELARRRQSYEGGYVKEPERGLWENIVYLDFRSLYPSIIITHNVSPDTLNREGCKEYDVAPQVGHRFCKDFPGFIPSLLGDLLEERQKIKKKMKATIDPIERKLLDYRQRAIKILANSYYGYYGYARARWYCKECAESVTAWGREYITMTIKEIEEKYGFKVIYSDTDGFFATIPGADAETVKKKAMEFLKYINAKLPGALELEYEGFYKRGFFVTKKKYAVIDEEGKITTRGLEIVRRDWSEIAKETQARVLEALLKDGDVEKAVRIVKEVTEKLSKYEVPPEKLVIHEQITRDLKDYKATGPHVAVAKRLAARGVKIRPGTVISYIVLKGSGRIGDRAIPFDEFDPTKHKYDAEYYIENQVLPAVERILRAFGYRKEDLRYQKTRQVGLSAWLKPKGT

SEQ ID NO: 1582 - protein, 774 aa, synthetic construct
MILDTDYITEDGKPVIRIFKKENGEFKIEYDRTFEWYFYALLKDDSAIEEVKKITAERHGTVVTVKRVEKVQKKFLGRPVEVWKLYFTHFQDRPAIRDKIREHPAVIDIYEYDIPFAKRYLIDKGLVPMEGDEELKMLAFDIETLYHEGEEFAEGPILMISYADEEGARVITWKNVDLPYVDVVSTEREMIKRFLRVVKEKDPDVLITYNGDNFDFAYLKKRCEKLGINFALGRDGSEPKIQRMGDRFAVEVKGRIHFDLYPVIRRTINLPTYTLEAVYEAVFGQPKEKVYAEEITTAWETGENLERVARYSMEDAKVTYELGKEFLPMEAQLSRLIGQSLWDVSRSSTGNLVEWFLLRKAYERNELAPNKPDEKELARRRQSYEGGYVKEPERGLWENIVYLDFRSLYPSIIITHNVSPDTLNREGCKEYDVAPQVGHRFCKDFPGFIPSLLGDLLEERQKIKKKMKATIDPIERKLLDYRQRAIKILANSYYGYYGYARARWYCKECAESVTAWGREYITMTIKEIEEKYGFKVIYSDTDGFFATIPGADAETVKKKAMEFLKYINAKLPGALELEYEGFYKRGFFVTKKKYAVIDEEGKITTRGLEIVRRDWSEIAKETQARVLEALLKDGDVEKAVRIVKEVTEKLSKYEVPPEKLVIHEQITRDLKDYKATGPHVAVAKRLAARGVKIRPGTVISYIVLKGSGRIGDRAIPFDEFDPTKHKYDAEYYIENQVLPAVERILRAFGYRKEDLRYQKTRQVGLSAWLKPKGT

SEQ ID NO: 1583 - protein, 774 aa, synthetic construct
MILDTDYITEDGKPVIRIFKKENGEFKIEYDRTFEWYFYALLKDDSAIEEVKKITAERHGTVVTVKRVEKVQKKFLGRPVEVWKLYFTHIQDVPAIRDKIREHPAVIDIYEYDIPFAKRYLIDKGLVPMEGDEELKMLAFDIETLYHEGEEFAEGPILMISYADEEGARVITWKNVDLPYVDVVSTEREMIKRFLRVVKEKDPDVLITYNGDNFDFAYLKKRCEKLGINFALGRDGSEPKIQRMGDRFAVEVKGRIHFDLYPVIRRTINLPTYTLEAVYEAVFGQPKEKVYAEEITTAWETGENLERVARYSMEDAKVTYELGKEFLPMEAQLSRLIGQSLWDVSRSSTGNLVEWFLLRKAYERNELAPNKPDEKELARRRQSYEGGYVKEPERGLWENIVYLDFRSLYPSIIITHNVSPDTLNREGCKEYDVAPQVGHRFCKDFPGFIPSLLGDLLEERQKIKKKMKATIDPIERKLLDYRQRAIKILANSYYGYYGYARARWYCKECAESVTAWGREYITMTIKEIEEKYGFKVIYSDTDGFFATIPGADAETVKKKAMEFLKYINAKLPGALELEYEGFYKRGFFVTKKKYAVIDEEGKITTRGLEIVRRDWSEIAKETQARVLEALLKDGDVEKAVRIVKEVTEKLSKYEVPPEKLVIHEQITRDLKDYKATGPHVAVAKRLAARGVKIRPGTVISYIVLKGSGRIGDRAIPFDEFDPTKHKYDAEYYIENQVLPAVERILRAFGYRKEDLRYQKTRQVGLSAWLKPKGT

SEQ ID NO: 1584 - protein, 774 aa, synthetic construct
MILDTDYITEDGKPVIRIFKKENGEFKIEYDRTFEWYFYALLKDDSAIEEVKKITAERHGTVVTVKRVEKVQKKFLGRPVEVWKLYFTHIQDVPAIFDKIREHPAVIDIYEYDIPFAKRYLIDKGLVPMEGDEELKMLAFDIETLYHEGEEFAEGPILMISYADEEGARVITWKNVDLPYVDVVSTEREMIKRFLRVVKEKDPDVLITYNGDNFDFAYLKKRCEKLGINFALGRDGSEPKIQRMGDRFAVEVKGRIHFDLYPVIRRTINLPTYTLEAVYEAVFGQPKEKVYAEEITTAWETGENLERVARYSMEDAKVTYELGKEFLPMEAQLSRLIGQSLWDVSRSSTGNLVEWFLLRKAYERNELAPNKPDEKELARRRQSYEGGYVKEPERGLWENIVYLDFRSLYPSIIITHNVSPDTLNREGCKEYDVAPQVGHRFCKDFPGFIPSLLGDLLEERQKIKKKMKATIDPIERKLLDYRQRAIKILANSYYGYYGYARARWYCKECAESVTAWGREYITMTIKEIEEKYGFKVIYSDTDGFFATIPGADAETVKKKAMEFLKYINAKLPGALELEYEGFYKRGFFVTKKKYAVIDEEGKITTRGLEIVRRDWSEIAKETQARVLEALLKDGDVEKAVRIVKEVTEKLSKYEVPPEKLVIHEQITRDLKDYKATGPHVAVAKRLAARGVKIRPGTVISYIVLKGSGRIGDRAIPFDEFDPTKHKYDAEYYIENQVLPAVERILRAFGYRKEDLRYQKTRQVGLSAWLKPKGT

SEQ ID NO: 1585 - protein, 774 aa, synthetic construct
MILDTDYITEDGKPVIRIFKKENGEFKIEYDRTFEWYFYALLKDDSAIEEVKKITAERHGTVVTVKRVEKVQKKFLGRPVEVWKLYFTHIQDIPAIRDKIREHPAVIDIYEYDIPFAKRYLIDKGLVPMEGDEELKMLAFDIETLYHEGEEFAEGPILMISYADEEGARVITWKNVDLPYVDVVSTEREMIKRFLRVVKEKDPDVLITYNGDNFDFAYLKKRCEKLGINFALGRDGSEPKIQRMGDRFAVEVKGRIHFDLYPVIRRTINLPTYTLEAVYEAVFGQPKEKVYAEEITTAWETGENLERVARYSMEDAKVTYELGKEFLPMEAQLSRLIGQSLWDVSRSSTGNLVEWFLLRKAYERNELAPNKPDEKELARRRQSYEGGYVKEPERGLWENIVYLDFRSLYPSIIITHNVSPDTLNREGCKEYDVAPQVGHRFCKDFPGFIPSLLGDLLEERQKIKKKMKATIDPIERKLLDYRQRAIKILANSYYGYYGYARARWYCKECAESVTAWGREYITMTIKEIEEKYGFKVIYSDTDGFFATIPGADAETVKKKAMEFLKYINAKLPGALELEYEGFYKRGFFVTKKKYAVIDEEGKITTRGLEIVRRDWSEIAKETQARVLEALLKDGDVEKAVRIVKEVTEKLSKYEVPPEKLVIHEQITRDLKDYKATGPHVAVAKRLAARGVKIRPGTVISYIVLKGSGRIGDRAIPFDEFDPTKHKYDAEYYIENQVLPAVERILRAFGYRKEDLRYQKTRQVGLSAWLKPKGT

SEQ ID NO: 1586 - protein, 774 aa, synthetic construct
MILDTDYITEDGKPVIRIFKKENGEFKIEYDRTFEWYFYALLKDDSAIEEVKKITAERHGTVVTVKRVEKVQKKFLGRPVEVWKLYFTHIQDIPAIADKIREHPAVIDIYEYDIPFAKRYLIDKGLVPMEGDEELKMLAFDIETLYHEGEEFAEGPILMISYADEEGARVITWKNVDLPYVDVVSTEREMIKRFLRVVKEKDPDVLITYNGDNFDFAYLKKRCEKLGINFALGRDGSEPKIQRMGDRFAVEVKGRIHFDLYPVIRRTINLPTYTLEAVYEAVFGQPKEKVYAEEITTAWETGENLERVARYSMEDAKVTYELGKEFLPMEAQLSRLIGQSLWDVSRSSTGNLVEWFLLRKAYERNELAPNKPDEKELARRRQSYEGGYVKEPERGLWENIVYLDFRSLYPSIIITHNVSPDTLNREGCKEYDVAPQVGHRFCKDFPGFIPSLLGDLLEERQKIKKKMKATIDPIERKLLDYRQRAIKILANSYYGYYGYARARWYCKECAESVTAWGREYITMTIKEIEEKYGFKVIYSDTDGFFATIPGADAETVKKKAMEFLKYINAKLPGALELEYEGFYKRGFFVTKKKYAVIDEEGKITTRGLEIVRRDWSEIAKETQARVLEALLKDGDVEKAVRIVKEVTEKLSKYEVPPEKLVIHEQITRDLKDYKATGPHVAVAKRLAARGVKIRPGTVISYIVLKGSGRIGDRAIPFDEFDPTKHKYDAEYYIENQVLPAVERILRAFGYRKEDLRYQKTRQVGLSAWLKPKGT

SEQ ID NO: 1587 - protein, 774 aa, synthetic construct
MILDTDYITEDGKPVIRIFKKENGEFKIEYDRTFEWYFYALLKDDSAIEEVKKITAERHGTVVTVKRVEKVQKKFLGRPVEVWKLYFTHIQDRPAIADKIREHPAVIDIYEYDIPFAKRYLIDKGLVPMEGDEELKMLAFDIETLYHEGEEFAEGPILMISYADEEGARVITWKNVDLPYVDVVSTEREMIKRFLRVVKEKDPDVLITYNGDNFDFAYLKKRCEKLGINFALGRDGSEPKIQRMGDRFAVEVKGRIHFDLYPVIRRTINLPTYTLEAVYEAVFGQPKEKVYAEEITTAWETGENLERVARYSMEDAKVTYELGKEFLPMEAQLSRLIGQSLWDVSRSSTGNLVEWFLLRKAYERNELAPNKPDEKELARRRQSYEGGYVKEPERGLWENIVYLDFRSLYPSIIITHNVSPDTLNREGCKEYDVAPQVGHRFCKDFPGFIPSLLGDLLEERQKIKKKMKATIDPIERKLLDYRQRAIKILANSYYGYYGYARARWYCKECAESVTAWGREYITMTIKEIEEKYGFKVIYSDTDGFFATIPGADAETVKKKAMEFLKYINAKLPGALELEYEGFYKRGFFVTKKKYAVIDEEGKITTRGLEIVRRDWSEIAKETQARVLEALLKDGDVEKAVRIVKEVTEKLSKYEVPPEKLVIHEQITRDLKDYKATGPHVAVAKRLAARGVKIRPGTVISYIVLKGSGRIGDRAIPFDEFDPTKHKYDAEYYIENQVLPAVERILRAFGYRKEDLRYQKTRQVGLSAWLKPKGT

SEQ ID NO: 1588 - protein, 774 aa, synthetic construct
MILDTDYITEDGKPVIRIFKKENGEFKIEYDRTFEWYFYALLKDDSAIEEVKKITAERHGTVVTVKRVEKVQKKFLGRPVEVWKLYFTHIQDRPAIWDKIREHPAVIDIYEYDIPFAKRYLIDKGLVPMEGDEELKMLAFDIETLYHEGEEFAEGPILMISYADEEGARVITWKNVDLPYVDVVSTEREMIKRFLRVVKEKDPDVLITYNGDNFDFAYLKKRCEKLGINFALGRDGSEPKIQRMGDRFAVEVKGRIHFDLYPVIRRTINLPTYTLEAVYEAVFGQPKEKVYAEEITTAWETGENLERVARYSMEDAKVTYELGKEFLPMEAQLSRLIGQSLWDVSRSSTGNLVEWFLLRKAYERNELAPNKPDEKELARRRQSYEGGYVKEPERGLWENIVYLDFRSLYPSIIITHNVSPDTLNREGCKEYDVAPQVGHRFCKDFPGFIPSLLGDLLEERQKIKKKMKATIDPIERKLLDYRQRAIKILANSYYGYYGYARARWYCKECAESVTAWGREYITMTIKEIEEKYGFKVIYSDTDGFFATIPGADAETVKKKAMEFLKYINAKLPGALELEYEGFYKRGFFVTKKKYAVIDEEGKITTRGLEIVRRDWSEIAKETQARVLEALLKDGDVEKAVRIVKEVTEKLSKYEVPPEKLVIHEQITRDLKDYKATGPHVAVAKRLAARGVKIRPGTVISYIVLKGSGRIGDRAIPFDEFDPTKHKYDAEYYIENQVLPAVERILRAFGYRKEDLRYQKTRQVGLSAWLKPKGT

SEQ ID NO: 1589 - protein, 774 aa, synthetic construct
MILDTDYITEDGKPVIRIFKKENGEFKIEYDRTFEWYFYALLKDDSAIEEVKKITAERHGTVVTVKRVEKVQKKFLGRPVEVWKLYFTHSQDVPAIRDKIREHPAVIDIYEYDIPFAKRYLIDKGLVPMEGDEELKMLAFDIETLYHEGEEFAEGPILMISYADEEGARVITWKNVDLPYVDVVSTEREMIKRFLRVVKEKDPDVLITYNGDNFDFAYLKKRCEKLGINFALGRDGSEPKIQRMGDRFAVEVKGRIHFDLYPVIRRTINLPTYTLEAVYEAVFGQPKEKVYAEEITTAWETGENLERVARYSMEDAKVTYELGKEFLPMEAQLSRLIGQSLWDVSRSSTGNLVEWFLLRKAYERNELAPNKPDEKELARRRQSYEGGYVKEPERGLWENIVYLDFRSLYPSIIITHNVSPDTLNREGCKEYDVAPQVGHRFCKDFPGFIPSLLGDLLEERQKIKKKMKATIDPIERKLLDYRQRAIKILANSYYGYYGYARARWYCKECAESVTAWGREYITMTIKEIEEKYGFKVIYSDTDGFFATIPGADAETVKKKAMEFLKYINAKLPGALELEYEGFYKRGFFVTKKKYAVIDEEGKITTRGLEIVRRDWSEIAKETQARVLEALLKDGDVEKAVRIVKEVTEKLSKYEVPPEKLVIHEQITRDLKDYKATGPHVAVAKRLAARGVKIRPGTVISYIVLKGSGRIGDRAIPFDEFDPTKHKYDAEYYIENQVLPAVERILRAFGYRKEDLRYQKTRQVGLSAWLKPKGT

SEQ ID NO: 1590 - protein, 774 aa, synthetic construct
MILDTDYITEDGKPVIRIFKKENGEFKIEYDRTFEWYFYALLKDDSAIEEVKKITAERHGTVVTVKRVEKVQKKFLGRPVEVWKLYFTHWQDVPAIRDKIREHPAVIDIYEYDIPFAKRYLIDKGLVPMEGDEELKMLAFDIETLYHEGEEFAEGPILMISYADEEGARVITWKNVDLPYVDVVSTEREMIKRFLRVVKEKDPDVLITYNGDNFDFAYLKKRCEKLGINFALGRDGSEPKIQRMGDRFAVEVKGRIHFDLYPVIRRTINLPTYTLEAVYEAVFGQPKEKVYAEEITTAWETGENLERVARYSMEDAKVTYELGKEFLPMEAQLSRLIGQSLWDVSRSSTGNLVEWFLLRKAYERNELAPNKPDEKELARRRQSYEGGYVKEPERGLWENIVYLDFRSLYPSIIITHNVSPDTLNREGCKEYDVAPQVGHRFCKDFPGFIPSLLGDLLEERQKIKKKMKATIDPIERKLLDYRQRAIKILANSYYGYYGYARARWYCKECAESVTAWGREYITMTIKEIEEKYGFKVIYSDTDGFFATIPGADAETVKKKAMEFLKYINAKLPGALELEYEGFYKRGFFVTKKKYAVIDEEGKITTRGLEIVRRDWSEIAKETQARVLEALLKDGDVEKAVRIVKEVTEKLSKYEVPPEKLVIHEQITRDLKDYKATGPHVAVAKRLAARGVKIRPGTVISYIVLKGSGRIGDRAIPFDEFDPTKHKYDAEYYIENQVLPAVERILRAFGYRKEDLRYQKTRQVGLSAWLKPKGT

SEQ ID NO: 1591 - protein, 774 aa, synthetic construct
MILDTDYITEDGKPVIRIFKKENGEFKIEYDRTFEWYFYALLKDDSAIEEVKKITAERHGTVVTVKRVEKVQKKFLGRPVEVWKLYFTHWQDVPAIADKIREHPAVIDIYEYDIPFAKRYLIDKGLVPMEGDEELKMLAFDIETLYHEGEEFAEGPILMISYADEEGARVITWKNVDLPYVDVVSTEREMIKRFLRVVKEKDPDVLITYNGDNFDFAYLKKRCEKLGINFALGRDGSEPKIQRMGDRFAVEVKGRIHFDLYPVIRRTINLPTYTLEAVYEAVFGQPKEKVYAEEITTAWETGENLERVARYSMEDAKVTYELGKEFLPMEAQLSRLIGQSLWDVSRSSTGNLVEWFLLRKAYERNELAPNKPDEKELARRRQSYEGGYVKEPERGLWENIVYLDFRSLYPSIIITHNVSPDTLNREGCKEYDVAPQVGHRFCKDFPGFIPSLLGDLLEERQKIKKKMKATIDPIERKLLDYRQRAIKILANSYYGYYGYARARWYCKECAESVTAWGREYITMTIKEIEEKYGFKVIYSDTDGFFATIPGADAETVKKKAMEFLKYINAKLPGALELEYEGFYKRGFFVTKKKYAVIDEEGKITTRGLEIVRRDWSEIAKETQARVLEALLKDGDVEKAVRIVKEVTEKLSKYEVPPEKLVIHEQITRDLKDYKATGPHVAVAKRLAARGVKIRPGTVISYIVLKGSGRIGDRAIPFDEFDPTKHKYDAEYYIENQVLPAVERILRAFGYRKEDLRYQKTRQVGLSAWLKPKGT

SEQ ID NO: 1592 - protein, 774 aa, synthetic construct
MILDTDYITEDGKPVIRIFKKENGEFKIEYDRTFEWYFYALLKDDSAIEEVKKITAERHGTVVTVKRVEKVQKKFLGRPVEVWKLYFTHWQDVPAIHDKIREHPAVIDIYEYDIPFAKRYLIDKGLVPMEGDEELKMLAFDIETLYHEGEEFAEGPILMISYADEEGARVITWKNVDLPYVDVVSTEREMIKRFLRVVKEKDPDVLITYNGDNFDFAYLKKRCEKLGINFALGRDGSEPKIQRMGDRFAVEVKGRIHFDLYPVIRRTINLPTYTLEAVYEAVFGQPKEKVYAEEITTAWETGENLERVARYSMEDAKVTYELGKEFLPMEAQLSRLIGQSLWDVSRSSTGNLVEWFLLRKAYERNELAPNKPDEKELARRRQSYEGGYVKEPERGLWENIVYLDFRSLYPSIIITHNVSPDTLNREGCKEYDVAPQVGHRFCKDFPGFIPSLLGDLLEERQKIKKKMKATIDPIERKLLDYRQRAIKILANSYYGYYGYARARWYCKECAESVTAWGREYITMTIKEIEEKYGFKVIYSDTDGFFATIPGADAETVKKKAMEFLKYINAKLPGALELEYEGFYKRGFFVTKKKYAVIDEEGKITTRGLEIVRRDWSEIAKETQARVLEALLKDGDVEKAVRIVKEVTEKLSKYEVPPEKLVIHEQITRDLKDYKATGPHVAVAKRLAARGVKIRPGTVISYIVLKGSGRIGDRAIPFDEFDPTKHKYDAEYYIENQVLPAVERILRAFGYRKEDLRYQKTRQVGLSAWLKPKGT

SEQ ID NO: 1593 - protein, 774 aa, synthetic construct
MILDTDYITEDGKPVIRIFKKENGEFKIEYDRTFEWYFYALLKDDSAIEEVKKITAERHGTVVTVKRVEKVQKKFLGRPVEVWKLYFTHWQDIPAIRDKIREHPAVIDIYEYDIPFAKRYLIDKGLVPMEGDEELKMLAFDIETLYHEGEEFAEGPILMISYADEEGARVITWKNVDLPYVDVVSTEREMIKRFLRVVKEKDPDVLITYNGDNFDFAYLKKRCEKLGINFALGRDGSEPKIQRMGDRFAVEVKGRIHFDLYPVIRRTINLPTYTLEAVYEAVFGQPKEKVYAEEITTAWETGENLERVARYSMEDAKVTYELGKEFLPMEAQLSRLIGQSLWDVSRSSTGNLVEWFLLRKAYERNELAPNKPDEKELARRRQSYEGGYVKEPERGLWENIVYLDFRSLYPSIIITHNVSPDTLNREGCKEYDVAPQVGHRFCKDFPGFIPSLLGDLLEERQKIKKKMKATIDPIERKLLDYRQRAIKILANSYYGYYGYARARWYCKECAESVTAWGREYITMTIKEIEEKYGFKVIYSDTDGFFATIPGADAETVKKKAMEFLKYINAKLPGALELEYEGFYKRGFFVTKKKYAVIDEEGKITTRGLEIVRRDWSEIAKETQARVLEALLKDGDVEKAVRIVKEVTEKLSKYEVPPEKLVIHEQITRDLKDYKATGPHVAVAKRLAARGVKIRPGTVISYIVLKGSGRIGDRAIPFDEFDPTKHKYDAEYYIENQVLPAVERILRAFGYRKEDLRYQKTRQVGLSAWLKPKGT

SEQ ID NO: 1594 - protein, 774 aa, synthetic construct
MILDTDYITEDGKPVIRIFKKENGEFKIEYDRTFEWYFYALLKDDSAIEEVKKITAERHGTVVTVKRVEKVQKKFLGRPVEVWKLYFTHWQDIPAIADKIREHPAVIDIYEYDIPFAKRYLIDKGLVPMEGDEELKMLAFDIETLYHEGEEFAEGPILMISYADEEGARVITWKNVDLPYVDVVSTEREMIKRFLRVVKEKDPDVLITYNGDNFDFAYLKKRCEKLGINFALGRDGSEPKIQRMGDRFAVEVKGRIHFDLYPVIRRTINLPTYTLEAVYEAVFGQPKEKVYAEEITTAWETGENLERVARYSMEDAKVTYELGKEFLPMEAQLSRLIGQSLWDVSRSSTGNLVEWFLLRKAYERNELAPNKPDEKELARRRQSYEGGYVKEPERGLWENIVYLDFRSLYPSIIITHNVSPDTLNREGCKEYDVAPQVGHRFCKDFPGFIPSLLGDLLEERQKIKKKMKATIDPIERKLLDYRQRAIKILANSYYGYYGYARARWYCKECAESVTAWGREYITMTIKEIEEKYGFKVIYSDTDGFFATIPGADAETVKKKAMEFLKYINAKLPGALELEYEGFYKRGFFVTKKKYAVIDEEGKITTRGLEIVRRDWSEIAKETQARVLEALLKDGDVEKAVRIVKEVTEKLSKYEVPPEKLVIHEQITRDLKDYKATGPHVAVAKRLAARGVKIRPGTVISYIVLKGSGRIGDRAIPFDEFDPTKHKYDAEYYIENQVLPAVERILRAFGYRKEDLRYQKTRQVGLSAWLKPKGT

SEQ ID NO: 1595 - protein, 774 aa, synthetic construct
MILDTDYITEDGKPVIRIFKKENGEFKIEYDRTFEWYFYALLKDDSAIEEVKKITAERHGTVVTVKRVEKVQKKFLGRPVEVWKLYFTHWQDIPAIFDKIREHPAVIDIYEYDIPFAKRYLIDKGLVPMEGDEELKMLAFDIETLYHEGEEFAEGPILMISYADEEGARVITWKNVDLPYVDVVSTEREMIKRFLRVVKEKDPDVLITYNGDNFDFAYLKKRCEKLGINFALGRDGSEPKIQRMGDRFAVEVKGRIHFDLYPVIRRTINLPTYTLEAVYEAVFGQPKEKVYAEEITTAWETGENLERVARYSMEDAKVTYELGKEFLPMEAQLSRLIGQSLWDVSRSSTGNLVEWFLLRKAYERNELAPNKPDEKELARRRQSYEGGYVKEPERGLWENIVYLDFRSLYPSIIITHNVSPDTLNREGCKEYDVAPQVGHRFCKDFPGFIPSLLGDLLEERQKIKKKMKATIDPIERKLLDYRQRAIKILANSYYGYYGYARARWYCKECAESVTAWGREYITMTIKEIEEKYGFKVIYSDTDGFFATIPGADAETVKKKAMEFLKYINAKLPGALELEYEGFYKRGFFVTKKKYAVIDEEGKITTRGLEIVRRDWSEIAKETQARVLEALLKDGDVEKAVRIVKEVTEKLSKYEVPPEKLVIHEQITRDLKDYKATGPHVAVAKRLAARGVKIRPGTVISYIVLKGSGRIGDRAIPFDEFDPTKHKYDAEYYIENQVLPAVERILRAFGYRKEDLRYQKTRQVGLSAWLKPKGT

SEQ ID NO: 1596 - protein, 774 aa, synthetic construct
MILDTDYITEDGKPVIRIFKKENGEFKIEYDRTFEWYFYALLKDDSAIEEVKKITAERHGTVVTVKRVEKVQKKFLGRPVEVWKLYFTHWQDIPAIHDKIREHPAVIDIYEYDIPFAKRYLIDKGLVPMEGDEELKMLAFDIETLYHEGEEFAEGPILMISYADEEGARVITWKNVDLPYVDVVSTEREMIKRFLRVVKEKDPDVLITYNGDNFDFAYLKKRCEKLGINFALGRDGSEPKIQRMGDRFAVEVKGRIHFDLYPVIRRTINLPTYTLEAVYEAVFGQPKEKVYAEEITTAWETGENLERVARYSMEDAKVTYELGKEFLPMEAQLSRLIGQSLWDVSRSSTGNLVEWFLLRKAYERNELAPNKPDEKELARRRQSYEGGYVKEPERGLWENIVYLDFRSLYPSIIITHNVSPDTLNREGCKEYDVAPQVGHRFCKDFPGFIPSLLGDLLEERQKIKKKMKATIDPIERKLLDYRQRAIKILANSYYGYYGYARARWYCKECAESVTAWGREYITMTIKEIEEKYGFKVIYSDTDGFFATIPGADAETVKKKAMEFLKYINAKLPGALELEYEGFYKRGFFVTKKKYAVIDEEGKITTRGLEIVRRDWSEIAKETQARVLEALLKDGDVEKAVRIVKEVTEKLSKYEVPPEKLVIHEQITRDLKDYKATGPHVAVAKRLAARGVKIRPGTVISYIVLKGSGRIGDRAIPFDEFDPTKHKYDAEYYIENQVLPAVERILRAFGYRKEDLRYQKTRQVGLSAWLKPKGT

SEQ ID NO: 1597 - protein, 774 aa, synthetic construct
MILDTDYITEDGKPVIRIFKKENGEFKIEYDRTFEWYFYALLKDDSAIEEVKKITAERHGTVVTVKRVEKVQKKFLGRPVEVWKLYFTHWQDIPAIWDKIREHPAVIDIYEYDIPFAKRYLIDKGLVPMEGDEELKMLAFDIETLYHEGEEFAEGPILMISYADEEGARVITWKNVDLPYVDVVSTEREMIKRFLRVVKEKDPDVLITYNGDNFDFAYLKKRCEKLGINFALGRDGSEPKIQRMGDRFAVEVKGRIHFDLYPVIRRTINLPTYTLEAVYEAVFGQPKEKVYAEEITTAWETGENLERVARYSMEDAKVTYELGKEFLPMEAQLSRLIGQSLWDVSRSSTGNLVEWFLLRKAYERNELAPNKPDEKELARRRQSYEGGYVKEPERGLWENIVYLDFRSLYPSIIITHNVSPDTLNREGCKEYDVAPQVGHRFCKDFPGFIPSLLGDLLEERQKIKKKMKATIDPIERKLLDYRQRAIKILANSYYGYYGYARARWYCKECAESVTAWGREYITMTIKEIEEKYGFKVIYSDTDGFFATIPGADAETVKKKAMEFLKYINAKLPGALELEYEGFYKRGFFVTKKKYAVIDEEGKITTRGLEIVRRDWSEIAKETQARVLEALLKDGDVEKAVRIVKEVTEKLSKYEVPPEKLVIHEQITRDLKDYKATGPHVAVAKRLAARGVKIRPGTVISYIVLKGSGRIGDRAIPFDEFDPTKHKYDAEYYIENQVLPAVERILRAFGYRKEDLRYQKTRQVGLSAWLKPKGT

SEQ ID NO: 1598 - protein, 774 aa, synthetic construct
MILDTDYITEDGKPVIRIFKKENGEFKIEYDRTFEWYFYALLKDDSAIEEVKKITAERHGTVVTVKRVEKVQKKFLGRPVEVWKLYFTHWQDQPAIADKIREHPAVIDIYEYDIPFAKRYLIDKGLVPMEGDEELKMLAFDIETLYHEGEEFAEGPILMISYADEEGARVITWKNVDLPYVDVVSTEREMIKRFLRVVKEKDPDVLITYNGDNFDFAYLKKRCEKLGINFALGRDGSEPKIQRMGDRFAVEVKGRIHFDLYPVIRRTINLPTYTLEAVYEAVFGQPKEKVYAEEITTAWETGENLERVARYSMEDAKVTYELGKEFLPMEAQLSRLIGQSLWDVSRSSTGNLVEWFLLRKAYERNELAPNKPDEKELARRRQSYEGGYVKEPERGLWENIVYLDFRSLYPSIIITHNVSPDTLNREGCKEYDVAPQVGHRFCKDFPGFIPSLLGDLLEERQKIKKKMKATIDPIERKLLDYRQRAIKILANSYYGYYGYARARWYCKECAESVTAWGREYITMTIKEIEEKYGFKVIYSDTDGFFATIPGADAETVKKKAMEFLKYINAKLPGALELEYEGFYKRGFFVTKKKYAVIDEEGKITTRGLEIVRRDWSEIAKETQARVLEALLKDGDVEKAVRIVKEVTEKLSKYEVPPEKLVIHEQITRDLKDYKATGPHVAVAKRLAARGVKIRPGTVISYIVLKGSGRIGDRAIPFDEFDPTKHKYDAEYYIENQVLPAVERILRAFGYRKEDLRYQKTRQVGLSAWLKPKGT

SEQ ID NO: 1599 - protein, 774 aa, synthetic construct
MILDTDYITEDGKPVIRIFKKENGEFKIEYDRTFEWYFYALLKDDSAIEEVKKITAERHGTVVTVKRVEKVQKKFLGRPVEVWKLYFTHWQDRPAIADKIREHPAVIDIYEYDIPFAKRYLIDKGLVPMEGDEELKMLAFDIETLYHEGEEFAEGPILMISYADEEGARVITWKNVDLPYVDVVSTEREMIKRFLRVVKEKDPDVLITYNGDNFDFAYLKKRCEKLGINFALGRDGSEPKIQRMGDRFAVEVKGRIHFDLYPVIRRTINLPTYTLEAVYEAVFGQPKEKVYAEEITTAWETGENLERVARYSMEDAKVTYELGKEFLPMEAQLSRLIGQSLWDVSRSSTGNLVEWFLLRKAYERNELAPNKPDEKELARRRQSYEGGYVKEPERGLWENIVYLDFRSLYPSIIITHNVSPDTLNREGCKEYDVAPQVGHRFCKDFPGFIPSLLGDLLEERQKIKKKMKATIDPIERKLLDYRQRAIKILANSYYGYYGYARARWYCKECAESVTAWGREYITMTIKEIEEKYGFKVIYSDTDGFFATIPGADAETVKKKAMEFLKYINAKLPGALELEYEGFYKRGFFVTKKKYAVIDEEGKITTRGLEIVRRDWSEIAKETQARVLEALLKDGDVEKAVRIVKEVTEKLSKYEVPPEKLVIHEQITRDLKDYKATGPHVAVAKRLAARGVKIRPGTVISYIVLKGSGRIGDRAIPFDEFDPTKHKYDAEYYIENQVLPAVERILRAFGYRKEDLRYQKTRQVGLSAWLKPKGT

SEQ ID NO: 1600 - protein, 774 aa, synthetic construct
MILDTDYITEDGKPVIRIFKKENGEFKIEYDRTFEWYFYALLKDDSAIEEVKKITAERHGTVVTVKRVEKVQKKFLGRPVEVWKLYFTHYQDVPAIRDKIREHPAVIDIYEYDIPFAKRYLIDKGLVPMEGDEELKMLAFDIETLYHEGEEFAEGPILMISYADEEGARVITWKNVDLPYVDVVSTEREMIKRFLRVVKEKDPDVLITYNGDNFDFAYLKKRCEKLGINFALGRDGSEPKIQRMGDRFAVEVKGRIHFDLYPVIRRTINLPTYTLEAVYEAVFGQPKEKVYAEEITTAWETGENLERVARYSMEDAKVTYELGKEFLPMEAQLSRLIGQSLWDVSRSSTGNLVEWFLLRKAYERNELAPNKPDEKELARRRQSYEGGYVKEPERGLWENIVYLDFRSLYPSIIITHNVSPDTLNREGCKEYDVAPQVGHRFCKDFPGFIPSLLGDLLEERQKIKKKMKATIDPIERKLLDYRQRAIKILANSYYGYYGYARARWYCKECAESVTAWGREYITMTIKEIEEKYGFKVIYSDTDGFFATIPGADAETVKKKAMEFLKYINAKLPGALELEYEGFYKRGFFVTKKKYAVIDEEGKITTRGLEIVRRDWSEIAKETQARVLEALLKDGDVEKAVRIVKEVTEKLSKYEVPPEKLVIHEQITRDLKDYKATGPHVAVAKRLAARGVKIRPGTVISYIVLKGSGRIGDRAIPFDEFDPTKHKYDAEYYIENQVLPAVERILRAFGYRKEDLRYQKTRQVGLSAWLKPKGT

SEQ ID NO: 1601 - protein, 774 aa, synthetic construct
MILDTDYITEDGKPVIRIFKKENGEFKIEYDRTFEWYFYALLKDDSAIEEVKKITAERHGTVVTVKRVEKVQKKFLGRPVEVWKLYFTHYQDIPAIRDKIREHPAVIDIYEYDIPFAKRYLIDKGLVPMEGDEELKMLAFDIETLYHEGEEFAEGPILMISYADEEGARVITWKNVDLPYVDVVSTEREMIKRFLRVVKEKDPDVLITYNGDNFDFAYLKKRCEKLGINFALGRDGSEPKIQRMGDRFAVEVKGRIHFDLYPVIRRTINLPTYTLEAVYEAVFGQPKEKVYAEEITTAWETGENLERVARYSMEDAKVTYELGKEFLPMEAQLSRLIGQSLWDVSRSSTGNLVEWFLLRKAYERNELAPNKPDEKELARRRQSYEGGYVKEPERGLWENIVYLDFRSLYPSIIITHNVSPDTLNREGCKEYDVAPQVGHRFCKDFPGFIPSLLGDLLEERQKIKKKMKATIDPIERKLLDYRQRAIKILANSYYGYYGYARARWYCKECAESVTAWGREYITMTIKEIEEKYGFKVIYSDTDGFFATIPGADAETVKKKAMEFLKYINAKLPGALELEYEGFYKRGFFVTKKKYAVIDEEGKITTRGLEIVRRDWSEIAKETQARVLEALLKDGDVEKAVRIVKEVTEKLSKYEVPPEKLVIHEQITRDLKDYKATGPHVAVAKRLAARGVKIRPGTVISYIVLKGSGRIGDRAIPFDEFDPTKHKYDAEYYIENQVLPAVERILRAFGYRKEDLRYQKTRQVGLSAWLKPKGT

SEQ ID NO: 1602 - protein, 774 aa, synthetic construct
MILDTDYITEDGKPVIRIFKKENGEFKIEYDRTFEWYFYALLKDDSAIEEVKKITAERHGTVVTVKRVEKVQKKFLGRPVEVWKLYFTHYQDIPAIADKIREHPAVIDIYEYDIPFAKRYLIDKGLVPMEGDEELKMLAFDIETLYHEGEEFAEGPILMISYADEEGARVITWKNVDLPYVDVVSTEREMIKRFLRVVKEKDPDVLITYNGDNFDFAYLKKRCEKLGINFALGRDGSEPKIQRMGDRFAVEVKGRIHFDLYPVIRRTINLPTYTLEAVYEAVFGQPKEKVYAEEITTAWETGENLERVARYSMEDAKVTYELGKEFLPMEAQLSRLIGQSLWDVSRSSTGNLVEWFLLRKAYERNELAPNKPDEKELARRRQSYEGGYVKEPERGLWENIVYLDFRSLYPSIIITHNVSPDTLNREGCKEYDVAPQVGHRFCKDFPGFIPSLLGDLLEERQKIKKKMKATIDPIERKLLDYRQRAIKILANSYYGYYGYARARWYCKECAESVTAWGREYITMTIKEIEEKYGFKVIYSDTDGFFATIPGADAETVKKKAMEFLKYINAKLPGALELEYEGFYKRGFFVTKKKYAVIDEEGKITTRGLEIVRRDWSEIAKETQARVLEALLKDGDVEKAVRIVKEVTEKLSKYEVPPEKLVIHEQITRDLKDYKATGPHVAVAKRLAARGVKIRPGTVISYIVLKGSGRIGDRAIPFDEFDPTKHKYDAEYYIENQVLPAVERILRAFGYRKEDLRYQKTRQVGLSAWLKPKGT

SEQ ID NO: 1603 - protein, 774 aa, synthetic construct
MILDTDYITEDGKPVIRIFKKENGEFKIEYDRTFEWYFYALLKDDSAIEEVKKITAERHGTVVTVKRVEKVQKKFLGRPVEVWKLYFTHYQDIPAIFDKIREHPAVIDIYEYDIPFAKRYLIDKGLVPMEGDEELKMLAFDIETLYHEGEEFAEGPILMISYADEEGARVITWKNVDLPYVDVVSTEREMIKRFLRVVKEKDPDVLITYNGDNFDFAYLKKRCEKLGINFALGRDGSEPKIQRMGDRFAVEVKGRIHFDLYPVIRRTINLPTYTLEAVYEAVFGQPKEKVYAEEITTAWETGENLERVARYSMEDAKVTYELGKEFLPMEAQLSRLIGQSLWDVSRSSTGNLVEWFLLRKAYERNELAPNKPDEKELARRRQSYEGGYVKEPERGLWENIVYLDFRSLYPSIIITHNVSPDTLNREGCKEYDVAPQVGHRFCKDFPGFIPSLLGDLLEERQKIKKKMKATIDPIERKLLDYRQRAIKILANSYYGYYGYARARWYCKECAESVTAWGREYITMTIKEIEEKYGFKVIYSDTDGFFATIPGADAETVKKKAMEFLKYINAKLPGALELEYEGFYKRGFFVTKKKYAVIDEEGKITTRGLEIVRRDWSEIAKETQARVLEALLKDGDVEKAVRIVKEVTEKLSKYEVPPEKLVIHEQITRDLKDYKATGPHVAVAKRLAARGVKIRPGTVISYIVLKGSGRIGDRAIPFDEFDPTKHKYDAEYYIENQVLPAVERILRAFGYRKEDLRYQKTRQVGLSAWLKPKGT

SEQ ID NO: 1604 - protein, 774 aa, synthetic construct
MILDTDYITEDGKPVIRIFKKENGEFKIEYDRTFEWYFYALLKDDSAIEEVKKITAERHGTVVTVKRVEKVQKKFLGRPVEVWKLYFTHYQDIPAIHDKIREHPAVIDIYEYDIPFAKRYLIDKGLVPMEGDEELKMLAFDIETLYHEGEEFAEGPILMISYADEEGARVITWKNVDLPYVDVVSTEREMIKRFLRVVKEKDPDVLITYNGDNFDFAYLKKRCEKLGINFALGRDGSEPKIQRMGDRFAVEVKGRIHFDLYPVIRRTINLPTYTLEAVYEAVFGQPKEKVYAEEITTAWETGENLERVARYSMEDAKVTYELGKEFLPMEAQLSRLIGQSLWDVSRSSTGNLVEWFLLRKAYERNELAPNKPDEKELARRRQSYEGGYVKEPERGLWENIVYLDFRSLYPSIIITHNVSPDTLNREGCKEYDVAPQVGHRFCKDFPGFIPSLLGDLLEERQKIKKKMKATIDPIERKLLDYRQRAIKILANSYYGYYGYARARWYCKECAESVTAWGREYITMTIKEIEEKYGFKVIYSDTDGFFATIPGADAETVKKKAMEFLKYINAKLPGALELEYEGFYKRGFFVTKKKYAVIDEEGKITTRGLEIVRRDWSEIAKETQARVLEALLKDGDVEKAVRIVKEVTEKLSKYEVPPEKLVIHEQITRDLKDYKATGPHVAVAKRLAARGVKIRPGTVISYIVLKGSGRIGDRAIPFDEFDPTKHKYDAEYYIENQVLPAVERILRAFGYRKEDLRYQKTRQVGLSAWLKPKGT

SEQ ID NO: 1605 - protein, 774 aa, synthetic construct
MILDTDYITEDGKPVIRIFKKENGEFKIEYDRTFEWYFYALLKDDSAIEEVKKITAERHGTVVTVKRVEKVQKKFLGRPVEVWKLYFTHYQDKPAIRDKIREHPAVIDIYEYDIPFAKRYLIDKGLVPMEGDEELKMLAFDIETLYHEGEEFAEGPILMISYADEEGARVITWKNVDLPYVDVVSTEREMIKRFLRVVKEKDPDVLITYNGDNFDFAYLKKRCEKLGINFALGRDGSEPKIQRMGDRFAVEVKGRIHFDLYPVIRRTINLPTYTLEAVYEAVFGQPKEKVYAEEITTAWETGENLERVARYSMEDAKVTYELGKEFLPMEAQLSRLIGQSLWDVSRSSTGNLVEWFLLRKAYERNELAPNKPDEKELARRRQSYEGGYVKEPERGLWENIVYLDFRSLYPSIIITHNVSPDTLNREGCKEYDVAPQVGHRFCKDFPGFIPSLLGDLLEERQKIKKKMKATIDPIERKLLDYRQRAIKILANSYYGYYGYARARWYCKECAESVTAWGREYITMTIKEIEEKYGFKVIYSDTDGFFATIPGADAETVKKKAMEFLKYINAKLPGALELEYEGFYKRGFFVTKKKYAVIDEEGKITTRGLEIVRRDWSEIAKETQARVLEALLKDGDVEKAVRIVKEVTEKLSKYEVPPEKLVIHEQITRDLKDYKATGPHVAVAKRLAARGVKIRPGTVISYIVLKGSGRIGDRAIPFDEFDPTKHKYDAEYYIENQVLPAVERILRAFGYRKEDLRYQKTRQVGLSAWLKPKGT

SEQ ID NO: 1606 - protein, 774 aa, synthetic construct
MILDTDYITEDGKPVIRIFKKENGEFKIEYDRTFEWYFYALLKDDSAIEEVKKITAERHGTVVTVKRVEKVQKKFLGRPVEVWKLYFTHYQDRPAIRDKIREHPAVIDIYEYDIPFAKRYLIDKGLVPMEGDEELKMLAFDIETLYHEGEEFAEGPILMISYADEEGARVITWKNVDLPYVDVVSTEREMIKRFLRVVKEKDPDVLITYNGDNFDFAYLKKRCEKLGINFALGRDGSEPKIQRMGDRFAVEVKGRIHFDLYPVIRRTINLPTYTLEAVYEAVFGQPKEKVYAEEITTAWETGENLERVARYSMEDAKVTYELGKEFLPMEAQLSRLIGQSLWDVSRSSTGNLVEWFLLRKAYERNELAPNKPDEKELARRRQSYEGGYVKEPERGLWENIVYLDFRSLYPSIIITHNVSPDTLNREGCKEYDVAPQVGHRFCKDFPGFIPSLLGDLLEERQKIKKKMKATIDPIERKLLDYRQRAIKILANSYYGYYGYARARWYCKECAESVTAWGREYITMTIKEIEEKYGFKVIYSDTDGFFATIPGADAETVKKKAMEFLKYINAKLPGALELEYEGFYKRGFFVTKKKYAVIDEEGKITTRGLEIVRRDWSEIAKETQARVLEALLKDGDVEKAVRIVKEVTEKLSKYEVPPEKLVIHEQITRDLKDYKATGPHVAVAKRLAARGVKIRPGTVISYIVLKGSGRIGDRAIPFDEFDPTKHKYDAEYYIENQVLPAVERILRAFGYRKEDLRYQKTRQVGLSAWLKPKGT

SEQ ID NO: 1607 - protein, 774 aa, synthetic construct
MILDTDYITEDGKPVIRIFKKENGEFKIEYDRTFEWYFYALLKDDSAIEEVKKITAERHGTVVTVKRVEKVQKKFLGRPVEVWKLYFTHYQDRPAIADKIREHPAVIDIYEYDIPFAKRYLIDKGLVPMEGDEELKMLAFDIETLYHEGEEFAEGPILMISYADEEGARVITWKNVDLPYVDVVSTEREMIKRFLRVVKEKDPDVLITYNGDNFDFAYLKKRCEKLGINFALGRDGSEPKIQRMGDRFAVEVKGRIHFDLYPVIRRTINLPTYTLEAVYEAVFGQPKEKVYAEEITTAWETGENLERVARYSMEDAKVTYELGKEFLPMEAQLSRLIGQSLWDVSRSSTGNLVEWFLLRKAYERNELAPNKPDEKELARRRQSYEGGYVKEPERGLWENIVYLDFRSLYPSIIITHNVSPDTLNREGCKEYDVAPQVGHRFCKDFPGFIPSLLGDLLEERQKIKKKMKATIDPIERKLLDYRQRAIKILANSYYGYYGYARARWYCKECAESVTAWGREYITMTIKEIEEKYGFKVIYSDTDGFFATIPGADAETVKKKAMEFLKYINAKLPGALELEYEGFYKRGFFVTKKKYAVIDEEGKITTRGLEIVRRDWSEIAKETQARVLEALLKDGDVEKAVRIVKEVTEKLSKYEVPPEKLVIHEQITRDLKDYKATGPHVAVAKRLAARGVKIRPGTVISYIVLKGSGRIGDRAIPFDEFDPTKHKYDAEYYIENQVLPAVERILRAFGYRKEDLRYQKTRQVGLSAWLKPKGT

SEQ ID NO: 1608 - protein, 774 aa, synthetic construct
MILDTDYITEDGKPVIRIFKKENGEFKIEYDRTFEWYFYALLKDDSAIEEVKKITAERHGTVVTVKRVEKVQKKFLGRPVEVWKLYFTHPQDVPAIADKIREHPAVIDIYEYDIPFAKRYLIDKGLVPMEGDEELKMLAFDIETLYHEGEEFAEGPILMISYADEEGARVITWKNVDLPYVDVVSTEREMIKRFLRVVKEKDPDVLITYNGDNFDFAYLKKRCEKLGINFALGRDGSEPKIQRMGDRFAVEVKGRIHFDLYPVIRRTINLPTYTLEAVYEAVFGQPKEKVYAEEITTAWETGENLERVARYSMEDAKVTYELGKEFLPMEAQLSRLIGQSLWDVSRSSTGNLVEWFLLRKAYERNELAPNKPDEKELARRRQSYEGGYVKEPERGLWENIVYLDFRSLYPSIIITHNVSPDTLNREGCKEYDVAPQVGHRFCKDFPGFIPSLLGDLLEERQKIKKKMKATIDPIERKLLDYRQRAIKILANSYYGYYGYARARWYCKECAESVTAWGREYITMTIKEIEEKYGFKVIYSDTDGFFATIPGADAETVKKKAMEFLKYINAKLPGALELEYEGFYKRGFFVTKKKYAVIDEEGKITTRGLEIVRRDWSEIAKETQARVLEALLKDGDVEKAVRIVKEVTEKLSKYEVPPEKLVIHEQITRDLKDYKATGPHVAVAKRLAARGVKIRPGTVISYIVLKGSGRIGDRAIPFDEFDPTKHKYDAEYYIENQVLPAVERILRAFGYRKEDLRYQKTRQVGLSAWLKPKGT

SEQ ID NO: 1609 - protein, 774 aa, synthetic construct
MILDTDYITEDGKPVIRIFKKENGEFKIEYDRTFEWYFYALLKDDSAIEEVKKITAERHGTVVTVKRVEKVQKKFLGRPVEVWKLYFTHPQDVPAIFDKIREHPAVIDIYEYDIPFAKRYLIDKGLVPMEGDEELKMLAFDIETLYHEGEEFAEGPILMISYADEEGARVITWKNVDLPYVDVVSTEREMIKRFLRVVKEKDPDVLITYNGDNFDFAYLKKRCEKLGINFALGRDGSEPKIQRMGDRFAVEVKGRIHFDLYPVIRRTINLPTYTLEAVYEAVFGQPKEKVYAEEITTAWETGENLERVARYSMEDAKVTYELGKEFLPMEAQLSRLIGQSLWDVSRSSTGNLVEWFLLRKAYERNELAPNKPDEKELARRRQSYEGGYVKEPERGLWENIVYLDFRSLYPSIIITHNVSPDTLNREGCKEYDVAPQVGHRFCKDFPGFIPSLLGDLLEERQKIKKKMKATIDPIERKLLDYRQRAIKILANSYYGYYGYARARWYCKECAESVTAWGREYITMTIKEIEEKYGFKVIYSDTDGFFATIPGADAETVKKKAMEFLKYINAKLPGALELEYEGFYKRGFFVTKKKYAVIDEEGKITTRGLEIVRRDWSEIAKETQARVLEALLKDGDVEKAVRIVKEVTEKLSKYEVPPEKLVIHEQITRDLKDYKATGPHVAVAKRLAARGVKIRPGTVISYIVLKGSGRIGDRAIPFDEFDPTKHKYDAEYYIENQVLPAVERILRAFGYRKEDLRYQKTRQVGLSAWLKPKGT

SEQ ID NO: 1610 - protein, 774 aa, synthetic construct
MILDTDYITEDGKPVIRIFKKENGEFKIEYDRTFEWYFYALLKDDSAIEEVKKITAERHGTVVTVKRVEKVQKKFLGRPVEVWKLYFTHPQDVPAIHDKIREHPAVIDIYEYDIPFAKRYLIDKGLVPMEGDEELKMLAFDIETLYHEGEEFAEGPILMISYADEEGARVITWKNVDLPYVDVVSTEREMIKRFLRVVKEKDPDVLITYNGDNFDFAYLKKRCEKLGINFALGRDGSEPKIQRMGDRFAVEVKGRIHFDLYPVIRRTINLPTYTLEAVYEAVFGQPKEKVYAEEITTAWETGENLERVARYSMEDAKVTYELGKEFLPMEAQLSRLIGQSLWDVSRSSTGNLVEWFLLRKAYERNELAPNKPDEKELARRRQSYEGGYVKEPERGLWENIVYLDFRSLYPSIIITHNVSPDTLNREGCKEYDVAPQVGHRFCKDFPGFIPSLLGDLLEERQKIKKKMKATIDPIERKLLDYRQRAIKILANSYYGYYGYARARWYCKECAESVTAWGREYITMTIKEIEEKYGFKVIYSDTDGFFATIPGADAETVKKKAMEFLKYINAKLPGALELEYEGFYKRGFFVTKKKYAVIDEEGKITTRGLEIVRRDWSEIAKETQARVLEALLKDGDVEKAVRIVKEVTEKLSKYEVPPEKLVIHEQITRDLKDYKATGPHVAVAKRLAARGVKIRPGTVISYIVLKGSGRIGDRAIPFDEFDPTKHKYDAEYYIENQVLPAVERILRAFGYRKEDLRYQKTRQVGLSAWLKPKGT

SEQ ID NO: 1611 - protein, 774 aa, synthetic construct
MILDTDYITEDGKPVIRIFKKENGEFKIEYDRTFEWYFYALLKDDSAIEEVKKITAERHGTVVTVKRVEKVQKKFLGRPVEVWKLYFTHPQDVPAIWDKIREHPAVIDIYEYDIPFAKRYLIDKGLVPMEGDEELKMLAFDIETLYHEGEEFAEGPILMISYADEEGARVITWKNVDLPYVDVVSTEREMIKRFLRVVKEKDPDVLITYNGDNFDFAYLKKRCEKLGINFALGRDGSEPKIQRMGDRFAVEVKGRIHFDLYPVIRRTINLPTYTLEAVYEAVFGQPKEKVYAEEITTAWETGENLERVARYSMEDAKVTYELGKEFLPMEAQLSRLIGQSLWDVSRSSTGNLVEWFLLRKAYERNELAPNKPDEKELARRRQSYEGGYVKEPERGLWENIVYLDFRSLYPSIIITHNVSPDTLNREGCKEYDVAPQVGHRFCKDFPGFIPSLLGDLLEERQKIKKKMKATIDPIERKLLDYRQRAIKILANSYYGYYGYARARWYCKECAESVTAWGREYITMTIKEIEEKYGFKVIYSDTDGFFATIPGADAETVKKKAMEFLKYINAKLPGALELEYEGFYKRGFFVTKKKYAVIDEEGKITTRGLEIVRRDWSEIAKETQARVLEALLKDGDVEKAVRIVKEVTEKLSKYEVPPEKLVIHEQITRDLKDYKATGPHVAVAKRLAARGVKIRPGTVISYIVLKGSGRIGDRAIPFDEFDPTKHKYDAEYYIENQVLPAVERILRAFGYRKEDLRYQKTRQVGLSAWLKPKGT

SEQ ID NO: 1612 - protein, 774 aa, synthetic construct
MILDTDYITEDGKPVIRIFKKENGEFKIEYDRTFEWYFYALLKDDSAIEEVKKITAERHGTVVTVKRVEKVQKKFLGRPVEVWKLYFTHPQDIPAIRDKIREHPAVIDIYEYDIPFAKRYLIDKGLVPMEGDEELKMLAFDIETLYHEGEEFAEGPILMISYADEEGARVITWKNVDLPYVDVVSTEREMIKRFLRVVKEKDPDVLITYNGDNFDFAYLKKRCEKLGINFALGRDGSEPKIQRMGDRFAVEVKGRIHFDLYPVIRRTINLPTYTLEAVYEAVFGQPKEKVYAEEITTAWETGENLERVARYSMEDAKVTYELGKEFLPMEAQLSRLIGQSLWDVSRSSTGNLVEWFLLRKAYERNELAPNKPDEKELARRRQSYEGGYVKEPERGLWENIVYLDFRSLYPSIIITHNVSPDTLNREGCKEYDVAPQVGHRFCKDFPGFIPSLLGDLLEERQKIKKKMKATIDPIERKLLDYRQRAIKILANSYYGYYGYARARWYCKECAESVTAWGREYITMTIKEIEEKYGFKVIYSDTDGFFATIPGADAETVKKKAMEFLKYINAKLPGALELEYEGFYKRGFFVTKKKYAVIDEEGKITTRGLEIVRRDWSEIAKETQARVLEALLKDGDVEKAVRIVKEVTEKLSKYEVPPEKLVIHEQITRDLKDYKATGPHVAVAKRLAARGVKIRPGTVISYIVLKGSGRIGDRAIPFDEFDPTKHKYDAEYYIENQVLPAVERILRAFGYRKEDLRYQKTRQVGLSAWLKPKGT

SEQ ID NO: 1613 - protein, 774 aa, synthetic construct
MILDTDYITEDGKPVIRIFKKENGEFKIEYDRTFEWYFYALLKDDSAIEEVKKITAERHGTVVTVKRVEKVQKKFLGRPVEVWKLYFTHPQDIPAIADKIREHPAVIDIYEYDIPFAKRYLIDKGLVPMEGDEELKMLAFDIETLYHEGEEFAEGPILMISYADEEGARVITWKNVDLPYVDVVSTEREMIKRFLRVVKEKDPDVLITYNGDNFDFAYLKKRCEKLGINFALGRDGSEPKIQRMGDRFAVEVKGRIHFDLYPVIRRTINLPTYTLEAVYEAVFGQPKEKVYAEEITTAWETGENLERVARYSMEDAKVTYELGKEFLPMEAQLSRLIGQSLWDVSRSSTGNLVEWFLLRKAYERNELAPNKPDEKELARRRQSYEGGYVKEPERGLWENIVYLDFRSLYPSIIITHNVSPDTLNREGCKEYDVAPQVGHRFCKDFPGFIPSLLGDLLEERQKIKKKMKATIDPIERKLLDYRQRAIKILANSYYGYYGYARARWYCKECAESVTAWGREYITMTIKEIEEKYGFKVIYSDTDGFFATIPGADAETVKKKAMEFLKYINAKLPGALELEYEGFYKRGFFVTKKKYAVIDEEGKITTRGLEIVRRDWSEIAKETQARVLEALLKDGDVEKAVRIVKEVTEKLSKYEVPPEKLVIHEQITRDLKDYKATGPHVAVAKRLAARGVKIRPGTVISYIVLKGSGRIGDRAIPFDEFDPTKHKYDAEYYIENQVLPAVERILRAFGYRKEDLRYQKTRQVGLSAWLKPKGT

SEQ ID NO: 1614 - protein, 774 aa, synthetic construct
MILDTDYITEDGKPVIRIFKKENGEFKIEYDRTFEWYFYALLKDDSAIEEVKKITAERHGTVVTVKRVEKVQKKFLGRPVEVWKLYFTHPQDIPAIFDKIREHPAVIDIYEYDIPFAKRYLIDKGLVPMEGDEELKMLAFDIETLYHEGEEFAEGPILMISYADEEGARVITWKNVDLPYVDVVSTEREMIKRFLRVVKEKDPDVLITYNGDNFDFAYLKKRCEKLGINFALGRDGSEPKIQRMGDRFAVEVKGRIHFDLYPVIRRTINLPTYTLEAVYEAVFGQPKEKVYAEEITTAWETGENLERVARYSMEDAKVTYELGKEFLPMEAQLSRLIGQSLWDVSRSSTGNLVEWFLLRKAYERNELAPNKPDEKELARRRQSYEGGYVKEPERGLWENIVYLDFRSLYPSIIITHNVSPDTLNREGCKEYDVAPQVGHRFCKDFPGFIPSLLGDLLEERQKIKKKMKATIDPIERKLLDYRQRAIKILANSYYGYYGYARARWYCKECAESVTAWGREYITMTIKEIEEKYGFKVIYSDTDGFFATIPGADAETVKKKAMEFLKYINAKLPGALELEYEGFYKRGFFVTKKKYAVIDEEGKITTRGLEIVRRDWSEIAKETQARVLEALLKDGDVEKAVRIVKEVTEKLSKYEVPPEKLVIHEQITRDLKDYKATGPHVAVAKRLAARGVKIRPGTVISYIVLKGSGRIGDRAIPFDEFDPTKHKYDAEYYIENQVLPAVERILRAFGYRKEDLRYQKTRQVGLSAWLKPKGT

SEQ ID NO: 1615 - protein, 774 aa, synthetic construct
MILDTDYITEDGKPVIRIFKKENGEFKIEYDRTFEWYFYALLKDDSAIEEVKKITAERHGTVVTVKRVEKVQKKFLGRPVEVWKLYFTHPQDIPAIHDKIREHPAVIDIYEYDIPFAKRYLIDKGLVPMEGDEELKMLAFDIETLYHEGEEFAEGPILMISYADEEGARVITWKNVDLPYVDVVSTEREMIKRFLRVVKEKDPDVLITYNGDNFDFAYLKKRCEKLGINFALGRDGSEPKIQRMGDRFAVEVKGRIHFDLYPVIRRTINLPTYTLEAVYEAVFGQPKEKVYAEEITTAWETGENLERVARYSMEDAKVTYELGKEFLPMEAQLSRLIGQSLWDVSRSSTGNLVEWFLLRKAYERNELAPNKPDEKELARRRQSYEGGYVKEPERGLWENIVYLDFRSLYPSIIITHNVSPDTLNREGCKEYDVAPQVGHRFCKDFPGFIPSLLGDLLEERQKIKKKMKATIDPIERKLLDYRQRAIKILANSYYGYYGYARARWYCKECAESVTAWGREYITMTIKEIEEKYGFKVIYSDTDGFFATIPGADAETVKKKAMEFLKYINAKLPGALELEYEGFYKRGFFVTKKKYAVIDEEGKITTRGLEIVRRDWSEIAKETQARVLEALLKDGDVEKAVRIVKEVTEKLSKYEVPPEKLVIHEQITRDLKDYKATGPHVAVAKRLAARGVKIRPGTVISYIVLKGSGRIGDRAIPFDEFDPTKHKYDAEYYIENQVLPAVERILRAFGYRKEDLRYQKTRQVGLSAWLKPKGT

SEQ ID NO: 1616 - protein, 774 aa, synthetic construct
MILDTDYITEDGKPVIRIFKKENGEFKIEYDRTFEWYFYALLKDDSAIEEVKKITAERHGTVVTVKRVEKVQKKFLGRPVEVWKLYFTHPQDIPAIWDKIREHPAVIDIYEYDIPFAKRYLIDKGLVPMEGDEELKMLAFDIETLYHEGEEFAEGPILMISYADEEGARVITWKNVDLPYVDVVSTEREMIKRFLRVVKEKDPDVLITYNGDNFDFAYLKKRCEKLGINFALGRDGSEPKIQRMGDRFAVEVKGRIHFDLYPVIRRTINLPTYTLEAVYEAVFGQPKEKVYAEEITTAWETGENLERVARYSMEDAKVTYELGKEFLPMEAQLSRLIGQSLWDVSRSSTGNLVEWFLLRKAYERNELAPNKPDEKELARRRQSYEGGYVKEPERGLWENIVYLDFRSLYPSIIITHNVSPDTLNREGCKEYDVAPQVGHRFCKDFPGFIPSLLGDLLEERQKIKKKMKATIDPIERKLLDYRQRAIKILANSYYGYYGYARARWYCKECAESVTAWGREYITMTIKEIEEKYGFKVIYSDTDGFFATIPGADAETVKKKAMEFLKYINAKLPGALELEYEGFYKRGFFVTKKKYAVIDEEGKITTRGLEIVRRDWSEIAKETQARVLEALLKDGDVEKAVRIVKEVTEKLSKYEVPPEKLVIHEQITRDLKDYKATGPHVAVAKRLAARGVKIRPGTVISYIVLKGSGRIGDRAIPFDEFDPTKHKYDAEYYIENQVLPAVERILRAFGYRKEDLRYQKTRQVGLSAWLKPKGT

SEQ ID NO: 1617 - protein, 774 aa, synthetic construct
MILDTDYITEDGKPVIRIFKKENGEFKIEYDRTFEWYFYALLKDDSAIEEVKKITAERHGTVVTVKRVEKVQKKFLGRPVEVWKLYFTHPQDQPAIRDKIREHPAVIDIYEYDIPFAKRYLIDKGLVPMEGDEELKMLAFDIETLYHEGEEFAEGPILMISYADEEGARVITWKNVDLPYVDVVSTEREMIKRFLRVVKEKDPDVLITYNGDNFDFAYLKKRCEKLGINFALGRDGSEPKIQRMGDRFAVEVKGRIHFDLYPVIRRTINLPTYTLEAVYEAVFGQPKEKVYAEEITTAWETGENLERVARYSMEDAKVTYELGKEFLPMEAQLSRLIGQSLWDVSRSSTGNLVEWFLLRKAYERNELAPNKPDEKELARRRQSYEGGYVKEPERGLWENIVYLDFRSLYPSIIITHNVSPDTLNREGCKEYDVAPQVGHRFCKDFPGFIPSLLGDLLEERQKIKKKMKATIDPIERKLLDYRQRAIKILANSYYGYYGYARARWYCKECAESVTAWGREYITMTIKEIEEKYGFKVIYSDTDGFFATIPGADAETVKKKAMEFLKYINAKLPGALELEYEGFYKRGFFVTKKKYAVIDEEGKITTRGLEIVRRDWSEIAKETQARVLEALLKDGDVEKAVRIVKEVTEKLSKYEVPPEKLVIHEQITRDLKDYKATGPHVAVAKRLAARGVKIRPGTVISYIVLKGSGRIGDRAIPFDEFDPTKHKYDAEYYIENQVLPAVERILRAFGYRKEDLRYQKTRQVGLSAWLKPKGT

SEQ ID NO: 1618 - protein, 774 aa, synthetic construct
MILDTDYITEDGKPVIRIFKKENGEFKIEYDRTFEWYFYALLKDDSAIEEVKKITAERHGTVVTVKRVEKVQKKFLGRPVEVWKLYFTHPQDRPAIRDKIREHPAVIDIYEYDIPFAKRYLIDKGLVPMEGDEELKMLAFDIETLYHEGEEFAEGPILMISYADEEGARVITWKNVDLPYVDVVSTEREMIKRFLRVVKEKDPDVLITYNGDNFDFAYLKKRCEKLGINFALGRDGSEPKIQRMGDRFAVEVKGRIHFDLYPVIRRTINLPTYTLEAVYEAVFGQPKEKVYAEEITTAWETGENLERVARYSMEDAKVTYELGKEFLPMEAQLSRLIGQSLWDVSRSSTGNLVEWFLLRKAYERNELAPNKPDEKELARRRQSYEGGYVKEPERGLWENIVYLDFRSLYPSIIITHNVSPDTLNREGCKEYDVAPQVGHRFCKDFPGFIPSLLGDLLEERQKIKKKMKATIDPIERKLLDYRQRAIKILANSYYGYYGYARARWYCKECAESVTAWGREYITMTIKEIEEKYGFKVIYSDTDGFFATIPGADAETVKKKAMEFLKYINAKLPGALELEYEGFYKRGFFVTKKKYAVIDEEGKITTRGLEIVRRDWSEIAKETQARVLEALLKDGDVEKAVRIVKEVTEKLSKYEVPPEKLVIHEQITRDLKDYKATGPHVAVAKRLAARGVKIRPGTVISYIVLKGSGRIGDRAIPFDEFDPTKHKYDAEYYIENQVLPAVERILRAFGYRKEDLRYQKTRQVGLSAWLKPKGT

SEQ ID NO: 1619 - protein, 774 aa, synthetic construct
MILDTDYITEDGKPVIRIFKKENGEFKIEYDRTFEWYFYALLKDDSAIEEVKKITAERHGTVVTVKRVEKVQKKFLGRPVEVWKLYFTHPQDRPAIADKIREHPAVIDIYEYDIPFAKRYLIDKGLVPMEGDEELKMLAFDIETLYHEGEEFAEGPILMISYADEEGARVITWKNVDLPYVDVVSTEREMIKRFLRVVKEKDPDVLITYNGDNFDFAYLKKRCEKLGINFALGRDGSEPKIQRMGDRFAVEVKGRIHFDLYPVIRRTINLPTYTLEAVYEAVFGQPKEKVYAEEITTAWETGENLERVARYSMEDAKVTYELGKEFLPMEAQLSRLIGQSLWDVSRSSTGNLVEWFLLRKAYERNELAPNKPDEKELARRRQSYEGGYVKEPERGLWENIVYLDFRSLYPSIIITHNVSPDTLNREGCKEYDVAPQVGHRFCKDFPGFIPSLLGDLLEERQKIKKKMKATIDPIERKLLDYRQRAIKILANSYYGYYGYARARWYCKECAESVTAWGREYITMTIKEIEEKYGFKVIYSDTDGFFATIPGADAETVKKKAMEFLKYINAKLPGALELEYEGFYKRGFFVTKKKYAVIDEEGKITTRGLEIVRRDWSEIAKETQARVLEALLKDGDVEKAVRIVKEVTEKLSKYEVPPEKLVIHEQITRDLKDYKATGPHVAVAKRLAARGVKIRPGTVISYIVLKGSGRIGDRAIPFDEFDPTKHKYDAEYYIENQVLPAVERILRAFGYRKEDLRYQKTRQVGLSAWLKPKGT

SEQ ID NO: 1620 - protein, 774 aa, synthetic construct
MILDTDYITEDGKPVIRIFKKENGEFKIEYDRTFEWYFYALLKDDSAIEEVKKITAERHGTVVTVKRVEKVQKKFLGRPVEVWKLYFTHPQDRPAIFDKIREHPAVIDIYEYDIPFAKRYLIDKGLVPMEGDEELKMLAFDIETLYHEGEEFAEGPILMISYADEEGARVITWKNVDLPYVDVVSTEREMIKRFLRVVKEKDPDVLITYNGDNFDFAYLKKRCEKLGINFALGRDGSEPKIQRMGDRFAVEVKGRIHFDLYPVIRRTINLPTYTLEAVYEAVFGQPKEKVYAEEITTAWETGENLERVARYSMEDAKVTYELGKEFLPMEAQLSRLIGQSLWDVSRSSTGNLVEWFLLRKAYERNELAPNKPDEKELARRRQSYEGGYVKEPERGLWENIVYLDFRSLYPSIIITHNVSPDTLNREGCKEYDVAPQVGHRFCKDFPGFIPSLLGDLLEERQKIKKKMKATIDPIERKLLDYRQRAIKILANSYYGYYGYARARWYCKECAESVTAWGREYITMTIKEIEEKYGFKVIYSDTDGFFATIPGADAETVKKKAMEFLKYINAKLPGALELEYEGFYKRGFFVTKKKYAVIDEEGKITTRGLEIVRRDWSEIAKETQARVLEALLKDGDVEKAVRIVKEVTEKLSKYEVPPEKLVIHEQITRDLKDYKATGPHVAVAKRLAARGVKIRPGTVISYIVLKGSGRIGDRAIPFDEFDPTKHKYDAEYYIENQVLPAVERILRAFGYRKEDLRYQKTRQVGLSAWLKPKGT

SEQ ID NO: 1621 - protein, 774 aa, synthetic construct
MILDTDYITEDGKPVIRIFKKENGEFKIEYDRTFEWYFYALLKDDSAIEEVKKITAERHGTVVTVKRVEKVQKKFLGRPVEVWKLYFTHPQDRPAIHDKIREHPAVIDIYEYDIPFAKRYLIDKGLVPMEGDEELKMLAFDIETLYHEGEEFAEGPILMISYADEEGARVITWKNVDLPYVDVVSTEREMIKRFLRVVKEKDPDVLITYNGDNFDFAYLKKRCEKLGINFALGRDGSEPKIQRMGDRFAVEVKGRIHFDLYPVIRRTINLPTYTLEAVYEAVFGQPKEKVYAEEITTAWETGENLERVARYSMEDAKVTYELGKEFLPMEAQLSRLIGQSLWDVSRSSTGNLVEWFLLRKAYERNELAPNKPDEKELARRRQSYEGGYVKEPERGLWENIVYLDFRSLYPSIIITHNVSPDTLNREGCKEYDVAPQVGHRFCKDFPGFIPSLLGDLLEERQKIKKKMKATIDPIERKLLDYRQRAIKILANSYYGYYGYARARWYCKECAESVTAWGREYITMTIKEIEEKYGFKVIYSDTDGFFATIPGADAETVKKKAMEFLKYINAKLPGALELEYEGFYKRGFFVTKKKYAVIDEEGKITTRGLEIVRRDWSEIAKETQARVLEALLKDGDVEKAVRIVKEVTEKLSKYEVPPEKLVIHEQITRDLKDYKATGPHVAVAKRLAARGVKIRPGTVISYIVLKGSGRIGDRAIPFDEFDPTKHKYDAEYYIENQVLPAVERILRAFGYRKEDLRYQKTRQVGLSAWLKPKGT

SEQ ID NO: 1622 - protein, 774 aa, synthetic construct
MILDTDYITEDGKPVIRIFKKENGEFKIEYDRTFEPYFYALLKDDSAIEEVKKITAERHGTVVTVKRVEKVQKKFLGRPVEVWKLYFTHFQDVPAIADKIREHPAVIDIYEYDIPFAKRYLIDKGLVPMEGDEELKMLAFDIETLYHEGEEFAEGPILMISYADEEGARVITWKNVDLPYVDVVSTEREMIKRFLRVVKEKDPDVLITYNGDNFDFAYLKKRCEKLGINFALGRDGSEPKIQRMGDRFAVEVKGRIHFDLYPVIRRTINLPTYTLEAVYEAVFGQPKEKVYAEEITTAWETGENLERVARYSMEDAKVTYELGKEFLPMEAQLSRLIGQSLWDVSRSSTGNLVEWFLLRKAYERNELAPNKPDEKELARRRQSYEGGYVKEPERGLWENIVYLDFRSLYPSIIITHNVSPDTLNREGCKEYDVAPQVGHRFCKDFPGFIPSLLGDLLEERQKIKKKMKATIDPIERKLLDYRQRAIKILANSYYGYYGYARARWYCKECAESVTAWGREYITMTIKEIEEKYGFKVIYSDTDGFFATIPGADAETVKKKAMEFLKYINAKLPGALELEYEGFYKRGFFVTKKKYAVIDEEGKITTRGLEIVRRDWSEIAKETQARVLEALLKDGDVEKAVRIVKEVTEKLSKYEVPPEKLVIHEQITRDLKDYKATGPHVAVAKRLAARGVKIRPGTVISYIVLKGSGRIGDRAIPFDEFDPTKHKYDAEYYIENQVLPAVERILRAFGYRKEDLRYQKTRQVGLSAWLKPKGT

SEQ ID NO: 1623 - protein, 774 aa, synthetic construct
MILDTDYITEDGKPVIRIFKKENGEFKIEYDRTFEPYFYALLKDDSAIEEVKKITAERHGTVVTVKRVEKVQKKFLGRPVEVWKLYFTHFQDVPAIFDKIREHPAVIDIYEYDIPFAKRYLIDKGLVPMEGDEELKMLAFDIETLYHEGEEFAEGPILMISYADEEGARVITWKNVDLPYVDVVSTEREMIKRFLRVVKEKDPDVLITYNGDNFDFAYLKKRCEKLGINFALGRDGSEPKIQRMGDRFAVEVKGRIHFDLYPVIRRTINLPTYTLEAVYEAVFGQPKEKVYAEEITTAWETGENLERVARYSMEDAKVTYELGKEFLPMEAQLSRLIGQSLWDVSRSSTGNLVEWFLLRKAYERNELAPNKPDEKELARRRQSYEGGYVKEPERGLWENIVYLDFRSLYPSIIITHNVSPDTLNREGCKEYDVAPQVGHRFCKDFPGFIPSLLGDLLEERQKIKKKMKATIDPIERKLLDYRQRAIKILANSYYGYYGYARARWYCKECAESVTAWGREYITMTIKEIEEKYGFKVIYSDTDGFFATIPGADAETVKKKAMEFLKYINAKLPGALELEYEGFYKRGFFVTKKKYAVIDEEGKITTRGLEIVRRDWSEIAKETQARVLEALLKDGDVEKAVRIVKEVTEKLSKYEVPPEKLVIHEQITRDLKDYKATGPHVAVAKRLAARGVKIRPGTVISYIVLKGSGRIGDRAIPFDEFDPTKHKYDAEYYIENQVLPAVERILRAFGYRKEDLRYQKTRQVGLSAWLKPKGT

SEQ ID NO: 1624 - protein, 774 aa, synthetic construct
MILDTDYITEDGKPVIRIFKKENGEFKIEYDRTFEPYFYALLKDDSAIEEVKKITAERHGTVVTVKRVEKVQKKFLGRPVEVWKLYFTHFQDVPAIHDKIREHPAVIDIYEYDIPFAKRYLIDKGLVPMEGDEELKMLAFDIETLYHEGEEFAEGPILMISYADEEGARVITWKNVDLPYVDVVSTEREMIKRFLRVVKEKDPDVLITYNGDNFDFAYLKKRCEKLGINFALGRDGSEPKIQRMGDRFAVEVKGRIHFDLYPVIRRTINLPTYTLEAVYEAVFGQPKEKVYAEEITTAWETGENLERVARYSMEDAKVTYELGKEFLPMEAQLSRLIGQSLWDVSRSSTGNLVEWFLLRKAYERNELAPNKPDEKELARRRQSYEGGYVKEPERGLWENIVYLDFRSLYPSIIITHNVSPDTLNREGCKEYDVAPQVGHRFCKDFPGFIPSLLGDLLEERQKIKKKMKATIDPIERKLLDYRQRAIKILANSYYGYYGYARARWYCKECAESVTAWGREYITMTIKEIEEKYGFKVIYSDTDGFFATIPGADAETVKKKAMEFLKYINAKLPGALELEYEGFYKRGFFVTKKKYAVIDEEGKITTRGLEIVRRDWSEIAKETQARVLEALLKDGDVEKAVRIVKEVTEKLSKYEVPPEKLVIHEQITRDLKDYKATGPHVAVAKRLAARGVKIRPGTVISYIVLKGSGRIGDRAIPFDEFDPTKHKYDAEYYIENQVLPAVERILRAFGYRKEDLRYQKTRQVGLSAWLKPKGT

SEQ ID NO: 1625 - protein, 774 aa, synthetic construct
MILDTDYITEDGKPVIRIFKKENGEFKIEYDRTFEPYFYALLKDDSAIEEVKKITAERHGTVVTVKRVEKVQKKFLGRPVEVWKLYFTHFQDVPAIWDKIREHPAVIDIYEYDIPFAKRYLIDKGLVPMEGDEELKMLAFDIETLYHEGEEFAEGPILMISYADEEGARVITWKNVDLPYVDVVSTEREMIKRFLRVVKEKDPDVLITYNGDNFDFAYLKKRCEKLGINFALGRDGSEPKIQRMGDRFAVEVKGRIHFDLYPVIRRTINLPTYTLEAVYEAVFGQPKEKVYAEEITTAWETGENLERVARYSMEDAKVTYELGKEFLPMEAQLSRLIGQSLWDVSRSSTGNLVEWFLLRKAYERNELAPNKPDEKELARRRQSYEGGYVKEPERGLWENIVYLDFRSLYPSIIITHNVSPDTLNREGCKEYDVAPQVGHRFCKDFPGFIPSLLGDLLEERQKIKKKMKATIDPIERKLLDYRQRAIKILANSYYGYYGYARARWYCKECAESVTAWGREYITMTIKEIEEKYGFKVIYSDTDGFFATIPGADAETVKKKAMEFLKYINAKLPGALELEYEGFYKRGFFVTKKKYAVIDEEGKITTRGLEIVRRDWSEIAKETQARVLEALLKDGDVEKAVRIVKEVTEKLSKYEVPPEKLVIHEQITRDLKDYKATGPHVAVAKRLAARGVKIRPGTVISYIVLKGSGRIGDRAIPFDEFDPTKHKYDAEYYIENQVLPAVERILRAFGYRKEDLRYQKTRQVGLSAWLKPKGT

SEQ ID NO: 1626 - protein, 774 aa, synthetic construct
MILDTDYITEDGKPVIRIFKKENGEFKIEYDRTFEPYFYALLKDDSAIEEVKKITAERHGTVVTVKRVEKVQKKFLGRPVEVWKLYFTHFQDIPAIRDKIREHPAVIDIYEYDIPFAKRYLIDKGLVPMEGDEELKMLAFDIETLYHEGEEFAEGPILMISYADEEGARVITWKNVDLPYVDVVSTEREMIKRFLRVVKEKDPDVLITYNGDNFDFAYLKKRCEKLGINFALGRDGSEPKIQRMGDRFAVEVKGRIHFDLYPVIRRTINLPTYTLEAVYEAVFGQPKEKVYAEEITTAWETGENLERVARYSMEDAKVTYELGKEFLPMEAQLSRLIGQSLWDVSRSSTGNLVEWFLLRKAYERNELAPNKPDEKELARRRQSYEGGYVKEPERGLWENIVYLDFRSLYPSIIITHNVSPDTLNREGCKEYDVAPQVGHRFCKDFPGFIPSLLGDLLEERQKIKKKMKATIDPIERKLLDYRQRAIKILANSYYGYYGYARARWYCKECAESVTAWGREYITMTIKEIEEKYGFKVIYSDTDGFFATIPGADAETVKKKAMEFLKYINAKLPGALELEYEGFYKRGFFVTKKKYAVIDEEGKITTRGLEIVRRDWSEIAKETQARVLEALLKDGDVEKAVRIVKEVTEKLSKYEVPPEKLVIHEQITRDLKDYKATGPHVAVAKRLAARGVKIRPGTVISYIVLKGSGRIGDRAIPFDEFDPTKHKYDAEYYIENQVLPAVERILRAFGYRKEDLRYQKTRQVGLSAWLKPKGT

SEQ ID NO: 1627 - protein, 774 aa, synthetic construct
MILDTDYITEDGKPVIRIFKKENGEFKIEYDRTFEPYFYALLKDDSAIEEVKKITAERHGTVVTVKRVEKVQKKFLGRPVEVWKLYFTHFQDIPAIFDKIREHPAVIDIYEYDIPFAKRYLIDKGLVPMEGDEELKMLAFDIETLYHEGEEFAEGPILMISYADEEGARVITWKNVDLPYVDVVSTEREMIKRFLRVVKEKDPDVLITYNGDNFDFAYLKKRCEKLGINFALGRDGSEPKIQRMGDRFAVEVKGRIHFDLYPVIRRTINLPTYTLEAVYEAVFGQPKEKVYAEEITTAWETGENLERVARYSMEDAKVTYELGKEFLPMEAQLSRLIGQSLWDVSRSSTGNLVEWFLLRKAYERNELAPNKPDEKELARRRQSYEGGYVKEPERGLWENIVYLDFRSLYPSIIITHNVSPDTLNREGCKEYDVAPQVGHRFCKDFPGFIPSLLGDLLEERQKIKKKMKATIDPIERKLLDYRQRAIKILANSYYGYYGYARARWYCKECAESVTAWGREYITMTIKEIEEKYGFKVIYSDTDGFFATIPGADAETVKKKAMEFLKYINAKLPGALELEYEGFYKRGFFVTKKKYAVIDEEGKITTRGLEIVRRDWSEIAKETQARVLEALLKDGDVEKAVRIVKEVTEKLSKYEVPPEKLVIHEQITRDLKDYKATGPHVAVAKRLAARGVKIRPGTVISYIVLKGSGRIGDRAIPFDEFDPTKHKYDAEYYIENQVLPAVERILRAFGYRKEDLRYQKTRQVGLSAWLKPKGT

SEQ ID NO: 1628 - protein, 774 aa, synthetic construct
MILDTDYITEDGKPVIRIFKKENGEFKIEYDRTFEPYFYALLKDDSAIEEVKKITAERHGTVVTVKRVEKVQKKFLGRPVEVWKLYFTHFQDIPAIHDKIREHPAVIDIYEYDIPFAKRYLIDKGLVPMEGDEELKMLAFDIETLYHEGEEFAEGPILMISYADEEGARVITWKNVDLPYVDVVSTEREMIKRFLRVVKEKDPDVLITYNGDNFDFAYLKKRCEKLGINFALGRDGSEPKIQRMGDRFAVEVKGRIHFDLYPVIRRTINLPTYTLEAVYEAVFGQPKEKVYAEEITTAWETGENLERVARYSMEDAKVTYELGKEFLPMEAQLSRLIGQSLWDVSRSSTGNLVEWFLLRKAYERNELAPNKPDEKELARRRQSYEGGYVKEPERGLWENIVYLDFRSLYPSIIITHNVSPDTLNREGCKEYDVAPQVGHRFCKDFPGFIPSLLGDLLEERQKIKKKMKATIDPIERKLLDYRQRAIKILANSYYGYYGYARARWYCKECAESVTAWGREYITMTIKEIEEKYGFKVIYSDTDGFFATIPGADAETVKKKAMEFLKYINAKLPGALELEYEGFYKRGFFVTKKKYAVIDEEGKITTRGLEIVRRDWSEIAKETQARVLEALLKDGDVEKAVRIVKEVTEKLSKYEVPPEKLVIHEQITRDLKDYKATGPHVAVAKRLAARGVKIRPGTVISYIVLKGSGRIGDRAIPFDEFDPTKHKYDAEYYIENQVLPAVERILRAFGYRKEDLRYQKTRQVGLSAWLKPKGT

SEQ ID NO: 1629 - protein, 774 aa, synthetic construct
MILDTDYITEDGKPVIRIFKKENGEFKIEYDRTFEPYFYALLKDDSAIEEVKKITAERHGTVVTVKRVEKVQKKFLGRPVEVWKLYFTHFQDIPAIWDKIREHPAVIDIYEYDIPFAKRYLIDKGLVPMEGDEELKMLAFDIETLYHEGEEFAEGPILMISYADEEGARVITWKNVDLPYVDVVSTEREMIKRFLRVVKEKDPDVLITYNGDNFDFAYLKKRCEKLGINFALGRDGSEPKIQRMGDRFAVEVKGRIHFDLYPVIRRTINLPTYTLEAVYEAVFGQPKEKVYAEEITTAWETGENLERVARYSMEDAKVTYELGKEFLPMEAQLSRLIGQSLWDVSRSSTGNLVEWFLLRKAYERNELAPNKPDEKELARRRQSYEGGYVKEPERGLWENIVYLDFRSLYPSIIITHNVSPDTLNREGCKEYDVAPQVGHRFCKDFPGFIPSLLGDLLEERQKIKKKMKATIDPIERKLLDYRQRAIKILANSYYGYYGYARARWYCKECAESVTAWGREYITMTIKEIEEKYGFKVIYSDTDGFFATIPGADAETVKKKAMEFLKYINAKLPGALELEYEGFYKRGFFVTKKKYAVIDEEGKITTRGLEIVRRDWSEIAKETQARVLEALLKDGDVEKAVRIVKEVTEKLSKYEVPPEKLVIHEQITRDLKDYKATGPHVAVAKRLAARGVKIRPGTVISYIVLKGSGRIGDRAIPFDEFDPTKHKYDAEYYIENQVLPAVERILRAFGYRKEDLRYQKTRQVGLSAWLKPKGT

SEQ ID NO: 1630 - protein, 774 aa, synthetic construct
MILDTDYITEDGKPVIRIFKKENGEFKIEYDRTFEPYFYALLKDDSAIEEVKKITAERHGTVVTVKRVEKVQKKFLGRPVEVWKLYFTHFQDKPAIRDKIREHPAVIDIYEYDIPFAKRYLIDKGLVPMEGDEELKMLAFDIETLYHEGEEFAEGPILMISYADEEGARVITWKNVDLPYVDVVSTEREMIKRFLRVVKEKDPDVLITYNGDNFDFAYLKKRCEKLGINFALGRDGSEPKIQRMGDRFAVEVKGRIHFDLYPVIRRTINLPTYTLEAVYEAVFGQPKEKVYAEEITTAWETGENLERVARYSMEDAKVTYELGKEFLPMEAQLSRLIGQSLWDVSRSSTGNLVEWFLLRKAYERNELAPNKPDEKELARRRQSYEGGYVKEPERGLWENIVYLDFRSLYPSIIITHNVSPDTLNREGCKEYDVAPQVGHRFCKDFPGFIPSLLGDLLEERQKIKKKMKATIDPIERKLLDYRQRAIKILANSYYGYYGYARARWYCKECAESVTAWGREYITMTIKEIEEKYGFKVIYSDTDGFFATIPGADAETVKKKAMEFLKYINAKLPGALELEYEGFYKRGFFVTKKKYAVIDEEGKITTRGLEIVRRDWSEIAKETQARVLEALLKDGDVEKAVRIVKEVTEKLSKYEVPPEKLVIHEQITRDLKDYKATGPHVAVAKRLAARGVKIRPGTVISYIVLKGSGRIGDRAIPFDEFDPTKHKYDAEYYIENQVLPAVERILRAFGYRKEDLRYQKTRQVGLSAWLKPKGT

SEQ ID NO: 1631 - protein, 774 aa, synthetic construct
MILDTDYITEDGKPVIRIFKKENGEFKIEYDRTFEPYFYALLKDDSAIEEVKKITAERHGTVVTVKRVEKVQKKFLGRPVEVWKLYFTHFQDKPAIADKIREHPAVIDIYEYDIPFAKRYLIDKGLVPMEGDEELKMLAFDIETLYHEGEEFAEGPILMISYADEEGARVITWKNVDLPYVDVVSTEREMIKRFLRVVKEKDPDVLITYNGDNFDFAYLKKRCEKLGINFALGRDGSEPKIQRMGDRFAVEVKGRIHFDLYPVIRRTINLPTYTLEAVYEAVFGQPKEKVYAEEITTAWETGENLERVARYSMEDAKVTYELGKEFLPMEAQLSRLIGQSLWDVSRSSTGNLVEWFLLRKAYERNELAPNKPDEKELARRRQSYEGGYVKEPERGLWENIVYLDFRSLYPSIIITHNVSPDTLNREGCKEYDVAPQVGHRFCKDFPGFIPSLLGDLLEERQKIKKKMKATIDPIERKLLDYRQRAIKILANSYYGYYGYARARWYCKECAESVTAWGREYITMTIKEIEEKYGFKVIYSDTDGFFATIPGADAETVKKKAMEFLKYINAKLPGALELEYEGFYKRGFFVTKKKYAVIDEEGKITTRGLEIVRRDWSEIAKETQARVLEALLKDGDVEKAVRIVKEVTEKLSKYEVPPEKLVIHEQITRDLKDYKATGPHVAVAKRLAARGVKIRPGTVISYIVLKGSGRIGDRAIPFDEFDPTKHKYDAEYYIENQVLPAVERILRAFGYRKEDLRYQKTRQVGLSAWLKPKGT

SEQ ID NO: 1632 - protein, 774 aa, synthetic construct
MILDTDYITEDGKPVIRIFKKENGEFKIEYDRTFEPYFYALLKDDSAIEEVKKITAERHGTVVTVKRVEKVQKKFLGRPVEVWKLYFTHFQDKPAIFDKIREHPAVIDIYEYDIPFAKRYLIDKGLVPMEGDEELKMLAFDIETLYHEGEEFAEGPILMISYADEEGARVITWKNVDLPYVDVVSTEREMIKRFLRVVKEKDPDVLITYNGDNFDFAYLKKRCEKLGINFALGRDGSEPKIQRMGDRFAVEVKGRIHFDLYPVIRRTINLPTYTLEAVYEAVFGQPKEKVYAEEITTAWETGENLERVARYSMEDAKVTYELGKEFLPMEAQLSRLIGQSLWDVSRSSTGNLVEWFLLRKAYERNELAPNKPDEKELARRRQSYEGGYVKEPERGLWENIVYLDFRSLYPSIIITHNVSPDTLNREGCKEYDVAPQVGHRFCKDFPGFIPSLLGDLLEERQKIKKKMKATIDPIERKLLDYRQRAIKILANSYYGYYGYARARWYCKECAESVTAWGREYITMTIKEIEEKYGFKVIYSDTDGFFATIPGADAETVKKKAMEFLKYINAKLPGALELEYEGFYKRGFFVTKKKYAVIDEEGKITTRGLEIVRRDWSEIAKETQARVLEALLKDGDVEKAVRIVKEVTEKLSKYEVPPEKLVIHEQITRDLKDYKATGPHVAVAKRLAARGVKIRPGTVISYIVLKGSGRIGDRAIPFDEFDPTKHKYDAEYYIENQVLPAVERILRAFGYRKEDLRYQKTRQVGLSAWLKPKGT

SEQ ID NO: 1633 - protein, 774 aa, synthetic construct
MILDTDYITEDGKPVIRIFKKENGEFKIEYDRTFEPYFYALLKDDSAIEEVKKITAERHGTVVTVKRVEKVQKKFLGRPVEVWKLYFTHFQDKPAIHDKIREHPAVIDIYEYDIPFAKRYLIDKGLVPMEGDEELKMLAFDIETLYHEGEEFAEGPILMISYADEEGARVITWKNVDLPYVDVVSTEREMIKRFLRVVKEKDPDVLITYNGDNFDFAYLKKRCEKLGINFALGRDGSEPKIQRMGDRFAVEVKGRIHFDLYPVIRRTINLPTYTLEAVYEAVFGQPKEKVYAEEITTAWETGENLERVARYSMEDAKVTYELGKEFLPMEAQLSRLIGQSLWDVSRSSTGNLVEWFLLRKAYERNELAPNKPDEKELARRRQSYEGGYVKEPERGLWENIVYLDFRSLYPSIIITHNVSPDTLNREGCKEYDVAPQVGHRFCKDFPGFIPSLLGDLLEERQKIKKKMKATIDPIERKLLDYRQRAIKILANSYYGYYGYARARWYCKECAESVTAWGREYITMTIKEIEEKYGFKVIYSDTDGFFATIPGADAETVKKKAMEFLKYINAKLPGALELEYEGFYKRGFFVTKKKYAVIDEEGKITTRGLEIVRRDWSEIAKETQARVLEALLKDGDVEKAVRIVKEVTEKLSKYEVPPEKLVIHEQITRDLKDYKATGPHVAVAKRLAARGVKIRPGTVISYIVLKGSGRIGDRAIPFDEFDPTKHKYDAEYYIENQVLPAVERILRAFGYRKEDLRYQKTRQVGLSAWLKPKGT

SEQ ID NO: 1634 - protein, 774 aa, synthetic construct
MILDTDYITEDGKPVIRIFKKENGEFKIEYDRTFEPYFYALLKDDSAIEEVKKITAERHGTVVTVKRVEKVQKKFLGRPVEVWKLYFTHFQDQPAIRDKIREHPAVIDIYEYDIPFAKRYLIDKGLVPMEGDEELKMLAFDIETLYHEGEEFAEGPILMISYADEEGARVITWKNVDLPYVDVVSTEREMIKRFLRVVKEKDPDVLITYNGDNFDFAYLKKRCEKLGINFALGRDGSEPKIQRMGDRFAVEVKGRIHFDLYPVIRRTINLPTYTLEAVYEAVFGQPKEKVYAEEITTAWETGENLERVARYSMEDAKVTYELGKEFLPMEAQLSRLIGQSLWDVSRSSTGNLVEWFLLRKAYERNELAPNKPDEKELARRRQSYEGGYVKEPERGLWENIVYLDFRSLYPSIIITHNVSPDTLNREGCKEYDVAPQVGHRFCKDFPGFIPSLLGDLLEERQKIKKKMKATIDPIERKLLDYRQRAIKILANSYYGYYGYARARWYCKECAESVTAWGREYITMTIKEIEEKYGFKVIYSDTDGFFATIPGADAETVKKKAMEFLKYINAKLPGALELEYEGFYKRGFFVTKKKYAVIDEEGKITTRGLEIVRRDWSEIAKETQARVLEALLKDGDVEKAVRIVKEVTEKLSKYEVPPEKLVIHEQITRDLKDYKATGPHVAVAKRLAARGVKIRPGTVISYIVLKGSGRIGDRAIPFDEFDPTKHKYDAEYYIENQVLPAVERILRAFGYRKEDLRYQKTRQVGLSAWLKPKGT

SEQ ID NO: 1635 - protein, 774 aa, synthetic construct
MILDTDYITEDGKPVIRIFKKENGEFKIEYDRTFEPYFYALLKDDSAIEEVKKITAERHGTVVTVKRVEKVQKKFLGRPVEVWKLYFTHFQDRPAIRDKIREHPAVIDIYEYDIPFAKRYLIDKGLVPMEGDEELKMLAFDIETLYHEGEEFAEGPILMISYADEEGARVITWKNVDLPYVDVVSTEREMIKRFLRVVKEKDPDVLITYNGDNFDFAYLKKRCEKLGINFALGRDGSEPKIQRMGDRFAVEVKGRIHFDLYPVIRRTINLPTYTLEAVYEAVFGQPKEKVYAEEITTAWETGENLERVARYSMEDAKVTYELGKEFLPMEAQLSRLIGQSLWDVSRSSTGNLVEWFLLRKAYERNELAPNKPDEKELARRRQSYEGGYVKEPERGLWENIVYLDFRSLYPSIIITHNVSPDTLNREGCKEYDVAPQVGHRFCKDFPGFIPSLLGDLLEERQKIKKKMKATIDPIERKLLDYRQRAIKILANSYYGYYGYARARWYCKECAESVTAWGREYITMTIKEIEEKYGFKVIYSDTDGFFATIPGADAETVKKKAMEFLKYINAKLPGALELEYEGFYKRGFFVTKKKYAVIDEEGKITTRGLEIVRRDWSEIAKETQARVLEALLKDGDVEKAVRIVKEVTEKLSKYEVPPEKLVIHEQITRDLKDYKATGPHVAVAKRLAARGVKIRPGTVISYIVLKGSGRIGDRAIPFDEFDPTKHKYDAEYYIENQVLPAVERILRAFGYRKEDLRYQKTRQVGLSAWLKPKGT

SEQ ID NO: 1636 - protein, 774 aa, synthetic construct
MILDTDYITEDGKPVIRIFKKENGEFKIEYDRTFEPYFYALLKDDSAIEEVKKITAERHGTVVTVKRVEKVQKKFLGRPVEVWKLYFTHFQDRPAIADKIREHPAVIDIYEYDIPFAKRYLIDKGLVPMEGDEELKMLAFDIETLYHEGEEFAEGPILMISYADEEGARVITWKNVDLPYVDVVSTEREMIKRFLRVVKEKDPDVLITYNGDNFDFAYLKKRCEKLGINFALGRDGSEPKIQRMGDRFAVEVKGRIHFDLYPVIRRTINLPTYTLEAVYEAVFGQPKEKVYAEEITTAWETGENLERVARYSMEDAKVTYELGKEFLPMEAQLSRLIGQSLWDVSRSSTGNLVEWFLLRKAYERNELAPNKPDEKELARRRQSYEGGYVKEPERGLWENIVYLDFRSLYPSIIITHNVSPDTLNREGCKEYDVAPQVGHRFCKDFPGFIPSLLGDLLEERQKIKKKMKATIDPIERKLLDYRQRAIKILANSYYGYYGYARARWYCKECAESVTAWGREYITMTIKEIEEKYGFKVIYSDTDGFFATIPGADAETVKKKAMEFLKYINAKLPGALELEYEGFYKRGFFVTKKKYAVIDEEGKITTRGLEIVRRDWSEIAKETQARVLEALLKDGDVEKAVRIVKEVTEKLSKYEVPPEKLVIHEQITRDLKDYKATGPHVAVAKRLAARGVKIRPGTVISYIVLKGSGRIGDRAIPFDEFDPTKHKYDAEYYIENQVLPAVERILRAFGYRKEDLRYQKTRQVGLSAWLKPKGT

SEQ ID NO: 1637 - protein, 774 aa, synthetic construct
MILDTDYITEDGKPVIRIFKKENGEFKIEYDRTFEPYFYALLKDDSAIEEVKKITAERHGTVVTVKRVEKVQKKFLGRPVEVWKLYFTHFQDRPAIADKIREHPAVIDIYEYDIPFAKQYLIDKGLVPMEGDEELKMLAFDIETLYHEGEEFAEGPILMISYADEEGARVITWKNVDLPYVDVVSTEREMIKRFLRVVKEKDPDVLITYNGDNFDFAYLKKRCEKLGINFALGRDGSEPKIQRMGDRFAVEVKGRIHFDLYPVIRRTINLPTYTLEAVYEAVFGQPKEKVYAEEITTAWETGENLERVARYSMEDAKVTYELGKEFLPMEAQLSRLIGQSLWDVSRSSTGNLVEWFLLRKAYERNELAPNKPDEKELARRRQSYEGGYVKEPERGLWENIVYLDFRSLYPSIIITHNVSPDTLNREGCKEYDVAPQVGHRFCKDFPGFIPSLLGDLLEERQKIKKKMKATIDPIERKLLDYRQRAIKILANSYYGYYGYARARWYCKECAESVTAWGREYITMTIKEIEEKYGFKVIYSDTDGFFATIPGADAETVKKKAMEFLKYINAKLPGALELEYEGFYKRGFFVTKKKYAVIDEEGKITTRGLEIVRRDWSEIAKETQARVLEALLKDGDVEKAVRIVKEVTEKLSKYEVPPEKLVIHEQITRDLKDYKATGPHVAVAKRLAARGVKIRPGTVISYIVLKGSGRIGDRAIPFDEFDPTKHKYDAEYYIENQVLPAVERILRAFGYRKEDLRYQKTRQVGLSAWLKPKGT

SEQ ID NO: 1638 - protein, 774 aa, synthetic construct
MILDTDYITEDGKPVIRIFKKENGEFKIEYDRTFEPYFYALLKDDSAIEEVKKITAERHGTVVTVKRVEKVQKKFLGRPVEVWKLYFTHFQDRPAIFDKIREHPAVIDIYEYDIPFAKRYLIDKGLVPMEGDEELKMLAFDIETLYHEGEEFAEGPILMISYADEEGARVITWKNVDLPYVDVVSTEREMIKRFLRVVKEKDPDVLITYNGDNFDFAYLKKRCEKLGINFALGRDGSEPKIQRMGDRFAVEVKGRIHFDLYPVIRRTINLPTYTLEAVYEAVFGQPKEKVYAEEITTAWETGENLERVARYSMEDAKVTYELGKEFLPMEAQLSRLIGQSLWDVSRSSTGNLVEWFLLRKAYERNELAPNKPDEKELARRRQSYEGGYVKEPERGLWENIVYLDFRSLYPSIIITHNVSPDTLNREGCKEYDVAPQVGHRFCKDFPGFIPSLLGDLLEERQKIKKKMKATIDPIERKLLDYRQRAIKILANSYYGYYGYARARWYCKECAESVTAWGREYITMTIKEIEEKYGFKVIYSDTDGFFATIPGADAETVKKKAMEFLKYINAKLPGALELEYEGFYKRGFFVTKKKYAVIDEEGKITTRGLEIVRRDWSEIAKETQARVLEALLKDGDVEKAVRIVKEVTEKLSKYEVPPEKLVIHEQITRDLKDYKATGPHVAVAKRLAARGVKIRPGTVISYIVLKGSGRIGDRAIPFDEFDPTKHKYDAEYYIENQVLPAVERILRAFGYRKEDLRYQKTRQVGLSAWLKPKGT

SEQ ID NO: 1639 - protein, 774 aa, synthetic construct
MILDTDYITEDGKPVIRIFKKENGEFKIEYDRTFEPYFYALLKDDSAIEEVKKITAERHGTVVTVKRVEKVQKKFLGRPVEVWKLYFTHFQDRPAIHDKIREHPAVIDIYEYDIPFAKRYLIDKGLVPMEGDEELKMLAFDIETLYHEGEEFAEGPILMISYADEEGARVITWKNVDLPYVDVVSTEREMIKRFLRVVKEKDPDVLITYNGDNFDFAYLKKRCEKLGINFALGRDGSEPKIQRMGDRFAVEVKGRIHFDLYPVIRRTINLPTYTLEAVYEAVFGQPKEKVYAEEITTAWETGENLERVARYSMEDAKVTYELGKEFLPMEAQLSRLIGQSLWDVSRSSTGNLVEWFLLRKAYERNELAPNKPDEKELARRRQSYEGGYVKEPERGLWENIVYLDFRSLYPSIIITHNVSPDTLNREGCKEYDVAPQVGHRFCKDFPGFIPSLLGDLLEERQKIKKKMKATIDPIERKLLDYRQRAIKILANSYYGYYGYARARWYCKECAESVTAWGREYITMTIKEIEEKYGFKVIYSDTDGFFATIPGADAETVKKKAMEFLKYINAKLPGALELEYEGFYKRGFFVTKKKYAVIDEEGKITTRGLEIVRRDWSEIAKETQARVLEALLKDGDVEKAVRIVKEVTEKLSKYEVPPEKLVIHEQITRDLKDYKATGPHVAVAKRLAARGVKIRPGTVISYIVLKGSGRIGDRAIPFDEFDPTKHKYDAEYYIENQVLPAVERILRAFGYRKEDLRYQKTRQVGLSAWLKPKGT

SEQ ID NO: 1640 - protein, 774 aa, synthetic construct
MILDTDYITEDGKPVIRIFKKENGEFKIEYDRTFEPYFYALLKDDSAIEEVKKITAERHGTVVTVKRVEKVQKKFLGRPVEVWKLYFTHIQDVPAIADKIREHPAVIDIYEYDIPFAKRYLIDKGLVPMEGDEELKMLAFDIETLYHEGEEFAEGPILMISYADEEGARVITWKNVDLPYVDVVSTEREMIKRFLRVVKEKDPDVLITYNGDNFDFAYLKKRCEKLGINFALGRDGSEPKIQRMGDRFAVEVKGRIHFDLYPVIRRTINLPTYTLEAVYEAVFGQPKEKVYAEEITTAWETGENLERVARYSMEDAKVTYELGKEFLPMEAQLSRLIGQSLWDVSRSSTGNLVEWFLLRKAYERNELAPNKPDEKELARRRQSYEGGYVKEPERGLWENIVYLDFRSLYPSIIITHNVSPDTLNREGCKEYDVAPQVGHRFCKDFPGFIPSLLGDLLEERQKIKKKMKATIDPIERKLLDYRQRAIKILANSYYGYYGYARARWYCKECAESVTAWGREYITMTIKEIEEKYGFKVIYSDTDGFFATIPGADAETVKKKAMEFLKYINAKLPGALELEYEGFYKRGFFVTKKKYAVIDEEGKITTRGLEIVRRDWSEIAKETQARVLEALLKDGDVEKAVRIVKEVTEKLSKYEVPPEKLVIHEQITRDLKDYKATGPHVAVAKRLAARGVKIRPGTVISYIVLKGSGRIGDRAIPFDEFDPTKHKYDAEYYIENQVLPAVERILRAFGYRKEDLRYQKTRQVGLSAWLKPKGT

SEQ ID NO: 1641 - protein, 774 aa, synthetic construct
MILDTDYITEDGKPVIRIFKKENGEFKIEYDRTFEPYFYALLKDDSAIEEVKKITAERHGTVVTVKRVEKVQKKFLGRPVEVWKLYFTHIQDVPAIFDKIREHPAVIDIYEYDIPFAKRYLIDKGLVPMEGDEELKMLAFDIETLYHEGEEFAEGPILMISYADEEGARVITWKNVDLPYVDVVSTEREMIKRFLRVVKEKDPDVLITYNGDNFDFAYLKKRCEKLGINFALGRDGSEPKIQRMGDRFAVEVKGRIHFDLYPVIRRTINLPTYTLEAVYEAVFGQPKEKVYAEEITTAWETGENLERVARYSMEDAKVTYELGKEFLPMEAQLSRLIGQSLWDVSRSSTGNLVEWFLLRKAYERNELAPNKPDEKELARRRQSYEGGYVKEPERGLWENIVYLDFRSLYPSIIITHNVSPDTLNREGCKEYDVAPQVGHRFCKDFPGFIPSLLGDLLEERQKIKKKMKATIDPIERKLLDYRQRAIKILANSYYGYYGYARARWYCKECAESVTAWGREYITMTIKEIEEKYGFKVIYSDTDGFFATIPGADAETVKKKAMEFLKYINAKLPGALELEYEGFYKRGFFVTKKKYAVIDEEGKITTRGLEIVRRDWSEIAKETQARVLEALLKDGDVEKAVRIVKEVTEKLSKYEVPPEKLVIHEQITRDLKDYKATGPHVAVAKRLAARGVKIRPGTVISYIVLKGSGRIGDRAIPFDEFDPTKHKYDAEYYIENQVLPAVERILRAFGYRKEDLRYQKTRQVGLSAWLKPKGT

SEQ ID NO: 1642 - protein, 774 aa, synthetic construct
MILDTDYITEDGKPVIRIFKKENGEFKIEYDRTFEPYFYALLKDDSAIEEVKKITAERHGTVVTVKRVEKVQKKFLGRPVEVWKLYFTHIQDVPAIHDKIREHPAVIDIYEYDIPFAKRYLIDKGLVPMEGDEELKMLAFDIETLYHEGEEFAEGPILMISYADEEGARVITWKNVDLPYVDVVSTEREMIKRFLRVVKEKDPDVLITYNGDNFDFAYLKKRCEKLGINFALGRDGSEPKIQRMGDRFAVEVKGRIHFDLYPVIRRTINLPTYTLEAVYEAVFGQPKEKVYAEEITTAWETGENLERVARYSMEDAKVTYELGKEFLPMEAQLSRLIGQSLWDVSRSSTGNLVEWFLLRKAYERNELAPNKPDEKELARRRQSYEGGYVKEPERGLWENIVYLDFRSLYPSIIITHNVSPDTLNREGCKEYDVAPQVGHRFCKDFPGFIPSLLGDLLEERQKIKKKMKATIDPIERKLLDYRQRAIKILANSYYGYYGYARARWYCKECAESVTAWGREYITMTIKEIEEKYGFKVIYSDTDGFFATIPGADAETVKKKAMEFLKYINAKLPGALELEYEGFYKRGFFVTKKKYAVIDEEGKITTRGLEIVRRDWSEIAKETQARVLEALLKDGDVEKAVRIVKEVTEKLSKYEVPPEKLVIHEQITRDLKDYKATGPHVAVAKRLAARGVKIRPGTVISYIVLKGSGRIGDRAIPFDEFDPTKHKYDAEYYIENQVLPAVERILRAFGYRKEDLRYQKTRQVGLSAWLKPKGT

SEQ ID NO: 1643 - protein, 774 aa, synthetic construct
MILDTDYITEDGKPVIRIFKKENGEFKIEYDRTFEPYFYALLKDDSAIEEVKKITAERHGTVVTVKRVEKVQKKFLGRPVEVWKLYFTHIQDVPAIWDKIREHPAVIDIYEYDIPFAKRYLIDKGLVPMEGDEELKMLAFDIETLYHEGEEFAEGPILMISYADEEGARVITWKNVDLPYVDVVSTEREMIKRFLRVVKEKDPDVLITYNGDNFDFAYLKKRCEKLGINFALGRDGSEPKIQRMGDRFAVEVKGRIHFDLYPVIRRTINLPTYTLEAVYEAVFGQPKEKVYAEEITTAWETGENLERVARYSMEDAKVTYELGKEFLPMEAQLSRLIGQSLWDVSRSSTGNLVEWFLLRKAYERNELAPNKPDEKELARRRQSYEGGYVKEPERGLWENIVYLDFRSLYPSIIITHNVSPDTLNREGCKEYDVAPQVGHRFCKDFPGFIPSLLGDLLEERQKIKKKMKATIDPIERKLLDYRQRAIKILANSYYGYYGYARARWYCKECAESVTAWGREYITMTIKEIEEKYGFKVIYSDTDGFFATIPGADAETVKKKAMEFLKYINAKLPGALELEYEGFYKRGFFVTKKKYAVIDEEGKITTRGLEIVRRDWSEIAKETQARVLEALLKDGDVEKAVRIVKEVTEKLSKYEVPPEKLVIHEQITRDLKDYKATGPHVAVAKRLAARGVKIRPGTVISYIVLKGSGRIGDRAIPFDEFDPTKHKYDAEYYIENQVLPAVERILRAFGYRKEDLRYQKTRQVGLSAWLKPKGT

SEQ ID NO: 1644 - protein, 774 aa, synthetic construct
MILDTDYITEDGKPVIRIFKKENGEFKIEYDRTFEPYFYALLKDDSAIEEVKKITAERHGTVVTVKRVEKVQKKFLGRPVEVWKLYFTHIQDIPAIRDKIREHPAVIDIYEYDIPFAKRYLIDKGLVPMEGDEELKMLAFDIETLYHEGEEFAEGPILMISYADEEGARVITWKNVDLPYVDVVSTEREMIKRFLRVVKEKDPDVLITYNGDNFDFAYLKKRCEKLGINFALGRDGSEPKIQRMGDRFAVEVKGRIHFDLYPVIRRTINLPTYTLEAVYEAVFGQPKEKVYAEEITTAWETGENLERVARYSMEDAKVTYELGKEFLPMEAQLSRLIGQSLWDVSRSSTGNLVEWFLLRKAYERNELAPNKPDEKELARRRQSYEGGYVKEPERGLWENIVYLDFRSLYPSIIITHNVSPDTLNREGCKEYDVAPQVGHRFCKDFPGFIPSLLGDLLEERQKIKKKMKATIDPIERKLLDYRQRAIKILANSYYGYYGYARARWYCKECAESVTAWGREYITMTIKEIEEKYGFKVIYSDTDGFFATIPGADAETVKKKAMEFLKYINAKLPGALELEYEGFYKRGFFVTKKKYAVIDEEGKITTRGLEIVRRDWSEIAKETQARVLEALLKDGDVEKAVRIVKEVTEKLSKYEVPPEKLVIHEQITRDLKDYKATGPHVAVAKRLAARGVKIRPGTVISYIVLKGSGRIGDRAIPFDEFDPTKHKYDAEYYIENQVLPAVERILRAFGYRKEDLRYQKTRQVGLSAWLKPKGT

SEQ ID NO: 1645 - protein, 774 aa, synthetic construct
MILDTDYITEDGKPVIRIFKKENGEFKIEYDRTFEPYFYALLKDDSAIEEVKKITAERHGTVVTVKRVEKVQKKFLGRPVEVWKLYFTHIQDIPAIADKIREHPAVIDIYEYDIPFAKRYLIDKGLVPMEGDEELKMLAFDIETLYHEGEEFAEGPILMISYADEEGARVITWKNVDLPYVDVVSTEREMIKRFLRVVKEKDPDVLITYNGDNFDFAYLKKRCEKLGINFALGRDGSEPKIQRMGDRFAVEVKGRIHFDLYPVIRRTINLPTYTLEAVYEAVFGQPKEKVYAEEITTAWETGENLERVARYSMEDAKVTYELGKEFLPMEAQLSRLIGQSLWDVSRSSTGNLVEWFLLRKAYERNELAPNKPDEKELARRRQSYEGGYVKEPERGLWENIVYLDFRSLYPSIIITHNVSPDTLNREGCKEYDVAPQVGHRFCKDFPGFIPSLLGDLLEERQKIKKKMKATIDPIERKLLDYRQRAIKILANSYYGYYGYARARWYCKECAESVTAWGREYITMTIKEIEEKYGFKVIYSDTDGFFATIPGADAETVKKKAMEFLKYINAKLPGALELEYEGFYKRGFFVTKKKYAVIDEEGKITTRGLEIVRRDWSEIAKETQARVLEALLKDGDVEKAVRIVKEVTEKLSKYEVPPEKLVIHEQITRDLKDYKATGPHVAVAKRLAARGVKIRPGTVISYIVLKGSGRIGDRAIPFDEFDPTKHKYDAEYYIENQVLPAVERILRAFGYRKEDLRYQKTRQVGLSAWLKPKGT

SEQ ID NO: 1646 - protein, 774 aa, synthetic construct
MILDTDYITEDGKPVIRIFKKENGEFKIEYDRTFEPYFYALLKDDSAIEEVKKITAERHGTVVTVKRVEKVQKKFLGRPVEVWKLYFTHIQDIPAIFDKIREHPAVIDIYEYDIPFAKRYLIDKGLVPMEGDEELKMLAFDIETLYHEGEEFAEGPILMISYADEEGARVITWKNVDLPYVDVVSTEREMIKRFLRVVKEKDPDVLITYNGDNFDFAYLKKRCEKLGINFALGRDGSEPKIQRMGDRFAVEVKGRIHFDLYPVIRRTINLPTYTLEAVYEAVFGQPKEKVYAEEITTAWETGENLERVARYSMEDAKVTYELGKEFLPMEAQLSRLIGQSLWDVSRSSTGNLVEWFLLRKAYERNELAPNKPDEKELARRRQSYEGGYVKEPERGLWENIVYLDFRSLYPSIIITHNVSPDTLNREGCKEYDVAPQVGHRFCKDFPGFIPSLLGDLLEERQKIKKKMKATIDPIERKLLDYRQRAIKILANSYYGYYGYARARWYCKECAESVTAWGREYITMTIKEIEEKYGFKVIYSDTDGFFATIPGADAETVKKKAMEFLKYINAKLPGALELEYEGFYKRGFFVTKKKYAVIDEEGKITTRGLEIVRRDWSEIAKETQARVLEALLKDGDVEKAVRIVKEVTEKLSKYEVPPEKLVIHEQITRDLKDYKATGPHVAVAKRLAARGVKIRPGTVISYIVLKGSGRIGDRAIPFDEFDPTKHKYDAEYYIENQVLPAVERILRAFGYRKEDLRYQKTRQVGLSAWLKPKGT

SEQ ID NO: 1647 - protein, 774 aa, synthetic construct
MILDTDYITEDGKPVIRIFKKENGEFKIEYDRTFEPYFYALLKDDSAIEEVKKITAERHGTVVTVKRVEKVQKKFLGRPVEVWKLYFTHIQDIPAIHDKIREHPAVIDIYEYDIPFAKRYLIDKGLVPMEGDEELKMLAFDIETLYHEGEEFAEGPILMISYADEEGARVITWKNVDLPYVDVVSTEREMIKRFLRVVKEKDPDVLITYNGDNFDFAYLKKRCEKLGINFALGRDGSEPKIQRMGDRFAVEVKGRIHFDLYPVIRRTINLPTYTLEAVYEAVFGQPKEKVYAEEITTAWETGENLERVARYSMEDAKVTYELGKEFLPMEAQLSRLIGQSLWDVSRSSTGNLVEWFLLRKAYERNELAPNKPDEKELARRRQSYEGGYVKEPERGLWENIVYLDFRSLYPSIIITHNVSPDTLNREGCKEYDVAPQVGHRFCKDFPGFIPSLLGDLLEERQKIKKKMKATIDPIERKLLDYRQRAIKILANSYYGYYGYARARWYCKECAESVTAWGREYITMTIKEIEEKYGFKVIYSDTDGFFATIPGADAETVKKKAMEFLKYINAKLPGALELEYEGFYKRGFFVTKKKYAVIDEEGKITTRGLEIVRRDWSEIAKETQARVLEALLKDGDVEKAVRIVKEVTEKLSKYEVPPEKLVIHEQITRDLKDYKATGPHVAVAKRLAARGVKIRPGTVISYIVLKGSGRIGDRAIPFDEFDPTKHKYDAEYYIENQVLPAVERILRAFGYRKEDLRYQKTRQVGLSAWLKPKGT

SEQ ID NO: 1648 - protein, 774 aa, synthetic construct
MILDTDYITEDGKPVIRIFKKENGEFKIEYDRTFEPYFYALLKDDSAIEEVKKITAERHGTVVTVKRVEKVQKKFLGRPVEVWKLYFTHIQDIPAIWDKIREHPAVIDIYEYDIPFAKRYLIDKGLVPMEGDEELKMLAFDIETLYHEGEEFAEGPILMISYADEEGARVITWKNVDLPYVDVVSTEREMIKRFLRVVKEKDPDVLITYNGDNFDFAYLKKRCEKLGINFALGRDGSEPKIQRMGDRFAVEVKGRIHFDLYPVIRRTINLPTYTLEAVYEAVFGQPKEKVYAEEITTAWETGENLERVARYSMEDAKVTYELGKEFLPMEAQLSRLIGQSLWDVSRSSTGNLVEWFLLRKAYERNELAPNKPDEKELARRRQSYEGGYVKEPERGLWENIVYLDFRSLYPSIIITHNVSPDTLNREGCKEYDVAPQVGHRFCKDFPGFIPSLLGDLLEERQKIKKKMKATIDPIERKLLDYRQRAIKILANSYYGYYGYARARWYCKECAESVTAWGREYITMTIKEIEEKYGFKVIYSDTDGFFATIPGADAETVKKKAMEFLKYINAKLPGALELEYEGFYKRGFFVTKKKYAVIDEEGKITTRGLEIVRRDWSEIAKETQARVLEALLKDGDVEKAVRIVKEVTEKLSKYEVPPEKLVIHEQITRDLKDYKATGPHVAVAKRLAARGVKIRPGTVISYIVLKGSGRIGDRAIPFDEFDPTKHKYDAEYYIENQVLPAVERILRAFGYRKEDLRYQKTRQVGLSAWLKPKGT

SEQ ID NO: 1649 - protein, 774 aa, synthetic construct
MILDTDYITEDGKPVIRIFKKENGEFKIEYDRTFEPYFYALLKDDSAIEEVKKITAERHGTVVTVKRVEKVQKKFLGRPVEVWKLYFTHIQDKPAIRDKIREHPAVIDIYEYDIPFAKRYLIDKGLVPMEGDEELKMLAFDIETLYHEGEEFAEGPILMISYADEEGARVITWKNVDLPYVDVVSTEREMIKRFLRVVKEKDPDVLITYNGDNFDFAYLKKRCEKLGINFALGRDGSEPKIQRMGDRFAVEVKGRIHFDLYPVIRRTINLPTYTLEAVYEAVFGQPKEKVYAEEITTAWETGENLERVARYSMEDAKVTYELGKEFLPMEAQLSRLIGQSLWDVSRSSTGNLVEWFLLRKAYERNELAPNKPDEKELARRRQSYEGGYVKEPERGLWENIVYLDFRSLYPSIIITHNVSPDTLNREGCKEYDVAPQVGHRFCKDFPGFIPSLLGDLLEERQKIKKKMKATIDPIERKLLDYRQRAIKILANSYYGYYGYARARWYCKECAESVTAWGREYITMTIKEIEEKYGFKVIYSDTDGFFATIPGADAETVKKKAMEFLKYINAKLPGALELEYEGFYKRGFFVTKKKYAVIDEEGKITTRGLEIVRRDWSEIAKETQARVLEALLKDGDVEKAVRIVKEVTEKLSKYEVPPEKLVIHEQITRDLKDYKATGPHVAVAKRLAARGVKIRPGTVISYIVLKGSGRIGDRAIPFDEFDPTKHKYDAEYYIENQVLPAVERILRAFGYRKEDLRYQKTRQVGLSAWLKPKGT

SEQ ID NO: 1650 - protein, 774 aa, synthetic construct
MILDTDYITEDGKPVIRIFKKENGEFKIEYDRTFEPYFYALLKDDSAIEEVKKITAERHGTVVTVKRVEKVQKKFLGRPVEVWKLYFTHIQDKPAIADKIREHPAVIDIYEYDIPFAKRYLIDKGLVPMEGDEELKMLAFDIETLYHEGEEFAEGPILMISYADEEGARVITWKNVDLPYVDVVSTEREMIKRFLRVVKEKDPDVLITYNGDNFDFAYLKKRCEKLGINFALGRDGSEPKIQRMGDRFAVEVKGRIHFDLYPVIRRTINLPTYTLEAVYEAVFGQPKEKVYAEEITTAWETGENLERVARYSMEDAKVTYELGKEFLPMEAQLSRLIGQSLWDVSRSSTGNLVEWFLLRKAYERNELAPNKPDEKELARRRQSYEGGYVKEPERGLWENIVYLDFRSLYPSIIITHNVSPDTLNREGCKEYDVAPQVGHRFCKDFPGFIPSLLGDLLEERQKIKKKMKATIDPIERKLLDYRQRAIKILANSYYGYYGYARARWYCKECAESVTAWGREYITMTIKEIEEKYGFKVIYSDTDGFFATIPGADAETVKKKAMEFLKYINAKLPGALELEYEGFYKRGFFVTKKKYAVIDEEGKITTRGLEIVRRDWSEIAKETQARVLEALLKDGDVEKAVRIVKEVTEKLSKYEVPPEKLVIHEQITRDLKDYKATGPHVAVAKRLAARGVKIRPGTVISYIVLKGSGRIGDRAIPFDEFDPTKHKYDAEYYIENQVLPAVERILRAFGYRKEDLRYQKTRQVGLSAWLKPKGT

SEQ ID NO: 1651 - protein, 774 aa, synthetic construct
MILDTDYITEDGKPVIRIFKKENGEFKIEYDRTFEPYFYALLKDDSAIEEVKKITAERHGTVVTVKRVEKVQKKFLGRPVEVWKLYFTHIQDKPAIHDKIREHPAVIDIYEYDIPFAKRYLIDKGLVPMEGDEELKMLAFDIETLYHEGEEFAEGPILMISYADEEGARVITWKNVDLPYVDVVSTEREMIKRFLRVVKEKDPDVLITYNGDNFDFAYLKKRCEKLGINFALGRDGSEPKIQRMGDRFAVEVKGRIHFDLYPVIRRTINLPTYTLEAVYEAVFGQPKEKVYAEEITTAWETGENLERVARYSMEDAKVTYELGKEFLPMEAQLSRLIGQSLWDVSRSSTGNLVEWFLLRKAYERNELAPNKPDEKELARRRQSYEGGYVKEPERGLWENIVYLDFRSLYPSIIITHNVSPDTLNREGCKEYDVAPQVGHRFCKDFPGFIPSLLGDLLEERQKIKKKMKATIDPIERKLLDYRQRAIKILANSYYGYYGYARARWYCKECAESVTAWGREYITMTIKEIEEKYGFKVIYSDTDGFFATIPGADAETVKKKAMEFLKYINAKLPGALELEYEGFYKRGFFVTKKKYAVIDEEGKITTRGLEIVRRDWSEIAKETQARVLEALLKDGDVEKAVRIVKEVTEKLSKYEVPPEKLVIHEQITRDLKDYKATGPHVAVAKRLAARGVKIRPGTVISYIVLKGSGRIGDRAIPFDEFDPTKHKYDAEYYIENQVLPAVERILRAFGYRKEDLRYQKTRQVGLSAWLKPKGT

SEQ ID NO: 1652 - protein, 774 aa, synthetic construct
MILDTDYITEDGKPVIRIFKKENGEFKIEYDRTFEPYFYALLKDDSAIEEVKKITAERHGTVVTVKRVEKVQKKFLGRPVEVWKLYFTHIQDKPAIPDKIREHPAVIDIYEYDIPFAKRYLIDKGLVPMEGDEELKMLAFDIETLYHEGEEFAEGPILMISYADEEGARVITWKNVDLPYVDVVSTEREMIKRFLRVVKEKDPDVLITYNGDNFDFAYLKKRCEKLGINFALGRDGSEPKIQRMGDRFAVEVKGRIHFDLYPVIRRTINLPTYTLEAVYEAVFGQPKEKVYAEEITTAWETGENLERVARYSMEDAKVTYELGKEFLPMEAQLSRLIGQSLWDVSRSSTGNLVEWFLLRKAYERNELAPNKPDEKELARRRQSYEGGYVKEPERGLWENIVYLDFRSLYPSIIITHNVSPDTLNREGCKEYDVAPQVGHRFCKDFPGFIPSLLGDLLEERQKIKKKMKATIDPIERKLLDYRQRAIKILANSYYGYYGYARARWYCKECAESVTAWGREYITMTIKEIEEKYGFKVIYSDTDGFFATIPGADAETVKKKAMEFLKYINAKLPGALELEYEGFYKRGFFVTKKKYAVIDEEGKITTRGLEIVRRDWSEIAKETQARVLEALLKDGDVEKAVRIVKEVTEKLSKYEVPPEKLVIHEQITRDLKDYKATGPHVAVAKRLAARGVKIRPGTVISYIVLKGSGRIGDRAIPFDEFDPTKHKYDAEYYIENQVLPAVERILRAFGYRKEDLRYQKTRQVGLSAWLKPKGT

SEQ ID NO: 1653 - protein, 774 aa, synthetic construct
MILDTDYITEDGKPVIRIFKKENGEFKIEYDRTFEPYFYALLKDDSAIEEVKKITAERHGTVVTVKRVEKVQKKFLGRPVEVWKLYFTHIQDQPAIRDKIREHPAVIDIYEYDIPFAKRYLIDKGLVPMEGDEELKMLAFDIETLYHEGEEFAEGPILMISYADEEGARVITWKNVDLPYVDVVSTEREMIKRFLRVVKEKDPDVLITYNGDNFDFAYLKKRCEKLGINFALGRDGSEPKIQRMGDRFAVEVKGRIHFDLYPVIRRTINLPTYTLEAVYEAVFGQPKEKVYAEEITTAWETGENLERVARYSMEDAKVTYELGKEFLPMEAQLSRLIGQSLWDVSRSSTGNLVEWFLLRKAYERNELAPNKPDEKELARRRQSYEGGYVKEPERGLWENIVYLDFRSLYPSIIITHNVSPDTLNREGCKEYDVAPQVGHRFCKDFPGFIPSLLGDLLEERQKIKKKMKATIDPIERKLLDYRQRAIKILANSYYGYYGYARARWYCKECAESVTAWGREYITMTIKEIEEKYGFKVIYSDTDGFFATIPGADAETVKKKAMEFLKYINAKLPGALELEYEGFYKRGFFVTKKKYAVIDEEGKITTRGLEIVRRDWSEIAKETQARVLEALLKDGDVEKAVRIVKEVTEKLSKYEVPPEKLVIHEQITRDLKDYKATGPHVAVAKRLAARGVKIRPGTVISYIVLKGSGRIGDRAIPFDEFDPTKHKYDAEYYIENQVLPAVERILRAFGYRKEDLRYQKTRQVGLSAWLKPKGT

SEQ ID NO: 1654 - protein, 774 aa, synthetic construct
MILDTDYITEDGKPVIRIFKKENGEFKIEYDRTFEPYFYALLKDDSAIEEVKKITAERHGTVVTVKRVEKVQKKFLGRPVEVWKLYFTHIQDQPAIADKIREHPAVIDIYEYDIPFAKRYLIDKGLVPMEGDEELKMLAFDIETLYHEGEEFAEGPILMISYADEEGARVITWKNVDLPYVDVVSTEREMIKRFLRVVKEKDPDVLITYNGDNFDFAYLKKRCEKLGINFALGRDGSEPKIQRMGDRFAVEVKGRIHFDLYPVIRRTINLPTYTLEAVYEAVFGQPKEKVYAEEITTAWETGENLERVARYSMEDAKVTYELGKEFLPMEAQLSRLIGQSLWDVSRSSTGNLVEWFLLRKAYERNELAPNKPDEKELARRRQSYEGGYVKEPERGLWENIVYLDFRSLYPSIIITHNVSPDTLNREGCKEYDVAPQVGHRFCKDFPGFIPSLLGDLLEERQKIKKKMKATIDPIERKLLDYRQRAIKILANSYYGYYGYARARWYCKECAESVTAWGREYITMTIKEIEEKYGFKVIYSDTDGFFATIPGADAETVKKKAMEFLKYINAKLPGALELEYEGFYKRGFFVTKKKYAVIDEEGKITTRGLEIVRRDWSEIAKETQARVLEALLKDGDVEKAVRIVKEVTEKLSKYEVPPEKLVIHEQITRDLKDYKATGPHVAVAKRLAARGVKIRPGTVISYIVLKGSGRIGDRAIPFDEFDPTKHKYDAEYYIENQVLPAVERILRAFGYRKEDLRYQKTRQVGLSAWLKPKGT

SEQ ID NO: 1655 - protein, 774 aa, synthetic construct
MILDTDYITEDGKPVIRIFKKENGEFKIEYDRTFEPYFYALLKDDSAIEEVKKITAERHGTVVTVKRVEKVQKKFLGRPVEVWKLYFTHIQDRPAIRDKIREHPAVIDIYEYDIPFAKRYLIDKGLVPMEGDEELKMLAFDIETLYHEGEEFAEGPILMISYADEEGARVITWKNVDLPYVDVVSTEREMIKRFLRVVKEKDPDVLITYNGDNFDFAYLKKRCEKLGINFALGRDGSEPKIQRMGDRFAVEVKGRIHFDLYPVIRRTINLPTYTLEAVYEAVFGQPKEKVYAEEITTAWETGENLERVARYSMEDAKVTYELGKEFLPMEAQLSRLIGQSLWDVSRSSTGNLVEWFLLRKAYERNELAPNKPDEKELARRRQSYEGGYVKEPERGLWENIVYLDFRSLYPSIIITHNVSPDTLNREGCKEYDVAPQVGHRFCKDFPGFIPSLLGDLLEERQKIKKKMKATIDPIERKLLDYRQRAIKILANSYYGYYGYARARWYCKECAESVTAWGREYITMTIKEIEEKYGFKVIYSDTDGFFATIPGADAETVKKKAMEFLKYINAKLPGALELEYEGFYKRGFFVTKKKYAVIDEEGKITTRGLEIVRRDWSEIAKETQARVLEALLKDGDVEKAVRIVKEVTEKLSKYEVPPEKLVIHEQITRDLKDYKATGPHVAVAKRLAARGVKIRPGTVISYIVLKGSGRIGDRAIPFDEFDPTKHKYDAEYYIENQVLPAVERILRAFGYRKEDLRYQKTRQVGLSAWLKPKGT

SEQ ID NO: 1656 - protein, 774 aa, synthetic construct
MILDTDYITEDGKPVIRIFKKENGEFKIEYDRTFEPYFYALLKDDSAIEEVKKITAERHGTVVTVKRVEKVQKKFLGRPVEVWKLYFTHIQDRPAIADKIREHPAVIDIYEYDIPFAKRYLIDKGLVPMEGDEELKMLAFDIETLYHEGEEFAEGPILMISYADEEGARVITWKNVDLPYVDVVSTEREMIKRFLRVVKEKDPDVLITYNGDNFDFAYLKKRCEKLGINFALGRDGSEPKIQRMGDRFAVEVKGRIHFDLYPVIRRTINLPTYTLEAVYEAVFGQPKEKVYAEEITTAWETGENLERVARYSMEDAKVTYELGKEFLPMEAQLSRLIGQSLWDVSRSSTGNLVEWFLLRKAYERNELAPNKPDEKELARRRQSYEGGYVKEPERGLWENIVYLDFRSLYPSIIITHNVSPDTLNREGCKEYDVAPQVGHRFCKDFPGFIPSLLGDLLEERQKIKKKMKATIDPIERKLLDYRQRAIKILANSYYGYYGYARARWYCKECAESVTAWGREYITMTIKEIEEKYGFKVIYSDTDGFFATIPGADAETVKKKAMEFLKYINAKLPGALELEYEGFYKRGFFVTKKKYAVIDEEGKITTRGLEIVRRDWSEIAKETQARVLEALLKDGDVEKAVRIVKEVTEKLSKYEVPPEKLVIHEQITRDLKDYKATGPHVAVAKRLAARGVKIRPGTVISYIVLKGSGRIGDRAIPFDEFDPTKHKYDAEYYIENQVLPAVERILRAFGYRKEDLRYQKTRQVGLSAWLKPKGT

SEQ ID NO: 1657 - protein, 774 aa, synthetic construct
MILDTDYITEDGKPVIRIFKKENGEFKIEYDRTFEPYFYALLKDDSAIEEVKKITAERHGTVVTVKRVEKVQKKFLGRPVEVWKLYFTHIQDRPAIFDKIREHPAVIDIYEYDIPFAKRYLIDKGLVPMEGDEELKMLAFDIETLYHEGEEFAEGPILMISYADEEGARVITWKNVDLPYVDVVSTEREMIKRFLRVVKEKDPDVLITYNGDNFDFAYLKKRCEKLGINFALGRDGSEPKIQRMGDRFAVEVKGRIHFDLYPVIRRTINLPTYTLEAVYEAVFGQPKEKVYAEEITTAWETGENLERVARYSMEDAKVTYELGKEFLPMEAQLSRLIGQSLWDVSRSSTGNLVEWFLLRKAYERNELAPNKPDEKELARRRQSYEGGYVKEPERGLWENIVYLDFRSLYPSIIITHNVSPDTLNREGCKEYDVAPQVGHRFCKDFPGFIPSLLGDLLEERQKIKKKMKATIDPIERKLLDYRQRAIKILANSYYGYYGYARARWYCKECAESVTAWGREYITMTIKEIEEKYGFKVIYSDTDGFFATIPGADAETVKKKAMEFLKYINAKLPGALELEYEGFYKRGFFVTKKKYAVIDEEGKITTRGLEIVRRDWSEIAKETQARVLEALLKDGDVEKAVRIVKEVTEKLSKYEVPPEKLVIHEQITRDLKDYKATGPHVAVAKRLAARGVKIRPGTVISYIVLKGSGRIGDRAIPFDEFDPTKHKYDAEYYIENQVLPAVERILRAFGYRKEDLRYQKTRQVGLSAWLKPKGT

SEQ ID NO: 1658 - protein, 774 aa, synthetic construct
MILDTDYITEDGKPVIRIFKKENGEFKIEYDRTFEPYFYALLKDDSAIEEVKKITAERHGTVVTVKRVEKVQKKFLGRPVEVWKLYFTHIQDRPAIHDKIREHPAVIDIYEYDIPFAKRYLIDKGLVPMEGDEELKMLAFDIETLYHEGEEFAEGPILMISYADEEGARVITWKNVDLPYVDVVSTEREMIKRFLRVVKEKDPDVLITYNGDNFDFAYLKKRCEKLGINFALGRDGSEPKIQRMGDRFAVEVKGRIHFDLYPVIRRTINLPTYTLEAVYEAVFGQPKEKVYAEEITTAWETGENLERVARYSMEDAKVTYELGKEFLPMEAQLSRLIGQSLWDVSRSSTGNLVEWFLLRKAYERNELAPNKPDEKELARRRQSYEGGYVKEPERGLWENIVYLDFRSLYPSIIITHNVSPDTLNREGCKEYDVAPQVGHRFCKDFPGFIPSLLGDLLEERQKIKKKMKATIDPIERKLLDYRQRAIKILANSYYGYYGYARARWYCKECAESVTAWGREYITMTIKEIEEKYGFKVIYSDTDGFFATIPGADAETVKKKAMEFLKYINAKLPGALELEYEGFYKRGFFVTKKKYAVIDEEGKITTRGLEIVRRDWSEIAKETQARVLEALLKDGDVEKAVRIVKEVTEKLSKYEVPPEKLVIHEQITRDLKDYKATGPHVAVAKRLAARGVKIRPGTVISYIVLKGSGRIGDRAIPFDEFDPTKHKYDAEYYIENQVLPAVERILRAFGYRKEDLRYQKTRQVGLSAWLKPKGT

SEQ ID NO: 1659 - protein, 774 aa, synthetic construct
MILDTDYITEDGKPVIRIFKKENGEFKIEYDRTFEPYFYALLKDDSAIEEVKKITAERHGTVVTVKRVEKVQKKFLGRPVEVWKLYFTHSQDVPAIHDKIREHPAVIDIYEYDIPFAKRYLIDKGLVPMEGDEELKMLAFDIETLYHEGEEFAEGPILMISYADEEGARVITWKNVDLPYVDVVSTEREMIKRFLRVVKEKDPDVLITYNGDNFDFAYLKKRCEKLGINFALGRDGSEPKIQRMGDRFAVEVKGRIHFDLYPVIRRTINLPTYTLEAVYEAVFGQPKEKVYAEEITTAWETGENLERVARYSMEDAKVTYELGKEFLPMEAQLSRLIGQSLWDVSRSSTGNLVEWFLLRKAYERNELAPNKPDEKELARRRQSYEGGYVKEPERGLWENIVYLDFRSLYPSIIITHNVSPDTLNREGCKEYDVAPQVGHRFCKDFPGFIPSLLGDLLEERQKIKKKMKATIDPIERKLLDYRQRAIKILANSYYGYYGYARARWYCKECAESVTAWGREYITMTIKEIEEKYGFKVIYSDTDGFFATIPGADAETVKKKAMEFLKYINAKLPGALELEYEGFYKRGFFVTKKKYAVIDEEGKITTRGLEIVRRDWSEIAKETQARVLEALLKDGDVEKAVRIVKEVTEKLSKYEVPPEKLVIHEQITRDLKDYKATGPHVAVAKRLAARGVKIRPGTVISYIVLKGSGRIGDRAIPFDEFDPTKHKYDAEYYIENQVLPAVERILRAFGYRKEDLRYQKTRQVGLSAWLKPKGT

SEQ ID NO: 1660 - protein, 774 aa, synthetic construct
MILDTDYITEDGKPVIRIFKKENGEFKIEYDRTFEPYFYALLKDDSAIEEVKKITAERHGTVVTVKRVEKVQKKFLGRPVEVWKLYFTHSQDVPAIWDKIREHPAVIDIYEYDIPFAKRYLIDKGLVPMEGDEELKMLAFDIETLYHEGEEFAEGPILMISYADEEGARVITWKNVDLPYVDVVSTEREMIKRFLRVVKEKDPDVLITYNGDNFDFAYLKKRCEKLGINFALGRDGSEPKIQRMGDRFAVEVKGRIHFDLYPVIRRTINLPTYTLEAVYEAVFGQPKEKVYAEEITTAWETGENLERVARYSMEDAKVTYELGKEFLPMEAQLSRLIGQSLWDVSRSSTGNLVEWFLLRKAYERNELAPNKPDEKELARRRQSYEGGYVKEPERGLWENIVYLDFRSLYPSIIITHNVSPDTLNREGCKEYDVAPQVGHRFCKDFPGFIPSLLGDLLEERQKIKKKMKATIDPIERKLLDYRQRAIKILANSYYGYYGYARARWYCKECAESVTAWGREYITMTIKEIEEKYGFKVIYSDTDGFFATIPGADAETVKKKAMEFLKYINAKLPGALELEYEGFYKRGFFVTKKKYAVIDEEGKITTRGLEIVRRDWSEIAKETQARVLEALLKDGDVEKAVRIVKEVTEKLSKYEVPPEKLVIHEQITRDLKDYKATGPHVAVAKRLAARGVKIRPGTVISYIVLKGSGRIGDRAIPFDEFDPTKHKYDAEYYIENQVLPAVERILRAFGYRKEDLRYQKTRQVGLSAWLKPKGT

SEQ ID NO: 1661 - protein, 774 aa, synthetic construct
MILDTDYITEDGKPVIRIFKKENGEFKIEYDRTFEPYFYALLKDDSAIEEVKKITAERHGTVVTVKRVEKVQKKFLGRPVEVWKLYFTHSQDIPAIADKIREHPAVIDIYEYDIPFAKRYLIDKGLVPMEGDEELKMLAFDIETLYHEGEEFAEGPILMISYADEEGARVITWKNVDLPYVDVVSTEREMIKRFLRVVKEKDPDVLITYNGDNFDFAYLKKRCEKLGINFALGRDGSEPKIQRMGDRFAVEVKGRIHFDLYPVIRRTINLPTYTLEAVYEAVFGQPKEKVYAEEITTAWETGENLERVARYSMEDAKVTYELGKEFLPMEAQLSRLIGQSLWDVSRSSTGNLVEWFLLRKAYERNELAPNKPDEKELARRRQSYEGGYVKEPERGLWENIVYLDFRSLYPSIIITHNVSPDTLNREGCKEYDVAPQVGHRFCKDFPGFIPSLLGDLLEERQKIKKKMKATIDPIERKLLDYRQRAIKILANSYYGYYGYARARWYCKECAESVTAWGREYITMTIKEIEEKYGFKVIYSDTDGFFATIPGADAETVKKKAMEFLKYINAKLPGALELEYEGFYKRGFFVTKKKYAVIDEEGKITTRGLEIVRRDWSEIAKETQARVLEALLKDGDVEKAVRIVKEVTEKLSKYEVPPEKLVIHEQITRDLKDYKATGPHVAVAKRLAARGVKIRPGTVISYIVLKGSGRIGDRAIPFDEFDPTKHKYDAEYYIENQVLPAVERILRAFGYRKEDLRYQKTRQVGLSAWLKPKGT

SEQ ID NO: 1662 - protein, 774 aa, synthetic construct
MILDTDYITEDGKPVIRIFKKENGEFKIEYDRTFEPYFYALLKDDSAIEEVKKITAERHGTVVTVKRVEKVQKKFLGRPVEVWKLYFTHSQDIPAIFDKIREHPAVIDIYEYDIPFAKRYLIDKGLVPMEGDEELKMLAFDIETLYHEGEEFAEGPILMISYADEEGARVITWKNVDLPYVDVVSTEREMIKRFLRVVKEKDPDVLITYNGDNFDFAYLKKRCEKLGINFALGRDGSEPKIQRMGDRFAVEVKGRIHFDLYPVIRRTINLPTYTLEAVYEAVFGQPKEKVYAEEITTAWETGENLERVARYSMEDAKVTYELGKEFLPMEAQLSRLIGQSLWDVSRSSTGNLVEWFLLRKAYERNELAPNKPDEKELARRRQSYEGGYVKEPERGLWENIVYLDFRSLYPSIIITHNVSPDTLNREGCKEYDVAPQVGHRFCKDFPGFIPSLLGDLLEERQKIKKKMKATIDPIERKLLDYRQRAIKILANSYYGYYGYARARWYCKECAESVTAWGREYITMTIKEIEEKYGFKVIYSDTDGFFATIPGADAETVKKKAMEFLKYINAKLPGALELEYEGFYKRGFFVTKKKYAVIDEEGKITTRGLEIVRRDWSEIAKETQARVLEALLKDGDVEKAVRIVKEVTEKLSKYEVPPEKLVIHEQITRDLKDYKATGPHVAVAKRLAARGVKIRPGTVISYIVLKGSGRIGDRAIPFDEFDPTKHKYDAEYYIENQVLPAVERILRAFGYRKEDLRYQKTRQVGLSAWLKPKGT

SEQ ID NO: 1663 - protein, 774 aa, synthetic construct
MILDTDYITEDGKPVIRIFKKENGEFKIEYDRTFEPYFYALLKDDSAIEEVKKITAERHGTVVTVKRVEKVQKKFLGRPVEVWKLYFTHSQDIPAIHDKIREHPAVIDIYEYDIPFAKRYLIDKGLVPMEGDEELKMLAFDIETLYHEGEEFAEGPILMISYADEEGARVITWKNVDLPYVDVVSTEREMIKRFLRVVKEKDPDVLITYNGDNFDFAYLKKRCEKLGINFALGRDGSEPKIQRMGDRFAVEVKGRIHFDLYPVIRRTINLPTYTLEAVYEAVFGQPKEKVYAEEITTAWETGENLERVARYSMEDAKVTYELGKEFLPMEAQLSRLIGQSLWDVSRSSTGNLVEWFLLRKAYERNELAPNKPDEKELARRRQSYEGGYVKEPERGLWENIVYLDFRSLYPSIIITHNVSPDTLNREGCKEYDVAPQVGHRFCKDFPGFIPSLLGDLLEERQKIKKKMKATIDPIERKLLDYRQRAIKILANSYYGYYGYARARWYCKECAESVTAWGREYITMTIKEIEEKYGFKVIYSDTDGFFATIPGADAETVKKKAMEFLKYINAKLPGALELEYEGFYKRGFFVTKKKYAVIDEEGKITTRGLEIVRRDWSEIAKETQARVLEALLKDGDVEKAVRIVKEVTEKLSKYEVPPEKLVIHEQITRDLKDYKATGPHVAVAKRLAARGVKIRPGTVISYIVLKGSGRIGDRAIPFDEFDPTKHKYDAEYYIENQVLPAVERILRAFGYRKEDLRYQKTRQVGLSAWLKPKGT

SEQ ID NO: 1664 - protein, 774 aa, synthetic construct
MILDTDYITEDGKPVIRIFKKENGEFKIEYDRTFEPYFYALLKDDSAIEEVKKITAERHGTVVTVKRVEKVQKKFLGRPVEVWKLYFTHSQDIPAIWDKIREHPAVIDIYEYDIPFAKRYLIDKGLVPMEGDEELKMLAFDIETLYHEGEEFAEGPILMISYADEEGARVITWKNVDLPYVDVVSTEREMIKRFLRVVKEKDPDVLITYNGDNFDFAYLKKRCEKLGINFALGRDGSEPKIQRMGDRFAVEVKGRIHFDLYPVIRRTINLPTYTLEAVYEAVFGQPKEKVYAEEITTAWETGENLERVARYSMEDAKVTYELGKEFLPMEAQLSRLIGQSLWDVSRSSTGNLVEWFLLRKAYERNELAPNKPDEKELARRRQSYEGGYVKEPERGLWENIVYLDFRSLYPSIIITHNVSPDTLNREGCKEYDVAPQVGHRFCKDFPGFIPSLLGDLLEERQKIKKKMKATIDPIERKLLDYRQRAIKILANSYYGYYGYARARWYCKECAESVTAWGREYITMTIKEIEEKYGFKVIYSDTDGFFATIPGADAETVKKKAMEFLKYINAKLPGALELEYEGFYKRGFFVTKKKYAVIDEEGKITTRGLEIVRRDWSEIAKETQARVLEALLKDGDVEKAVRIVKEVTEKLSKYEVPPEKLVIHEQITRDLKDYKATGPHVAVAKRLAARGVKIRPGTVISYIVLKGSGRIGDRAIPFDEFDPTKHKYDAEYYIENQVLPAVERILRAFGYRKEDLRYQKTRQVGLSAWLKPKGT

SEQ ID NO: 1665 - protein, 774 aa, synthetic construct
MILDTDYITEDGKPVIRIFKKENGEFKIEYDRTFEPYFYALLKDDSAIEEVKKITAERHGTVVTVKRVEKVQKKFLGRPVEVWKLYFTHSQDKPAIFDKIREHPAVIDIYEYDIPFAKRYLIDKGLVPMEGDEELKMLAFDIETLYHEGEEFAEGPILMISYADEEGARVITWKNVDLPYVDVVSTEREMIKRFLRVVKEKDPDVLITYNGDNFDFAYLKKRCEKLGINFALGRDGSEPKIQRMGDRFAVEVKGRIHFDLYPVIRRTINLPTYTLEAVYEAVFGQPKEKVYAEEITTAWETGENLERVARYSMEDAKVTYELGKEFLPMEAQLSRLIGQSLWDVSRSSTGNLVEWFLLRKAYERNELAPNKPDEKELARRRQSYEGGYVKEPERGLWENIVYLDFRSLYPSIIITHNVSPDTLNREGCKEYDVAPQVGHRFCKDFPGFIPSLLGDLLEERQKIKKKMKATIDPIERKLLDYRQRAIKILANSYYGYYGYARARWYCKECAESVTAWGREYITMTIKEIEEKYGFKVIYSDTDGFFATIPGADAETVKKKAMEFLKYINAKLPGALELEYEGFYKRGFFVTKKKYAVIDEEGKITTRGLEIVRRDWSEIAKETQARVLEALLKDGDVEKAVRIVKEVTEKLSKYEVPPEKLVIHEQITRDLKDYKATGPHVAVAKRLAARGVKIRPGTVISYIVLKGSGRIGDRAIPFDEFDPTKHKYDAEYYIENQVLPAVERILRAFGYRKEDLRYQKTRQVGLSAWLKPKGT

SEQ ID NO: 1666 - protein, 774 aa, synthetic construct
MILDTDYITEDGKPVIRIFKKENGEFKIEYDRTFEPYFYALLKDDSAIEEVKKITAERHGTVVTVKRVEKVQKKFLGRPVEVWKLYFTHSQDKPAIWDKIREHPAVIDIYEYDIPFAKRYLIDKGLVPMEGDEELKMLAFDIETLYHEGEEFAEGPILMISYADEEGARVITWKNVDLPYVDVVSTEREMIKRFLRVVKEKDPDVLITYNGDNFDFAYLKKRCEKLGINFALGRDGSEPKIQRMGDRFAVEVKGRIHFDLYPVIRRTINLPTYTLEAVYEAVFGQPKEKVYAEEITTAWETGENLERVARYSMEDAKVTYELGKEFLPMEAQLSRLIGQSLWDVSRSSTGNLVEWFLLRKAYERNELAPNKPDEKELARRRQSYEGGYVKEPERGLWENIVYLDFRSLYPSIIITHNVSPDTLNREGCKEYDVAPQVGHRFCKDFPGFIPSLLGDLLEERQKIKKKMKATIDPIERKLLDYRQRAIKILANSYYGYYGYARARWYCKECAESVTAWGREYITMTIKEIEEKYGFKVIYSDTDGFFATIPGADAETVKKKAMEFLKYINAKLPGALELEYEGFYKRGFFVTKKKYAVIDEEGKITTRGLEIVRRDWSEIAKETQARVLEALLKDGDVEKAVRIVKEVTEKLSKYEVPPEKLVIHEQITRDLKDYKATGPHVAVAKRLAARGVKIRPGTVISYIVLKGSGRIGDRAIPFDEFDPTKHKYDAEYYIENQVLPAVERILRAFGYRKEDLRYQKTRQVGLSAWLKPKGT

SEQ ID NO: 1667 - protein, 774 aa, synthetic construct
MILDTDYITEDGKPVIRIFKKENGEFKIEYDRTFEPYFYALLKDDSAIEEVKKITAERHGTVVTVKRVEKVQKKFLGRPVEVWKLYFTHSQDQPAIRDKIREHPAVIDIYEYDIPFAKRYLIDKGLVPMEGDEELKMLAFDIETLYHEGEEFAEGPILMISYADEEGARVITWKNVDLPYVDVVSTEREMIKRFLRVVKEKDPDVLITYNGDNFDFAYLKKRCEKLGINFALGRDGSEPKIQRMGDRFAVEVKGRIHFDLYPVIRRTINLPTYTLEAVYEAVFGQPKEKVYAEEITTAWETGENLERVARYSMEDAKVTYELGKEFLPMEAQLSRLIGQSLWDVSRSSTGNLVEWFLLRKAYERNELAPNKPDEKELARRRQSYEGGYVKEPERGLWENIVYLDFRSLYPSIIITHNVSPDTLNREGCKEYDVAPQVGHRFCKDFPGFIPSLLGDLLEERQKIKKKMKATIDPIERKLLDYRQRAIKILANSYYGYYGYARARWYCKECAESVTAWGREYITMTIKEIEEKYGFKVIYSDTDGFFATIPGADAETVKKKAMEFLKYINAKLPGALELEYEGFYKRGFFVTKKKYAVIDEEGKITTRGLEIVRRDWSEIAKETQARVLEALLKDGDVEKAVRIVKEVTEKLSKYEVPPEKLVIHEQITRDLKDYKATGPHVAVAKRLAARGVKIRPGTVISYIVLKGSGRIGDRAIPFDEFDPTKHKYDAEYYIENQVLPAVERILRAFGYRKEDLRYQKTRQVGLSAWLKPKGT

SEQ ID NO: 1668 - protein, 774 aa, synthetic construct
MILDTDYITEDGKPVIRIFKKENGEFKIEYDRTFEPYFYALLKDDSAIEEVKKITAERHGTVVTVKRVEKVQKKFLGRPVEVWKLYFTHSQDQPAIADKIREHPAVIDIYEYDIPFAKRYLIDKGLVPMEGDEELKMLAFDIETLYHEGEEFAEGPILMISYADEEGARVITWKNVDLPYVDVVSTEREMIKRFLRVVKEKDPDVLITYNGDNFDFAYLKKRCEKLGINFALGRDGSEPKIQRMGDRFAVEVKGRIHFDLYPVIRRTINLPTYTLEAVYEAVFGQPKEKVYAEEITTAWETGENLERVARYSMEDAKVTYELGKEFLPMEAQLSRLIGQSLWDVSRSSTGNLVEWFLLRKAYERNELAPNKPDEKELARRRQSYEGGYVKEPERGLWENIVYLDFRSLYPSIIITHNVSPDTLNREGCKEYDVAPQVGHRFCKDFPGFIPSLLGDLLEERQKIKKKMKATIDPIERKLLDYRQRAIKILANSYYGYYGYARARWYCKECAESVTAWGREYITMTIKEIEEKYGFKVIYSDTDGFFATIPGADAETVKKKAMEFLKYINAKLPGALELEYEGFYKRGFFVTKKKYAVIDEEGKITTRGLEIVRRDWSEIAKETQARVLEALLKDGDVEKAVRIVKEVTEKLSKYEVPPEKLVIHEQITRDLKDYKATGPHVAVAKRLAARGVKIRPGTVISYIVLKGSGRIGDRAIPFDEFDPTKHKYDAEYYIENQVLPAVERILRAFGYRKEDLRYQKTRQVGLSAWLKPKGT

SEQ ID NO: 1669 - protein, 774 aa, synthetic construct
MILDTDYITEDGKPVIRIFKKENGEFKIEYDRTFEPYFYALLKDDSAIEEVKKITAERHGTVVTVKRVEKVQKKFLGRPVEVWKLYFTHSQDQPAIFDKIREHPAVIDIYEYDIPFAKRYLIDKGLVPMEGDEELKMLAFDIETLYHEGEEFAEGPILMISYADEEGARVITWKNVDLPYVDVVSTEREMIKRFLRVVKEKDPDVLITYNGDNFDFAYLKKRCEKLGINFALGRDGSEPKIQRMGDRFAVEVKGRIHFDLYPVIRRTINLPTYTLEAVYEAVFGQPKEKVYAEEITTAWETGENLERVARYSMEDAKVTYELGKEFLPMEAQLSRLIGQSLWDVSRSSTGNLVEWFLLRKAYERNELAPNKPDEKELARRRQSYEGGYVKEPERGLWENIVYLDFRSLYPSIIITHNVSPDTLNREGCKEYDVAPQVGHRFCKDFPGFIPSLLGDLLEERQKIKKKMKATIDPIERKLLDYRQRAIKILANSYYGYYGYARARWYCKECAESVTAWGREYITMTIKEIEEKYGFKVIYSDTDGFFATIPGADAETVKKKAMEFLKYINAKLPGALELEYEGFYKRGFFVTKKKYAVIDEEGKITTRGLEIVRRDWSEIAKETQARVLEALLKDGDVEKAVRIVKEVTEKLSKYEVPPEKLVIHEQITRDLKDYKATGPHVAVAKRLAARGVKIRPGTVISYIVLKGSGRIGDRAIPFDEFDPTKHKYDAEYYIENQVLPAVERILRAFGYRKEDLRYQKTRQVGLSAWLKPKGT

SEQ ID NO: 1670 - protein, 774 aa, synthetic construct
MILDTDYITEDGKPVIRIFKKENGEFKIEYDRTFEPYFYALLKDDSAIEEVKKITAERHGTVVTVKRVEKVQKKFLGRPVEVWKLYFTHSQDQPAIWDKIREHPAVIDIYEYDIPFAKRYLIDKGLVPMEGDEELKMLAFDIETLYHEGEEFAEGPILMISYADEEGARVITWKNVDLPYVDVVSTEREMIKRFLRVVKEKDPDVLITYNGDNFDFAYLKKRCEKLGINFALGRDGSEPKIQRMGDRFAVEVKGRIHFDLYPVIRRTINLPTYTLEAVYEAVFGQPKEKVYAEEITTAWETGENLERVARYSMEDAKVTYELGKEFLPMEAQLSRLIGQSLWDVSRSSTGNLVEWFLLRKAYERNELAPNKPDEKELARRRQSYEGGYVKEPERGLWENIVYLDFRSLYPSIIITHNVSPDTLNREGCKEYDVAPQVGHRFCKDFPGFIPSLLGDLLEERQKIKKKMKATIDPIERKLLDYRQRAIKILANSYYGYYGYARARWYCKECAESVTAWGREYITMTIKEIEEKYGFKVIYSDTDGFFATIPGADAETVKKKAMEFLKYINAKLPGALELEYEGFYKRGFFVTKKKYAVIDEEGKITTRGLEIVRRDWSEIAKETQARVLEALLKDGDVEKAVRIVKEVTEKLSKYEVPPEKLVIHEQITRDLKDYKATGPHVAVAKRLAARGVKIRPGTVISYIVLKGSGRIGDRAIPFDEFDPTKHKYDAEYYIENQVLPAVERILRAFGYRKEDLRYQKTRQVGLSAWLKPKGT

SEQ ID NO: 1671 - protein, 774 aa, synthetic construct
MILDTDYITEDGKPVIRIFKKENGEFKIEYDRTFEPYFYALLKDDSAIEEVKKITAERHGTVVTVKRVEKVQKKFLGRPVEVWKLYFTHSQDRPAIRDKIREHPAVIDIYEYDIPFAKRYLIDKGLVPMEGDEELKMLAFDIETLYHEGEEFAEGPILMISYADEEGARVITWKNVDLPYVDVVSTEREMIKRFLRVVKEKDPDVLITYNGDNFDFAYLKKRCEKLGINFALGRDGSEPKIQRMGDRFAVEVKGRIHFDLYPVIRRTINLPTYTLEAVYEAVFGQPKEKVYAEEITTAWETGENLERVARYSMEDAKVTYELGKEFLPMEAQLSRLIGQSLWDVSRSSTGNLVEWFLLRKAYERNELAPNKPDEKELARRRQSYEGGYVKEPERGLWENIVYLDFRSLYPSIIITHNVSPDTLNREGCKEYDVAPQVGHRFCKDFPGFIPSLLGDLLEERQKIKKKMKATIDPIERKLLDYRQRAIKILANSYYGYYGYARARWYCKECAESVTAWGREYITMTIKEIEEKYGFKVIYSDTDGFFATIPGADAETVKKKAMEFLKYINAKLPGALELEYEGFYKRGFFVTKKKYAVIDEEGKITTRGLEIVRRDWSEIAKETQARVLEALLKDGDVEKAVRIVKEVTEKLSKYEVPPEKLVIHEQITRDLKDYKATGPHVAVAKRLAARGVKIRPGTVISYIVLKGSGRIGDRAIPFDEFDPTKHKYDAEYYIENQVLPAVERILRAFGYRKEDLRYQKTRQVGLSAWLKPKGT

SEQ ID NO: 1672 - protein, 774 aa, synthetic construct
MILDTDYITEDGKPVIRIFKKENGEFKIEYDRTFEPYFYALLKDDSAIEEVKKITAERHGTVVTVKRVEKVQKKFLGRPVEVWKLYFTHSQDRPAIADKIREHPAVIDIYEYDIPFAKRYLIDKGLVPMEGDEELKMLAFDIETLYHEGEEFAEGPILMISYADEEGARVITWKNVDLPYVDVVSTEREMIKRFLRVVKEKDPDVLITYNGDNFDFAYLKKRCEKLGINFALGRDGSEPKIQRMGDRFAVEVKGRIHFDLYPVIRRTINLPTYTLEAVYEAVFGQPKEKVYAEEITTAWETGENLERVARYSMEDAKVTYELGKEFLPMEAQLSRLIGQSLWDVSRSSTGNLVEWFLLRKAYERNELAPNKPDEKELARRRQSYEGGYVKEPERGLWENIVYLDFRSLYPSIIITHNVSPDTLNREGCKEYDVAPQVGHRFCKDFPGFIPSLLGDLLEERQKIKKKMKATIDPIERKLLDYRQRAIKILANSYYGYYGYARARWYCKECAESVTAWGREYITMTIKEIEEKYGFKVIYSDTDGFFATIPGADAETVKKKAMEFLKYINAKLPGALELEYEGFYKRGFFVTKKKYAVIDEEGKITTRGLEIVRRDWSEIAKETQARVLEALLKDGDVEKAVRIVKEVTEKLSKYEVPPEKLVIHEQITRDLKDYKATGPHVAVAKRLAARGVKIRPGTVISYIVLKGSGRIGDRAIPFDEFDPTKHKYDAEYYIENQVLPAVERILRAFGYRKEDLRYQKTRQVGLSAWLKPKGT

SEQ ID NO: 1673 - protein, 774 aa, synthetic construct
MILDTDYITEDGKPVIRIFKKENGEFKIEYDRTFEPYFYALLKDDSAIEEVKKITAERHGTVVTVKRVEKVQKKFLGRPVEVWKLYFTHSQDRPAIHDKIREHPAVIDIYEYDIPFAKRYLIDKGLVPMEGDEELKMLAFDIETLYHEGEEFAEGPILMISYADEEGARVITWKNVDLPYVDVVSTEREMIKRFLRVVKEKDPDVLITYNGDNFDFAYLKKRCEKLGINFALGRDGSEPKIQRMGDRFAVEVKGRIHFDLYPVIRRTINLPTYTLEAVYEAVFGQPKEKVYAEEITTAWETGENLERVARYSMEDAKVTYELGKEFLPMEAQLSRLIGQSLWDVSRSSTGNLVEWFLLRKAYERNELAPNKPDEKELARRRQSYEGGYVKEPERGLWENIVYLDFRSLYPSIIITHNVSPDTLNREGCKEYDVAPQVGHRFCKDFPGFIPSLLGDLLEERQKIKKKMKATIDPIERKLLDYRQRAIKILANSYYGYYGYARARWYCKECAESVTAWGREYITMTIKEIEEKYGFKVIYSDTDGFFATIPGADAETVKKKAMEFLKYINAKLPGALELEYEGFYKRGFFVTKKKYAVIDEEGKITTRGLEIVRRDWSEIAKETQARVLEALLKDGDVEKAVRIVKEVTEKLSKYEVPPEKLVIHEQITRDLKDYKATGPHVAVAKRLAARGVKIRPGTVISYIVLKGSGRIGDRAIPFDEFDPTKHKYDAEYYIENQVLPAVERILRAFGYRKEDLRYQKTRQVGLSAWLKPKGT

SEQ ID NO: 1674 - protein, 774 aa, synthetic construct
MILDTDYITEDGKPVIRIFKKENGEFKIEYDRTFEPYFYALLKDDSAIEEVKKITAERHGTVVTVKRVEKVQKKFLGRPVEVWKLYFTHSQDRPAIWDKIREHPAVIDIYEYDIPFAKRYLIDKGLVPMEGDEELKMLAFDIETLYHEGEEFAEGPILMISYADEEGARVITWKNVDLPYVDVVSTEREMIKRFLRVVKEKDPDVLITYNGDNFDFAYLKKRCEKLGINFALGRDGSEPKIQRMGDRFAVEVKGRIHFDLYPVIRRTINLPTYTLEAVYEAVFGQPKEKVYAEEITTAWETGENLERVARYSMEDAKVTYELGKEFLPMEAQLSRLIGQSLWDVSRSSTGNLVEWFLLRKAYERNELAPNKPDEKELARRRQSYEGGYVKEPERGLWENIVYLDFRSLYPSIIITHNVSPDTLNREGCKEYDVAPQVGHRFCKDFPGFIPSLLGDLLEERQKIKKKMKATIDPIERKLLDYRQRAIKILANSYYGYYGYARARWYCKECAESVTAWGREYITMTIKEIEEKYGFKVIYSDTDGFFATIPGADAETVKKKAMEFLKYINAKLPGALELEYEGFYKRGFFVTKKKYAVIDEEGKITTRGLEIVRRDWSEIAKETQARVLEALLKDGDVEKAVRIVKEVTEKLSKYEVPPEKLVIHEQITRDLKDYKATGPHVAVAKRLAARGVKIRPGTVISYIVLKGSGRIGDRAIPFDEFDPTKHKYDAEYYIENQVLPAVERILRAFGYRKEDLRYQKTRQVGLSAWLKPKGT

SEQ ID NO: 1675 - protein, 774 aa, synthetic construct
MILDTDYITEDGKPVIRIFKKENGEFKIEYDRTFEPYFYALLKDDSAIEEVKKITAERHGTVVTVKRVEKVQKKFLGRPVEVWKLYFTHWQDVPAIADKIREHPAVIDIYEYDIPFAKRYLIDKGLVPMEGDEELKMLAFDIETLYHEGEEFAEGPILMISYADEEGARVITWKNVDLPYVDVVSTEREMIKRFLRVVKEKDPDVLITYNGDNFDFAYLKKRCEKLGINFALGRDGSEPKIQRMGDRFAVEVKGRIHFDLYPVIRRTINLPTYTLEAVYEAVFGQPKEKVYAEEITTAWETGENLERVARYSMEDAKVTYELGKEFLPMEAQLSRLIGQSLWDVSRSSTGNLVEWFLLRKAYERNELAPNKPDEKELARRRQSYEGGYVKEPERGLWENIVYLDFRSLYPSIIITHNVSPDTLNREGCKEYDVAPQVGHRFCKDFPGFIPSLLGDLLEERQKIKKKMKATIDPIERKLLDYRQRAIKILANSYYGYYGYARARWYCKECAESVTAWGREYITMTIKEIEEKYGFKVIYSDTDGFFATIPGADAETVKKKAMEFLKYINAKLPGALELEYEGFYKRGFFVTKKKYAVIDEEGKITTRGLEIVRRDWSEIAKETQARVLEALLKDGDVEKAVRIVKEVTEKLSKYEVPPEKLVIHEQITRDLKDYKATGPHVAVAKRLAARGVKIRPGTVISYIVLKGSGRIGDRAIPFDEFDPTKHKYDAEYYIENQVLPAVERILRAFGYRKEDLRYQKTRQVGLSAWLKPKGT

SEQ ID NO: 1676 - protein, 774 aa, synthetic construct
MILDTDYITEDGKPVIRIFKKENGEFKIEYDRTFEPYFYALLKDDSAIEEVKKITAERHGTVVTVKRVEKVQKKFLGRPVEVWKLYFTHWQDVPAIFDKIREHPAVIDIYEYDIPFAKRYLIDKGLVPMEGDEELKMLAFDIETLYHEGEEFAEGPILMISYADEEGARVITWKNVDLPYVDVVSTEREMIKRFLRVVKEKDPDVLITYNGDNFDFAYLKKRCEKLGINFALGRDGSEPKIQRMGDRFAVEVKGRIHFDLYPVIRRTINLPTYTLEAVYEAVFGQPKEKVYAEEITTAWETGENLERVARYSMEDAKVTYELGKEFLPMEAQLSRLIGQSLWDVSRSSTGNLVEWFLLRKAYERNELAPNKPDEKELARRRQSYEGGYVKEPERGLWENIVYLDFRSLYPSIIITHNVSPDTLNREGCKEYDVAPQVGHRFCKDFPGFIPSLLGDLLEERQKIKKKMKATIDPIERKLLDYRQRAIKILANSYYGYYGYARARWYCKECAESVTAWGREYITMTIKEIEEKYGFKVIYSDTDGFFATIPGADAETVKKKAMEFLKYINAKLPGALELEYEGFYKRGFFVTKKKYAVIDEEGKITTRGLEIVRRDWSEIAKETQARVLEALLKDGDVEKAVRIVKEVTEKLSKYEVPPEKLVIHEQITRDLKDYKATGPHVAVAKRLAARGVKIRPGTVISYIVLKGSGRIGDRAIPFDEFDPTKHKYDAEYYIENQVLPAVERILRAFGYRKEDLRYQKTRQVGLSAWLKPKGT

SEQ ID NO: 1677 - protein, 774 aa, synthetic construct
MILDTDYITEDGKPVIRIFKKENGEFKIEYDRTFEPYFYALLKDDSAIEEVKKITAERHGTVVTVKRVEKVQKKFLGRPVEVWKLYFTHWQDVPAIHDKIREHPAVIDIYEYDIPFAKRYLIDKGLVPMEGDEELKMLAFDIETLYHEGEEFAEGPILMISYADEEGARVITWKNVDLPYVDVVSTEREMIKRFLRVVKEKDPDVLITYNGDNFDFAYLKKRCEKLGINFALGRDGSEPKIQRMGDRFAVEVKGRIHFDLYPVIRRTINLPTYTLEAVYEAVFGQPKEKVYAEEITTAWETGENLERVARYSMEDAKVTYELGKEFLPMEAQLSRLIGQSLWDVSRSSTGNLVEWFLLRKAYERNELAPNKPDEKELARRRQSYEGGYVKEPERGLWENIVYLDFRSLYPSIIITHNVSPDTLNREGCKEYDVAPQVGHRFCKDFPGFIPSLLGDLLEERQKIKKKMKATIDPIERKLLDYRQRAIKILANSYYGYYGYARARWYCKECAESVTAWGREYITMTIKEIEEKYGFKVIYSDTDGFFATIPGADAETVKKKAMEFLKYINAKLPGALELEYEGFYKRGFFVTKKKYAVIDEEGKITTRGLEIVRRDWSEIAKETQARVLEALLKDGDVEKAVRIVKEVTEKLSKYEVPPEKLVIHEQITRDLKDYKATGPHVAVAKRLAARGVKIRPGTVISYIVLKGSGRIGDRAIPFDEFDPTKHKYDAEYYIENQVLPAVERILRAFGYRKEDLRYQKTRQVGLSAWLKPKGT

SEQ ID NO: 1678 - protein, 774 aa, synthetic construct
MILDTDYITEDGKPVIRIFKKENGEFKIEYDRTFEPYFYALLKDDSAIEEVKKITAERHGTVVTVKRVEKVQKKFLGRPVEVWKLYFTHWQDVPAIWDKIREHPAVIDIYEYDIPFAKRYLIDKGLVPMEGDEELKMLAFDIETLYHEGEEFAEGPILMISYADEEGARVITWKNVDLPYVDVVSTEREMIKRFLRVVKEKDPDVLITYNGDNFDFAYLKKRCEKLGINFALGRDGSEPKIQRMGDRFAVEVKGRIHFDLYPVIRRTINLPTYTLEAVYEAVFGQPKEKVYAEEITTAWETGENLERVARYSMEDAKVTYELGKEFLPMEAQLSRLIGQSLWDVSRSSTGNLVEWFLLRKAYERNELAPNKPDEKELARRRQSYEGGYVKEPERGLWENIVYLDFRSLYPSIIITHNVSPDTLNREGCKEYDVAPQVGHRFCKDFPGFIPSLLGDLLEERQKIKKKMKATIDPIERKLLDYRQRAIKILANSYYGYYGYARARWYCKECAESVTAWGREYITMTIKEIEEKYGFKVIYSDTDGFFATIPGADAETVKKKAMEFLKYINAKLPGALELEYEGFYKRGFFVTKKKYAVIDEEGKITTRGLEIVRRDWSEIAKETQARVLEALLKDGDVEKAVRIVKEVTEKLSKYEVPPEKLVIHEQITRDLKDYKATGPHVAVAKRLAARGVKIRPGTVISYIVLKGSGRIGDRAIPFDEFDPTKHKYDAEYYIENQVLPAVERILRAFGYRKEDLRYQKTRQVGLSAWLKPKGT

SEQ ID NO: 1679 - protein, 774 aa, synthetic construct
MILDTDYITEDGKPVIRIFKKENGEFKIEYDRTFEPYFYALLKDDSAIEEVKKITAERHGTVVTVKRVEKVQKKFLGRPVEVWKLYFTHWQDIPAIRDKIREHPAVIDIYEYDIPFAKRYLIDKGLVPMEGDEELKMLAFDIETLYHEGEEFAEGPILMISYADEEGARVITWKNVDLPYVDVVSTEREMIKRFLRVVKEKDPDVLITYNGDNFDFAYLKKRCEKLGINFALGRDGSEPKIQRMGDRFAVEVKGRIHFDLYPVIRRTINLPTYTLEAVYEAVFGQPKEKVYAEEITTAWETGENLERVARYSMEDAKVTYELGKEFLPMEAQLSRLIGQSLWDVSRSSTGNLVEWFLLRKAYERNELAPNKPDEKELARRRQSYEGGYVKEPERGLWENIVYLDFRSLYPSIIITHNVSPDTLNREGCKEYDVAPQVGHRFCKDFPGFIPSLLGDLLEERQKIKKKMKATIDPIERKLLDYRQRAIKILANSYYGYYGYARARWYCKECAESVTAWGREYITMTIKEIEEKYGFKVIYSDTDGFFATIPGADAETVKKKAMEFLKYINAKLPGALELEYEGFYKRGFFVTKKKYAVIDEEGKITTRGLEIVRRDWSEIAKETQARVLEALLKDGDVEKAVRIVKEVTEKLSKYEVPPEKLVIHEQITRDLKDYKATGPHVAVAKRLAARGVKIRPGTVISYIVLKGSGRIGDRAIPFDEFDPTKHKYDAEYYIENQVLPAVERILRAFGYRKEDLRYQKTRQVGLSAWLKPKGT

SEQ ID NO: 1680 - protein, 774 aa, synthetic construct
MILDTDYITEDGKPVIRIFKKENGEFKIEYDRTFEPYFYALLKDDSAIEEVKKITAERHGTVVTVKRVEKVQKKFLGRPVEVWKLYFTHWQDIPAIADKIREHPAVIDIYEYDIPFAKRYLIDKGLVPMEGDEELKMLAFDIETLYHEGEEFAEGPILMISYADEEGARVITWKNVDLPYVDVVSTEREMIKRFLRVVKEKDPDVLITYNGDNFDFAYLKKRCEKLGINFALGRDGSEPKIQRMGDRFAVEVKGRIHFDLYPVIRRTINLPTYTLEAVYEAVFGQPKEKVYAEEITTAWETGENLERVARYSMEDAKVTYELGKEFLPMEAQLSRLIGQSLWDVSRSSTGNLVEWFLLRKAYERNELAPNKPDEKELARRRQSYEGGYVKEPERGLWENIVYLDFRSLYPSIIITHNVSPDTLNREGCKEYDVAPQVGHRFCKDFPGFIPSLLGDLLEERQKIKKKMKATIDPIERKLLDYRQRAIKILANSYYGYYGYARARWYCKECAESVTAWGREYITMTIKEIEEKYGFKVIYSDTDGFFATIPGADAETVKKKAMEFLKYINAKLPGALELEYEGFYKRGFFVTKKKYAVIDEEGKITTRGLEIVRRDWSEIAKETQARVLEALLKDGDVEKAVRIVKEVTEKLSKYEVPPEKLVIHEQITRDLKDYKATGPHVAVAKRLAARGVKIRPGTVISYIVLKGSGRIGDRAIPFDEFDPTKHKYDAEYYIENQVLPAVERILRAFGYRKEDLRYQKTRQVGLSAWLKPKGT

SEQ ID NO: 1681 - protein, 774 aa, synthetic construct
MILDTDYITEDGKPVIRIFKKENGEFKIEYDRTFEPYFYALLKDDSAIEEVKKITAERHGTVVTVKRVEKVQKKFLGRPVEVWKLYFTHWQDIPAIFDKIREHPAVIDIYEYDIPFAKRYLIDKGLVPMEGDEELKMLAFDIETLYHEGEEFAEGPILMISYADEEGARVITWKNVDLPYVDVVSTEREMIKRFLRVVKEKDPDVLITYNGDNFDFAYLKKRCEKLGINFALGRDGSEPKIQRMGDRFAVEVKGRIHFDLYPVIRRTINLPTYTLEAVYEAVFGQPKEKVYAEEITTAWETGENLERVARYSMEDAKVTYELGKEFLPMEAQLSRLIGQSLWDVSRSSTGNLVEWFLLRKAYERNELAPNKPDEKELARRRQSYEGGYVKEPERGLWENIVYLDFRSLYPSIIITHNVSPDTLNREGCKEYDVAPQVGHRFCKDFPGFIPSLLGDLLEERQKIKKKMKATIDPIERKLLDYRQRAIKILANSYYGYYGYARARWYCKECAESVTAWGREYITMTIKEIEEKYGFKVIYSDTDGFFATIPGADAETVKKKAMEFLKYINAKLPGALELEYEGFYKRGFFVTKKKYAVIDEEGKITTRGLEIVRRDWSEIAKETQARVLEALLKDGDVEKAVRIVKEVTEKLSKYEVPPEKLVIHEQITRDLKDYKATGPHVAVAKRLAARGVKIRPGTVISYIVLKGSGRIGDRAIPFDEFDPTKHKYDAEYYIENQVLPAVERILRAFGYRKEDLRYQKTRQVGLSAWLKPKGT

SEQ ID NO: 1682 - protein, 774 aa, synthetic construct
MILDTDYITEDGKPVIRIFKKENGEFKIEYDRTFEPYFYALLKDDSAIEEVKKITAERHGTVVTVKRVEKVQKKFLGRPVEVWKLYFTHWQDIPAIHDKIREHPAVIDIYEYDIPFAKRYLIDKGLVPMEGDEELKMLAFDIETLYHEGEEFAEGPILMISYADEEGARVITWKNVDLPYVDVVSTEREMIKRFLRVVKEKDPDVLITYNGDNFDFAYLKKRCEKLGINFALGRDGSEPKIQRMGDRFAVEVKGRIHFDLYPVIRRTINLPTYTLEAVYEAVFGQPKEKVYAEEITTAWETGENLERVARYSMEDAKVTYELGKEFLPMEAQLSRLIGQSLWDVSRSSTGNLVEWFLLRKAYERNELAPNKPDEKELARRRQSYEGGYVKEPERGLWENIVYLDFRSLYPSIIITHNVSPDTLNREGCKEYDVAPQVGHRFCKDFPGFIPSLLGDLLEERQKIKKKMKATIDPIERKLLDYRQRAIKILANSYYGYYGYARARWYCKECAESVTAWGREYITMTIKEIEEKYGFKVIYSDTDGFFATIPGADAETVKKKAMEFLKYINAKLPGALELEYEGFYKRGFFVTKKKYAVIDEEGKITTRGLEIVRRDWSEIAKETQARVLEALLKDGDVEKAVRIVKEVTEKLSKYEVPPEKLVIHEQITRDLKDYKATGPHVAVAKRLAARGVKIRPGTVISYIVLKGSGRIGDRAIPFDEFDPTKHKYDAEYYIENQVLPAVERILRAFGYRKEDLRYQKTRQVGLSAWLKPKGT

SEQ ID NO: 1683 - protein, 774 aa, synthetic construct
MILDTDYITEDGKPVIRIFKKENGEFKIEYDRTFEPYFYALLKDDSAIEEVKKITAERHGTVVTVKRVEKVQKKFLGRPVEVWKLYFTHWQDIPAIWDKIREHPAVIDIYEYDIPFAKRYLIDKGLVPMEGDEELKMLAFDIETLYHEGEEFAEGPILMISYADEEGARVITWKNVDLPYVDVVSTEREMIKRFLRVVKEKDPDVLITYNGDNFDFAYLKKRCEKLGINFALGRDGSEPKIQRMGDRFAVEVKGRIHFDLYPVIRRTINLPTYTLEAVYEAVFGQPKEKVYAEEITTAWETGENLERVARYSMEDAKVTYELGKEFLPMEAQLSRLIGQSLWDVSRSSTGNLVEWFLLRKAYERNELAPNKPDEKELARRRQSYEGGYVKEPERGLWENIVYLDFRSLYPSIIITHNVSPDTLNREGCKEYDVAPQVGHRFCKDFPGFIPSLLGDLLEERQKIKKKMKATIDPIERKLLDYRQRAIKILANSYYGYYGYARARWYCKECAESVTAWGREYITMTIKEIEEKYGFKVIYSDTDGFFATIPGADAETVKKKAMEFLKYINAKLPGALELEYEGFYKRGFFVTKKKYAVIDEEGKITTRGLEIVRRDWSEIAKETQARVLEALLKDGDVEKAVRIVKEVTEKLSKYEVPPEKLVIHEQITRDLKDYKATGPHVAVAKRLAARGVKIRPGTVISYIVLKGSGRIGDRAIPFDEFDPTKHKYDAEYYIENQVLPAVERILRAFGYRKEDLRYQKTRQVGLSAWLKPKGT

SEQ ID NO: 1684 - protein, 774 aa, synthetic construct
MILDTDYITEDGKPVIRIFKKENGEFKIEYDRTFEPYFYALLKDDSAIEEVKKITAERHGTVVTVKRVEKVQKKFLGRPVEVWKLYFTHWQDKPAIRDKIREHPAVIDIYEYDIPFAKRYLIDKGLVPMEGDEELKMLAFDIETLYHEGEEFAEGPILMISYADEEGARVITWKNVDLPYVDVVSTEREMIKRFLRVVKEKDPDVLITYNGDNFDFAYLKKRCEKLGINFALGRDGSEPKIQRMGDRFAVEVKGRIHFDLYPVIRRTINLPTYTLEAVYEAVFGQPKEKVYAEEITTAWETGENLERVARYSMEDAKVTYELGKEFLPMEAQLSRLIGQSLWDVSRSSTGNLVEWFLLRKAYERNELAPNKPDEKELARRRQSYEGGYVKEPERGLWENIVYLDFRSLYPSIIITHNVSPDTLNREGCKEYDVAPQVGHRFCKDFPGFIPSLLGDLLEERQKIKKKMKATIDPIERKLLDYRQRAIKILANSYYGYYGYARARWYCKECAESVTAWGREYITMTIKEIEEKYGFKVIYSDTDGFFATIPGADAETVKKKAMEFLKYINAKLPGALELEYEGFYKRGFFVTKKKYAVIDEEGKITTRGLEIVRRDWSEIAKETQARVLEALLKDGDVEKAVRIVKEVTEKLSKYEVPPEKLVIHEQITRDLKDYKATGPHVAVAKRLAARGVKIRPGTVISYIVLKGSGRIGDRAIPFDEFDPTKHKYDAEYYIENQVLPAVERILRAFGYRKEDLRYQKTRQVGLSAWLKPKGT

SEQ ID NO: 1685 - protein, 774 aa, synthetic construct
MILDTDYITEDGKPVIRIFKKENGEFKIEYDRTFEPYFYALLKDDSAIEEVKKITAERHGTVVTVKRVEKVQKKFLGRPVEVWKLYFTHWQDKPAIFDKIREHPAVIDIYEYDIPFAKRYLIDKGLVPMEGDEELKMLAFDIETLYHEGEEFAEGPILMISYADEEGARVITWKNVDLPYVDVVSTEREMIKRFLRVVKEKDPDVLITYNGDNFDFAYLKKRCEKLGINFALGRDGSEPKIQRMGDRFAVEVKGRIHFDLYPVIRRTINLPTYTLEAVYEAVFGQPKEKVYAEEITTAWETGENLERVARYSMEDAKVTYELGKEFLPMEAQLSRLIGQSLWDVSRSSTGNLVEWFLLRKAYERNELAPNKPDEKELARRRQSYEGGYVKEPERGLWENIVYLDFRSLYPSIIITHNVSPDTLNREGCKEYDVAPQVGHRFCKDFPGFIPSLLGDLLEERQKIKKKMKATIDPIERKLLDYRQRAIKILANSYYGYYGYARARWYCKECAESVTAWGREYITMTIKEIEEKYGFKVIYSDTDGFFATIPGADAETVKKKAMEFLKYINAKLPGALELEYEGFYKRGFFVTKKKYAVIDEEGKITTRGLEIVRRDWSEIAKETQARVLEALLKDGDVEKAVRIVKEVTEKLSKYEVPPEKLVIHEQITRDLKDYKATGPHVAVAKRLAARGVKIRPGTVISYIVLKGSGRIGDRAIPFDEFDPTKHKYDAEYYIENQVLPAVERILRAFGYRKEDLRYQKTRQVGLSAWLKPKGT

SEQ ID NO: 1686 - protein, 774 aa, synthetic construct
MILDTDYITEDGKPVIRIFKKENGEFKIEYDRTFEPYFYALLKDDSAIEEVKKITAERHGTVVTVKRVEKVQKKFLGRPVEVWKLYFTHWQDKPAIHDKIREHPAVIDIYEYDIPFAKRYLIDKGLVPMEGDEELKMLAFDIETLYHEGEEFAEGPILMISYADEEGARVITWKNVDLPYVDVVSTEREMIKRFLRVVKEKDPDVLITYNGDNFDFAYLKKRCEKLGINFALGRDGSEPKIQRMGDRFAVEVKGRIHFDLYPVIRRTINLPTYTLEAVYEAVFGQPKEKVYAEEITTAWETGENLERVARYSMEDAKVTYELGKEFLPMEAQLSRLIGQSLWDVSRSSTGNLVEWFLLRKAYERNELAPNKPDEKELARRRQSYEGGYVKEPERGLWENIVYLDFRSLYPSIIITHNVSPDTLNREGCKEYDVAPQVGHRFCKDFPGFIPSLLGDLLEERQKIKKKMKATIDPIERKLLDYRQRAIKILANSYYGYYGYARARWYCKECAESVTAWGREYITMTIKEIEEKYGFKVIYSDTDGFFATIPGADAETVKKKAMEFLKYINAKLPGALELEYEGFYKRGFFVTKKKYAVIDEEGKITTRGLEIVRRDWSEIAKETQARVLEALLKDGDVEKAVRIVKEVTEKLSKYEVPPEKLVIHEQITRDLKDYKATGPHVAVAKRLAARGVKIRPGTVISYIVLKGSGRIGDRAIPFDEFDPTKHKYDAEYYIENQVLPAVERILRAFGYRKEDLRYQKTRQVGLSAWLKPKGT

SEQ ID NO: 1687 - protein, 774 aa, synthetic construct
MILDTDYITEDGKPVIRIFKKENGEFKIEYDRTFEPYFYALLKDDSAIEEVKKITAERHGTVVTVKRVEKVQKKFLGRPVEVWKLYFTHWQDQPAIRDKIREHPAVIDIYEYDIPFAKRYLIDKGLVPMEGDEELKMLAFDIETLYHEGEEFAEGPILMISYADEEGARVITWKNVDLPYVDVVSTEREMIKRFLRVVKEKDPDVLITYNGDNFDFAYLKKRCEKLGINFALGRDGSEPKIQRMGDRFAVEVKGRIHFDLYPVIRRTINLPTYTLEAVYEAVFGQPKEKVYAEEITTAWETGENLERVARYSMEDAKVTYELGKEFLPMEAQLSRLIGQSLWDVSRSSTGNLVEWFLLRKAYERNELAPNKPDEKELARRRQSYEGGYVKEPERGLWENIVYLDFRSLYPSIIITHNVSPDTLNREGCKEYDVAPQVGHRFCKDFPGFIPSLLGDLLEERQKIKKKMKATIDPIERKLLDYRQRAIKILANSYYGYYGYARARWYCKECAESVTAWGREYITMTIKEIEEKYGFKVIYSDTDGFFATIPGADAETVKKKAMEFLKYINAKLPGALELEYEGFYKRGFFVTKKKYAVIDEEGKITTRGLEIVRRDWSEIAKETQARVLEALLKDGDVEKAVRIVKEVTEKLSKYEVPPEKLVIHEQITRDLKDYKATGPHVAVAKRLAARGVKIRPGTVISYIVLKGSGRIGDRAIPFDEFDPTKHKYDAEYYIENQVLPAVERILRAFGYRKEDLRYQKTRQVGLSAWLKPKGT

SEQ ID NO: 1688 - protein, 774 aa, synthetic construct
MILDTDYITEDGKPVIRIFKKENGEFKIEYDRTFEPYFYALLKDDSAIEEVKKITAERHGTVVTVKRVEKVQKKFLGRPVEVWKLYFTHWQDQPAIADKIREHPAVIDIYEYDIPFAKRYLIDKGLVPMEGDEELKMLAFDIETLYHEGEEFAEGPILMISYADEEGARVITWKNVDLPYVDVVSTEREMIKRFLRVVKEKDPDVLITYNGDNFDFAYLKKRCEKLGINFALGRDGSEPKIQRMGDRFAVEVKGRIHFDLYPVIRRTINLPTYTLEAVYEAVFGQPKEKVYAEEITTAWETGENLERVARYSMEDAKVTYELGKEFLPMEAQLSRLIGQSLWDVSRSSTGNLVEWFLLRKAYERNELAPNKPDEKELARRRQSYEGGYVKEPERGLWENIVYLDFRSLYPSIIITHNVSPDTLNREGCKEYDVAPQVGHRFCKDFPGFIPSLLGDLLEERQKIKKKMKATIDPIERKLLDYRQRAIKILANSYYGYYGYARARWYCKECAESVTAWGREYITMTIKEIEEKYGFKVIYSDTDGFFATIPGADAETVKKKAMEFLKYINAKLPGALELEYEGFYKRGFFVTKKKYAVIDEEGKITTRGLEIVRRDWSEIAKETQARVLEALLKDGDVEKAVRIVKEVTEKLSKYEVPPEKLVIHEQITRDLKDYKATGPHVAVAKRLAARGVKIRPGTVISYIVLKGSGRIGDRAIPFDEFDPTKHKYDAEYYIENQVLPAVERILRAFGYRKEDLRYQKTRQVGLSAWLKPKGT

SEQ ID NO: 1689 - protein, 774 aa, synthetic construct
MILDTDYITEDGKPVIRIFKKENGEFKIEYDRTFEPYFYALLKDDSAIEEVKKITAERHGTVVTVKRVEKVQKKFLGRPVEVWKLYFTHWQDQPAIHDKIREHPAVIDIYEYDIPFAKRYLIDKGLVPMEGDEELKMLAFDIETLYHEGEEFAEGPILMISYADEEGARVITWKNVDLPYVDVVSTEREMIKRFLRVVKEKDPDVLITYNGDNFDFAYLKKRCEKLGINFALGRDGSEPKIQRMGDRFAVEVKGRIHFDLYPVIRRTINLPTYTLEAVYEAVFGQPKEKVYAEEITTAWETGENLERVARYSMEDAKVTYELGKEFLPMEAQLSRLIGQSLWDVSRSSTGNLVEWFLLRKAYERNELAPNKPDEKELARRRQSYEGGYVKEPERGLWENIVYLDFRSLYPSIIITHNVSPDTLNREGCKEYDVAPQVGHRFCKDFPGFIPSLLGDLLEERQKIKKKMKATIDPIERKLLDYRQRAIKILANSYYGYYGYARARWYCKECAESVTAWGREYITMTIKEIEEKYGFKVIYSDTDGFFATIPGADAETVKKKAMEFLKYINAKLPGALELEYEGFYKRGFFVTKKKYAVIDEEGKITTRGLEIVRRDWSEIAKETQARVLEALLKDGDVEKAVRIVKEVTEKLSKYEVPPEKLVIHEQITRDLKDYKATGPHVAVAKRLAARGVKIRPGTVISYIVLKGSGRIGDRAIPFDEFDPTKHKYDAEYYIENQVLPAVERILRAFGYRKEDLRYQKTRQVGLSAWLKPKGT

SEQ ID NO: 1690 - protein, 774 aa, synthetic construct
MILDTDYITEDGKPVIRIFKKENGEFKIEYDRTFEPYFYALLKDDSAIEEVKKITAERHGTVVTVKRVEKVQKKFLGRPVEVWKLYFTHWQDRPAIRDKIREHPAVIDIYEYDIPFAKRYLIDKGLVPMEGDEELKMLAFDIETLYHEGEEFAEGPILMISYADEEGARVITWKNVDLPYVDVVSTEREMIKRFLRVVKEKDPDVLITYNGDNFDFAYLKKRCEKLGINFALGRDGSEPKIQRMGDRFAVEVKGRIHFDLYPVIRRTINLPTYTLEAVYEAVFGQPKEKVYAEEITTAWETGENLERVARYSMEDAKVTYELGKEFLPMEAQLSRLIGQSLWDVSRSSTGNLVEWFLLRKAYERNELAPNKPDEKELARRRQSYEGGYVKEPERGLWENIVYLDFRSLYPSIIITHNVSPDTLNREGCKEYDVAPQVGHRFCKDFPGFIPSLLGDLLEERQKIKKKMKATIDPIERKLLDYRQRAIKILANSYYGYYGYARARWYCKECAESVTAWGREYITMTIKEIEEKYGFKVIYSDTDGFFATIPGADAETVKKKAMEFLKYINAKLPGALELEYEGFYKRGFFVTKKKYAVIDEEGKITTRGLEIVRRDWSEIAKETQARVLEALLKDGDVEKAVRIVKEVTEKLSKYEVPPEKLVIHEQITRDLKDYKATGPHVAVAKRLAARGVKIRPGTVISYIVLKGSGRIGDRAIPFDEFDPTKHKYDAEYYIENQVLPAVERILRAFGYRKEDLRYQKTRQVGLSAWLKPKGT

SEQ ID NO: 1691 - protein, 774 aa, synthetic construct
MILDTDYITEDGKPVIRIFKKENGEFKIEYDRTFEPYFYALLKDDSAIEEVKKITAERHGTVVTVKRVEKVQKKFLGRPVEVWKLYFTHWQDRPAIADKIREHPAVIDIYEYDIPFAKRYLIDKGLVPMEGDEELKMLAFDIETLYHEGEEFAEGPILMISYADEEGARVITWKNVDLPYVDVVSTEREMIKRFLRVVKEKDPDVLITYNGDNFDFAYLKKRCEKLGINFALGRDGSEPKIQRMGDRFAVEVKGRIHFDLYPVIRRTINLPTYTLEAVYEAVFGQPKEKVYAEEITTAWETGENLERVARYSMEDAKVTYELGKEFLPMEAQLSRLIGQSLWDVSRSSTGNLVEWFLLRKAYERNELAPNKPDEKELARRRQSYEGGYVKEPERGLWENIVYLDFRSLYPSIIITHNVSPDTLNREGCKEYDVAPQVGHRFCKDFPGFIPSLLGDLLEERQKIKKKMKATIDPIERKLLDYRQRAIKILANSYYGYYGYARARWYCKECAESVTAWGREYITMTIKEIEEKYGFKVIYSDTDGFFATIPGADAETVKKKAMEFLKYINAKLPGALELEYEGFYKRGFFVTKKKYAVIDEEGKITTRGLEIVRRDWSEIAKETQARVLEALLKDGDVEKAVRIVKEVTEKLSKYEVPPEKLVIHEQITRDLKDYKATGPHVAVAKRLAARGVKIRPGTVISYIVLKGSGRIGDRAIPFDEFDPTKHKYDAEYYIENQVLPAVERILRAFGYRKEDLRYQKTRQVGLSAWLKPKGT

SEQ ID NO: 1692 - protein, 774 aa, synthetic construct
MILDTDYITEDGKPVIRIFKKENGEFKIEYDRTFEPYFYALLKDDSAIEEVKKITAERHGTVVTVKRVEKVQKKFLGRPVEVWKLYFTHWQDRPAIFDKIREHPAVIDIYEYDIPFAKRYLIDKGLVPMEGDEELKMLAFDIETLYHEGEEFAEGPILMISYADEEGARVITWKNVDLPYVDVVSTEREMIKRFLRVVKEKDPDVLITYNGDNFDFAYLKKRCEKLGINFALGRDGSEPKIQRMGDRFAVEVKGRIHFDLYPVIRRTINLPTYTLEAVYEAVFGQPKEKVYAEEITTAWETGENLERVARYSMEDAKVTYELGKEFLPMEAQLSRLIGQSLWDVSRSSTGNLVEWFLLRKAYERNELAPNKPDEKELARRRQSYEGGYVKEPERGLWENIVYLDFRSLYPSIIITHNVSPDTLNREGCKEYDVAPQVGHRFCKDFPGFIPSLLGDLLEERQKIKKKMKATIDPIERKLLDYRQRAIKILANSYYGYYGYARARWYCKECAESVTAWGREYITMTIKEIEEKYGFKVIYSDTDGFFATIPGADAETVKKKAMEFLKYINAKLPGALELEYEGFYKRGFFVTKKKYAVIDEEGKITTRGLEIVRRDWSEIAKETQARVLEALLKDGDVEKAVRIVKEVTEKLSKYEVPPEKLVIHEQITRDLKDYKATGPHVAVAKRLAARGVKIRPGTVISYIVLKGSGRIGDRAIPFDEFDPTKHKYDAEYYIENQVLPAVERILRAFGYRKEDLRYQKTRQVGLSAWLKPKGT

SEQ ID NO: 1693 - protein, 774 aa, synthetic construct
MILDTDYITEDGKPVIRIFKKENGEFKIEYDRTFEPYFYALLKDDSAIEEVKKITAERHGTVVTVKRVEKVQKKFLGRPVEVWKLYFTHWQDRPAIHDKIREHPAVIDIYEYDIPFAKRYLIDKGLVPMEGDEELKMLAFDIETLYHEGEEFAEGPILMISYADEEGARVITWKNVDLPYVDVVSTEREMIKRFLRVVKEKDPDVLITYNGDNFDFAYLKKRCEKLGINFALGRDGSEPKIQRMGDRFAVEVKGRIHFDLYPVIRRTINLPTYTLEAVYEAVFGQPKEKVYAEEITTAWETGENLERVARYSMEDAKVTYELGKEFLPMEAQLSRLIGQSLWDVSRSSTGNLVEWFLLRKAYERNELAPNKPDEKELARRRQSYEGGYVKEPERGLWENIVYLDFRSLYPSIIITHNVSPDTLNREGCKEYDVAPQVGHRFCKDFPGFIPSLLGDLLEERQKIKKKMKATIDPIERKLLDYRQRAIKILANSYYGYYGYARARWYCKECAESVTAWGREYITMTIKEIEEKYGFKVIYSDTDGFFATIPGADAETVKKKAMEFLKYINAKLPGALELEYEGFYKRGFFVTKKKYAVIDEEGKITTRGLEIVRRDWSEIAKETQARVLEALLKDGDVEKAVRIVKEVTEKLSKYEVPPEKLVIHEQITRDLKDYKATGPHVAVAKRLAARGVKIRPGTVISYIVLKGSGRIGDRAIPFDEFDPTKHKYDAEYYIENQVLPAVERILRAFGYRKEDLRYQKTRQVGLSAWLKPKGT

SEQ ID NO: 1694 - protein, 774 aa, synthetic construct
MILDTDYITEDGKPVIRIFKKENGEFKIEYDRTFEPYFYALLKDDSAIEEVKKITAERHGTVVTVKRVEKVQKKFLGRPVEVWKLYFTHWQDRPAIWDKIREHPAVIDIYEYDIPFAKRYLIDKGLVPMEGDEELKMLAFDIETLYHEGEEFAEGPILMISYADEEGARVITWKNVDLPYVDVVSTEREMIKRFLRVVKEKDPDVLITYNGDNFDFAYLKKRCEKLGINFALGRDGSEPKIQRMGDRFAVEVKGRIHFDLYPVIRRTINLPTYTLEAVYEAVFGQPKEKVYAEEITTAWETGENLERVARYSMEDAKVTYELGKEFLPMEAQLSRLIGQSLWDVSRSSTGNLVEWFLLRKAYERNELAPNKPDEKELARRRQSYEGGYVKEPERGLWENIVYLDFRSLYPSIIITHNVSPDTLNREGCKEYDVAPQVGHRFCKDFPGFIPSLLGDLLEERQKIKKKMKATIDPIERKLLDYRQRAIKILANSYYGYYGYARARWYCKECAESVTAWGREYITMTIKEIEEKYGFKVIYSDTDGFFATIPGADAETVKKKAMEFLKYINAKLPGALELEYEGFYKRGFFVTKKKYAVIDEEGKITTRGLEIVRRDWSEIAKETQARVLEALLKDGDVEKAVRIVKEVTEKLSKYEVPPEKLVIHEQITRDLKDYKATGPHVAVAKRLAARGVKIRPGTVISYIVLKGSGRIGDRAIPFDEFDPTKHKYDAEYYIENQVLPAVERILRAFGYRKEDLRYQKTRQVGLSAWLKPKGT

SEQ ID NO: 1695 - protein, 774 aa, synthetic construct
MILDTDYITEDGKPVIRIFKKENGEFKIEYDRTFEPYFYALLKDDSAIEEVKKITAERHGTVVTVKRVEKVQKKFLGRPVEVWKLYFTHYQDVPAIADKIREHPAVIDIYEYDIPFAKRYLIDKGLVPMEGDEELKMLAFDIETLYHEGEEFAEGPILMISYADEEGARVITWKNVDLPYVDVVSTEREMIKRFLRVVKEKDPDVLITYNGDNFDFAYLKKRCEKLGINFALGRDGSEPKIQRMGDRFAVEVKGRIHFDLYPVIRRTINLPTYTLEAVYEAVFGQPKEKVYAEEITTAWETGENLERVARYSMEDAKVTYELGKEFLPMEAQLSRLIGQSLWDVSRSSTGNLVEWFLLRKAYERNELAPNKPDEKELARRRQSYEGGYVKEPERGLWENIVYLDFRSLYPSIIITHNVSPDTLNREGCKEYDVAPQVGHRFCKDFPGFIPSLLGDLLEERQKIKKKMKATIDPIERKLLDYRQRAIKILANSYYGYYGYARARWYCKECAESVTAWGREYITMTIKEIEEKYGFKVIYSDTDGFFATIPGADAETVKKKAMEFLKYINAKLPGALELEYEGFYKRGFFVTKKKYAVIDEEGKITTRGLEIVRRDWSEIAKETQARVLEALLKDGDVEKAVRIVKEVTEKLSKYEVPPEKLVIHEQITRDLKDYKATGPHVAVAKRLAARGVKIRPGTVISYIVLKGSGRIGDRAIPFDEFDPTKHKYDAEYYIENQVLPAVERILRAFGYRKEDLRYQKTRQVGLSAWLKPKGT

SEQ ID NO: 1696 - protein, 774 aa, synthetic construct
MILDTDYITEDGKPVIRIFKKENGEFKIEYDRTFEPYFYALLKDDSAIEEVKKITAERHGTVVTVKRVEKVQKKFLGRPVEVWKLYFTHYQDVPAIFDKIREHPAVIDIYEYDIPFAKRYLIDKGLVPMEGDEELKMLAFDIETLYHEGEEFAEGPILMISYADEEGARVITWKNVDLPYVDVVSTEREMIKRFLRVVKEKDPDVLITYNGDNFDFAYLKKRCEKLGINFALGRDGSEPKIQRMGDRFAVEVKGRIHFDLYPVIRRTINLPTYTLEAVYEAVFGQPKEKVYAEEITTAWETGENLERVARYSMEDAKVTYELGKEFLPMEAQLSRLIGQSLWDVSRSSTGNLVEWFLLRKAYERNELAPNKPDEKELARRRQSYEGGYVKEPERGLWENIVYLDFRSLYPSIIITHNVSPDTLNREGCKEYDVAPQVGHRFCKDFPGFIPSLLGDLLEERQKIKKKMKATIDPIERKLLDYRQRAIKILANSYYGYYGYARARWYCKECAESVTAWGREYITMTIKEIEEKYGFKVIYSDTDGFFATIPGADAETVKKKAMEFLKYINAKLPGALELEYEGFYKRGFFVTKKKYAVIDEEGKITTRGLEIVRRDWSEIAKETQARVLEALLKDGDVEKAVRIVKEVTEKLSKYEVPPEKLVIHEQITRDLKDYKATGPHVAVAKRLAARGVKIRPGTVISYIVLKGSGRIGDRAIPFDEFDPTKHKYDAEYYIENQVLPAVERILRAFGYRKEDLRYQKTRQVGLSAWLKPKGT

SEQ ID NO: 1697 - protein, 774 aa, synthetic construct
MILDTDYITEDGKPVIRIFKKENGEFKIEYDRTFEPYFYALLKDDSAIEEVKKITAERHGTVVTVKRVEKVQKKFLGRPVEVWKLYFTHYQDVPAIHDKIREHPAVIDIYEYDIPFAKRYLIDKGLVPMEGDEELKMLAFDIETLYHEGEEFAEGPILMISYADEEGARVITWKNVDLPYVDVVSTEREMIKRFLRVVKEKDPDVLITYNGDNFDFAYLKKRCEKLGINFALGRDGSEPKIQRMGDRFAVEVKGRIHFDLYPVIRRTINLPTYTLEAVYEAVFGQPKEKVYAEEITTAWETGENLERVARYSMEDAKVTYELGKEFLPMEAQLSRLIGQSLWDVSRSSTGNLVEWFLLRKAYERNELAPNKPDEKELARRRQSYEGGYVKEPERGLWENIVYLDFRSLYPSIIITHNVSPDTLNREGCKEYDVAPQVGHRFCKDFPGFIPSLLGDLLEERQKIKKKMKATIDPIERKLLDYRQRAIKILANSYYGYYGYARARWYCKECAESVTAWGREYITMTIKEIEEKYGFKVIYSDTDGFFATIPGADAETVKKKAMEFLKYINAKLPGALELEYEGFYKRGFFVTKKKYAVIDEEGKITTRGLEIVRRDWSEIAKETQARVLEALLKDGDVEKAVRIVKEVTEKLSKYEVPPEKLVIHEQITRDLKDYKATGPHVAVAKRLAARGVKIRPGTVISYIVLKGSGRIGDRAIPFDEFDPTKHKYDAEYYIENQVLPAVERILRAFGYRKEDLRYQKTRQVGLSAWLKPKGT

SEQ ID NO: 1698 - protein, 774 aa, synthetic construct
MILDTDYITEDGKPVIRIFKKENGEFKIEYDRTFEPYFYALLKDDSAIEEVKKITAERHGTVVTVKRVEKVQKKFLGRPVEVWKLYFTHYQDVPAIWDKIREHPAVIDIYEYDIPFAKRYLIDKGLVPMEGDEELKMLAFDIETLYHEGEEFAEGPILMISYADEEGARVITWKNVDLPYVDVVSTEREMIKRFLRVVKEKDPDVLITYNGDNFDFAYLKKRCEKLGINFALGRDGSEPKIQRMGDRFAVEVKGRIHFDLYPVIRRTINLPTYTLEAVYEAVFGQPKEKVYAEEITTAWETGENLERVARYSMEDAKVTYELGKEFLPMEAQLSRLIGQSLWDVSRSSTGNLVEWFLLRKAYERNELAPNKPDEKELARRRQSYEGGYVKEPERGLWENIVYLDFRSLYPSIIITHNVSPDTLNREGCKEYDVAPQVGHRFCKDFPGFIPSLLGDLLEERQKIKKKMKATIDPIERKLLDYRQRAIKILANSYYGYYGYARARWYCKECAESVTAWGREYITMTIKEIEEKYGFKVIYSDTDGFFATIPGADAETVKKKAMEFLKYINAKLPGALELEYEGFYKRGFFVTKKKYAVIDEEGKITTRGLEIVRRDWSEIAKETQARVLEALLKDGDVEKAVRIVKEVTEKLSKYEVPPEKLVIHEQITRDLKDYKATGPHVAVAKRLAARGVKIRPGTVISYIVLKGSGRIGDRAIPFDEFDPTKHKYDAEYYIENQVLPAVERILRAFGYRKEDLRYQKTRQVGLSAWLKPKGT

SEQ ID NO: 1699 - protein, 774 aa, synthetic construct
MILDTDYITEDGKPVIRIFKKENGEFKIEYDRTFEPYFYALLKDDSAIEEVKKITAERHGTVVTVKRVEKVQKKFLGRPVEVWKLYFTHYQDIPAIRDKIREHPAVIDIYEYDIPFAKRYLIDKGLVPMEGDEELKMLAFDIETLYHEGEEFAEGPILMISYADEEGARVITWKNVDLPYVDVVSTEREMIKRFLRVVKEKDPDVLITYNGDNFDFAYLKKRCEKLGINFALGRDGSEPKIQRMGDRFAVEVKGRIHFDLYPVIRRTINLPTYTLEAVYEAVFGQPKEKVYAEEITTAWETGENLERVARYSMEDAKVTYELGKEFLPMEAQLSRLIGQSLWDVSRSSTGNLVEWFLLRKAYERNELAPNKPDEKELARRRQSYEGGYVKEPERGLWENIVYLDFRSLYPSIIITHNVSPDTLNREGCKEYDVAPQVGHRFCKDFPGFIPSLLGDLLEERQKIKKKMKATIDPIERKLLDYRQRAIKILANSYYGYYGYARARWYCKECAESVTAWGREYITMTIKEIEEKYGFKVIYSDTDGFFATIPGADAETVKKKAMEFLKYINAKLPGALELEYEGFYKRGFFVTKKKYAVIDEEGKITTRGLEIVRRDWSEIAKETQARVLEALLKDGDVEKAVRIVKEVTEKLSKYEVPPEKLVIHEQITRDLKDYKATGPHVAVAKRLAARGVKIRPGTVISYIVLKGSGRIGDRAIPFDEFDPTKHKYDAEYYIENQVLPAVERILRAFGYRKEDLRYQKTRQVGLSAWLKPKGT

SEQ ID NO: 1700 - protein, 774 aa, synthetic construct
MILDTDYITEDGKPVIRIFKKENGEFKIEYDRTFEPYFYALLKDDSAIEEVKKITAERHGTVVTVKRVEKVQKKFLGRPVEVWKLYFTHYQDIPAIADKIREHPAVIDIYEYDIPFAKRYLIDKGLVPMEGDEELKMLAFDIETLYHEGEEFAEGPILMISYADEEGARVITWKNVDLPYVDVVSTEREMIKRFLRVVKEKDPDVLITYNGDNFDFAYLKKRCEKLGINFALGRDGSEPKIQRMGDRFAVEVKGRIHFDLYPVIRRTINLPTYTLEAVYEAVFGQPKEKVYAEEITTAWETGENLERVARYSMEDAKVTYELGKEFLPMEAQLSRLIGQSLWDVSRSSTGNLVEWFLLRKAYERNELAPNKPDEKELARRRQSYEGGYVKEPERGLWENIVYLDFRSLYPSIIITHNVSPDTLNREGCKEYDVAPQVGHRFCKDFPGFIPSLLGDLLEERQKIKKKMKATIDPIERKLLDYRQRAIKILANSYYGYYGYARARWYCKECAESVTAWGREYITMTIKEIEEKYGFKVIYSDTDGFFATIPGADAETVKKKAMEFLKYINAKLPGALELEYEGFYKRGFFVTKKKYAVIDEEGKITTRGLEIVRRDWSEIAKETQARVLEALLKDGDVEKAVRIVKEVTEKLSKYEVPPEKLVIHEQITRDLKDYKATGPHVAVAKRLAARGVKIRPGTVISYIVLKGSGRIGDRAIPFDEFDPTKHKYDAEYYIENQVLPAVERILRAFGYRKEDLRYQKTRQVGLSAWLKPKGT

SEQ ID NO: 1701 - protein, 774 aa, synthetic construct
MILDTDYITEDGKPVIRIFKKENGEFKIEYDRTFEPYFYALLKDDSAIEEVKKITAERHGTVVTVKRVEKVQKKFLGRPVEVWKLYFTHYQDIPAIFDKIREHPAVIDIYEYDIPFAKRYLIDKGLVPMEGDEELKMLAFDIETLYHEGEEFAEGPILMISYADEEGARVITWKNVDLPYVDVVSTEREMIKRFLRVVKEKDPDVLITYNGDNFDFAYLKKRCEKLGINFALGRDGSEPKIQRMGDRFAVEVKGRIHFDLYPVIRRTINLPTYTLEAVYEAVFGQPKEKVYAEEITTAWETGENLERVARYSMEDAKVTYELGKEFLPMEAQLSRLIGQSLWDVSRSSTGNLVEWFLLRKAYERNELAPNKPDEKELARRRQSYEGGYVKEPERGLWENIVYLDFRSLYPSIIITHNVSPDTLNREGCKEYDVAPQVGHRFCKDFPGFIPSLLGDLLEERQKIKKKMKATIDPIERKLLDYRQRAIKILANSYYGYYGYARARWYCKECAESVTAWGREYITMTIKEIEEKYGFKVIYSDTDGFFATIPGADAETVKKKAMEFLKYINAKLPGALELEYEGFYKRGFFVTKKKYAVIDEEGKITTRGLEIVRRDWSEIAKETQARVLEALLKDGDVEKAVRIVKEVTEKLSKYEVPPEKLVIHEQITRDLKDYKATGPHVAVAKRLAARGVKIRPGTVISYIVLKGSGRIGDRAIPFDEFDPTKHKYDAEYYIENQVLPAVERILRAFGYRKEDLRYQKTRQVGLSAWLKPKGT

SEQ ID NO: 1702 - protein, 774 aa, synthetic construct
MILDTDYITEDGKPVIRIFKKENGEFKIEYDRTFEPYFYALLKDDSAIEEVKKITAERHGTVVTVKRVEKVQKKFLGRPVEVWKLYFTHYQDIPAIHDKIREHPAVIDIYEYDIPFAKRYLIDKGLVPMEGDEELKMLAFDIETLYHEGEEFAEGPILMISYADEEGARVITWKNVDLPYVDVVSTEREMIKRFLRVVKEKDPDVLITYNGDNFDFAYLKKRCEKLGINFALGRDGSEPKIQRMGDRFAVEVKGRIHFDLYPVIRRTINLPTYTLEAVYEAVFGQPKEKVYAEEITTAWETGENLERVARYSMEDAKVTYELGKEFLPMEAQLSRLIGQSLWDVSRSSTGNLVEWFLLRKAYERNELAPNKPDEKELARRRQSYEGGYVKEPERGLWENIVYLDFRSLYPSIIITHNVSPDTLNREGCKEYDVAPQVGHRFCKDFPGFIPSLLGDLLEERQKIKKKMKATIDPIERKLLDYRQRAIKILANSYYGYYGYARARWYCKECAESVTAWGREYITMTIKEIEEKYGFKVIYSDTDGFFATIPGADAETVKKKAMEFLKYINAKLPGALELEYEGFYKRGFFVTKKKYAVIDEEGKITTRGLEIVRRDWSEIAKETQARVLEALLKDGDVEKAVRIVKEVTEKLSKYEVPPEKLVIHEQITRDLKDYKATGPHVAVAKRLAARGVKIRPGTVISYIVLKGSGRIGDRAIPFDEFDPTKHKYDAEYYIENQVLPAVERILRAFGYRKEDLRYQKTRQVGLSAWLKPKGT

SEQ ID NO: 1703 - protein, 774 aa, synthetic construct
MILDTDYITEDGKPVIRIFKKENGEFKIEYDRTFEPYFYALLKDDSAIEEVKKITAERHGTVVTVKRVEKVQKKFLGRPVEVWKLYFTHYQDIPAIWDKIREHPAVIDIYEYDIPFAKRYLIDKGLVPMEGDEELKMLAFDIETLYHEGEEFAEGPILMISYADEEGARVITWKNVDLPYVDVVSTEREMIKRFLRVVKEKDPDVLITYNGDNFDFAYLKKRCEKLGINFALGRDGSEPKIQRMGDRFAVEVKGRIHFDLYPVIRRTINLPTYTLEAVYEAVFGQPKEKVYAEEITTAWETGENLERVARYSMEDAKVTYELGKEFLPMEAQLSRLIGQSLWDVSRSSTGNLVEWFLLRKAYERNELAPNKPDEKELARRRQSYEGGYVKEPERGLWENIVYLDFRSLYPSIIITHNVSPDTLNREGCKEYDVAPQVGHRFCKDFPGFIPSLLGDLLEERQKIKKKMKATIDPIERKLLDYRQRAIKILANSYYGYYGYARARWYCKECAESVTAWGREYITMTIKEIEEKYGFKVIYSDTDGFFATIPGADAETVKKKAMEFLKYINAKLPGALELEYEGFYKRGFFVTKKKYAVIDEEGKITTRGLEIVRRDWSEIAKETQARVLEALLKDGDVEKAVRIVKEVTEKLSKYEVPPEKLVIHEQITRDLKDYKATGPHVAVAKRLAARGVKIRPGTVISYIVLKGSGRIGDRAIPFDEFDPTKHKYDAEYYIENQVLPAVERILRAFGYRKEDLRYQKTRQVGLSAWLKPKGT

SEQ ID NO: 1704 - protein, 774 aa, synthetic construct
MILDTDYITEDGKPVIRIFKKENGEFKIEYDRTFEPYFYALLKDDSAIEEVKKITAERHGTVVTVKRVEKVQKKFLGRPVEVWKLYFTHYQDKPAIRDKIREHPAVIDIYEYDIPFAKRYLIDKGLVPMEGDEELKMLAFDIETLYHEGEEFAEGPILMISYADEEGARVITWKNVDLPYVDVVSTEREMIKRFLRVVKEKDPDVLITYNGDNFDFAYLKKRCEKLGINFALGRDGSEPKIQRMGDRFAVEVKGRIHFDLYPVIRRTINLPTYTLEAVYEAVFGQPKEKVYAEEITTAWETGENLERVARYSMEDAKVTYELGKEFLPMEAQLSRLIGQSLWDVSRSSTGNLVEWFLLRKAYERNELAPNKPDEKELARRRQSYEGGYVKEPERGLWENIVYLDFRSLYPSIIITHNVSPDTLNREGCKEYDVAPQVGHRFCKDFPGFIPSLLGDLLEERQKIKKKMKATIDPIERKLLDYRQRAIKILANSYYGYYGYARARWYCKECAESVTAWGREYITMTIKEIEEKYGFKVIYSDTDGFFATIPGADAETVKKKAMEFLKYINAKLPGALELEYEGFYKRGFFVTKKKYAVIDEEGKITTRGLEIVRRDWSEIAKETQARVLEALLKDGDVEKAVRIVKEVTEKLSKYEVPPEKLVIHEQITRDLKDYKATGPHVAVAKRLAARGVKIRPGTVISYIVLKGSGRIGDRAIPFDEFDPTKHKYDAEYYIENQVLPAVERILRAFGYRKEDLRYQKTRQVGLSAWLKPKGT

SEQ ID NO: 1705 - protein, 774 aa, synthetic construct
MILDTDYITEDGKPVIRIFKKENGEFKIEYDRTFEPYFYALLKDDSAIEEVKKITAERHGTVVTVKRVEKVQKKFLGRPVEVWKLYFTHYQDQPAIRDKIREHPAVIDIYEYDIPFAKRYLIDKGLVPMEGDEELKMLAFDIETLYHEGEEFAEGPILMISYADEEGARVITWKNVDLPYVDVVSTEREMIKRFLRVVKEKDPDVLITYNGDNFDFAYLKKRCEKLGINFALGRDGSEPKIQRMGDRFAVEVKGRIHFDLYPVIRRTINLPTYTLEAVYEAVFGQPKEKVYAEEITTAWETGENLERVARYSMEDAKVTYELGKEFLPMEAQLSRLIGQSLWDVSRSSTGNLVEWFLLRKAYERNELAPNKPDEKELARRRQSYEGGYVKEPERGLWENIVYLDFRSLYPSIIITHNVSPDTLNREGCKEYDVAPQVGHRFCKDFPGFIPSLLGDLLEERQKIKKKMKATIDPIERKLLDYRQRAIKILANSYYGYYGYARARWYCKECAESVTAWGREYITMTIKEIEEKYGFKVIYSDTDGFFATIPGADAETVKKKAMEFLKYINAKLPGALELEYEGFYKRGFFVTKKKYAVIDEEGKITTRGLEIVRRDWSEIAKETQARVLEALLKDGDVEKAVRIVKEVTEKLSKYEVPPEKLVIHEQITRDLKDYKATGPHVAVAKRLAARGVKIRPGTVISYIVLKGSGRIGDRAIPFDEFDPTKHKYDAEYYIENQVLPAVERILRAFGYRKEDLRYQKTRQVGLSAWLKPKGT

SEQ ID NO: 1706 - protein, 774 aa, synthetic construct
MILDTDYITEDGKPVIRIFKKENGEFKIEYDRTFEPYFYALLKDDSAIEEVKKITAERHGTVVTVKRVEKVQKKFLGRPVEVWKLYFTHYQDQPAIADKIREHPAVIDIYEYDIPFAKRYLIDKGLVPMEGDEELKMLAFDIETLYHEGEEFAEGPILMISYADEEGARVITWKNVDLPYVDVVSTEREMIKRFLRVVKEKDPDVLITYNGDNFDFAYLKKRCEKLGINFALGRDGSEPKIQRMGDRFAVEVKGRIHFDLYPVIRRTINLPTYTLEAVYEAVFGQPKEKVYAEEITTAWETGENLERVARYSMEDAKVTYELGKEFLPMEAQLSRLIGQSLWDVSRSSTGNLVEWFLLRKAYERNELAPNKPDEKELARRRQSYEGGYVKEPERGLWENIVYLDFRSLYPSIIITHNVSPDTLNREGCKEYDVAPQVGHRFCKDFPGFIPSLLGDLLEERQKIKKKMKATIDPIERKLLDYRQRAIKILANSYYGYYGYARARWYCKECAESVTAWGREYITMTIKEIEEKYGFKVIYSDTDGFFATIPGADAETVKKKAMEFLKYINAKLPGALELEYEGFYKRGFFVTKKKYAVIDEEGKITTRGLEIVRRDWSEIAKETQARVLEALLKDGDVEKAVRIVKEVTEKLSKYEVPPEKLVIHEQITRDLKDYKATGPHVAVAKRLAARGVKIRPGTVISYIVLKGSGRIGDRAIPFDEFDPTKHKYDAEYYIENQVLPAVERILRAFGYRKEDLRYQKTRQVGLSAWLKPKGT

SEQ ID NO: 1707 - protein, 774 aa, synthetic construct
MILDTDYITEDGKPVIRIFKKENGEFKIEYDRTFEPYFYALLKDDSAIEEVKKITAERHGTVVTVKRVEKVQKKFLGRPVEVWKLYFTHYQDQPAIFDKIREHPAVIDIYEYDIPFAKRYLIDKGLVPMEGDEELKMLAFDIETLYHEGEEFAEGPILMISYADEEGARVITWKNVDLPYVDVVSTEREMIKRFLRVVKEKDPDVLITYNGDNFDFAYLKKRCEKLGINFALGRDGSEPKIQRMGDRFAVEVKGRIHFDLYPVIRRTINLPTYTLEAVYEAVFGQPKEKVYAEEITTAWETGENLERVARYSMEDAKVTYELGKEFLPMEAQLSRLIGQSLWDVSRSSTGNLVEWFLLRKAYERNELAPNKPDEKELARRRQSYEGGYVKEPERGLWENIVYLDFRSLYPSIIITHNVSPDTLNREGCKEYDVAPQVGHRFCKDFPGFIPSLLGDLLEERQKIKKKMKATIDPIERKLLDYRQRAIKILANSYYGYYGYARARWYCKECAESVTAWGREYITMTIKEIEEKYGFKVIYSDTDGFFATIPGADAETVKKKAMEFLKYINAKLPGALELEYEGFYKRGFFVTKKKYAVIDEEGKITTRGLEIVRRDWSEIAKETQARVLEALLKDGDVEKAVRIVKEVTEKLSKYEVPPEKLVIHEQITRDLKDYKATGPHVAVAKRLAARGVKIRPGTVISYIVLKGSGRIGDRAIPFDEFDPTKHKYDAEYYIENQVLPAVERILRAFGYRKEDLRYQKTRQVGLSAWLKPKGT

SEQ ID NO: 1708 - protein, 774 aa, synthetic construct
MILDTDYITEDGKPVIRIFKKENGEFKIEYDRTFEPYFYALLKDDSAIEEVKKITAERHGTVVTVKRVEKVQKKFLGRPVEVWKLYFTHYQDQPAIWDKIREHPAVIDIYEYDIPFAKRYLIDKGLVPMEGDEELKMLAFDIETLYHEGEEFAEGPILMISYADEEGARVITWKNVDLPYVDVVSTEREMIKRFLRVVKEKDPDVLITYNGDNFDFAYLKKRCEKLGINFALGRDGSEPKIQRMGDRFAVEVKGRIHFDLYPVIRRTINLPTYTLEAVYEAVFGQPKEKVYAEEITTAWETGENLERVARYSMEDAKVTYELGKEFLPMEAQLSRLIGQSLWDVSRSSTGNLVEWFLLRKAYERNELAPNKPDEKELARRRQSYEGGYVKEPERGLWENIVYLDFRSLYPSIIITHNVSPDTLNREGCKEYDVAPQVGHRFCKDFPGFIPSLLGDLLEERQKIKKKMKATIDPIERKLLDYRQRAIKILANSYYGYYGYARARWYCKECAESVTAWGREYITMTIKEIEEKYGFKVIYSDTDGFFATIPGADAETVKKKAMEFLKYINAKLPGALELEYEGFYKRGFFVTKKKYAVIDEEGKITTRGLEIVRRDWSEIAKETQARVLEALLKDGDVEKAVRIVKEVTEKLSKYEVPPEKLVIHEQITRDLKDYKATGPHVAVAKRLAARGVKIRPGTVISYIVLKGSGRIGDRAIPFDEFDPTKHKYDAEYYIENQVLPAVERILRAFGYRKEDLRYQKTRQVGLSAWLKPKGT

SEQ ID NO: 1709 - protein, 774 aa, synthetic construct
MILDTDYITEDGKPVIRIFKKENGEFKIEYDRTFEPYFYALLKDDSAIEEVKKITAERHGTVVTVKRVEKVQKKFLGRPVEVWKLYFTHYQDRPAIRDKIREHPAVIDIYEYDIPFAKRYLIDKGLVPMEGDEELKMLAFDIETLYHEGEEFAEGPILMISYADEEGARVITWKNVDLPYVDVVSTEREMIKRFLRVVKEKDPDVLITYNGDNFDFAYLKKRCEKLGINFALGRDGSEPKIQRMGDRFAVEVKGRIHFDLYPVIRRTINLPTYTLEAVYEAVFGQPKEKVYAEEITTAWETGENLERVARYSMEDAKVTYELGKEFLPMEAQLSRLIGQSLWDVSRSSTGNLVEWFLLRKAYERNELAPNKPDEKELARRRQSYEGGYVKEPERGLWENIVYLDFRSLYPSIIITHNVSPDTLNREGCKEYDVAPQVGHRFCKDFPGFIPSLLGDLLEERQKIKKKMKATIDPIERKLLDYRQRAIKILANSYYGYYGYARARWYCKECAESVTAWGREYITMTIKEIEEKYGFKVIYSDTDGFFATIPGADAETVKKKAMEFLKYINAKLPGALELEYEGFYKRGFFVTKKKYAVIDEEGKITTRGLEIVRRDWSEIAKETQARVLEALLKDGDVEKAVRIVKEVTEKLSKYEVPPEKLVIHEQITRDLKDYKATGPHVAVAKRLAARGVKIRPGTVISYIVLKGSGRIGDRAIPFDEFDPTKHKYDAEYYIENQVLPAVERILRAFGYRKEDLRYQKTRQVGLSAWLKPKGT

SEQ ID NO: 1710 - protein, 774 aa, synthetic construct
MILDTDYITEDGKPVIRIFKKENGEFKIEYDRTFEPYFYALLKDDSAIEEVKKITAERHGTVVTVKRVEKVQKKFLGRPVEVWKLYFTHYQDRPAIFDKIREHPAVIDIYEYDIPFAKRYLIDKGLVPMEGDEELKMLAFDIETLYHEGEEFAEGPILMISYADEEGARVITWKNVDLPYVDVVSTEREMIKRFLRVVKEKDPDVLITYNGDNFDFAYLKKRCEKLGINFALGRDGSEPKIQRMGDRFAVEVKGRIHFDLYPVIRRTINLPTYTLEAVYEAVFGQPKEKVYAEEITTAWETGENLERVARYSMEDAKVTYELGKEFLPMEAQLSRLIGQSLWDVSRSSTGNLVEWFLLRKAYERNELAPNKPDEKELARRRQSYEGGYVKEPERGLWENIVYLDFRSLYPSIIITHNVSPDTLNREGCKEYDVAPQVGHRFCKDFPGFIPSLLGDLLEERQKIKKKMKATIDPIERKLLDYRQRAIKILANSYYGYYGYARARWYCKECAESVTAWGREYITMTIKEIEEKYGFKVIYSDTDGFFATIPGADAETVKKKAMEFLKYINAKLPGALELEYEGFYKRGFFVTKKKYAVIDEEGKITTRGLEIVRRDWSEIAKETQARVLEALLKDGDVEKAVRIVKEVTEKLSKYEVPPEKLVIHEQITRDLKDYKATGPHVAVAKRLAARGVKIRPGTVISYIVLKGSGRIGDRAIPFDEFDPTKHKYDAEYYIENQVLPAVERILRAFGYRKEDLRYQKTRQVGLSAWLKPKGT

SEQ ID NO: 1711 - protein, 774 aa, synthetic construct
MILDTDYITEDGKPVIRIFKKENGEFKIEYDRTFEPYFYALLKDDSAIEEVKKITAERHGTVVTVKRVEKVQKKFLGRPVEVWKLYFTHPQDVPAIADKIREHPAVIDIYEYDIPFAKMYLIDKGLVPMEGDEELKMLAFDIETLYHEGEEFAEGPILMISYADEEGARVITWKNVDLPYVDVVSTEREMIKRFLRVVKEKDPDVLITYNGDNFDFAYLKKRCEKLGINFALGRDGSEPKIQRMGDRFAVEVKGRIHFDLYPVIRRTINLPTYTLEAVYEAVFGQPKEKVYAEEITTAWETGENLERVARYSMEDAKVTYELGKEFLPMEAQLSRLIGQSLWDVSRSSTGNLVEWFLLRKAYERNELAPNKPDEKELARRRQSYEGGYVKEPERGLWENIVYLDFRSLYPSIIITHNVSPDTLNREGCKEYDVAPQVGHRFCKDFPGFIPSLLGDLLEERQKIKKKMKATIDPIERKLLDYRQRAIKILANSYYGYYGYARARWYCKECAESVTAWGREYITMTIKEIEEKYGFKVIYSDTDGFFATIPGADAETVKKKAMEFLKYINAKLPGALELEYEGFYKRGFFVTKKKYAVIDEEGKITTRGLEIVRRDWSEIAKETQARVLEALLKDGDVEKAVRIVKEVTEKLSKYEVPPEKLVIHEQITRDLKDYKATGPHVAVAKRLAARGVKIRPGTVISYIVLKGSGRIGDRAIPFDEFDPTKHKYDAEYYIENQVLPAVERILRAFGYRKEDLRYQKTRQVGLSAWLKPKGT

SEQ ID NO: 1712 - protein, 774 aa, synthetic construct
MILDTDYITEDGKPVIRIFKKENGEFKIEYDRTFEPYFYALLKDDSAIEEVKKITAERHGTVVTVKRVEKVQKKFLGRPVEVWKLYFTHPQDIPAIRDKIREHPAVIDIYEYDIPFAKRYLIDKGLVPMEGDEELKMLAFDIETLYHEGEEFAEGPILMISYADEEGARVITWKNVDLPYVDVVSTEREMIKRFLRVVKEKDPDVLITYNGDNFDFAYLKKRCEKLGINFALGRDGSEPKIQRMGDRFAVEVKGRIHFDLYPVIRRTINLPTYTLEAVYEAVFGQPKEKVYAEEITTAWETGENLERVARYSMEDAKVTYELGKEFLPMEAQLSRLIGQSLWDVSRSSTGNLVEWFLLRKAYERNELAPNKPDEKELARRRQSYEGGYVKEPERGLWENIVYLDFRSLYPSIIITHNVSPDTLNREGCKEYDVAPQVGHRFCKDFPGFIPSLLGDLLEERQKIKKKMKATIDPIERKLLDYRQRAIKILANSYYGYYGYARARWYCKECAESVTAWGREYITMTIKEIEEKYGFKVIYSDTDGFFATIPGADAETVKKKAMEFLKYINAKLPGALELEYEGFYKRGFFVTKKKYAVIDEEGKITTRGLEIVRRDWSEIAKETQARVLEALLKDGDVEKAVRIVKEVTEKLSKYEVPPEKLVIHEQITRDLKDYKATGPHVAVAKRLAARGVKIRPGTVISYIVLKGSGRIGDRAIPFDEFDPTKHKYDAEYYIENQVLPAVERILRAFGYRKEDLRYQKTRQVGLSAWLKPKGT

SEQ ID NO: 1713 - protein, 774 aa, synthetic construct
MILDTDYITEDGKPVIRIFKKENGEFKIEYDRTFEPYFYALLKDDSAIEEVKKITAERHGTVVTVKRVEKVQKKFLGRPVEVWKLYFTHPQDIPAIADKIREHPAVIDIYEYDIPFAKRYLIDKGLVPMEGDEELKMLAFDIETLYHEGEEFAEGPILMISYADEEGARVITWKNVDLPYVDVVSTEREMIKRFLRVVKEKDPDVLITYNGDNFDFAYLKKRCEKLGINFALGRDGSEPKIQRMGDRFAVEVKGRIHFDLYPVIRRTINLPTYTLEAVYEAVFGQPKEKVYAEEITTAWETGENLERVARYSMEDAKVTYELGKEFLPMEAQLSRLIGQSLWDVSRSSTGNLVEWFLLRKAYERNELAPNKPDEKELARRRQSYEGGYVKEPERGLWENIVYLDFRSLYPSIIITHNVSPDTLNREGCKEYDVAPQVGHRFCKDFPGFIPSLLGDLLEERQKIKKKMKATIDPIERKLLDYRQRAIKILANSYYGYYGYARARWYCKECAESVTAWGREYITMTIKEIEEKYGFKVIYSDTDGFFATIPGADAETVKKKAMEFLKYINAKLPGALELEYEGFYKRGFFVTKKKYAVIDEEGKITTRGLEIVRRDWSEIAKETQARVLEALLKDGDVEKAVRIVKEVTEKLSKYEVPPEKLVIHEQITRDLKDYKATGPHVAVAKRLAARGVKIRPGTVISYIVLKGSGRIGDRAIPFDEFDPTKHKYDAEYYIENQVLPAVERILRAFGYRKEDLRYQKTRQVGLSAWLKPKGT

SEQ ID NO: 1714 - protein, 774 aa, synthetic construct
MILDTDYITEDGKPVIRIFKKENGEFKIEYDRTFEPYFYALLKDDSAIEEVKKITAERHGTVVTVKRVEKVQKKFLGRPVEVWKLYFTHPQDIPAIADKIREHPAVIDIYEYDIPFAKMYLIDKGLVPMEGDEELKMLAFDIETLYHEGEEFAEGPILMISYADEEGARVITWKNVDLPYVDVVSTEREMIKRFLRVVKEKDPDVLITYNGDNFDFAYLKKRCEKLGINFALGRDGSEPKIQRMGDRFAVEVKGRIHFDLYPVIRRTINLPTYTLEAVYEAVFGQPKEKVYAEEITTAWETGENLERVARYSMEDAKVTYELGKEFLPMEAQLSRLIGQSLWDVSRSSTGNLVEWFLLRKAYERNELAPNKPDEKELARRRQSYEGGYVKEPERGLWENIVYLDFRSLYPSIIITHNVSPDTLNREGCKEYDVAPQVGHRFCKDFPGFIPSLLGDLLEERQKIKKKMKATIDPIERKLLDYRQRAIKILANSYYGYYGYARARWYCKECAESVTAWGREYITMTIKEIEEKYGFKVIYSDTDGFFATIPGADAETVKKKAMEFLKYINAKLPGALELEYEGFYKRGFFVTKKKYAVIDEEGKITTRGLEIVRRDWSEIAKETQARVLEALLKDGDVEKAVRIVKEVTEKLSKYEVPPEKLVIHEQITRDLKDYKATGPHVAVAKRLAARGVKIRPGTVISYIVLKGSGRIGDRAIPFDEFDPTKHKYDAEYYIENQVLPAVERILRAFGYRKEDLRYQKTRQVGLSAWLKPKGT

SEQ ID NO: 1715 - protein, 774 aa, synthetic construct
MILDTDYITEDGKPVIRIFKKENGEFKIEYDRTFEPYFYALLKDDSAIEEVKKITAERHGTVVTVKRVEKVQKKFLGRPVEVWKLYFTHPQDIPAIADKIREHPAVIDIYEYDIPFAKQYLIDKGLVPMEGDEELKMLAFDIETLYHEGEEFAEGPILMISYADEEGARVITWKNVDLPYVDVVSTEREMIKRFLRVVKEKDPDVLITYNGDNFDFAYLKKRCEKLGINFALGRDGSEPKIQRMGDRFAVEVKGRIHFDLYPVIRRTINLPTYTLEAVYEAVFGQPKEKVYAEEITTAWETGENLERVARYSMEDAKVTYELGKEFLPMEAQLSRLIGQSLWDVSRSSTGNLVEWFLLRKAYERNELAPNKPDEKELARRRQSYEGGYVKEPERGLWENIVYLDFRSLYPSIIITHNVSPDTLNREGCKEYDVAPQVGHRFCKDFPGFIPSLLGDLLEERQKIKKKMKATIDPIERKLLDYRQRAIKILANSYYGYYGYARARWYCKECAESVTAWGREYITMTIKEIEEKYGFKVIYSDTDGFFATIPGADAETVKKKAMEFLKYINAKLPGALELEYEGFYKRGFFVTKKKYAVIDEEGKITTRGLEIVRRDWSEIAKETQARVLEALLKDGDVEKAVRIVKEVTEKLSKYEVPPEKLVIHEQITRDLKDYKATGPHVAVAKRLAARGVKIRPGTVISYIVLKGSGRIGDRAIPFDEFDPTKHKYDAEYYIENQVLPAVERILRAFGYRKEDLRYQKTRQVGLSAWLKPKGT

SEQ ID NO: 1716 - protein, 774 aa, synthetic construct
MILDTDYITEDGKPVIRIFKKENGEFKIEYDRTFEPYFYALLKDDSAIEEVKKITAERHGTVVTVKRVEKVQKKFLGRPVEVWKLYFTHPQDIPAIFDKIREHPAVIDIYEYDIPFAKRYLIDKGLVPMEGDEELKMLAFDIETLYHEGEEFAEGPILMISYADEEGARVITWKNVDLPYVDVVSTEREMIKRFLRVVKEKDPDVLITYNGDNFDFAYLKKRCEKLGINFALGRDGSEPKIQRMGDRFAVEVKGRIHFDLYPVIRRTINLPTYTLEAVYEAVFGQPKEKVYAEEITTAWETGENLERVARYSMEDAKVTYELGKEFLPMEAQLSRLIGQSLWDVSRSSTGNLVEWFLLRKAYERNELAPNKPDEKELARRRQSYEGGYVKEPERGLWENIVYLDFRSLYPSIIITHNVSPDTLNREGCKEYDVAPQVGHRFCKDFPGFIPSLLGDLLEERQKIKKKMKATIDPIERKLLDYRQRAIKILANSYYGYYGYARARWYCKECAESVTAWGREYITMTIKEIEEKYGFKVIYSDTDGFFATIPGADAETVKKKAMEFLKYINAKLPGALELEYEGFYKRGFFVTKKKYAVIDEEGKITTRGLEIVRRDWSEIAKETQARVLEALLKDGDVEKAVRIVKEVTEKLSKYEVPPEKLVIHEQITRDLKDYKATGPHVAVAKRLAARGVKIRPGTVISYIVLKGSGRIGDRAIPFDEFDPTKHKYDAEYYIENQVLPAVERILRAFGYRKEDLRYQKTRQVGLSAWLKPKGT

SEQ ID NO: 1717 - protein, 774 aa, synthetic construct
MILDTDYITEDGKPVIRIFKKENGEFKIEYDRTFEPYFYALLKDDSAIEEVKKITAERHGTVVTVKRVEKVQKKFLGRPVEVWKLYFTHPQDIPAIFDKIREHPAVIDIYEYDIPFAKQYLIDKGLVPMEGDEELKMLAFDIETLYHEGEEFAEGPILMISYADEEGARVITWKNVDLPYVDVVSTEREMIKRFLRVVKEKDPDVLITYNGDNFDFAYLKKRCEKLGINFALGRDGSEPKIQRMGDRFAVEVKGRIHFDLYPVIRRTINLPTYTLEAVYEAVFGQPKEKVYAEEITTAWETGENLERVARYSMEDAKVTYELGKEFLPMEAQLSRLIGQSLWDVSRSSTGNLVEWFLLRKAYERNELAPNKPDEKELARRRQSYEGGYVKEPERGLWENIVYLDFRSLYPSIIITHNVSPDTLNREGCKEYDVAPQVGHRFCKDFPGFIPSLLGDLLEERQKIKKKMKATIDPIERKLLDYRQRAIKILANSYYGYYGYARARWYCKECAESVTAWGREYITMTIKEIEEKYGFKVIYSDTDGFFATIPGADAETVKKKAMEFLKYINAKLPGALELEYEGFYKRGFFVTKKKYAVIDEEGKITTRGLEIVRRDWSEIAKETQARVLEALLKDGDVEKAVRIVKEVTEKLSKYEVPPEKLVIHEQITRDLKDYKATGPHVAVAKRLAARGVKIRPGTVISYIVLKGSGRIGDRAIPFDEFDPTKHKYDAEYYIENQVLPAVERILRAFGYRKEDLRYQKTRQVGLSAWLKPKGT

SEQ ID NO: 1718 - protein, 774 aa, synthetic construct
MILDTDYITEDGKPVIRIFKKENGEFKIEYDRTFEPYFYALLKDDSAIEEVKKITAERHGTVVTVKRVEKVQKKFLGRPVEVWKLYFTHPQDIPAIHDKIREHPAVIDIYEYDIPFAKRYLIDKGLVPMEGDEELKMLAFDIETLYHEGEEFAEGPILMISYADEEGARVITWKNVDLPYVDVVSTEREMIKRFLRVVKEKDPDVLITYNGDNFDFAYLKKRCEKLGINFALGRDGSEPKIQRMGDRFAVEVKGRIHFDLYPVIRRTINLPTYTLEAVYEAVFGQPKEKVYAEEITTAWETGENLERVARYSMEDAKVTYELGKEFLPMEAQLSRLIGQSLWDVSRSSTGNLVEWFLLRKAYERNELAPNKPDEKELARRRQSYEGGYVKEPERGLWENIVYLDFRSLYPSIIITHNVSPDTLNREGCKEYDVAPQVGHRFCKDFPGFIPSLLGDLLEERQKIKKKMKATIDPIERKLLDYRQRAIKILANSYYGYYGYARARWYCKECAESVTAWGREYITMTIKEIEEKYGFKVIYSDTDGFFATIPGADAETVKKKAMEFLKYINAKLPGALELEYEGFYKRGFFVTKKKYAVIDEEGKITTRGLEIVRRDWSEIAKETQARVLEALLKDGDVEKAVRIVKEVTEKLSKYEVPPEKLVIHEQITRDLKDYKATGPHVAVAKRLAARGVKIRPGTVISYIVLKGSGRIGDRAIPFDEFDPTKHKYDAEYYIENQVLPAVERILRAFGYRKEDLRYQKTRQVGLSAWLKPKGT

SEQ ID NO: 1719 - protein, 774 aa, synthetic construct
MILDTDYITEDGKPVIRIFKKENGEFKIEYDRTFEPYFYALLKDDSAIEEVKKITAERHGTVVTVKRVEKVQKKFLGRPVEVWKLYFTHPQDIPAIWDKIREHPAVIDIYEYDIPFAKRYLIDKGLVPMEGDEELKMLAFDIETLYHEGEEFAEGPILMISYADEEGARVITWKNVDLPYVDVVSTEREMIKRFLRVVKEKDPDVLITYNGDNFDFAYLKKRCEKLGINFALGRDGSEPKIQRMGDRFAVEVKGRIHFDLYPVIRRTINLPTYTLEAVYEAVFGQPKEKVYAEEITTAWETGENLERVARYSMEDAKVTYELGKEFLPMEAQLSRLIGQSLWDVSRSSTGNLVEWFLLRKAYERNELAPNKPDEKELARRRQSYEGGYVKEPERGLWENIVYLDFRSLYPSIIITHNVSPDTLNREGCKEYDVAPQVGHRFCKDFPGFIPSLLGDLLEERQKIKKKMKATIDPIERKLLDYRQRAIKILANSYYGYYGYARARWYCKECAESVTAWGREYITMTIKEIEEKYGFKVIYSDTDGFFATIPGADAETVKKKAMEFLKYINAKLPGALELEYEGFYKRGFFVTKKKYAVIDEEGKITTRGLEIVRRDWSEIAKETQARVLEALLKDGDVEKAVRIVKEVTEKLSKYEVPPEKLVIHEQITRDLKDYKATGPHVAVAKRLAARGVKIRPGTVISYIVLKGSGRIGDRAIPFDEFDPTKHKYDAEYYIENQVLPAVERILRAFGYRKEDLRYQKTRQVGLSAWLKPKGT

SEQ ID NO: 1720 - protein, 774 aa, synthetic construct
MILDTDYITEDGKPVIRIFKKENGEFKIEYDRTFEPYFYALLKDDSAIEEVKKITAERHGTVVTVKRVEKVQKKFLGRPVEVWKLYFTHPQDIPAIRDKIREHPAVIDIYEYDIPFAKQYLIDKGLVPMEGDEELKMLAFDIETLYHEGEEFAEGPILMISYADEEGARVITWKNVDLPYVDVVSTEREMIKRFLRVVKEKDPDVLITYNGDNFDFAYLKKRCEKLGINFALGRDGSEPKIQRMGDRFAVEVKGRIHFDLYPVIRRTINLPTYTLEAVYEAVFGQPKEKVYAEEITTAWETGENLERVARYSMEDAKVTYELGKEFLPMEAQLSRLIGQSLWDVSRSSTGNLVEWFLLRKAYERNELAPNKPDEKELARRRQSYEGGYVKEPERGLWENIVYLDFRSLYPSIIITHNVSPDTLNREGCKEYDVAPQVGHRFCKDFPGFIPSLLGDLLEERQKIKKKMKATIDPIERKLLDYRQRAIKILANSYYGYYGYARARWYCKECAESVTAWGREYITMTIKEIEEKYGFKVIYSDTDGFFATIPGADAETVKKKAMEFLKYINAKLPGALELEYEGFYKRGFFVTKKKYAVIDEEGKITTRGLEIVRRDWSEIAKETQARVLEALLKDGDVEKAVRIVKEVTEKLSKYEVPPEKLVIHEQITRDLKDYKATGPHVAVAKRLAARGVKIRPGTVISYIVLKGSGRIGDRAIPFDEFDPTKHKYDAEYYIENQVLPAVERILRAFGYRKEDLRYQKTRQVGLSAWLKPKGT

SEQ ID NO: 1721 - protein, 774 aa, synthetic construct
MILDTDYITEDGKPVIRIFKKENGEFKIEYDRTFEPYFYALLKDDSAIEEVKKITAERHGTVVTVKRVEKVQKKFLGRPVEVWKLYFTHPQDIPAIRDKIREHPAVIDIYEYDIPFAKYYLIDKGLVPMEGDEELKMLAFDIETLYHEGEEFAEGPILMISYADEEGARVITWKNVDLPYVDVVSTEREMIKRFLRVVKEKDPDVLITYNGDNFDFAYLKKRCEKLGINFALGRDGSEPKIQRMGDRFAVEVKGRIHFDLYPVIRRTINLPTYTLEAVYEAVFGQPKEKVYAEEITTAWETGENLERVARYSMEDAKVTYELGKEFLPMEAQLSRLIGQSLWDVSRSSTGNLVEWFLLRKAYERNELAPNKPDEKELARRRQSYEGGYVKEPERGLWENIVYLDFRSLYPSIIITHNVSPDTLNREGCKEYDVAPQVGHRFCKDFPGFIPSLLGDLLEERQKIKKKMKATIDPIERKLLDYRQRAIKILANSYYGYYGYARARWYCKECAESVTAWGREYITMTIKEIEEKYGFKVIYSDTDGFFATIPGADAETVKKKAMEFLKYINAKLPGALELEYEGFYKRGFFVTKKKYAVIDEEGKITTRGLEIVRRDWSEIAKETQARVLEALLKDGDVEKAVRIVKEVTEKLSKYEVPPEKLVIHEQITRDLKDYKATGPHVAVAKRLAARGVKIRPGTVISYIVLKGSGRIGDRAIPFDEFDPTKHKYDAEYYIENQVLPAVERILRAFGYRKEDLRYQKTRQVGLSAWLKPKGT

SEQ ID NO: 1722 - protein, 774 aa, synthetic construct
MILDTDYITEDGKPVIRIFKKENGEFKIEYDRTFEPYFYALLKDDSAIEEVKKITAERHGTVVTVKRVEKVQKKFLGRPVEVWKLYFTHPQDKPAIADKIREHPAVIDIYEYDIPFAKRYLIDKGLVPMEGDEELKMLAFDIETLYHEGEEFAEGPILMISYADEEGARVITWKNVDLPYVDVVSTEREMIKRFLRVVKEKDPDVLITYNGDNFDFAYLKKRCEKLGINFALGRDGSEPKIQRMGDRFAVEVKGRIHFDLYPVIRRTINLPTYTLEAVYEAVFGQPKEKVYAEEITTAWETGENLERVARYSMEDAKVTYELGKEFLPMEAQLSRLIGQSLWDVSRSSTGNLVEWFLLRKAYERNELAPNKPDEKELARRRQSYEGGYVKEPERGLWENIVYLDFRSLYPSIIITHNVSPDTLNREGCKEYDVAPQVGHRFCKDFPGFIPSLLGDLLEERQKIKKKMKATIDPIERKLLDYRQRAIKILANSYYGYYGYARARWYCKECAESVTAWGREYITMTIKEIEEKYGFKVIYSDTDGFFATIPGADAETVKKKAMEFLKYINAKLPGALELEYEGFYKRGFFVTKKKYAVIDEEGKITTRGLEIVRRDWSEIAKETQARVLEALLKDGDVEKAVRIVKEVTEKLSKYEVPPEKLVIHEQITRDLKDYKATGPHVAVAKRLAARGVKIRPGTVISYIVLKGSGRIGDRAIPFDEFDPTKHKYDAEYYIENQVLPAVERILRAFGYRKEDLRYQKTRQVGLSAWLKPKGT

SEQ ID NO: 1723 - protein, 774 aa, synthetic construct
MILDTDYITEDGKPVIRIFKKENGEFKIEYDRTFEPYFYALLKDDSAIEEVKKITAERHGTVVTVKRVEKVQKKFLGRPVEVWKLYFTHPQDKPAIADKIREHPAVIDIYEYDIPFAKMYLIDKGLVPMEGDEELKMLAFDIETLYHEGEEFAEGPILMISYADEEGARVITWKNVDLPYVDVVSTEREMIKRFLRVVKEKDPDVLITYNGDNFDFAYLKKRCEKLGINFALGRDGSEPKIQRMGDRFAVEVKGRIHFDLYPVIRRTINLPTYTLEAVYEAVFGQPKEKVYAEEITTAWETGENLERVARYSMEDAKVTYELGKEFLPMEAQLSRLIGQSLWDVSRSSTGNLVEWFLLRKAYERNELAPNKPDEKELARRRQSYEGGYVKEPERGLWENIVYLDFRSLYPSIIITHNVSPDTLNREGCKEYDVAPQVGHRFCKDFPGFIPSLLGDLLEERQKIKKKMKATIDPIERKLLDYRQRAIKILANSYYGYYGYARARWYCKECAESVTAWGREYITMTIKEIEEKYGFKVIYSDTDGFFATIPGADAETVKKKAMEFLKYINAKLPGALELEYEGFYKRGFFVTKKKYAVIDEEGKITTRGLEIVRRDWSEIAKETQARVLEALLKDGDVEKAVRIVKEVTEKLSKYEVPPEKLVIHEQITRDLKDYKATGPHVAVAKRLAARGVKIRPGTVISYIVLKGSGRIGDRAIPFDEFDPTKHKYDAEYYIENQVLPAVERILRAFGYRKEDLRYQKTRQVGLSAWLKPKGT

SEQ ID NO: 1724 - protein, 774 aa, synthetic construct
MILDTDYITEDGKPVIRIFKKENGEFKIEYDRTFEPYFYALLKDDSAIEEVKKITAERHGTVVTVKRVEKVQKKFLGRPVEVWKLYFTHPQDKPAIFDKIREHPAVIDIYEYDIPFAKRYLIDKGLVPMEGDEELKMLAFDIETLYHEGEEFAEGPILMISYADEEGARVITWKNVDLPYVDVVSTEREMIKRFLRVVKEKDPDVLITYNGDNFDFAYLKKRCEKLGINFALGRDGSEPKIQRMGDRFAVEVKGRIHFDLYPVIRRTINLPTYTLEAVYEAVFGQPKEKVYAEEITTAWETGENLERVARYSMEDAKVTYELGKEFLPMEAQLSRLIGQSLWDVSRSSTGNLVEWFLLRKAYERNELAPNKPDEKELARRRQSYEGGYVKEPERGLWENIVYLDFRSLYPSIIITHNVSPDTLNREGCKEYDVAPQVGHRFCKDFPGFIPSLLGDLLEERQKIKKKMKATIDPIERKLLDYRQRAIKILANSYYGYYGYARARWYCKECAESVTAWGREYITMTIKEIEEKYGFKVIYSDTDGFFATIPGADAETVKKKAMEFLKYINAKLPGALELEYEGFYKRGFFVTKKKYAVIDEEGKITTRGLEIVRRDWSEIAKETQARVLEALLKDGDVEKAVRIVKEVTEKLSKYEVPPEKLVIHEQITRDLKDYKATGPHVAVAKRLAARGVKIRPGTVISYIVLKGSGRIGDRAIPFDEFDPTKHKYDAEYYIENQVLPAVERILRAFGYRKEDLRYQKTRQVGLSAWLKPKGT

SEQ ID NO: 1725 - protein, 774 aa, synthetic construct
MILDTDYITEDGKPVIRIFKKENGEFKIEYDRTFEPYFYALLKDDSAIEEVKKITAERHGTVVTVKRVEKVQKKFLGRPVEVWKLYFTHPQDKPAIFDKIREHPAVIDIYEYDIPFAKQYLIDKGLVPMEGDEELKMLAFDIETLYHEGEEFAEGPILMISYADEEGARVITWKNVDLPYVDVVSTEREMIKRFLRVVKEKDPDVLITYNGDNFDFAYLKKRCEKLGINFALGRDGSEPKIQRMGDRFAVEVKGRIHFDLYPVIRRTINLPTYTLEAVYEAVFGQPKEKVYAEEITTAWETGENLERVARYSMEDAKVTYELGKEFLPMEAQLSRLIGQSLWDVSRSSTGNLVEWFLLRKAYERNELAPNKPDEKELARRRQSYEGGYVKEPERGLWENIVYLDFRSLYPSIIITHNVSPDTLNREGCKEYDVAPQVGHRFCKDFPGFIPSLLGDLLEERQKIKKKMKATIDPIERKLLDYRQRAIKILANSYYGYYGYARARWYCKECAESVTAWGREYITMTIKEIEEKYGFKVIYSDTDGFFATIPGADAETVKKKAMEFLKYINAKLPGALELEYEGFYKRGFFVTKKKYAVIDEEGKITTRGLEIVRRDWSEIAKETQARVLEALLKDGDVEKAVRIVKEVTEKLSKYEVPPEKLVIHEQITRDLKDYKATGPHVAVAKRLAARGVKIRPGTVISYIVLKGSGRIGDRAIPFDEFDPTKHKYDAEYYIENQVLPAVERILRAFGYRKEDLRYQKTRQVGLSAWLKPKGT

SEQ ID NO: 1726 - protein, 774 aa, synthetic construct
MILDTDYITEDGKPVIRIFKKENGEFKIEYDRTFEPYFYALLKDDSAIEEVKKITAERHGTVVTVKRVEKVQKKFLGRPVEVWKLYFTHPQDKPAIHDKIREHPAVIDIYEYDIPFAKRYLIDKGLVPMEGDEELKMLAFDIETLYHEGEEFAEGPILMISYADEEGARVITWKNVDLPYVDVVSTEREMIKRFLRVVKEKDPDVLITYNGDNFDFAYLKKRCEKLGINFALGRDGSEPKIQRMGDRFAVEVKGRIHFDLYPVIRRTINLPTYTLEAVYEAVFGQPKEKVYAEEITTAWETGENLERVARYSMEDAKVTYELGKEFLPMEAQLSRLIGQSLWDVSRSSTGNLVEWFLLRKAYERNELAPNKPDEKELARRRQSYEGGYVKEPERGLWENIVYLDFRSLYPSIIITHNVSPDTLNREGCKEYDVAPQVGHRFCKDFPGFIPSLLGDLLEERQKIKKKMKATIDPIERKLLDYRQRAIKILANSYYGYYGYARARWYCKECAESVTAWGREYITMTIKEIEEKYGFKVIYSDTDGFFATIPGADAETVKKKAMEFLKYINAKLPGALELEYEGFYKRGFFVTKKKYAVIDEEGKITTRGLEIVRRDWSEIAKETQARVLEALLKDGDVEKAVRIVKEVTEKLSKYEVPPEKLVIHEQITRDLKDYKATGPHVAVAKRLAARGVKIRPGTVISYIVLKGSGRIGDRAIPFDEFDPTKHKYDAEYYIENQVLPAVERILRAFGYRKEDLRYQKTRQVGLSAWLKPKGT

SEQ ID NO: 1727 - protein, 774 aa, synthetic construct
MILDTDYITEDGKPVIRIFKKENGEFKIEYDRTFEPYFYALLKDDSAIEEVKKITAERHGTVVTVKRVEKVQKKFLGRPVEVWKLYFTHPQDKPAIWDKIREHPAVIDIYEYDIPFAKRYLIDKGLVPMEGDEELKMLAFDIETLYHEGEEFAEGPILMISYADEEGARVITWKNVDLPYVDVVSTEREMIKRFLRVVKEKDPDVLITYNGDNFDFAYLKKRCEKLGINFALGRDGSEPKIQRMGDRFAVEVKGRIHFDLYPVIRRTINLPTYTLEAVYEAVFGQPKEKVYAEEITTAWETGENLERVARYSMEDAKVTYELGKEFLPMEAQLSRLIGQSLWDVSRSSTGNLVEWFLLRKAYERNELAPNKPDEKELARRRQSYEGGYVKEPERGLWENIVYLDFRSLYPSIIITHNVSPDTLNREGCKEYDVAPQVGHRFCKDFPGFIPSLLGDLLEERQKIKKKMKATIDPIERKLLDYRQRAIKILANSYYGYYGYARARWYCKECAESVTAWGREYITMTIKEIEEKYGFKVIYSDTDGFFATIPGADAETVKKKAMEFLKYINAKLPGALELEYEGFYKRGFFVTKKKYAVIDEEGKITTRGLEIVRRDWSEIAKETQARVLEALLKDGDVEKAVRIVKEVTEKLSKYEVPPEKLVIHEQITRDLKDYKATGPHVAVAKRLAARGVKIRPGTVISYIVLKGSGRIGDRAIPFDEFDPTKHKYDAEYYIENQVLPAVERILRAFGYRKEDLRYQKTRQVGLSAWLKPKGT

SEQ ID NO: 1728 - protein, 774 aa, synthetic construct
MILDTDYITEDGKPVIRIFKKENGEFKIEYDRTFEPYFYALLKDDSAIEEVKKITAERHGTVVTVKRVEKVQKKFLGRPVEVWKLYFTHPQDKPAIRDKIREHPAVIDIYEYDIPFAKMYLIDKGLVPMEGDEELKMLAFDIETLYHEGEEFAEGPILMISYADEEGARVITWKNVDLPYVDVVSTEREMIKRFLRVVKEKDPDVLITYNGDNFDFAYLKKRCEKLGINFALGRDGSEPKIQRMGDRFAVEVKGRIHFDLYPVIRRTINLPTYTLEAVYEAVFGQPKEKVYAEEITTAWETGENLERVARYSMEDAKVTYELGKEFLPMEAQLSRLIGQSLWDVSRSSTGNLVEWFLLRKAYERNELAPNKPDEKELARRRQSYEGGYVKEPERGLWENIVYLDFRSLYPSIIITHNVSPDTLNREGCKEYDVAPQVGHRFCKDFPGFIPSLLGDLLEERQKIKKKMKATIDPIERKLLDYRQRAIKILANSYYGYYGYARARWYCKECAESVTAWGREYITMTIKEIEEKYGFKVIYSDTDGFFATIPGADAETVKKKAMEFLKYINAKLPGALELEYEGFYKRGFFVTKKKYAVIDEEGKITTRGLEIVRRDWSEIAKETQARVLEALLKDGDVEKAVRIVKEVTEKLSKYEVPPEKLVIHEQITRDLKDYKATGPHVAVAKRLAARGVKIRPGTVISYIVLKGSGRIGDRAIPFDEFDPTKHKYDAEYYIENQVLPAVERILRAFGYRKEDLRYQKTRQVGLSAWLKPKGT

SEQ ID NO: 1729 - protein, 774 aa, synthetic construct
MILDTDYITEDGKPVIRIFKKENGEFKIEYDRTFEPYFYALLKDDSAIEEVKKITAERHGTVVTVKRVEKVQKKFLGRPVEVWKLYFTHPQDKPAIRDKIREHPAVIDIYEYDIPFAKQYLIDKGLVPMEGDEELKMLAFDIETLYHEGEEFAEGPILMISYADEEGARVITWKNVDLPYVDVVSTEREMIKRFLRVVKEKDPDVLITYNGDNFDFAYLKKRCEKLGINFALGRDGSEPKIQRMGDRFAVEVKGRIHFDLYPVIRRTINLPTYTLEAVYEAVFGQPKEKVYAEEITTAWETGENLERVARYSMEDAKVTYELGKEFLPMEAQLSRLIGQSLWDVSRSSTGNLVEWFLLRKAYERNELAPNKPDEKELARRRQSYEGGYVKEPERGLWENIVYLDFRSLYPSIIITHNVSPDTLNREGCKEYDVAPQVGHRFCKDFPGFIPSLLGDLLEERQKIKKKMKATIDPIERKLLDYRQRAIKILANSYYGYYGYARARWYCKECAESVTAWGREYITMTIKEIEEKYGFKVIYSDTDGFFATIPGADAETVKKKAMEFLKYINAKLPGALELEYEGFYKRGFFVTKKKYAVIDEEGKITTRGLEIVRRDWSEIAKETQARVLEALLKDGDVEKAVRIVKEVTEKLSKYEVPPEKLVIHEQITRDLKDYKATGPHVAVAKRLAARGVKIRPGTVISYIVLKGSGRIGDRAIPFDEFDPTKHKYDAEYYIENQVLPAVERILRAFGYRKEDLRYQKTRQVGLSAWLKPKGT

SEQ ID NO: 1730 - protein, 774 aa, synthetic construct
MILDTDYITEDGKPVIRIFKKENGEFKIEYDRTFEPYFYALLKDDSAIEEVKKITAERHGTVVTVKRVEKVQKKFLGRPVEVWKLYFTHPQDQPAIADKIREHPAVIDIYEYDIPFAKRYLIDKGLVPMEGDEELKMLAFDIETLYHEGEEFAEGPILMISYADEEGARVITWKNVDLPYVDVVSTEREMIKRFLRVVKEKDPDVLITYNGDNFDFAYLKKRCEKLGINFALGRDGSEPKIQRMGDRFAVEVKGRIHFDLYPVIRRTINLPTYTLEAVYEAVFGQPKEKVYAEEITTAWETGENLERVARYSMEDAKVTYELGKEFLPMEAQLSRLIGQSLWDVSRSSTGNLVEWFLLRKAYERNELAPNKPDEKELARRRQSYEGGYVKEPERGLWENIVYLDFRSLYPSIIITHNVSPDTLNREGCKEYDVAPQVGHRFCKDFPGFIPSLLGDLLEERQKIKKKMKATIDPIERKLLDYRQRAIKILANSYYGYYGYARARWYCKECAESVTAWGREYITMTIKEIEEKYGFKVIYSDTDGFFATIPGADAETVKKKAMEFLKYINAKLPGALELEYEGFYKRGFFVTKKKYAVIDEEGKITTRGLEIVRRDWSEIAKETQARVLEALLKDGDVEKAVRIVKEVTEKLSKYEVPPEKLVIHEQITRDLKDYKATGPHVAVAKRLAARGVKIRPGTVISYIVLKGSGRIGDRAIPFDEFDPTKHKYDAEYYIENQVLPAVERILRAFGYRKEDLRYQKTRQVGLSAWLKPKGT

SEQ ID NO: 1731 - protein, 774 aa, synthetic construct
MILDTDYITEDGKPVIRIFKKENGEFKIEYDRTFEPYFYALLKDDSAIEEVKKITAERHGTVVTVKRVEKVQKKFLGRPVEVWKLYFTHPQDQPAIHDKIREHPAVIDIYEYDIPFAKRYLIDKGLVPMEGDEELKMLAFDIETLYHEGEEFAEGPILMISYADEEGARVITWKNVDLPYVDVVSTEREMIKRFLRVVKEKDPDVLITYNGDNFDFAYLKKRCEKLGINFALGRDGSEPKIQRMGDRFAVEVKGRIHFDLYPVIRRTINLPTYTLEAVYEAVFGQPKEKVYAEEITTAWETGENLERVARYSMEDAKVTYELGKEFLPMEAQLSRLIGQSLWDVSRSSTGNLVEWFLLRKAYERNELAPNKPDEKELARRRQSYEGGYVKEPERGLWENIVYLDFRSLYPSIIITHNVSPDTLNREGCKEYDVAPQVGHRFCKDFPGFIPSLLGDLLEERQKIKKKMKATIDPIERKLLDYRQRAIKILANSYYGYYGYARARWYCKECAESVTAWGREYITMTIKEIEEKYGFKVIYSDTDGFFATIPGADAETVKKKAMEFLKYINAKLPGALELEYEGFYKRGFFVTKKKYAVIDEEGKITTRGLEIVRRDWSEIAKETQARVLEALLKDGDVEKAVRIVKEVTEKLSKYEVPPEKLVIHEQITRDLKDYKATGPHVAVAKRLAARGVKIRPGTVISYIVLKGSGRIGDRAIPFDEFDPTKHKYDAEYYIENQVLPAVERILRAFGYRKEDLRYQKTRQVGLSAWLKPKGT

SEQ ID NO: 1732 - protein, 774 aa, synthetic construct
MILDTDYITEDGKPVIRIFKKENGEFKIEYDRTFEPYFYALLKDDSAIEEVKKITAERHGTVVTVKRVEKVQKKFLGRPVEVWKLYFTHPQDQPAIPDKIREHPAVIDIYEYDIPFAKRYLIDKGLVPMEGDEELKMLAFDIETLYHEGEEFAEGPILMISYADEEGARVITWKNVDLPYVDVVSTEREMIKRFLRVVKEKDPDVLITYNGDNFDFAYLKKRCEKLGINFALGRDGSEPKIQRMGDRFAVEVKGRIHFDLYPVIRRTINLPTYTLEAVYEAVFGQPKEKVYAEEITTAWETGENLERVARYSMEDAKVTYELGKEFLPMEAQLSRLIGQSLWDVSRSSTGNLVEWFLLRKAYERNELAPNKPDEKELARRRQSYEGGYVKEPERGLWENIVYLDFRSLYPSIIITHNVSPDTLNREGCKEYDVAPQVGHRFCKDFPGFIPSLLGDLLEERQKIKKKMKATIDPIERKLLDYRQRAIKILANSYYGYYGYARARWYCKECAESVTAWGREYITMTIKEIEEKYGFKVIYSDTDGFFATIPGADAETVKKKAMEFLKYINAKLPGALELEYEGFYKRGFFVTKKKYAVIDEEGKITTRGLEIVRRDWSEIAKETQARVLEALLKDGDVEKAVRIVKEVTEKLSKYEVPPEKLVIHEQITRDLKDYKATGPHVAVAKRLAARGVKIRPGTVISYIVLKGSGRIGDRAIPFDEFDPTKHKYDAEYYIENQVLPAVERILRAFGYRKEDLRYQKTRQVGLSAWLKPKGT

SEQ ID NO: 1733 - protein, 774 aa, synthetic construct
MILDTDYITEDGKPVIRIFKKENGEFKIEYDRTFEPYFYALLKDDSAIEEVKKITAERHGTVVTVKRVEKVQKKFLGRPVEVWKLYFTHPQDQPAIWDKIREHPAVIDIYEYDIPFAKRYLIDKGLVPMEGDEELKMLAFDIETLYHEGEEFAEGPILMISYADEEGARVITWKNVDLPYVDVVSTEREMIKRFLRVVKEKDPDVLITYNGDNFDFAYLKKRCEKLGINFALGRDGSEPKIQRMGDRFAVEVKGRIHFDLYPVIRRTINLPTYTLEAVYEAVFGQPKEKVYAEEITTAWETGENLERVARYSMEDAKVTYELGKEFLPMEAQLSRLIGQSLWDVSRSSTGNLVEWFLLRKAYERNELAPNKPDEKELARRRQSYEGGYVKEPERGLWENIVYLDFRSLYPSIIITHNVSPDTLNREGCKEYDVAPQVGHRFCKDFPGFIPSLLGDLLEERQKIKKKMKATIDPIERKLLDYRQRAIKILANSYYGYYGYARARWYCKECAESVTAWGREYITMTIKEIEEKYGFKVIYSDTDGFFATIPGADAETVKKKAMEFLKYINAKLPGALELEYEGFYKRGFFVTKKKYAVIDEEGKITTRGLEIVRRDWSEIAKETQARVLEALLKDGDVEKAVRIVKEVTEKLSKYEVPPEKLVIHEQITRDLKDYKATGPHVAVAKRLAARGVKIRPGTVISYIVLKGSGRIGDRAIPFDEFDPTKHKYDAEYYIENQVLPAVERILRAFGYRKEDLRYQKTRQVGLSAWLKPKGT

SEQ ID NO: 1734 - protein, 774 aa, synthetic construct
MILDTDYITEDGKPVIRIFKKENGEFKIEYDRTFEPYFYALLKDDSAIEEVKKITAERHGTVVTVKRVEKVQKKFLGRPVEVWKLYFTHPQDRPAIADKIREHPAVIDIYEYDIPFAKRYLIDKGLVPMEGDEELKMLAFDIETLYHEGEEFAEGPILMISYADEEGARVITWKNVDLPYVDVVSTEREMIKRFLRVVKEKDPDVLITYNGDNFDFAYLKKRCEKLGINFALGRDGSEPKIQRMGDRFAVEVKGRIHFDLYPVIRRTINLPTYTLEAVYEAVFGQPKEKVYAEEITTAWETGENLERVARYSMEDAKVTYELGKEFLPMEAQLSRLIGQSLWDVSRSSTGNLVEWFLLRKAYERNELAPNKPDEKELARRRQSYEGGYVKEPERGLWENIVYLDFRSLYPSIIITHNVSPDTLNREGCKEYDVAPQVGHRFCKDFPGFIPSLLGDLLEERQKIKKKMKATIDPIERKLLDYRQRAIKILANSYYGYYGYARARWYCKECAESVTAWGREYITMTIKEIEEKYGFKVIYSDTDGFFATIPGADAETVKKKAMEFLKYINAKLPGALELEYEGFYKRGFFVTKKKYAVIDEEGKITTRGLEIVRRDWSEIAKETQARVLEALLKDGDVEKAVRIVKEVTEKLSKYEVPPEKLVIHEQITRDLKDYKATGPHVAVAKRLAARGVKIRPGTVISYIVLKGSGRIGDRAIPFDEFDPTKHKYDAEYYIENQVLPAVERILRAFGYRKEDLRYQKTRQVGLSAWLKPKGT

SEQ ID NO: 1735 - protein, 774 aa, synthetic construct
MILDTDYITEDGKPVIRIFKKENGEFKIEYDRTFEPYFYALLKDDSAIEEVKKITAERHGTVVTVKRVEKVQKKFLGRPVEVWKLYFTHPQDRPAIADKIREHPAVIDIYEYDIPFAKEYLIDKGLVPMEGDEELKMLAFDIETLYHEGEEFAEGPILMISYADEEGARVITWKNVDLPYVDVVSTEREMIKRFLRVVKEKDPDVLITYNGDNFDFAYLKKRCEKLGINFALGRDGSEPKIQRMGDRFAVEVKGRIHFDLYPVIRRTINLPTYTLEAVYEAVFGQPKEKVYAEEITTAWETGENLERVARYSMEDAKVTYELGKEFLPMEAQLSRLIGQSLWDVSRSSTGNLVEWFLLRKAYERNELAPNKPDEKELARRRQSYEGGYVKEPERGLWENIVYLDFRSLYPSIIITHNVSPDTLNREGCKEYDVAPQVGHRFCKDFPGFIPSLLGDLLEERQKIKKKMKATIDPIERKLLDYRQRAIKILANSYYGYYGYARARWYCKECAESVTAWGREYITMTIKEIEEKYGFKVIYSDTDGFFATIPGADAETVKKKAMEFLKYINAKLPGALELEYEGFYKRGFFVTKKKYAVIDEEGKITTRGLEIVRRDWSEIAKETQARVLEALLKDGDVEKAVRIVKEVTEKLSKYEVPPEKLVIHEQITRDLKDYKATGPHVAVAKRLAARGVKIRPGTVISYIVLKGSGRIGDRAIPFDEFDPTKHKYDAEYYIENQVLPAVERILRAFGYRKEDLRYQKTRQVGLSAWLKPKGT

SEQ ID NO: 1736 - protein, 774 aa, synthetic construct
MILDTDYITEDGKPVIRIFKKENGEFKIEYDRTFEPYFYALLKDDSAIEEVKKITAERHGTVVTVKRVEKVQKKFLGRPVEVWKLYFTHPQDRPAIADKIREHPAVIDIYEYDIPFAKYYLIDKGLVPMEGDEELKMLAFDIETLYHEGEEFAEGPILMISYADEEGARVITWKNVDLPYVDVVSTEREMIKRFLRVVKEKDPDVLITYNGDNFDFAYLKKRCEKLGINFALGRDGSEPKIQRMGDRFAVEVKGRIHFDLYPVIRRTINLPTYTLEAVYEAVFGQPKEKVYAEEITTAWETGENLERVARYSMEDAKVTYELGKEFLPMEAQLSRLIGQSLWDVSRSSTGNLVEWFLLRKAYERNELAPNKPDEKELARRRQSYEGGYVKEPERGLWENIVYLDFRSLYPSIIITHNVSPDTLNREGCKEYDVAPQVGHRFCKDFPGFIPSLLGDLLEERQKIKKKMKATIDPIERKLLDYRQRAIKILANSYYGYYGYARARWYCKECAESVTAWGREYITMTIKEIEEKYGFKVIYSDTDGFFATIPGADAETVKKKAMEFLKYINAKLPGALELEYEGFYKRGFFVTKKKYAVIDEEGKITTRGLEIVRRDWSEIAKETQARVLEALLKDGDVEKAVRIVKEVTEKLSKYEVPPEKLVIHEQITRDLKDYKATGPHVAVAKRLAARGVKIRPGTVISYIVLKGSGRIGDRAIPFDEFDPTKHKYDAEYYIENQVLPAVERILRAFGYRKEDLRYQKTRQVGLSAWLKPKGT

SEQ ID NO: 1737 - protein, 774 aa, synthetic construct
MILDTDYITEDGKPVIRIFKKENGEFKIEYDRTFEPYFYALLKDDSAIEEVKKITAERHGTVVTVKRVEKVQKKFLGRPVEVWKLYFTHPQDRPAIFDKIREHPAVIDIYEYDIPFAKRYLIDKGLVPMEGDEELKMLAFDIETLYHEGEEFAEGPILMISYADEEGARVITWKNVDLPYVDVVSTEREMIKRFLRVVKEKDPDVLITYNGDNFDFAYLKKRCEKLGINFALGRDGSEPKIQRMGDRFAVEVKGRIHFDLYPVIRRTINLPTYTLEAVYEAVFGQPKEKVYAEEITTAWETGENLERVARYSMEDAKVTYELGKEFLPMEAQLSRLIGQSLWDVSRSSTGNLVEWFLLRKAYERNELAPNKPDEKELARRRQSYEGGYVKEPERGLWENIVYLDFRSLYPSIIITHNVSPDTLNREGCKEYDVAPQVGHRFCKDFPGFIPSLLGDLLEERQKIKKKMKATIDPIERKLLDYRQRAIKILANSYYGYYGYARARWYCKECAESVTAWGREYITMTIKEIEEKYGFKVIYSDTDGFFATIPGADAETVKKKAMEFLKYINAKLPGALELEYEGFYKRGFFVTKKKYAVIDEEGKITTRGLEIVRRDWSEIAKETQARVLEALLKDGDVEKAVRIVKEVTEKLSKYEVPPEKLVIHEQITRDLKDYKATGPHVAVAKRLAARGVKIRPGTVISYIVLKGSGRIGDRAIPFDEFDPTKHKYDAEYYIENQVLPAVERILRAFGYRKEDLRYQKTRQVGLSAWLKPKGT

SEQ ID NO: 1738 - protein, 774 aa, synthetic construct
MILDTDYITEDGKPVIRIFKKENGEFKIEYDRTFEPYFYALLKDDSAIEEVKKITAERHGTVVTVKRVEKVQKKFLGRPVEVWKLYFTHPQDRPAIHDKIREHPAVIDIYEYDIPFAKRYLIDKGLVPMEGDEELKMLAFDIETLYHEGEEFAEGPILMISYADEEGARVITWKNVDLPYVDVVSTEREMIKRFLRVVKEKDPDVLITYNGDNFDFAYLKKRCEKLGINFALGRDGSEPKIQRMGDRFAVEVKGRIHFDLYPVIRRTINLPTYTLEAVYEAVFGQPKEKVYAEEITTAWETGENLERVARYSMEDAKVTYELGKEFLPMEAQLSRLIGQSLWDVSRSSTGNLVEWFLLRKAYERNELAPNKPDEKELARRRQSYEGGYVKEPERGLWENIVYLDFRSLYPSIIITHNVSPDTLNREGCKEYDVAPQVGHRFCKDFPGFIPSLLGDLLEERQKIKKKMKATIDPIERKLLDYRQRAIKILANSYYGYYGYARARWYCKECAESVTAWGREYITMTIKEIEEKYGFKVIYSDTDGFFATIPGADAETVKKKAMEFLKYINAKLPGALELEYEGFYKRGFFVTKKKYAVIDEEGKITTRGLEIVRRDWSEIAKETQARVLEALLKDGDVEKAVRIVKEVTEKLSKYEVPPEKLVIHEQITRDLKDYKATGPHVAVAKRLAARGVKIRPGTVISYIVLKGSGRIGDRAIPFDEFDPTKHKYDAEYYIENQVLPAVERILRAFGYRKEDLRYQKTRQVGLSAWLKPKGT

SEQ ID NO: 1739 - protein, 774 aa, synthetic construct
MILDTDYITEDGKPVIRIFKKENGEFKIEYDRTFEPYFYALLKDDSAIEEVKKITAERHGTVVTVKRVEKVQKKFLGRPVEVWKLYFTHPQDRPAIHDKIREHPAVIDIYEYDIPFAKMYLIDKGLVPMEGDEELKMLAFDIETLYHEGEEFAEGPILMISYADEEGARVITWKNVDLPYVDVVSTEREMIKRFLRVVKEKDPDVLITYNGDNFDFAYLKKRCEKLGINFALGRDGSEPKIQRMGDRFAVEVKGRIHFDLYPVIRRTINLPTYTLEAVYEAVFGQPKEKVYAEEITTAWETGENLERVARYSMEDAKVTYELGKEFLPMEAQLSRLIGQSLWDVSRSSTGNLVEWFLLRKAYERNELAPNKPDEKELARRRQSYEGGYVKEPERGLWENIVYLDFRSLYPSIIITHNVSPDTLNREGCKEYDVAPQVGHRFCKDFPGFIPSLLGDLLEERQKIKKKMKATIDPIERKLLDYRQRAIKILANSYYGYYGYARARWYCKECAESVTAWGREYITMTIKEIEEKYGFKVIYSDTDGFFATIPGADAETVKKKAMEFLKYINAKLPGALELEYEGFYKRGFFVTKKKYAVIDEEGKITTRGLEIVRRDWSEIAKETQARVLEALLKDGDVEKAVRIVKEVTEKLSKYEVPPEKLVIHEQITRDLKDYKATGPHVAVAKRLAARGVKIRPGTVISYIVLKGSGRIGDRAIPFDEFDPTKHKYDAEYYIENQVLPAVERILRAFGYRKEDLRYQKTRQVGLSAWLKPKGT

SEQ ID NO: 1740 - protein, 774 aa, synthetic construct
MILDTDYITEDGKPVIRIFKKENGEFKIEYDRTFEPYFYALLKDDSAIEEVKKITAERHGTVVTVKRVEKVQKKFLGRPVEVWKLYFTHPQDRPAIWDKIREHPAVIDIYEYDIPFAKRYLIDKGLVPMEGDEELKMLAFDIETLYHEGEEFAEGPILMISYADEEGARVITWKNVDLPYVDVVSTEREMIKRFLRVVKEKDPDVLITYNGDNFDFAYLKKRCEKLGINFALGRDGSEPKIQRMGDRFAVEVKGRIHFDLYPVIRRTINLPTYTLEAVYEAVFGQPKEKVYAEEITTAWETGENLERVARYSMEDAKVTYELGKEFLPMEAQLSRLIGQSLWDVSRSSTGNLVEWFLLRKAYERNELAPNKPDEKELARRRQSYEGGYVKEPERGLWENIVYLDFRSLYPSIIITHNVSPDTLNREGCKEYDVAPQVGHRFCKDFPGFIPSLLGDLLEERQKIKKKMKATIDPIERKLLDYRQRAIKILANSYYGYYGYARARWYCKECAESVTAWGREYITMTIKEIEEKYGFKVIYSDTDGFFATIPGADAETVKKKAMEFLKYINAKLPGALELEYEGFYKRGFFVTKKKYAVIDEEGKITTRGLEIVRRDWSEIAKETQARVLEALLKDGDVEKAVRIVKEVTEKLSKYEVPPEKLVIHEQITRDLKDYKATGPHVAVAKRLAARGVKIRPGTVISYIVLKGSGRIGDRAIPFDEFDPTKHKYDAEYYIENQVLPAVERILRAFGYRKEDLRYQKTRQVGLSAWLKPKGT

SEQ ID NO: 1741 - protein, 774 aa, synthetic construct
MILDTDYITEDGKPVIRIFKKENGEFKIEYDRTFEPYFYALLKDDSAIEEVKKITAERHGTVVTVKRVEKVQKKFLGRPVEVWKLYFTHPQDRPAIRDKIREHPAVIDIYEYDIPFAKQYLIDKGLVPMEGDEELKMLAFDIETLYHEGEEFAEGPILMISYADEEGARVITWKNVDLPYVDVVSTEREMIKRFLRVVKEKDPDVLITYNGDNFDFAYLKKRCEKLGINFALGRDGSEPKIQRMGDRFAVEVKGRIHFDLYPVIRRTINLPTYTLEAVYEAVFGQPKEKVYAEEITTAWETGENLERVARYSMEDAKVTYELGKEFLPMEAQLSRLIGQSLWDVSRSSTGNLVEWFLLRKAYERNELAPNKPDEKELARRRQSYEGGYVKEPERGLWENIVYLDFRSLYPSIIITHNVSPDTLNREGCKEYDVAPQVGHRFCKDFPGFIPSLLGDLLEERQKIKKKMKATIDPIERKLLDYRQRAIKILANSYYGYYGYARARWYCKECAESVTAWGREYITMTIKEIEEKYGFKVIYSDTDGFFATIPGADAETVKKKAMEFLKYINAKLPGALELEYEGFYKRGFFVTKKKYAVIDEEGKITTRGLEIVRRDWSEIAKETQARVLEALLKDGDVEKAVRIVKEVTEKLSKYEVPPEKLVIHEQITRDLKDYKATGPHVAVAKRLAARGVKIRPGTVISYIVLKGSGRIGDRAIPFDEFDPTKHKYDAEYYIENQVLPAVERILRAFGYRKEDLRYQKTRQVGLSAWLKPKGT

SEQ ID NO: 1742 - protein, 774 aa, synthetic construct
MILDTDCITEDGKPVFRIFKKENGEFKIEYDRTFEPYFYALLKDDSAIEEVKKITAERHGTVVTVKRVEKVQKKFLGRPVEVWKLYFTHPQDVPAIRDKIREHPAVIDIYEYDIPFAKRYLIDKGLVPMEGDEELKMLAFDIETLYHEGEEFAEGPILMISYADEEGARVITWKNVDLPYVDVVSTEREMIKRFLRVVKEKDPDVLITYNGDNFDFAYLKKRCEKLGINFALGRDGSEPKIQRMGDRFAVEVKGRIHFDLYPVIRRTINLPTYTLEAVYEAVFGQPKEKVYAEEITTAWETGENLERVARYSMEDAKVTYELGKEFLPMEAQLSRLIGQSLWDVSRSSTGNLVEWFLLRKAYERNELAPNKPDEKELARRRQSYEGGYVKEPERGLWENIVYLDFRSLYPSIIITHNVSPDTLNREGCKEYDVAPQVGHRFCKDFPGFIPSLLGDLLEERQKIKKKMKATIDPIERKLLDYRQRAIKILANSYYGYYGYARARWYCKECAESVTAWGREYITMTIKEIEEKYGFKVIYSDTDGFFATIPGADAETVKKKAMEFLKYINAKLPGALELEYEGFYKRGFFVTKKKYAVIDEEGKITTRGLEIVRRDWSEIAKETQARVLEALLKDGDVEKAVRIVKEVTEKLSKYEVPPEKLVIHEQITRDLKDYKATGPHVAVAKRLAARGVKIRPGTVISYIVLKGSGRIGDRAIPFDEFDPTKHKYDAEYYIENQVLPAVERILRAFGYRKEDLRYQKTRQVGLSAWLKPKGT

SEQ ID NO: 1743 - protein, 774 aa, synthetic construct
MILDTDCITEDGKPVFRIFKKENGEFKIEYDRTFEAYFYALLKDDSAIEEVKKITAERHGTVVTVKRVEKVQKKFLGRPVEVWKLYFTHWQDIPAIRDKIREHPAVIDIYEYDIPFAKRYLIDKGLVPMEGDEELKMLAFDIETLYHEGEEFAEGPILMISYADEEGARVITWKNVDLPYVDVVSTEREMIKRFLRVVKEKDPDVLITYNGDNFDFAYLKKRCEKLGINFALGRDGSEPKIQRMGDRFAVEVKGRIHFDLYPVIRRTINLPTYTLEAVYEAVFGQPKEKVYAEEITTAWETGENLERVARYSMEDAKVTYELGKEFLPMEAQLSRLIGQSLWDVSRSSTGNLVEWFLLRKAYERNELAPNKPDEKELARRRQSYEGGYVKEPERGLWENIVYLDFRSLYPSIIITHNVSPDTLNREGCKEYDVAPQVGHRFCKDFPGFIPSLLGDLLEERQKIKKKMKATIDPIERKLLDYRQRAIKILANSYYGYYGYARARWYCKECAESVTAWGREYITMTIKEIEEKYGFKVIYSDTDGFFATIPGADAETVKKKAMEFLKYINAKLPGALELEYEGFYKRGFFVTKKKYAVIDEEGKITTRGLEIVRRDWSEIAKETQARVLEALLKDGDVEKAVRIVKEVTEKLSKYEVPPEKLVIHEQITRDLKDYKATGPHVAVAKRLAARGVKIRPGTVISYIVLKGSGRIGDRAIPFDEFDPTKHKYDAEYYIENQVLPAVERILRAFGYRKEDLRYQKTRQVGLSAWLKPKGT

SEQ ID NO: 1744 - protein, 774 aa, synthetic construct
MILDTDCITEDGKPVFRIFKKENGEFKIEYDRTFEAYFYALLKDDSAIEEVKKITAERHGTVVTVKRVEKVQKKFLGRPVEVWKLYFTHYQDIPAIRDKIREHPAVIDIYEYDIPFAKRYLIDKGLVPMEGDEELKMLAFDIETLYHEGEEFAEGPILMISYADEEGARVITWKNVDLPYVDVVSTEREMIKRFLRVVKEKDPDVLITYNGDNFDFAYLKKRCEKLGINFALGRDGSEPKIQRMGDRFAVEVKGRIHFDLYPVIRRTINLPTYTLEAVYEAVFGQPKEKVYAEEITTAWETGENLERVARYSMEDAKVTYELGKEFLPMEAQLSRLIGQSLWDVSRSSTGNLVEWFLLRKAYERNELAPNKPDEKELARRRQSYEGGYVKEPERGLWENIVYLDFRSLYPSIIITHNVSPDTLNREGCKEYDVAPQVGHRFCKDFPGFIPSLLGDLLEERQKIKKKMKATIDPIERKLLDYRQRAIKILANSYYGYYGYARARWYCKECAESVTAWGREYITMTIKEIEEKYGFKVIYSDTDGFFATIPGADAETVKKKAMEFLKYINAKLPGALELEYEGFYKRGFFVTKKKYAVIDEEGKITTRGLEIVRRDWSEIAKETQARVLEALLKDGDVEKAVRIVKEVTEKLSKYEVPPEKLVIHEQITRDLKDYKATGPHVAVAKRLAARGVKIRPGTVISYIVLKGSGRIGDRAIPFDEFDPTKHKYDAEYYIENQVLPAVERILRAFGYRKEDLRYQKTRQVGLSAWLKPKGT

SEQ ID NO: 1745 - protein, 774 aa, synthetic construct
MILDTDCITEDGKPVFRIFKKENGEFKIEYDRTFEAYFYALLKDDSAIEEVKKITAERHGTVVTVKRVEKVQKKFLGRPVEVWKLYFTHYQDIPAIADKIREHPAVIDIYEYDIPFAKRYLIDKGLVPMEGDEELKMLAFDIETLYHEGEEFAEGPILMISYADEEGARVITWKNVDLPYVDVVSTEREMIKRFLRVVKEKDPDVLITYNGDNFDFAYLKKRCEKLGINFALGRDGSEPKIQRMGDRFAVEVKGRIHFDLYPVIRRTINLPTYTLEAVYEAVFGQPKEKVYAEEITTAWETGENLERVARYSMEDAKVTYELGKEFLPMEAQLSRLIGQSLWDVSRSSTGNLVEWFLLRKAYERNELAPNKPDEKELARRRQSYEGGYVKEPERGLWENIVYLDFRSLYPSIIITHNVSPDTLNREGCKEYDVAPQVGHRFCKDFPGFIPSLLGDLLEERQKIKKKMKATIDPIERKLLDYRQRAIKILANSYYGYYGYARARWYCKECAESVTAWGREYITMTIKEIEEKYGFKVIYSDTDGFFATIPGADAETVKKKAMEFLKYINAKLPGALELEYEGFYKRGFFVTKKKYAVIDEEGKITTRGLEIVRRDWSEIAKETQARVLEALLKDGDVEKAVRIVKEVTEKLSKYEVPPEKLVIHEQITRDLKDYKATGPHVAVAKRLAARGVKIRPGTVISYIVLKGSGRIGDRAIPFDEFDPTKHKYDAEYYIENQVLPAVERILRAFGYRKEDLRYQKTRQVGLSAWLKPKGT

SEQ ID NO: 1746 - protein, 774 aa, synthetic construct
MILDTDCITEDGKPVFRIFKKENGEFKIEYDRTFEAYFYALLKDDSAIEEVKKITAERHGTVVTVKRVEKVQKKFLGRPVEVWKLYFTHPQDIPAIRDKIREHPAVIDIYEYDIPFAKRYLIDKGLVPMEGDEELKMLAFDIETLYHEGEEFAEGPILMISYADEEGARVITWKNVDLPYVDVVSTEREMIKRFLRVVKEKDPDVLITYNGDNFDFAYLKKRCEKLGINFALGRDGSEPKIQRMGDRFAVEVKGRIHFDLYPVIRRTINLPTYTLEAVYEAVFGQPKEKVYAEEITTAWETGENLERVARYSMEDAKVTYELGKEFLPMEAQLSRLIGQSLWDVSRSSTGNLVEWFLLRKAYERNELAPNKPDEKELARRRQSYEGGYVKEPERGLWENIVYLDFRSLYPSIIITHNVSPDTLNREGCKEYDVAPQVGHRFCKDFPGFIPSLLGDLLEERQKIKKKMKATIDPIERKLLDYRQRAIKILANSYYGYYGYARARWYCKECAESVTAWGREYITMTIKEIEEKYGFKVIYSDTDGFFATIPGADAETVKKKAMEFLKYINAKLPGALELEYEGFYKRGFFVTKKKYAVIDEEGKITTRGLEIVRRDWSEIAKETQARVLEALLKDGDVEKAVRIVKEVTEKLSKYEVPPEKLVIHEQITRDLKDYKATGPHVAVAKRLAARGVKIRPGTVISYIVLKGSGRIGDRAIPFDEFDPTKHKYDAEYYIENQVLPAVERILRAFGYRKEDLRYQKTRQVGLSAWLKPKGT

SEQ ID NO: 1747 - protein, 774 aa, synthetic construct
MILDTDCITEDGKPVFRIFKKENGEFKIEYDRTFEAYFYALLKDDSAIEEVKKITAERHGTVVTVKRVEKVQKKFLGRPVEVWKLYFTHPQDIPAIFDKIREHPAVIDIYEYDIPFAKRYLIDKGLVPMEGDEELKMLAFDIETLYHEGEEFAEGPILMISYADEEGARVITWKNVDLPYVDVVSTEREMIKRFLRVVKEKDPDVLITYNGDNFDFAYLKKRCEKLGINFALGRDGSEPKIQRMGDRFAVEVKGRIHFDLYPVIRRTINLPTYTLEAVYEAVFGQPKEKVYAEEITTAWETGENLERVARYSMEDAKVTYELGKEFLPMEAQLSRLIGQSLWDVSRSSTGNLVEWFLLRKAYERNELAPNKPDEKELARRRQSYEGGYVKEPERGLWENIVYLDFRSLYPSIIITHNVSPDTLNREGCKEYDVAPQVGHRFCKDFPGFIPSLLGDLLEERQKIKKKMKATIDPIERKLLDYRQRAIKILANSYYGYYGYARARWYCKECAESVTAWGREYITMTIKEIEEKYGFKVIYSDTDGFFATIPGADAETVKKKAMEFLKYINAKLPGALELEYEGFYKRGFFVTKKKYAVIDEEGKITTRGLEIVRRDWSEIAKETQARVLEALLKDGDVEKAVRIVKEVTEKLSKYEVPPEKLVIHEQITRDLKDYKATGPHVAVAKRLAARGVKIRPGTVISYIVLKGSGRIGDRAIPFDEFDPTKHKYDAEYYIENQVLPAVERILRAFGYRKEDLRYQKTRQVGLSAWLKPKGT

SEQ ID NO: 1748 - protein, 774 aa, synthetic construct
MILDTDCITEDGKPVFRIFKKENGEFKIEYDRTFEHYFYALLKDDSAIEEVKKITAERHGTVVTVKRVEKVQKKFLGRPVEVWKLYFTHYQDIPAIRDKIREHPAVIDIYEYDIPFAKRYLIDKGLVPMEGDEELKMLAFDIETLYHEGEEFAEGPILMISYADEEGARVITWKNVDLPYVDVVSTEREMIKRFLRVVKEKDPDVLITYNGDNFDFAYLKKRCEKLGINFALGRDGSEPKIQRMGDRFAVEVKGRIHFDLYPVIRRTINLPTYTLEAVYEAVFGQPKEKVYAEEITTAWETGENLERVARYSMEDAKVTYELGKEFLPMEAQLSRLIGQSLWDVSRSSTGNLVEWFLLRKAYERNELAPNKPDEKELARRRQSYEGGYVKEPERGLWENIVYLDFRSLYPSIIITHNVSPDTLNREGCKEYDVAPQVGHRFCKDFPGFIPSLLGDLLEERQKIKKKMKATIDPIERKLLDYRQRAIKILANSYYGYYGYARARWYCKECAESVTAWGREYITMTIKEIEEKYGFKVIYSDTDGFFATIPGADAETVKKKAMEFLKYINAKLPGALELEYEGFYKRGFFVTKKKYAVIDEEGKITTRGLEIVRRDWSEIAKETQARVLEALLKDGDVEKAVRIVKEVTEKLSKYEVPPEKLVIHEQITRDLKDYKATGPHVAVAKRLAARGVKIRPGTVISYIVLKGSGRIGDRAIPFDEFDPTKHKYDAEYYIENQVLPAVERILRAFGYRKEDLRYQKTRQVGLSAWLKPKGT

SEQ ID NO: 1749 - protein, 774 aa, synthetic construct
MILDTDCITEDGKPVFRIFKKENGEFKIEYDRTFESYFYALLKDDSAIEEVKKITAERHGTVVTVKRVEKVQKKFLGRPVEVWKLYFTHFQDIPAIRDKIREHPAVIDIYEYDIPFAKRYLIDKGLVPMEGDEELKMLAFDIETLYHEGEEFAEGPILMISYADEEGARVITWKNVDLPYVDVVSTEREMIKRFLRVVKEKDPDVLITYNGDNFDFAYLKKRCEKLGINFALGRDGSEPKIQRMGDRFAVEVKGRIHFDLYPVIRRTINLPTYTLEAVYEAVFGQPKEKVYAEEITTAWETGENLERVARYSMEDAKVTYELGKEFLPMEAQLSRLIGQSLWDVSRSSTGNLVEWFLLRKAYERNELAPNKPDEKELARRRQSYEGGYVKEPERGLWENIVYLDFRSLYPSIIITHNVSPDTLNREGCKEYDVAPQVGHRFCKDFPGFIPSLLGDLLEERQKIKKKMKATIDPIERKLLDYRQRAIKILANSYYGYYGYARARWYCKECAESVTAWGREYITMTIKEIEEKYGFKVIYSDTDGFFATIPGADAETVKKKAMEFLKYINAKLPGALELEYEGFYKRGFFVTKKKYAVIDEEGKITTRGLEIVRRDWSEIAKETQARVLEALLKDGDVEKAVRIVKEVTEKLSKYEVPPEKLVIHEQITRDLKDYKATGPHVAVAKRLAARGVKIRPGTVISYIVLKGSGRIGDRAIPFDEFDPTKHKYDAEYYIENQVLPAVERILRAFGYRKEDLRYQKTRQVGLSAWLKPKGT

SEQ ID NO: 1750 - protein, 774 aa, synthetic construct
MILDTDCITEDGKPVFRIFKKENGEFKIEYDRTFESYFYALLKDDSAIEEVKKITAERHGTVVTVKRVEKVQKKFLGRPVEVWKLYFTHFQDIPAIADKIREHPAVIDIYEYDIPFAKRYLIDKGLVPMEGDEELKMLAFDIETLYHEGEEFAEGPILMISYADEEGARVITWKNVDLPYVDVVSTEREMIKRFLRVVKEKDPDVLITYNGDNFDFAYLKKRCEKLGINFALGRDGSEPKIQRMGDRFAVEVKGRIHFDLYPVIRRTINLPTYTLEAVYEAVFGQPKEKVYAEEITTAWETGENLERVARYSMEDAKVTYELGKEFLPMEAQLSRLIGQSLWDVSRSSTGNLVEWFLLRKAYERNELAPNKPDEKELARRRQSYEGGYVKEPERGLWENIVYLDFRSLYPSIIITHNVSPDTLNREGCKEYDVAPQVGHRFCKDFPGFIPSLLGDLLEERQKIKKKMKATIDPIERKLLDYRQRAIKILANSYYGYYGYARARWYCKECAESVTAWGREYITMTIKEIEEKYGFKVIYSDTDGFFATIPGADAETVKKKAMEFLKYINAKLPGALELEYEGFYKRGFFVTKKKYAVIDEEGKITTRGLEIVRRDWSEIAKETQARVLEALLKDGDVEKAVRIVKEVTEKLSKYEVPPEKLVIHEQITRDLKDYKATGPHVAVAKRLAARGVKIRPGTVISYIVLKGSGRIGDRAIPFDEFDPTKHKYDAEYYIENQVLPAVERILRAFGYRKEDLRYQKTRQVGLSAWLKPKGT

SEQ ID NO: 1751 - protein, 774 aa, synthetic construct
MILDTDCITEDGKPVFRIFKKENGEFKIEYDRTFEWYFYALLKDDSAIEEVKKITAERHGTVVTVKRVEKVQKKFLGRPVEVWKLYFTHFQDVPAIRDKIREHPAVIDIYEYDIPFAKRYLIDKGLVPMEGDEELKMLAFDIETLYHEGEEFAEGPILMISYADEEGARVITWKNVDLPYVDVVSTEREMIKRFLRVVKEKDPDVLITYNGDNFDFAYLKKRCEKLGINFALGRDGSEPKIQRMGDRFAVEVKGRIHFDLYPVIRRTINLPTYTLEAVYEAVFGQPKEKVYAEEITTAWETGENLERVARYSMEDAKVTYELGKEFLPMEAQLSRLIGQSLWDVSRSSTGNLVEWFLLRKAYERNELAPNKPDEKELARRRQSYEGGYVKEPERGLWENIVYLDFRSLYPSIIITHNVSPDTLNREGCKEYDVAPQVGHRFCKDFPGFIPSLLGDLLEERQKIKKKMKATIDPIERKLLDYRQRAIKILANSYYGYYGYARARWYCKECAESVTAWGREYITMTIKEIEEKYGFKVIYSDTDGFFATIPGADAETVKKKAMEFLKYINAKLPGALELEYEGFYKRGFFVTKKKYAVIDEEGKITTRGLEIVRRDWSEIAKETQARVLEALLKDGDVEKAVRIVKEVTEKLSKYEVPPEKLVIHEQITRDLKDYKATGPHVAVAKRLAARGVKIRPGTVISYIVLKGSGRIGDRAIPFDEFDPTKHKYDAEYYIENQVLPAVERILRAFGYRKEDLRYQKTRQVGLSAWLKPKGT

SEQ ID NO: 1752 - protein, 774 aa, synthetic construct
MILDTDCITEDGKPVFRIFKKENGEFKIEYDRTFEWYFYALLKDDSAIEEVKKITAERHGTVVTVKRVEKVQKKFLGRPVEVWKLYFTHFQDIPAIRDKIREHPAVIDIYEYDIPFAKRYLIDKGLVPMEGDEELKMLAFDIETLYHEGEEFAEGPILMISYADEEGARVITWKNVDLPYVDVVSTEREMIKRFLRVVKEKDPDVLITYNGDNFDFAYLKKRCEKLGINFALGRDGSEPKIQRMGDRFAVEVKGRIHFDLYPVIRRTINLPTYTLEAVYEAVFGQPKEKVYAEEITTAWETGENLERVARYSMEDAKVTYELGKEFLPMEAQLSRLIGQSLWDVSRSSTGNLVEWFLLRKAYERNELAPNKPDEKELARRRQSYEGGYVKEPERGLWENIVYLDFRSLYPSIIITHNVSPDTLNREGCKEYDVAPQVGHRFCKDFPGFIPSLLGDLLEERQKIKKKMKATIDPIERKLLDYRQRAIKILANSYYGYYGYARARWYCKECAESVTAWGREYITMTIKEIEEKYGFKVIYSDTDGFFATIPGADAETVKKKAMEFLKYINAKLPGALELEYEGFYKRGFFVTKKKYAVIDEEGKITTRGLEIVRRDWSEIAKETQARVLEALLKDGDVEKAVRIVKEVTEKLSKYEVPPEKLVIHEQITRDLKDYKATGPHVAVAKRLAARGVKIRPGTVISYIVLKGSGRIGDRAIPFDEFDPTKHKYDAEYYIENQVLPAVERILRAFGYRKEDLRYQKTRQVGLSAWLKPKGT

SEQ ID NO: 1753 - protein, 774 aa, synthetic construct
MILDTDCITEDGKPVFRIFKKENGEFKIEYDRTFEWYFYALLKDDSAIEEVKKITAERHGTVVTVKRVEKVQKKFLGRPVEVWKLYFTHFQDIPAIADKIREHPAVIDIYEYDIPFAKRYLIDKGLVPMEGDEELKMLAFDIETLYHEGEEFAEGPILMISYADEEGARVITWKNVDLPYVDVVSTEREMIKRFLRVVKEKDPDVLITYNGDNFDFAYLKKRCEKLGINFALGRDGSEPKIQRMGDRFAVEVKGRIHFDLYPVIRRTINLPTYTLEAVYEAVFGQPKEKVYAEEITTAWETGENLERVARYSMEDAKVTYELGKEFLPMEAQLSRLIGQSLWDVSRSSTGNLVEWFLLRKAYERNELAPNKPDEKELARRRQSYEGGYVKEPERGLWENIVYLDFRSLYPSIIITHNVSPDTLNREGCKEYDVAPQVGHRFCKDFPGFIPSLLGDLLEERQKIKKKMKATIDPIERKLLDYRQRAIKILANSYYGYYGYARARWYCKECAESVTAWGREYITMTIKEIEEKYGFKVIYSDTDGFFATIPGADAETVKKKAMEFLKYINAKLPGALELEYEGFYKRGFFVTKKKYAVIDEEGKITTRGLEIVRRDWSEIAKETQARVLEALLKDGDVEKAVRIVKEVTEKLSKYEVPPEKLVIHEQITRDLKDYKATGPHVAVAKRLAARGVKIRPGTVISYIVLKGSGRIGDRAIPFDEFDPTKHKYDAEYYIENQVLPAVERILRAFGYRKEDLRYQKTRQVGLSAWLKPKGT

SEQ ID NO: 1754 - protein, 774 aa, synthetic construct
MILDTDCITEDGKPVFRIFKKENGEFKIEYDRTFEPYFYALLKDDSAIEEVKKITAERHGTVVTVKRVEKVQKKFLGRPVEVWKLYFTHFQDVPAIRDKIREHPAVIDIYEYDIPFAKRYLIDKGLVPMEGDEELKMLAFDIETLYHEGEEFAEGPILMISYADEEGARVITWKNVDLPYVDVVSTEREMIKRFLRVVKEKDPDVLITYNGDNFDFAYLKKRCEKLGINFALGRDGSEPKIQRMGDRFAVEVKGRIHFDLYPVIRRTINLPTYTLEAVYEAVFGQPKEKVYAEEITTAWETGENLERVARYSMEDAKVTYELGKEFLPMEAQLSRLIGQSLWDVSRSSTGNLVEWFLLRKAYERNELAPNKPDEKELARRRQSYEGGYVKEPERGLWENIVYLDFRSLYPSIIITHNVSPDTLNREGCKEYDVAPQVGHRFCKDFPGFIPSLLGDLLEERQKIKKKMKATIDPIERKLLDYRQRAIKILANSYYGYYGYARARWYCKECAESVTAWGREYITMTIKEIEEKYGFKVIYSDTDGFFATIPGADAETVKKKAMEFLKYINAKLPGALELEYEGFYKRGFFVTKKKYAVIDEEGKITTRGLEIVRRDWSEIAKETQARVLEALLKDGDVEKAVRIVKEVTEKLSKYEVPPEKLVIHEQITRDLKDYKATGPHVAVAKRLAARGVKIRPGTVISYIVLKGSGRIGDRAIPFDEFDPTKHKYDAEYYIENQVLPAVERILRAFGYRKEDLRYQKTRQVGLSAWLKPKGT

SEQ ID NO: 1755 - protein, 774 aa, synthetic construct
MILDTDCITEDGKPVFRIFKKENGEFKIEYDRTFEPYFYALLKDDSAIEEVKKITAERHGTVVTVKRVEKVQKKFLGRPVEVWKLYFTHFQDVPAIADKIREHPAVIDIYEYDIPFAKRYLIDKGLVPMEGDEELKMLAFDIETLYHEGEEFAEGPILMISYADEEGARVITWKNVDLPYVDVVSTEREMIKRFLRVVKEKDPDVLITYNGDNFDFAYLKKRCEKLGINFALGRDGSEPKIQRMGDRFAVEVKGRIHFDLYPVIRRTINLPTYTLEAVYEAVFGQPKEKVYAEEITTAWETGENLERVARYSMEDAKVTYELGKEFLPMEAQLSRLIGQSLWDVSRSSTGNLVEWFLLRKAYERNELAPNKPDEKELARRRQSYEGGYVKEPERGLWENIVYLDFRSLYPSIIITHNVSPDTLNREGCKEYDVAPQVGHRFCKDFPGFIPSLLGDLLEERQKIKKKMKATIDPIERKLLDYRQRAIKILANSYYGYYGYARARWYCKECAESVTAWGREYITMTIKEIEEKYGFKVIYSDTDGFFATIPGADAETVKKKAMEFLKYINAKLPGALELEYEGFYKRGFFVTKKKYAVIDEEGKITTRGLEIVRRDWSEIAKETQARVLEALLKDGDVEKAVRIVKEVTEKLSKYEVPPEKLVIHEQITRDLKDYKATGPHVAVAKRLAARGVKIRPGTVISYIVLKGSGRIGDRAIPFDEFDPTKHKYDAEYYIENQVLPAVERILRAFGYRKEDLRYQKTRQVGLSAWLKPKGT

SEQ ID NO: 1756 - protein, 774 aa, synthetic construct
MILDTDCITEDGKPVFRIFKKENGEFKIEYDRTFEPYFYALLKDDSAIEEVKKITAERHGTVVTVKRVEKVQKKFLGRPVEVWKLYFTHFQDVPAIFDKIREHPAVIDIYEYDIPFAKRYLIDKGLVPMEGDEELKMLAFDIETLYHEGEEFAEGPILMISYADEEGARVITWKNVDLPYVDVVSTEREMIKRFLRVVKEKDPDVLITYNGDNFDFAYLKKRCEKLGINFALGRDGSEPKIQRMGDRFAVEVKGRIHFDLYPVIRRTINLPTYTLEAVYEAVFGQPKEKVYAEEITTAWETGENLERVARYSMEDAKVTYELGKEFLPMEAQLSRLIGQSLWDVSRSSTGNLVEWFLLRKAYERNELAPNKPDEKELARRRQSYEGGYVKEPERGLWENIVYLDFRSLYPSIIITHNVSPDTLNREGCKEYDVAPQVGHRFCKDFPGFIPSLLGDLLEERQKIKKKMKATIDPIERKLLDYRQRAIKILANSYYGYYGYARARWYCKECAESVTAWGREYITMTIKEIEEKYGFKVIYSDTDGFFATIPGADAETVKKKAMEFLKYINAKLPGALELEYEGFYKRGFFVTKKKYAVIDEEGKITTRGLEIVRRDWSEIAKETQARVLEALLKDGDVEKAVRIVKEVTEKLSKYEVPPEKLVIHEQITRDLKDYKATGPHVAVAKRLAARGVKIRPGTVISYIVLKGSGRIGDRAIPFDEFDPTKHKYDAEYYIENQVLPAVERILRAFGYRKEDLRYQKTRQVGLSAWLKPKGT

SEQ ID NO: 1757 - protein, 774 aa, synthetic construct
MILDTDCITEDGKPVFRIFKKENGEFKIEYDRTFEPYFYALLKDDSAIEEVKKITAERHGTVVTVKRVEKVQKKFLGRPVEVWKLYFTHFQDIPAIRDKIREHPAVIDIYEYDIPFAKRYLIDKGLVPMEGDEELKMLAFDIETLYHEGEEFAEGPILMISYADEEGARVITWKNVDLPYVDVVSTEREMIKRFLRVVKEKDPDVLITYNGDNFDFAYLKKRCEKLGINFALGRDGSEPKIQRMGDRFAVEVKGRIHFDLYPVIRRTINLPTYTLEAVYEAVFGQPKEKVYAEEITTAWETGENLERVARYSMEDAKVTYELGKEFLPMEAQLSRLIGQSLWDVSRSSTGNLVEWFLLRKAYERNELAPNKPDEKELARRRQSYEGGYVKEPERGLWENIVYLDFRSLYPSIIITHNVSPDTLNREGCKEYDVAPQVGHRFCKDFPGFIPSLLGDLLEERQKIKKKMKATIDPIERKLLDYRQRAIKILANSYYGYYGYARARWYCKECAESVTAWGREYITMTIKEIEEKYGFKVIYSDTDGFFATIPGADAETVKKKAMEFLKYINAKLPGALELEYEGFYKRGFFVTKKKYAVIDEEGKITTRGLEIVRRDWSEIAKETQARVLEALLKDGDVEKAVRIVKEVTEKLSKYEVPPEKLVIHEQITRDLKDYKATGPHVAVAKRLAARGVKIRPGTVISYIVLKGSGRIGDRAIPFDEFDPTKHKYDAEYYIENQVLPAVERILRAFGYRKEDLRYQKTRQVGLSAWLKPKGT

SEQ ID NO: 1758 - protein, 774 aa, synthetic construct
MILDTDCITEDGKPVFRIFKKENGEFKIEYDRTFEPYFYALLKDDSAIEEVKKITAERHGTVVTVKRVEKVQKKFLGRPVEVWKLYFTHFQDIPAIADKIREHPAVIDIYEYDIPFAKRYLIDKGLVPMEGDEELKMLAFDIETLYHEGEEFAEGPILMISYADEEGARVITWKNVDLPYVDVVSTEREMIKRFLRVVKEKDPDVLITYNGDNFDFAYLKKRCEKLGINFALGRDGSEPKIQRMGDRFAVEVKGRIHFDLYPVIRRTINLPTYTLEAVYEAVFGQPKEKVYAEEITTAWETGENLERVARYSMEDAKVTYELGKEFLPMEAQLSRLIGQSLWDVSRSSTGNLVEWFLLRKAYERNELAPNKPDEKELARRRQSYEGGYVKEPERGLWENIVYLDFRSLYPSIIITHNVSPDTLNREGCKEYDVAPQVGHRFCKDFPGFIPSLLGDLLEERQKIKKKMKATIDPIERKLLDYRQRAIKILANSYYGYYGYARARWYCKECAESVTAWGREYITMTIKEIEEKYGFKVIYSDTDGFFATIPGADAETVKKKAMEFLKYINAKLPGALELEYEGFYKRGFFVTKKKYAVIDEEGKITTRGLEIVRRDWSEIAKETQARVLEALLKDGDVEKAVRIVKEVTEKLSKYEVPPEKLVIHEQITRDLKDYKATGPHVAVAKRLAARGVKIRPGTVISYIVLKGSGRIGDRAIPFDEFDPTKHKYDAEYYIENQVLPAVERILRAFGYRKEDLRYQKTRQVGLSAWLKPKGT

SEQ ID NO: 1759 - protein, 774 aa, synthetic construct
MILDTDCITEDGKPVFRIFKKENGEFKIEYDRTFEPYFYALLKDDSAIEEVKKITAERHGTVVTVKRVEKVQKKFLGRPVEVWKLYFTHFQDIPAIFDKIREHPAVIDIYEYDIPFAKRYLIDKGLVPMEGDEELKMLAFDIETLYHEGEEFAEGPILMISYADEEGARVITWKNVDLPYVDVVSTEREMIKRFLRVVKEKDPDVLITYNGDNFDFAYLKKRCEKLGINFALGRDGSEPKIQRMGDRFAVEVKGRIHFDLYPVIRRTINLPTYTLEAVYEAVFGQPKEKVYAEEITTAWETGENLERVARYSMEDAKVTYELGKEFLPMEAQLSRLIGQSLWDVSRSSTGNLVEWFLLRKAYERNELAPNKPDEKELARRRQSYEGGYVKEPERGLWENIVYLDFRSLYPSIIITHNVSPDTLNREGCKEYDVAPQVGHRFCKDFPGFIPSLLGDLLEERQKIKKKMKATIDPIERKLLDYRQRAIKILANSYYGYYGYARARWYCKECAESVTAWGREYITMTIKEIEEKYGFKVIYSDTDGFFATIPGADAETVKKKAMEFLKYINAKLPGALELEYEGFYKRGFFVTKKKYAVIDEEGKITTRGLEIVRRDWSEIAKETQARVLEALLKDGDVEKAVRIVKEVTEKLSKYEVPPEKLVIHEQITRDLKDYKATGPHVAVAKRLAARGVKIRPGTVISYIVLKGSGRIGDRAIPFDEFDPTKHKYDAEYYIENQVLPAVERILRAFGYRKEDLRYQKTRQVGLSAWLKPKGT

SEQ ID NO: 1760 - protein, 774 aa, synthetic construct
MILDTDCITEDGKPVFRIFKKENGEFKIEYDRTFEPYFYALLKDDSAIEEVKKITAERHGTVVTVKRVEKVQKKFLGRPVEVWKLYFTHFQDIPAIHDKIREHPAVIDIYEYDIPFAKRYLIDKGLVPMEGDEELKMLAFDIETLYHEGEEFAEGPILMISYADEEGARVITWKNVDLPYVDVVSTEREMIKRFLRVVKEKDPDVLITYNGDNFDFAYLKKRCEKLGINFALGRDGSEPKIQRMGDRFAVEVKGRIHFDLYPVIRRTINLPTYTLEAVYEAVFGQPKEKVYAEEITTAWETGENLERVARYSMEDAKVTYELGKEFLPMEAQLSRLIGQSLWDVSRSSTGNLVEWFLLRKAYERNELAPNKPDEKELARRRQSYEGGYVKEPERGLWENIVYLDFRSLYPSIIITHNVSPDTLNREGCKEYDVAPQVGHRFCKDFPGFIPSLLGDLLEERQKIKKKMKATIDPIERKLLDYRQRAIKILANSYYGYYGYARARWYCKECAESVTAWGREYITMTIKEIEEKYGFKVIYSDTDGFFATIPGADAETVKKKAMEFLKYINAKLPGALELEYEGFYKRGFFVTKKKYAVIDEEGKITTRGLEIVRRDWSEIAKETQARVLEALLKDGDVEKAVRIVKEVTEKLSKYEVPPEKLVIHEQITRDLKDYKATGPHVAVAKRLAARGVKIRPGTVISYIVLKGSGRIGDRAIPFDEFDPTKHKYDAEYYIENQVLPAVERILRAFGYRKEDLRYQKTRQVGLSAWLKPKGT

SEQ ID NO: 1761 - protein, 774 aa, synthetic construct
MILDTDCITEDGKPVFRIFKKENGEFKIEYDRTFEPYFYALLKDDSAIEEVKKITAERHGTVVTVKRVEKVQKKFLGRPVEVWKLYFTHFQDIPAIWDKIREHPAVIDIYEYDIPFAKRYLIDKGLVPMEGDEELKMLAFDIETLYHEGEEFAEGPILMISYADEEGARVITWKNVDLPYVDVVSTEREMIKRFLRVVKEKDPDVLITYNGDNFDFAYLKKRCEKLGINFALGRDGSEPKIQRMGDRFAVEVKGRIHFDLYPVIRRTINLPTYTLEAVYEAVFGQPKEKVYAEEITTAWETGENLERVARYSMEDAKVTYELGKEFLPMEAQLSRLIGQSLWDVSRSSTGNLVEWFLLRKAYERNELAPNKPDEKELARRRQSYEGGYVKEPERGLWENIVYLDFRSLYPSIIITHNVSPDTLNREGCKEYDVAPQVGHRFCKDFPGFIPSLLGDLLEERQKIKKKMKATIDPIERKLLDYRQRAIKILANSYYGYYGYARARWYCKECAESVTAWGREYITMTIKEIEEKYGFKVIYSDTDGFFATIPGADAETVKKKAMEFLKYINAKLPGALELEYEGFYKRGFFVTKKKYAVIDEEGKITTRGLEIVRRDWSEIAKETQARVLEALLKDGDVEKAVRIVKEVTEKLSKYEVPPEKLVIHEQITRDLKDYKATGPHVAVAKRLAARGVKIRPGTVISYIVLKGSGRIGDRAIPFDEFDPTKHKYDAEYYIENQVLPAVERILRAFGYRKEDLRYQKTRQVGLSAWLKPKGT

SEQ ID NO: 1762 - protein, 774 aa, synthetic construct
MILDTDCITEDGKPVFRIFKKENGEFKIEYDRTFEPYFYALLKDDSAIEEVKKITAERHGTVVTVKRVEKVQKKFLGRPVEVWKLYFTHIQDVPAIRDKIREHPAVIDIYEYDIPFAKRYLIDKGLVPMEGDEELKMLAFDIETLYHEGEEFAEGPILMISYADEEGARVITWKNVDLPYVDVVSTEREMIKRFLRVVKEKDPDVLITYNGDNFDFAYLKKRCEKLGINFALGRDGSEPKIQRMGDRFAVEVKGRIHFDLYPVIRRTINLPTYTLEAVYEAVFGQPKEKVYAEEITTAWETGENLERVARYSMEDAKVTYELGKEFLPMEAQLSRLIGQSLWDVSRSSTGNLVEWFLLRKAYERNELAPNKPDEKELARRRQSYEGGYVKEPERGLWENIVYLDFRSLYPSIIITHNVSPDTLNREGCKEYDVAPQVGHRFCKDFPGFIPSLLGDLLEERQKIKKKMKATIDPIERKLLDYRQRAIKILANSYYGYYGYARARWYCKECAESVTAWGREYITMTIKEIEEKYGFKVIYSDTDGFFATIPGADAETVKKKAMEFLKYINAKLPGALELEYEGFYKRGFFVTKKKYAVIDEEGKITTRGLEIVRRDWSEIAKETQARVLEALLKDGDVEKAVRIVKEVTEKLSKYEVPPEKLVIHEQITRDLKDYKATGPHVAVAKRLAARGVKIRPGTVISYIVLKGSGRIGDRAIPFDEFDPTKHKYDAEYYIENQVLPAVERILRAFGYRKEDLRYQKTRQVGLSAWLKPKGT

SEQ ID NO: 1763 - protein, 774 aa, synthetic construct
MILDTDCITEDGKPVFRIFKKENGEFKIEYDRTFEPYFYALLKDDSAIEEVKKITAERHGTVVTVKRVEKVQKKFLGRPVEVWKLYFTHIQDIPAIRDKIREHPAVIDIYEYDIPFAKRYLIDKGLVPMEGDEELKMLAFDIETLYHEGEEFAEGPILMISYADEEGARVITWKNVDLPYVDVVSTEREMIKRFLRVVKEKDPDVLITYNGDNFDFAYLKKRCEKLGINFALGRDGSEPKIQRMGDRFAVEVKGRIHFDLYPVIRRTINLPTYTLEAVYEAVFGQPKEKVYAEEITTAWETGENLERVARYSMEDAKVTYELGKEFLPMEAQLSRLIGQSLWDVSRSSTGNLVEWFLLRKAYERNELAPNKPDEKELARRRQSYEGGYVKEPERGLWENIVYLDFRSLYPSIIITHNVSPDTLNREGCKEYDVAPQVGHRFCKDFPGFIPSLLGDLLEERQKIKKKMKATIDPIERKLLDYRQRAIKILANSYYGYYGYARARWYCKECAESVTAWGREYITMTIKEIEEKYGFKVIYSDTDGFFATIPGADAETVKKKAMEFLKYINAKLPGALELEYEGFYKRGFFVTKKKYAVIDEEGKITTRGLEIVRRDWSEIAKETQARVLEALLKDGDVEKAVRIVKEVTEKLSKYEVPPEKLVIHEQITRDLKDYKATGPHVAVAKRLAARGVKIRPGTVISYIVLKGSGRIGDRAIPFDEFDPTKHKYDAEYYIENQVLPAVERILRAFGYRKEDLRYQKTRQVGLSAWLKPKGT

SEQ ID NO: 1764 - protein, 774 aa, synthetic construct
MILDTDCITEDGKPVFRIFKKENGEFKIEYDRTFEPYFYALLKDDSAIEEVKKITAERHGTVVTVKRVEKVQKKFLGRPVEVWKLYFTHIQDIPAIADKIREHPAVIDIYEYDIPFAKRYLIDKGLVPMEGDEELKMLAFDIETLYHEGEEFAEGPILMISYADEEGARVITWKNVDLPYVDVVSTEREMIKRFLRVVKEKDPDVLITYNGDNFDFAYLKKRCEKLGINFALGRDGSEPKIQRMGDRFAVEVKGRIHFDLYPVIRRTINLPTYTLEAVYEAVFGQPKEKVYAEEITTAWETGENLERVARYSMEDAKVTYELGKEFLPMEAQLSRLIGQSLWDVSRSSTGNLVEWFLLRKAYERNELAPNKPDEKELARRRQSYEGGYVKEPERGLWENIVYLDFRSLYPSIIITHNVSPDTLNREGCKEYDVAPQVGHRFCKDFPGFIPSLLGDLLEERQKIKKKMKATIDPIERKLLDYRQRAIKILANSYYGYYGYARARWYCKECAESVTAWGREYITMTIKEIEEKYGFKVIYSDTDGFFATIPGADAETVKKKAMEFLKYINAKLPGALELEYEGFYKRGFFVTKKKYAVIDEEGKITTRGLEIVRRDWSEIAKETQARVLEALLKDGDVEKAVRIVKEVTEKLSKYEVPPEKLVIHEQITRDLKDYKATGPHVAVAKRLAARGVKIRPGTVISYIVLKGSGRIGDRAIPFDEFDPTKHKYDAEYYIENQVLPAVERILRAFGYRKEDLRYQKTRQVGLSAWLKPKGT

SEQ ID NO: 1765 - protein, 774 aa, synthetic construct
MILDTDCITEDGKPVFRIFKKENGEFKIEYDRTFEPYFYALLKDDSAIEEVKKITAERHGTVVTVKRVEKVQKKFLGRPVEVWKLYFTHIQDIPAIFDKIREHPAVIDIYEYDIPFAKRYLIDKGLVPMEGDEELKMLAFDIETLYHEGEEFAEGPILMISYADEEGARVITWKNVDLPYVDVVSTEREMIKRFLRVVKEKDPDVLITYNGDNFDFAYLKKRCEKLGINFALGRDGSEPKIQRMGDRFAVEVKGRIHFDLYPVIRRTINLPTYTLEAVYEAVFGQPKEKVYAEEITTAWETGENLERVARYSMEDAKVTYELGKEFLPMEAQLSRLIGQSLWDVSRSSTGNLVEWFLLRKAYERNELAPNKPDEKELARRRQSYEGGYVKEPERGLWENIVYLDFRSLYPSIIITHNVSPDTLNREGCKEYDVAPQVGHRFCKDFPGFIPSLLGDLLEERQKIKKKMKATIDPIERKLLDYRQRAIKILANSYYGYYGYARARWYCKECAESVTAWGREYITMTIKEIEEKYGFKVIYSDTDGFFATIPGADAETVKKKAMEFLKYINAKLPGALELEYEGFYKRGFFVTKKKYAVIDEEGKITTRGLEIVRRDWSEIAKETQARVLEALLKDGDVEKAVRIVKEVTEKLSKYEVPPEKLVIHEQITRDLKDYKATGPHVAVAKRLAARGVKIRPGTVISYIVLKGSGRIGDRAIPFDEFDPTKHKYDAEYYIENQVLPAVERILRAFGYRKEDLRYQKTRQVGLSAWLKPKGT

SEQ ID NO: 1766 - protein, 774 aa, synthetic construct
MILDTDCITEDGKPVFRIFKKENGEFKIEYDRTFEPYFYALLKDDSAIEEVKKITAERHGTVVTVKRVEKVQKKFLGRPVEVWKLYFTHIQDIPAIHDKIREHPAVIDIYEYDIPFAKRYLIDKGLVPMEGDEELKMLAFDIETLYHEGEEFAEGPILMISYADEEGARVITWKNVDLPYVDVVSTEREMIKRFLRVVKEKDPDVLITYNGDNFDFAYLKKRCEKLGINFALGRDGSEPKIQRMGDRFAVEVKGRIHFDLYPVIRRTINLPTYTLEAVYEAVFGQPKEKVYAEEITTAWETGENLERVARYSMEDAKVTYELGKEFLPMEAQLSRLIGQSLWDVSRSSTGNLVEWFLLRKAYERNELAPNKPDEKELARRRQSYEGGYVKEPERGLWENIVYLDFRSLYPSIIITHNVSPDTLNREGCKEYDVAPQVGHRFCKDFPGFIPSLLGDLLEERQKIKKKMKATIDPIERKLLDYRQRAIKILANSYYGYYGYARARWYCKECAESVTAWGREYITMTIKEIEEKYGFKVIYSDTDGFFATIPGADAETVKKKAMEFLKYINAKLPGALELEYEGFYKRGFFVTKKKYAVIDEEGKITTRGLEIVRRDWSEIAKETQARVLEALLKDGDVEKAVRIVKEVTEKLSKYEVPPEKLVIHEQITRDLKDYKATGPHVAVAKRLAARGVKIRPGTVISYIVLKGSGRIGDRAIPFDEFDPTKHKYDAEYYIENQVLPAVERILRAFGYRKEDLRYQKTRQVGLSAWLKPKGT

SEQ ID NO: 1767 - protein, 774 aa, synthetic construct
MILDTDCITEDGKPVFRIFKKENGEFKIEYDRTFEPYFYALLKDDSAIEEVKKITAERHGTVVTVKRVEKVQKKFLGRPVEVWKLYFTHIQDRPAIRDKIREHPAVIDIYEYDIPFAKRYLIDKGLVPMEGDEELKMLAFDIETLYHEGEEFAEGPILMISYADEEGARVITWKNVDLPYVDVVSTEREMIKRFLRVVKEKDPDVLITYNGDNFDFAYLKKRCEKLGINFALGRDGSEPKIQRMGDRFAVEVKGRIHFDLYPVIRRTINLPTYTLEAVYEAVFGQPKEKVYAEEITTAWETGENLERVARYSMEDAKVTYELGKEFLPMEAQLSRLIGQSLWDVSRSSTGNLVEWFLLRKAYERNELAPNKPDEKELARRRQSYEGGYVKEPERGLWENIVYLDFRSLYPSIIITHNVSPDTLNREGCKEYDVAPQVGHRFCKDFPGFIPSLLGDLLEERQKIKKKMKATIDPIERKLLDYRQRAIKILANSYYGYYGYARARWYCKECAESVTAWGREYITMTIKEIEEKYGFKVIYSDTDGFFATIPGADAETVKKKAMEFLKYINAKLPGALELEYEGFYKRGFFVTKKKYAVIDEEGKITTRGLEIVRRDWSEIAKETQARVLEALLKDGDVEKAVRIVKEVTEKLSKYEVPPEKLVIHEQITRDLKDYKATGPHVAVAKRLAARGVKIRPGTVISYIVLKGSGRIGDRAIPFDEFDPTKHKYDAEYYIENQVLPAVERILRAFGYRKEDLRYQKTRQVGLSAWLKPKGT

SEQ ID NO: 1768 - protein, 774 aa, synthetic construct
MILDTDCITEDGKPVFRIFKKENGEFKIEYDRTFEPYFYALLKDDSAIEEVKKITAERHGTVVTVKRVEKVQKKFLGRPVEVWKLYFTHSQDVPAIADKIREHPAVIDIYEYDIPFAKRYLIDKGLVPMEGDEELKMLAFDIETLYHEGEEFAEGPILMISYADEEGARVITWKNVDLPYVDVVSTEREMIKRFLRVVKEKDPDVLITYNGDNFDFAYLKKRCEKLGINFALGRDGSEPKIQRMGDRFAVEVKGRIHFDLYPVIRRTINLPTYTLEAVYEAVFGQPKEKVYAEEITTAWETGENLERVARYSMEDAKVTYELGKEFLPMEAQLSRLIGQSLWDVSRSSTGNLVEWFLLRKAYERNELAPNKPDEKELARRRQSYEGGYVKEPERGLWENIVYLDFRSLYPSIIITHNVSPDTLNREGCKEYDVAPQVGHRFCKDFPGFIPSLLGDLLEERQKIKKKMKATIDPIERKLLDYRQRAIKILANSYYGYYGYARARWYCKECAESVTAWGREYITMTIKEIEEKYGFKVIYSDTDGFFATIPGADAETVKKKAMEFLKYINAKLPGALELEYEGFYKRGFFVTKKKYAVIDEEGKITTRGLEIVRRDWSEIAKETQARVLEALLKDGDVEKAVRIVKEVTEKLSKYEVPPEKLVIHEQITRDLKDYKATGPHVAVAKRLAARGVKIRPGTVISYIVLKGSGRIGDRAIPFDEFDPTKHKYDAEYYIENQVLPAVERILRAFGYRKEDLRYQKTRQVGLSAWLKPKGT

SEQ ID NO: 1769 - protein, 774 aa, synthetic construct
MILDTDCITEDGKPVFRIFKKENGEFKIEYDRTFEPYFYALLKDDSAIEEVKKITAERHGTVVTVKRVEKVQKKFLGRPVEVWKLYFTHWQDVPAIRDKIREHPAVIDIYEYDIPFAKRYLIDKGLVPMEGDEELKMLAFDIETLYHEGEEFAEGPILMISYADEEGARVITWKNVDLPYVDVVSTEREMIKRFLRVVKEKDPDVLITYNGDNFDFAYLKKRCEKLGINFALGRDGSEPKIQRMGDRFAVEVKGRIHFDLYPVIRRTINLPTYTLEAVYEAVFGQPKEKVYAEEITTAWETGENLERVARYSMEDAKVTYELGKEFLPMEAQLSRLIGQSLWDVSRSSTGNLVEWFLLRKAYERNELAPNKPDEKELARRRQSYEGGYVKEPERGLWENIVYLDFRSLYPSIIITHNVSPDTLNREGCKEYDVAPQVGHRFCKDFPGFIPSLLGDLLEERQKIKKKMKATIDPIERKLLDYRQRAIKILANSYYGYYGYARARWYCKECAESVTAWGREYITMTIKEIEEKYGFKVIYSDTDGFFATIPGADAETVKKKAMEFLKYINAKLPGALELEYEGFYKRGFFVTKKKYAVIDEEGKITTRGLEIVRRDWSEIAKETQARVLEALLKDGDVEKAVRIVKEVTEKLSKYEVPPEKLVIHEQITRDLKDYKATGPHVAVAKRLAARGVKIRPGTVISYIVLKGSGRIGDRAIPFDEFDPTKHKYDAEYYIENQVLPAVERILRAFGYRKEDLRYQKTRQVGLSAWLKPKGT

SEQ ID NO: 1770 - protein, 774 aa, synthetic construct
MILDTDCITEDGKPVFRIFKKENGEFKIEYDRTFEPYFYALLKDDSAIEEVKKITAERHGTVVTVKRVEKVQKKFLGRPVEVWKLYFTHWQDVPAIADKIREHPAVIDIYEYDIPFAKRYLIDKGLVPMEGDEELKMLAFDIETLYHEGEEFAEGPILMISYADEEGARVITWKNVDLPYVDVVSTEREMIKRFLRVVKEKDPDVLITYNGDNFDFAYLKKRCEKLGINFALGRDGSEPKIQRMGDRFAVEVKGRIHFDLYPVIRRTINLPTYTLEAVYEAVFGQPKEKVYAEEITTAWETGENLERVARYSMEDAKVTYELGKEFLPMEAQLSRLIGQSLWDVSRSSTGNLVEWFLLRKAYERNELAPNKPDEKELARRRQSYEGGYVKEPERGLWENIVYLDFRSLYPSIIITHNVSPDTLNREGCKEYDVAPQVGHRFCKDFPGFIPSLLGDLLEERQKIKKKMKATIDPIERKLLDYRQRAIKILANSYYGYYGYARARWYCKECAESVTAWGREYITMTIKEIEEKYGFKVIYSDTDGFFATIPGADAETVKKKAMEFLKYINAKLPGALELEYEGFYKRGFFVTKKKYAVIDEEGKITTRGLEIVRRDWSEIAKETQARVLEALLKDGDVEKAVRIVKEVTEKLSKYEVPPEKLVIHEQITRDLKDYKATGPHVAVAKRLAARGVKIRPGTVISYIVLKGSGRIGDRAIPFDEFDPTKHKYDAEYYIENQVLPAVERILRAFGYRKEDLRYQKTRQVGLSAWLKPKGT

SEQ ID NO: 1771 - protein, 774 aa, synthetic construct
MILDTDCITEDGKPVFRIFKKENGEFKIEYDRTFEPYFYALLKDDSAIEEVKKITAERHGTVVTVKRVEKVQKKFLGRPVEVWKLYFTHWQDVPAIFDKIREHPAVIDIYEYDIPFAKRYLIDKGLVPMEGDEELKMLAFDIETLYHEGEEFAEGPILMISYADEEGARVITWKNVDLPYVDVVSTEREMIKRFLRVVKEKDPDVLITYNGDNFDFAYLKKRCEKLGINFALGRDGSEPKIQRMGDRFAVEVKGRIHFDLYPVIRRTINLPTYTLEAVYEAVFGQPKEKVYAEEITTAWETGENLERVARYSMEDAKVTYELGKEFLPMEAQLSRLIGQSLWDVSRSSTGNLVEWFLLRKAYERNELAPNKPDEKELARRRQSYEGGYVKEPERGLWENIVYLDFRSLYPSIIITHNVSPDTLNREGCKEYDVAPQVGHRFCKDFPGFIPSLLGDLLEERQKIKKKMKATIDPIERKLLDYRQRAIKILANSYYGYYGYARARWYCKECAESVTAWGREYITMTIKEIEEKYGFKVIYSDTDGFFATIPGADAETVKKKAMEFLKYINAKLPGALELEYEGFYKRGFFVTKKKYAVIDEEGKITTRGLEIVRRDWSEIAKETQARVLEALLKDGDVEKAVRIVKEVTEKLSKYEVPPEKLVIHEQITRDLKDYKATGPHVAVAKRLAARGVKIRPGTVISYIVLKGSGRIGDRAIPFDEFDPTKHKYDAEYYIENQVLPAVERILRAFGYRKEDLRYQKTRQVGLSAWLKPKGT

SEQ ID NO: 1772 - protein, 774 aa, synthetic construct
MILDTDCITEDGKPVFRIFKKENGEFKIEYDRTFEPYFYALLKDDSAIEEVKKITAERHGTVVTVKRVEKVQKKFLGRPVEVWKLYFTHWQDVPAIHDKIREHPAVIDIYEYDIPFAKRYLIDKGLVPMEGDEELKMLAFDIETLYHEGEEFAEGPILMISYADEEGARVITWKNVDLPYVDVVSTEREMIKRFLRVVKEKDPDVLITYNGDNFDFAYLKKRCEKLGINFALGRDGSEPKIQRMGDRFAVEVKGRIHFDLYPVIRRTINLPTYTLEAVYEAVFGQPKEKVYAEEITTAWETGENLERVARYSMEDAKVTYELGKEFLPMEAQLSRLIGQSLWDVSRSSTGNLVEWFLLRKAYERNELAPNKPDEKELARRRQSYEGGYVKEPERGLWENIVYLDFRSLYPSIIITHNVSPDTLNREGCKEYDVAPQVGHRFCKDFPGFIPSLLGDLLEERQKIKKKMKATIDPIERKLLDYRQRAIKILANSYYGYYGYARARWYCKECAESVTAWGREYITMTIKEIEEKYGFKVIYSDTDGFFATIPGADAETVKKKAMEFLKYINAKLPGALELEYEGFYKRGFFVTKKKYAVIDEEGKITTRGLEIVRRDWSEIAKETQARVLEALLKDGDVEKAVRIVKEVTEKLSKYEVPPEKLVIHEQITRDLKDYKATGPHVAVAKRLAARGVKIRPGTVISYIVLKGSGRIGDRAIPFDEFDPTKHKYDAEYYIENQVLPAVERILRAFGYRKEDLRYQKTRQVGLSAWLKPKGT

SEQ ID NO: 1773 - protein, 774 aa, synthetic construct
MILDTDCITEDGKPVFRIFKKENGEFKIEYDRTFEPYFYALLKDDSAIEEVKKITAERHGTVVTVKRVEKVQKKFLGRPVEVWKLYFTHWQDVPAIWDKIREHPAVIDIYEYDIPFAKRYLIDKGLVPMEGDEELKMLAFDIETLYHEGEEFAEGPILMISYADEEGARVITWKNVDLPYVDVVSTEREMIKRFLRVVKEKDPDVLITYNGDNFDFAYLKKRCEKLGINFALGRDGSEPKIQRMGDRFAVEVKGRIHFDLYPVIRRTINLPTYTLEAVYEAVFGQPKEKVYAEEITTAWETGENLERVARYSMEDAKVTYELGKEFLPMEAQLSRLIGQSLWDVSRSSTGNLVEWFLLRKAYERNELAPNKPDEKELARRRQSYEGGYVKEPERGLWENIVYLDFRSLYPSIIITHNVSPDTLNREGCKEYDVAPQVGHRFCKDFPGFIPSLLGDLLEERQKIKKKMKATIDPIERKLLDYRQRAIKILANSYYGYYGYARARWYCKECAESVTAWGREYITMTIKEIEEKYGFKVIYSDTDGFFATIPGADAETVKKKAMEFLKYINAKLPGALELEYEGFYKRGFFVTKKKYAVIDEEGKITTRGLEIVRRDWSEIAKETQARVLEALLKDGDVEKAVRIVKEVTEKLSKYEVPPEKLVIHEQITRDLKDYKATGPHVAVAKRLAARGVKIRPGTVISYIVLKGSGRIGDRAIPFDEFDPTKHKYDAEYYIENQVLPAVERILRAFGYRKEDLRYQKTRQVGLSAWLKPKGT

SEQ ID NO: 1774 - protein, 774 aa, synthetic construct
MILDTDCITEDGKPVFRIFKKENGEFKIEYDRTFEPYFYALLKDDSAIEEVKKITAERHGTVVTVKRVEKVQKKFLGRPVEVWKLYFTHWQDIPAIRDKIREHPAVIDIYEYDIPFAKRYLIDKGLVPMEGDEELKMLAFDIETLYHEGEEFAEGPILMISYADEEGARVITWKNVDLPYVDVVSTEREMIKRFLRVVKEKDPDVLITYNGDNFDFAYLKKRCEKLGINFALGRDGSEPKIQRMGDRFAVEVKGRIHFDLYPVIRRTINLPTYTLEAVYEAVFGQPKEKVYAEEITTAWETGENLERVARYSMEDAKVTYELGKEFLPMEAQLSRLIGQSLWDVSRSSTGNLVEWFLLRKAYERNELAPNKPDEKELARRRQSYEGGYVKEPERGLWENIVYLDFRSLYPSIIITHNVSPDTLNREGCKEYDVAPQVGHRFCKDFPGFIPSLLGDLLEERQKIKKKMKATIDPIERKLLDYRQRAIKILANSYYGYYGYARARWYCKECAESVTAWGREYITMTIKEIEEKYGFKVIYSDTDGFFATIPGADAETVKKKAMEFLKYINAKLPGALELEYEGFYKRGFFVTKKKYAVIDEEGKITTRGLEIVRRDWSEIAKETQARVLEALLKDGDVEKAVRIVKEVTEKLSKYEVPPEKLVIHEQITRDLKDYKATGPHVAVAKRLAARGVKIRPGTVISYIVLKGSGRIGDRAIPFDEFDPTKHKYDAEYYIENQVLPAVERILRAFGYRKEDLRYQKTRQVGLSAWLKPKGT

SEQ ID NO: 1775 - protein, 774 aa, synthetic construct
MILDTDCITEDGKPVFRIFKKENGEFKIEYDRTFEPYFYALLKDDSAIEEVKKITAERHGTVVTVKRVEKVQKKFLGRPVEVWKLYFTHWQDIPAIADKIREHPAVIDIYEYDIPFAKRYLIDKGLVPMEGDEELKMLAFDIETLYHEGEEFAEGPILMISYADEEGARVITWKNVDLPYVDVVSTEREMIKRFLRVVKEKDPDVLITYNGDNFDFAYLKKRCEKLGINFALGRDGSEPKIQRMGDRFAVEVKGRIHFDLYPVIRRTINLPTYTLEAVYEAVFGQPKEKVYAEEITTAWETGENLERVARYSMEDAKVTYELGKEFLPMEAQLSRLIGQSLWDVSRSSTGNLVEWFLLRKAYERNELAPNKPDEKELARRRQSYEGGYVKEPERGLWENIVYLDFRSLYPSIIITHNVSPDTLNREGCKEYDVAPQVGHRFCKDFPGFIPSLLGDLLEERQKIKKKMKATIDPIERKLLDYRQRAIKILANSYYGYYGYARARWYCKECAESVTAWGREYITMTIKEIEEKYGFKVIYSDTDGFFATIPGADAETVKKKAMEFLKYINAKLPGALELEYEGFYKRGFFVTKKKYAVIDEEGKITTRGLEIVRRDWSEIAKETQARVLEALLKDGDVEKAVRIVKEVTEKLSKYEVPPEKLVIHEQITRDLKDYKATGPHVAVAKRLAARGVKIRPGTVISYIVLKGSGRIGDRAIPFDEFDPTKHKYDAEYYIENQVLPAVERILRAFGYRKEDLRYQKTRQVGLSAWLKPKGT

SEQ ID NO: 1776 - protein, 774 aa, synthetic construct
MILDTDCITEDGKPVFRIFKKENGEFKIEYDRTFEPYFYALLKDDSAIEEVKKITAERHGTVVTVKRVEKVQKKFLGRPVEVWKLYFTHWQDIPAIFDKIREHPAVIDIYEYDIPFAKRYLIDKGLVPMEGDEELKMLAFDIETLYHEGEEFAEGPILMISYADEEGARVITWKNVDLPYVDVVSTEREMIKRFLRVVKEKDPDVLITYNGDNFDFAYLKKRCEKLGINFALGRDGSEPKIQRMGDRFAVEVKGRIHFDLYPVIRRTINLPTYTLEAVYEAVFGQPKEKVYAEEITTAWETGENLERVARYSMEDAKVTYELGKEFLPMEAQLSRLIGQSLWDVSRSSTGNLVEWFLLRKAYERNELAPNKPDEKELARRRQSYEGGYVKEPERGLWENIVYLDFRSLYPSIIITHNVSPDTLNREGCKEYDVAPQVGHRFCKDFPGFIPSLLGDLLEERQKIKKKMKATIDPIERKLLDYRQRAIKILANSYYGYYGYARARWYCKECAESVTAWGREYITMTIKEIEEKYGFKVIYSDTDGFFATIPGADAETVKKKAMEFLKYINAKLPGALELEYEGFYKRGFFVTKKKYAVIDEEGKITTRGLEIVRRDWSEIAKETQARVLEALLKDGDVEKAVRIVKEVTEKLSKYEVPPEKLVIHEQITRDLKDYKATGPHVAVAKRLAARGVKIRPGTVISYIVLKGSGRIGDRAIPFDEFDPTKHKYDAEYYIENQVLPAVERILRAFGYRKEDLRYQKTRQVGLSAWLKPKGT

SEQ ID NO: 1777 - protein, 774 aa, synthetic construct
MILDTDCITEDGKPVFRIFKKENGEFKIEYDRTFEPYFYALLKDDSAIEEVKKITAERHGTVVTVKRVEKVQKKFLGRPVEVWKLYFTHWQDIPAIHDKIREHPAVIDIYEYDIPFAKRYLIDKGLVPMEGDEELKMLAFDIETLYHEGEEFAEGPILMISYADEEGARVITWKNVDLPYVDVVSTEREMIKRFLRVVKEKDPDVLITYNGDNFDFAYLKKRCEKLGINFALGRDGSEPKIQRMGDRFAVEVKGRIHFDLYPVIRRTINLPTYTLEAVYEAVFGQPKEKVYAEEITTAWETGENLERVARYSMEDAKVTYELGKEFLPMEAQLSRLIGQSLWDVSRSSTGNLVEWFLLRKAYERNELAPNKPDEKELARRRQSYEGGYVKEPERGLWENIVYLDFRSLYPSIIITHNVSPDTLNREGCKEYDVAPQVGHRFCKDFPGFIPSLLGDLLEERQKIKKKMKATIDPIERKLLDYRQRAIKILANSYYGYYGYARARWYCKECAESVTAWGREYITMTIKEIEEKYGFKVIYSDTDGFFATIPGADAETVKKKAMEFLKYINAKLPGALELEYEGFYKRGFFVTKKKYAVIDEEGKITTRGLEIVRRDWSEIAKETQARVLEALLKDGDVEKAVRIVKEVTEKLSKYEVPPEKLVIHEQITRDLKDYKATGPHVAVAKRLAARGVKIRPGTVISYIVLKGSGRIGDRAIPFDEFDPTKHKYDAEYYIENQVLPAVERILRAFGYRKEDLRYQKTRQVGLSAWLKPKGT

SEQ ID NO: 1778 - protein, 774 aa, synthetic construct
MILDTDCITEDGKPVFRIFKKENGEFKIEYDRTFEPYFYALLKDDSAIEEVKKITAERHGTVVTVKRVEKVQKKFLGRPVEVWKLYFTHWQDIPAIWDKIREHPAVIDIYEYDIPFAKRYLIDKGLVPMEGDEELKMLAFDIETLYHEGEEFAEGPILMISYADEEGARVITWKNVDLPYVDVVSTEREMIKRFLRVVKEKDPDVLITYNGDNFDFAYLKKRCEKLGINFALGRDGSEPKIQRMGDRFAVEVKGRIHFDLYPVIRRTINLPTYTLEAVYEAVFGQPKEKVYAEEITTAWETGENLERVARYSMEDAKVTYELGKEFLPMEAQLSRLIGQSLWDVSRSSTGNLVEWFLLRKAYERNELAPNKPDEKELARRRQSYEGGYVKEPERGLWENIVYLDFRSLYPSIIITHNVSPDTLNREGCKEYDVAPQVGHRFCKDFPGFIPSLLGDLLEERQKIKKKMKATIDPIERKLLDYRQRAIKILANSYYGYYGYARARWYCKECAESVTAWGREYITMTIKEIEEKYGFKVIYSDTDGFFATIPGADAETVKKKAMEFLKYINAKLPGALELEYEGFYKRGFFVTKKKYAVIDEEGKITTRGLEIVRRDWSEIAKETQARVLEALLKDGDVEKAVRIVKEVTEKLSKYEVPPEKLVIHEQITRDLKDYKATGPHVAVAKRLAARGVKIRPGTVISYIVLKGSGRIGDRAIPFDEFDPTKHKYDAEYYIENQVLPAVERILRAFGYRKEDLRYQKTRQVGLSAWLKPKGT

SEQ ID NO: 1779 - protein, 774 aa, synthetic construct
MILDTDCITEDGKPVFRIFKKENGEFKIEYDRTFEPYFYALLKDDSAIEEVKKITAERHGTVVTVKRVEKVQKKFLGRPVEVWKLYFTHYQDVPAIRDKIREHPAVIDIYEYDIPFAKRYLIDKGLVPMEGDEELKMLAFDIETLYHEGEEFAEGPILMISYADEEGARVITWKNVDLPYVDVVSTEREMIKRFLRVVKEKDPDVLITYNGDNFDFAYLKKRCEKLGINFALGRDGSEPKIQRMGDRFAVEVKGRIHFDLYPVIRRTINLPTYTLEAVYEAVFGQPKEKVYAEEITTAWETGENLERVARYSMEDAKVTYELGKEFLPMEAQLSRLIGQSLWDVSRSSTGNLVEWFLLRKAYERNELAPNKPDEKELARRRQSYEGGYVKEPERGLWENIVYLDFRSLYPSIIITHNVSPDTLNREGCKEYDVAPQVGHRFCKDFPGFIPSLLGDLLEERQKIKKKMKATIDPIERKLLDYRQRAIKILANSYYGYYGYARARWYCKECAESVTAWGREYITMTIKEIEEKYGFKVIYSDTDGFFATIPGADAETVKKKAMEFLKYINAKLPGALELEYEGFYKRGFFVTKKKYAVIDEEGKITTRGLEIVRRDWSEIAKETQARVLEALLKDGDVEKAVRIVKEVTEKLSKYEVPPEKLVIHEQITRDLKDYKATGPHVAVAKRLAARGVKIRPGTVISYIVLKGSGRIGDRAIPFDEFDPTKHKYDAEYYIENQVLPAVERILRAFGYRKEDLRYQKTRQVGLSAWLKPKGT

SEQ ID NO: 1780 - protein, 774 aa, synthetic construct
MILDTDCITEDGKPVFRIFKKENGEFKIEYDRTFEPYFYALLKDDSAIEEVKKITAERHGTVVTVKRVEKVQKKFLGRPVEVWKLYFTHYQDVPAIADKIREHPAVIDIYEYDIPFAKRYLIDKGLVPMEGDEELKMLAFDIETLYHEGEEFAEGPILMISYADEEGARVITWKNVDLPYVDVVSTEREMIKRFLRVVKEKDPDVLITYNGDNFDFAYLKKRCEKLGINFALGRDGSEPKIQRMGDRFAVEVKGRIHFDLYPVIRRTINLPTYTLEAVYEAVFGQPKEKVYAEEITTAWETGENLERVARYSMEDAKVTYELGKEFLPMEAQLSRLIGQSLWDVSRSSTGNLVEWFLLRKAYERNELAPNKPDEKELARRRQSYEGGYVKEPERGLWENIVYLDFRSLYPSIIITHNVSPDTLNREGCKEYDVAPQVGHRFCKDFPGFIPSLLGDLLEERQKIKKKMKATIDPIERKLLDYRQRAIKILANSYYGYYGYARARWYCKECAESVTAWGREYITMTIKEIEEKYGFKVIYSDTDGFFATIPGADAETVKKKAMEFLKYINAKLPGALELEYEGFYKRGFFVTKKKYAVIDEEGKITTRGLEIVRRDWSEIAKETQARVLEALLKDGDVEKAVRIVKEVTEKLSKYEVPPEKLVIHEQITRDLKDYKATGPHVAVAKRLAARGVKIRPGTVISYIVLKGSGRIGDRAIPFDEFDPTKHKYDAEYYIENQVLPAVERILRAFGYRKEDLRYQKTRQVGLSAWLKPKGT

SEQ ID NO: 1781 - protein, 774 aa, synthetic construct
MILDTDCITEDGKPVFRIFKKENGEFKIEYDRTFEPYFYALLKDDSAIEEVKKITAERHGTVVTVKRVEKVQKKFLGRPVEVWKLYFTHYQDIPAIRDKIREHPAVIDIYEYDIPFAKRYLIDKGLVPMEGDEELKMLAFDIETLYHEGEEFAEGPILMISYADEEGARVITWKNVDLPYVDVVSTEREMIKRFLRVVKEKDPDVLITYNGDNFDFAYLKKRCEKLGINFALGRDGSEPKIQRMGDRFAVEVKGRIHFDLYPVIRRTINLPTYTLEAVYEAVFGQPKEKVYAEEITTAWETGENLERVARYSMEDAKVTYELGKEFLPMEAQLSRLIGQSLWDVSRSSTGNLVEWFLLRKAYERNELAPNKPDEKELARRRQSYEGGYVKEPERGLWENIVYLDFRSLYPSIIITHNVSPDTLNREGCKEYDVAPQVGHRFCKDFPGFIPSLLGDLLEERQKIKKKMKATIDPIERKLLDYRQRAIKILANSYYGYYGYARARWYCKECAESVTAWGREYITMTIKEIEEKYGFKVIYSDTDGFFATIPGADAETVKKKAMEFLKYINAKLPGALELEYEGFYKRGFFVTKKKYAVIDEEGKITTRGLEIVRRDWSEIAKETQARVLEALLKDGDVEKAVRIVKEVTEKLSKYEVPPEKLVIHEQITRDLKDYKATGPHVAVAKRLAARGVKIRPGTVISYIVLKGSGRIGDRAIPFDEFDPTKHKYDAEYYIENQVLPAVERILRAFGYRKEDLRYQKTRQVGLSAWLKPKGT

SEQ ID NO: 1782 - protein, 774 aa, synthetic construct
MILDTDCITEDGKPVFRIFKKENGEFKIEYDRTFEPYFYALLKDDSAIEEVKKITAERHGTVVTVKRVEKVQKKFLGRPVEVWKLYFTHYQDIPAIADKIREHPAVIDIYEYDIPFAKRYLIDKGLVPMEGDEELKMLAFDIETLYHEGEEFAEGPILMISYADEEGARVITWKNVDLPYVDVVSTEREMIKRFLRVVKEKDPDVLITYNGDNFDFAYLKKRCEKLGINFALGRDGSEPKIQRMGDRFAVEVKGRIHFDLYPVIRRTINLPTYTLEAVYEAVFGQPKEKVYAEEITTAWETGENLERVARYSMEDAKVTYELGKEFLPMEAQLSRLIGQSLWDVSRSSTGNLVEWFLLRKAYERNELAPNKPDEKELARRRQSYEGGYVKEPERGLWENIVYLDFRSLYPSIIITHNVSPDTLNREGCKEYDVAPQVGHRFCKDFPGFIPSLLGDLLEERQKIKKKMKATIDPIERKLLDYRQRAIKILANSYYGYYGYARARWYCKECAESVTAWGREYITMTIKEIEEKYGFKVIYSDTDGFFATIPGADAETVKKKAMEFLKYINAKLPGALELEYEGFYKRGFFVTKKKYAVIDEEGKITTRGLEIVRRDWSEIAKETQARVLEALLKDGDVEKAVRIVKEVTEKLSKYEVPPEKLVIHEQITRDLKDYKATGPHVAVAKRLAARGVKIRPGTVISYIVLKGSGRIGDRAIPFDEFDPTKHKYDAEYYIENQVLPAVERILRAFGYRKEDLRYQKTRQVGLSAWLKPKGT

SEQ ID NO: 1783 - protein, 774 aa, synthetic construct
MILDTDCITEDGKPVFRIFKKENGEFKIEYDRTFEPYFYALLKDDSAIEEVKKITAERHGTVVTVKRVEKVQKKFLGRPVEVWKLYFTHYQDIPAIFDKIREHPAVIDIYEYDIPFAKRYLIDKGLVPMEGDEELKMLAFDIETLYHEGEEFAEGPILMISYADEEGARVITWKNVDLPYVDVVSTEREMIKRFLRVVKEKDPDVLITYNGDNFDFAYLKKRCEKLGINFALGRDGSEPKIQRMGDRFAVEVKGRIHFDLYPVIRRTINLPTYTLEAVYEAVFGQPKEKVYAEEITTAWETGENLERVARYSMEDAKVTYELGKEFLPMEAQLSRLIGQSLWDVSRSSTGNLVEWFLLRKAYERNELAPNKPDEKELARRRQSYEGGYVKEPERGLWENIVYLDFRSLYPSIIITHNVSPDTLNREGCKEYDVAPQVGHRFCKDFPGFIPSLLGDLLEERQKIKKKMKATIDPIERKLLDYRQRAIKILANSYYGYYGYARARWYCKECAESVTAWGREYITMTIKEIEEKYGFKVIYSDTDGFFATIPGADAETVKKKAMEFLKYINAKLPGALELEYEGFYKRGFFVTKKKYAVIDEEGKITTRGLEIVRRDWSEIAKETQARVLEALLKDGDVEKAVRIVKEVTEKLSKYEVPPEKLVIHEQITRDLKDYKATGPHVAVAKRLAARGVKIRPGTVISYIVLKGSGRIGDRAIPFDEFDPTKHKYDAEYYIENQVLPAVERILRAFGYRKEDLRYQKTRQVGLSAWLKPKGT

SEQ ID NO: 1784 - protein, 774 aa, synthetic construct
MILDTDCITEDGKPVFRIFKKENGEFKIEYDRTFEPYFYALLKDDSAIEEVKKITAERHGTVVTVKRVEKVQKKFLGRPVEVWKLYFTHYQDIPAIHDKIREHPAVIDIYEYDIPFAKRYLIDKGLVPMEGDEELKMLAFDIETLYHEGEEFAEGPILMISYADEEGARVITWKNVDLPYVDVVSTEREMIKRFLRVVKEKDPDVLITYNGDNFDFAYLKKRCEKLGINFALGRDGSEPKIQRMGDRFAVEVKGRIHFDLYPVIRRTINLPTYTLEAVYEAVFGQPKEKVYAEEITTAWETGENLERVARYSMEDAKVTYELGKEFLPMEAQLSRLIGQSLWDVSRSSTGNLVEWFLLRKAYERNELAPNKPDEKELARRRQSYEGGYVKEPERGLWENIVYLDFRSLYPSIIITHNVSPDTLNREGCKEYDVAPQVGHRFCKDFPGFIPSLLGDLLEERQKIKKKMKATIDPIERKLLDYRQRAIKILANSYYGYYGYARARWYCKECAESVTAWGREYITMTIKEIEEKYGFKVIYSDTDGFFATIPGADAETVKKKAMEFLKYINAKLPGALELEYEGFYKRGFFVTKKKYAVIDEEGKITTRGLEIVRRDWSEIAKETQARVLEALLKDGDVEKAVRIVKEVTEKLSKYEVPPEKLVIHEQITRDLKDYKATGPHVAVAKRLAARGVKIRPGTVISYIVLKGSGRIGDRAIPFDEFDPTKHKYDAEYYIENQVLPAVERILRAFGYRKEDLRYQKTRQVGLSAWLKPKGT

SEQ ID NO: 1785 - protein, 774 aa, synthetic construct
MILDTDCITEDGKPVFRIFKKENGEFKIEYDRTFEPYFYALLKDDSAIEEVKKITAERHGTVVTVKRVEKVQKKFLGRPVEVWKLYFTHYQDIPAIWDKIREHPAVIDIYEYDIPFAKRYLIDKGLVPMEGDEELKMLAFDIETLYHEGEEFAEGPILMISYADEEGARVITWKNVDLPYVDVVSTEREMIKRFLRVVKEKDPDVLITYNGDNFDFAYLKKRCEKLGINFALGRDGSEPKIQRMGDRFAVEVKGRIHFDLYPVIRRTINLPTYTLEAVYEAVFGQPKEKVYAEEITTAWETGENLERVARYSMEDAKVTYELGKEFLPMEAQLSRLIGQSLWDVSRSSTGNLVEWFLLRKAYERNELAPNKPDEKELARRRQSYEGGYVKEPERGLWENIVYLDFRSLYPSIIITHNVSPDTLNREGCKEYDVAPQVGHRFCKDFPGFIPSLLGDLLEERQKIKKKMKATIDPIERKLLDYRQRAIKILANSYYGYYGYARARWYCKECAESVTAWGREYITMTIKEIEEKYGFKVIYSDTDGFFATIPGADAETVKKKAMEFLKYINAKLPGALELEYEGFYKRGFFVTKKKYAVIDEEGKITTRGLEIVRRDWSEIAKETQARVLEALLKDGDVEKAVRIVKEVTEKLSKYEVPPEKLVIHEQITRDLKDYKATGPHVAVAKRLAARGVKIRPGTVISYIVLKGSGRIGDRAIPFDEFDPTKHKYDAEYYIENQVLPAVERILRAFGYRKEDLRYQKTRQVGLSAWLKPKGT

SEQ ID NO: 1786 - protein, 774 aa, synthetic construct
MILDTDCITEDGKPVFRIFKKENGEFKIEYDRTFEPYFYALLKDDSAIEEVKKITAERHGTVVTVKRVEKVQKKFLGRPVEVWKLYFTHYQDKPAIRDKIREHPAVIDIYEYDIPFAKRYLIDKGLVPMEGDEELKMLAFDIETLYHEGEEFAEGPILMISYADEEGARVITWKNVDLPYVDVVSTEREMIKRFLRVVKEKDPDVLITYNGDNFDFAYLKKRCEKLGINFALGRDGSEPKIQRMGDRFAVEVKGRIHFDLYPVIRRTINLPTYTLEAVYEAVFGQPKEKVYAEEITTAWETGENLERVARYSMEDAKVTYELGKEFLPMEAQLSRLIGQSLWDVSRSSTGNLVEWFLLRKAYERNELAPNKPDEKELARRRQSYEGGYVKEPERGLWENIVYLDFRSLYPSIIITHNVSPDTLNREGCKEYDVAPQVGHRFCKDFPGFIPSLLGDLLEERQKIKKKMKATIDPIERKLLDYRQRAIKILANSYYGYYGYARARWYCKECAESVTAWGREYITMTIKEIEEKYGFKVIYSDTDGFFATIPGADAETVKKKAMEFLKYINAKLPGALELEYEGFYKRGFFVTKKKYAVIDEEGKITTRGLEIVRRDWSEIAKETQARVLEALLKDGDVEKAVRIVKEVTEKLSKYEVPPEKLVIHEQITRDLKDYKATGPHVAVAKRLAARGVKIRPGTVISYIVLKGSGRIGDRAIPFDEFDPTKHKYDAEYYIENQVLPAVERILRAFGYRKEDLRYQKTRQVGLSAWLKPKGT

SEQ ID NO: 1787 - protein, 774 aa, synthetic construct
MILDTDCITEDGKPVFRIFKKENGEFKIEYDRTFEPYFYALLKDDSAIEEVKKITAERHGTVVTVKRVEKVQKKFLGRPVEVWKLYFTHYQDKPAIADKIREHPAVIDIYEYDIPFAKRYLIDKGLVPMEGDEELKMLAFDIETLYHEGEEFAEGPILMISYADEEGARVITWKNVDLPYVDVVSTEREMIKRFLRVVKEKDPDVLITYNGDNFDFAYLKKRCEKLGINFALGRDGSEPKIQRMGDRFAVEVKGRIHFDLYPVIRRTINLPTYTLEAVYEAVFGQPKEKVYAEEITTAWETGENLERVARYSMEDAKVTYELGKEFLPMEAQLSRLIGQSLWDVSRSSTGNLVEWFLLRKAYERNELAPNKPDEKELARRRQSYEGGYVKEPERGLWENIVYLDFRSLYPSIIITHNVSPDTLNREGCKEYDVAPQVGHRFCKDFPGFIPSLLGDLLEERQKIKKKMKATIDPIERKLLDYRQRAIKILANSYYGYYGYARARWYCKECAESVTAWGREYITMTIKEIEEKYGFKVIYSDTDGFFATIPGADAETVKKKAMEFLKYINAKLPGALELEYEGFYKRGFFVTKKKYAVIDEEGKITTRGLEIVRRDWSEIAKETQARVLEALLKDGDVEKAVRIVKEVTEKLSKYEVPPEKLVIHEQITRDLKDYKATGPHVAVAKRLAARGVKIRPGTVISYIVLKGSGRIGDRAIPFDEFDPTKHKYDAEYYIENQVLPAVERILRAFGYRKEDLRYQKTRQVGLSAWLKPKGT

SEQ ID NO: 1788 - protein, 774 aa, synthetic construct
MILDTDCITEDGKPVFRIFKKENGEFKIEYDRTFEPYFYALLKDDSAIEEVKKITAERHGTVVTVKRVEKVQKKFLGRPVEVWKLYFTHPQDVPAIADKIREHPAVIDIYEYDIPFAKRYLIDKGLVPMEGDEELKMLAFDIETLYHEGEEFAEGPILMISYADEEGARVITWKNVDLPYVDVVSTEREMIKRFLRVVKEKDPDVLITYNGDNFDFAYLKKRCEKLGINFALGRDGSEPKIQRMGDRFAVEVKGRIHFDLYPVIRRTINLPTYTLEAVYEAVFGQPKEKVYAEEITTAWETGENLERVARYSMEDAKVTYELGKEFLPMEAQLSRLIGQSLWDVSRSSTGNLVEWFLLRKAYERNELAPNKPDEKELARRRQSYEGGYVKEPERGLWENIVYLDFRSLYPSIIITHNVSPDTLNREGCKEYDVAPQVGHRFCKDFPGFIPSLLGDLLEERQKIKKKMKATIDPIERKLLDYRQRAIKILANSYYGYYGYARARWYCKECAESVTAWGREYITMTIKEIEEKYGFKVIYSDTDGFFATIPGADAETVKKKAMEFLKYINAKLPGALELEYEGFYKRGFFVTKKKYAVIDEEGKITTRGLEIVRRDWSEIAKETQARVLEALLKDGDVEKAVRIVKEVTEKLSKYEVPPEKLVIHEQITRDLKDYKATGPHVAVAKRLAARGVKIRPGTVISYIVLKGSGRIGDRAIPFDEFDPTKHKYDAEYYIENQVLPAVERILRAFGYRKEDLRYQKTRQVGLSAWLKPKGT

SEQ ID NO: 1789 - protein, 774 aa, synthetic construct
MILDTDCITEDGKPVFRIFKKENGEFKIEYDRTFEPYFYALLKDDSAIEEVKKITAERHGTVVTVKRVEKVQKKFLGRPVEVWKLYFTHPQDVPAIFDKIREHPAVIDIYEYDIPFAKRYLIDKGLVPMEGDEELKMLAFDIETLYHEGEEFAEGPILMISYADEEGARVITWKNVDLPYVDVVSTEREMIKRFLRVVKEKDPDVLITYNGDNFDFAYLKKRCEKLGINFALGRDGSEPKIQRMGDRFAVEVKGRIHFDLYPVIRRTINLPTYTLEAVYEAVFGQPKEKVYAEEITTAWETGENLERVARYSMEDAKVTYELGKEFLPMEAQLSRLIGQSLWDVSRSSTGNLVEWFLLRKAYERNELAPNKPDEKELARRRQSYEGGYVKEPERGLWENIVYLDFRSLYPSIIITHNVSPDTLNREGCKEYDVAPQVGHRFCKDFPGFIPSLLGDLLEERQKIKKKMKATIDPIERKLLDYRQRAIKILANSYYGYYGYARARWYCKECAESVTAWGREYITMTIKEIEEKYGFKVIYSDTDGFFATIPGADAETVKKKAMEFLKYINAKLPGALELEYEGFYKRGFFVTKKKYAVIDEEGKITTRGLEIVRRDWSEIAKETQARVLEALLKDGDVEKAVRIVKEVTEKLSKYEVPPEKLVIHEQITRDLKDYKATGPHVAVAKRLAARGVKIRPGTVISYIVLKGSGRIGDRAIPFDEFDPTKHKYDAEYYIENQVLPAVERILRAFGYRKEDLRYQKTRQVGLSAWLKPKGT

SEQ ID NO: 1790 - protein, 774 aa, synthetic construct
MILDTDCITEDGKPVFRIFKKENGEFKIEYDRTFEPYFYALLKDDSAIEEVKKITAERHGTVVTVKRVEKVQKKFLGRPVEVWKLYFTHPQDVPAIWDKIREHPAVIDIYEYDIPFAKRYLIDKGLVPMEGDEELKMLAFDIETLYHEGEEFAEGPILMISYADEEGARVITWKNVDLPYVDVVSTEREMIKRFLRVVKEKDPDVLITYNGDNFDFAYLKKRCEKLGINFALGRDGSEPKIQRMGDRFAVEVKGRIHFDLYPVIRRTINLPTYTLEAVYEAVFGQPKEKVYAEEITTAWETGENLERVARYSMEDAKVTYELGKEFLPMEAQLSRLIGQSLWDVSRSSTGNLVEWFLLRKAYERNELAPNKPDEKELARRRQSYEGGYVKEPERGLWENIVYLDFRSLYPSIIITHNVSPDTLNREGCKEYDVAPQVGHRFCKDFPGFIPSLLGDLLEERQKIKKKMKATIDPIERKLLDYRQRAIKILANSYYGYYGYARARWYCKECAESVTAWGREYITMTIKEIEEKYGFKVIYSDTDGFFATIPGADAETVKKKAMEFLKYINAKLPGALELEYEGFYKRGFFVTKKKYAVIDEEGKITTRGLEIVRRDWSEIAKETQARVLEALLKDGDVEKAVRIVKEVTEKLSKYEVPPEKLVIHEQITRDLKDYKATGPHVAVAKRLAARGVKIRPGTVISYIVLKGSGRIGDRAIPFDEFDPTKHKYDAEYYIENQVLPAVERILRAFGYRKEDLRYQKTRQVGLSAWLKPKGT

SEQ ID NO: 1791 - protein, 774 aa, synthetic construct
MILDTDCITEDGKPVFRIFKKENGEFKIEYDRTFEPYFYALLKDDSAIEEVKKITAERHGTVVTVKRVEKVQKKFLGRPVEVWKLYFTHPQDIPAIRDKIREHPAVIDIYEYDIPFAKRYLIDKGLVPMEGDEELKMLAFDIETLYHEGEEFAEGPILMISYADEEGARVITWKNVDLPYVDVVSTEREMIKRFLRVVKEKDPDVLITYNGDNFDFAYLKKRCEKLGINFALGRDGSEPKIQRMGDRFAVEVKGRIHFDLYPVIRRTINLPTYTLEAVYEAVFGQPKEKVYAEEITTAWETGENLERVARYSMEDAKVTYELGKEFLPMEAQLSRLIGQSLWDVSRSSTGNLVEWFLLRKAYERNELAPNKPDEKELARRRQSYEGGYVKEPERGLWENIVYLDFRSLYPSIIITHNVSPDTLNREGCKEYDVAPQVGHRFCKDFPGFIPSLLGDLLEERQKIKKKMKATIDPIERKLLDYRQRAIKILANSYYGYYGYARARWYCKECAESVTAWGREYITMTIKEIEEKYGFKVIYSDTDGFFATIPGADAETVKKKAMEFLKYINAKLPGALELEYEGFYKRGFFVTKKKYAVIDEEGKITTRGLEIVRRDWSEIAKETQARVLEALLKDGDVEKAVRIVKEVTEKLSKYEVPPEKLVIHEQITRDLKDYKATGPHVAVAKRLAARGVKIRPGTVISYIVLKGSGRIGDRAIPFDEFDPTKHKYDAEYYIENQVLPAVERILRAFGYRKEDLRYQKTRQVGLSAWLKPKGT

SEQ ID NO: 1792 - protein, 774 aa, synthetic construct
MILDTDCITEDGKPVFRIFKKENGEFKIEYDRTFEPYFYALLKDDSAIEEVKKITAERHGTVVTVKRVEKVQKKFLGRPVEVWKLYFTHPQDIPAIADKIREHPAVIDIYEYDIPFAKRYLIDKGLVPMEGDEELKMLAFDIETLYHEGEEFAEGPILMISYADEEGARVITWKNVDLPYVDVVSTEREMIKRFLRVVKEKDPDVLITYNGDNFDFAYLKKRCEKLGINFALGRDGSEPKIQRMGDRFAVEVKGRIHFDLYPVIRRTINLPTYTLEAVYEAVFGQPKEKVYAEEITTAWETGENLERVARYSMEDAKVTYELGKEFLPMEAQLSRLIGQSLWDVSRSSTGNLVEWFLLRKAYERNELAPNKPDEKELARRRQSYEGGYVKEPERGLWENIVYLDFRSLYPSIIITHNVSPDTLNREGCKEYDVAPQVGHRFCKDFPGFIPSLLGDLLEERQKIKKKMKATIDPIERKLLDYRQRAIKILANSYYGYYGYARARWYCKECAESVTAWGREYITMTIKEIEEKYGFKVIYSDTDGFFATIPGADAETVKKKAMEFLKYINAKLPGALELEYEGFYKRGFFVTKKKYAVIDEEGKITTRGLEIVRRDWSEIAKETQARVLEALLKDGDVEKAVRIVKEVTEKLSKYEVPPEKLVIHEQITRDLKDYKATGPHVAVAKRLAARGVKIRPGTVISYIVLKGSGRIGDRAIPFDEFDPTKHKYDAEYYIENQVLPAVERILRAFGYRKEDLRYQKTRQVGLSAWLKPKGT

SEQ ID NO: 1793 - protein, 774 aa, synthetic construct
MILDTDCITEDGKPVFRIFKKENGEFKIEYDRTFEPYFYALLKDDSAIEEVKKITAERHGTVVTVKRVEKVQKKFLGRPVEVWKLYFTHPQDIPAIFDKIREHPAVIDIYEYDIPFAKRYLIDKGLVPMEGDEELKMLAFDIETLYHEGEEFAEGPILMISYADEEGARVITWKNVDLPYVDVVSTEREMIKRFLRVVKEKDPDVLITYNGDNFDFAYLKKRCEKLGINFALGRDGSEPKIQRMGDRFAVEVKGRIHFDLYPVIRRTINLPTYTLEAVYEAVFGQPKEKVYAEEITTAWETGENLERVARYSMEDAKVTYELGKEFLPMEAQLSRLIGQSLWDVSRSSTGNLVEWFLLRKAYERNELAPNKPDEKELARRRQSYEGGYVKEPERGLWENIVYLDFRSLYPSIIITHNVSPDTLNREGCKEYDVAPQVGHRFCKDFPGFIPSLLGDLLEERQKIKKKMKATIDPIERKLLDYRQRAIKILANSYYGYYGYARARWYCKECAESVTAWGREYITMTIKEIEEKYGFKVIYSDTDGFFATIPGADAETVKKKAMEFLKYINAKLPGALELEYEGFYKRGFFVTKKKYAVIDEEGKITTRGLEIVRRDWSEIAKETQARVLEALLKDGDVEKAVRIVKEVTEKLSKYEVPPEKLVIHEQITRDLKDYKATGPHVAVAKRLAARGVKIRPGTVISYIVLKGSGRIGDRAIPFDEFDPTKHKYDAEYYIENQVLPAVERILRAFGYRKEDLRYQKTRQVGLSAWLKPKGT

SEQ ID NO: 1794 - protein, 774 aa, synthetic construct
MILDTDCITEDGKPVFRIFKKENGEFKIEYDRTFEPYFYALLKDDSAIEEVKKITAERHGTVVTVKRVEKVQKKFLGRPVEVWKLYFTHPQDIPAIHDKIREHPAVIDIYEYDIPFAKRYLIDKGLVPMEGDEELKMLAFDIETLYHEGEEFAEGPILMISYADEEGARVITWKNVDLPYVDVVSTEREMIKRFLRVVKEKDPDVLITYNGDNFDFAYLKKRCEKLGINFALGRDGSEPKIQRMGDRFAVEVKGRIHFDLYPVIRRTINLPTYTLEAVYEAVFGQPKEKVYAEEITTAWETGENLERVARYSMEDAKVTYELGKEFLPMEAQLSRLIGQSLWDVSRSSTGNLVEWFLLRKAYERNELAPNKPDEKELARRRQSYEGGYVKEPERGLWENIVYLDFRSLYPSIIITHNVSPDTLNREGCKEYDVAPQVGHRFCKDFPGFIPSLLGDLLEERQKIKKKMKATIDPIERKLLDYRQRAIKILANSYYGYYGYARARWYCKECAESVTAWGREYITMTIKEIEEKYGFKVIYSDTDGFFATIPGADAETVKKKAMEFLKYINAKLPGALELEYEGFYKRGFFVTKKKYAVIDEEGKITTRGLEIVRRDWSEIAKETQARVLEALLKDGDVEKAVRIVKEVTEKLSKYEVPPEKLVIHEQITRDLKDYKATGPHVAVAKRLAARGVKIRPGTVISYIVLKGSGRIGDRAIPFDEFDPTKHKYDAEYYIENQVLPAVERILRAFGYRKEDLRYQKTRQVGLSAWLKPKGT

SEQ ID NO: 1795 - protein, 774 aa, synthetic construct
MILDTDCITEDGKPVFRIFKKENGEFKIEYDRTFEPYFYALLKDDSAIEEVKKITAERHGTVVTVKRVEKVQKKFLGRPVEVWKLYFTHPQDIPAIWDKIREHPAVIDIYEYDIPFAKRYLIDKGLVPMEGDEELKMLAFDIETLYHEGEEFAEGPILMISYADEEGARVITWKNVDLPYVDVVSTEREMIKRFLRVVKEKDPDVLITYNGDNFDFAYLKKRCEKLGINFALGRDGSEPKIQRMGDRFAVEVKGRIHFDLYPVIRRTINLPTYTLEAVYEAVFGQPKEKVYAEEITTAWETGENLERVARYSMEDAKVTYELGKEFLPMEAQLSRLIGQSLWDVSRSSTGNLVEWFLLRKAYERNELAPNKPDEKELARRRQSYEGGYVKEPERGLWENIVYLDFRSLYPSIIITHNVSPDTLNREGCKEYDVAPQVGHRFCKDFPGFIPSLLGDLLEERQKIKKKMKATIDPIERKLLDYRQRAIKILANSYYGYYGYARARWYCKECAESVTAWGREYITMTIKEIEEKYGFKVIYSDTDGFFATIPGADAETVKKKAMEFLKYINAKLPGALELEYEGFYKRGFFVTKKKYAVIDEEGKITTRGLEIVRRDWSEIAKETQARVLEALLKDGDVEKAVRIVKEVTEKLSKYEVPPEKLVIHEQITRDLKDYKATGPHVAVAKRLAARGVKIRPGTVISYIVLKGSGRIGDRAIPFDEFDPTKHKYDAEYYIENQVLPAVERILRAFGYRKEDLRYQKTRQVGLSAWLKPKGT

SEQ ID NO: 1796 - protein, 774 aa, synthetic construct
MILDTDCITEDGKPVFRIFKKENGEFKIEYDRTFEPYFYALLKDDSAIEEVKKITAERHGTVVTVKRVEKVQKKFLGRPVEVWKLYFTHPQDQPAIRDKIREHPAVIDIYEYDIPFAKRYLIDKGLVPMEGDEELKMLAFDIETLYHEGEEFAEGPILMISYADEEGARVITWKNVDLPYVDVVSTEREMIKRFLRVVKEKDPDVLITYNGDNFDFAYLKKRCEKLGINFALGRDGSEPKIQRMGDRFAVEVKGRIHFDLYPVIRRTINLPTYTLEAVYEAVFGQPKEKVYAEEITTAWETGENLERVARYSMEDAKVTYELGKEFLPMEAQLSRLIGQSLWDVSRSSTGNLVEWFLLRKAYERNELAPNKPDEKELARRRQSYEGGYVKEPERGLWENIVYLDFRSLYPSIIITHNVSPDTLNREGCKEYDVAPQVGHRFCKDFPGFIPSLLGDLLEERQKIKKKMKATIDPIERKLLDYRQRAIKILANSYYGYYGYARARWYCKECAESVTAWGREYITMTIKEIEEKYGFKVIYSDTDGFFATIPGADAETVKKKAMEFLKYINAKLPGALELEYEGFYKRGFFVTKKKYAVIDEEGKITTRGLEIVRRDWSEIAKETQARVLEALLKDGDVEKAVRIVKEVTEKLSKYEVPPEKLVIHEQITRDLKDYKATGPHVAVAKRLAARGVKIRPGTVISYIVLKGSGRIGDRAIPFDEFDPTKHKYDAEYYIENQVLPAVERILRAFGYRKEDLRYQKTRQVGLSAWLKPKGT

SEQ ID NO: 1797 - protein, 774 aa, synthetic construct
MILDTDCITEDGKPVFRIFKKENGEFKIEYDRTFEPYFYALLKDDSAIEEVKKITAERHGTVVTVKRVEKVQKKFLGRPVEVWKLYFTHPQDQPAIADKIREHPAVIDIYEYDIPFAKRYLIDKGLVPMEGDEELKMLAFDIETLYHEGEEFAEGPILMISYADEEGARVITWKNVDLPYVDVVSTEREMIKRFLRVVKEKDPDVLITYNGDNFDFAYLKKRCEKLGINFALGRDGSEPKIQRMGDRFAVEVKGRIHFDLYPVIRRTINLPTYTLEAVYEAVFGQPKEKVYAEEITTAWETGENLERVARYSMEDAKVTYELGKEFLPMEAQLSRLIGQSLWDVSRSSTGNLVEWFLLRKAYERNELAPNKPDEKELARRRQSYEGGYVKEPERGLWENIVYLDFRSLYPSIIITHNVSPDTLNREGCKEYDVAPQVGHRFCKDFPGFIPSLLGDLLEERQKIKKKMKATIDPIERKLLDYRQRAIKILANSYYGYYGYARARWYCKECAESVTAWGREYITMTIKEIEEKYGFKVIYSDTDGFFATIPGADAETVKKKAMEFLKYINAKLPGALELEYEGFYKRGFFVTKKKYAVIDEEGKITTRGLEIVRRDWSEIAKETQARVLEALLKDGDVEKAVRIVKEVTEKLSKYEVPPEKLVIHEQITRDLKDYKATGPHVAVAKRLAARGVKIRPGTVISYIVLKGSGRIGDRAIPFDEFDPTKHKYDAEYYIENQVLPAVERILRAFGYRKEDLRYQKTRQVGLSAWLKPKGT

SEQ ID NO: 1798 - protein, 774 aa, synthetic construct
MILDTDCITEDGKPVFRIFKKENGEFKIEYDRTFEPYFYALLKDDSAIEEVKKITAERHGTVVTVKRVEKVQKKFLGRPVEVWKLYFTHPQDRPAIRDKIREHPAVIDIYEYDIPFAKRYLIDKGLVPMEGDEELKMLAFDIETLYHEGEEFAEGPILMISYADEEGARVITWKNVDLPYVDVVSTEREMIKRFLRVVKEKDPDVLITYNGDNFDFAYLKKRCEKLGINFALGRDGSEPKIQRMGDRFAVEVKGRIHFDLYPVIRRTINLPTYTLEAVYEAVFGQPKEKVYAEEITTAWETGENLERVARYSMEDAKVTYELGKEFLPMEAQLSRLIGQSLWDVSRSSTGNLVEWFLLRKAYERNELAPNKPDEKELARRRQSYEGGYVKEPERGLWENIVYLDFRSLYPSIIITHNVSPDTLNREGCKEYDVAPQVGHRFCKDFPGFIPSLLGDLLEERQKIKKKMKATIDPIERKLLDYRQRAIKILANSYYGYYGYARARWYCKECAESVTAWGREYITMTIKEIEEKYGFKVIYSDTDGFFATIPGADAETVKKKAMEFLKYINAKLPGALELEYEGFYKRGFFVTKKKYAVIDEEGKITTRGLEIVRRDWSEIAKETQARVLEALLKDGDVEKAVRIVKEVTEKLSKYEVPPEKLVIHEQITRDLKDYKATGPHVAVAKRLAARGVKIRPGTVISYIVLKGSGRIGDRAIPFDEFDPTKHKYDAEYYIENQVLPAVERILRAFGYRKEDLRYQKTRQVGLSAWLKPKGT

SEQ ID NO: 1799 - protein, 774 aa, synthetic construct
MILDTDCITEDGKPVFRIFKKENGEFKIEYDRTFEPYFYALLKDDSAIEEVKKITAERHGTVVTVKRVEKVQKKFLGRPVEVWKLYFTHPQDRPAIADKIREHPAVIDIYEYDIPFAKRYLIDKGLVPMEGDEELKMLAFDIETLYHEGEEFAEGPILMISYADEEGARVITWKNVDLPYVDVVSTEREMIKRFLRVVKEKDPDVLITYNGDNFDFAYLKKRCEKLGINFALGRDGSEPKIQRMGDRFAVEVKGRIHFDLYPVIRRTINLPTYTLEAVYEAVFGQPKEKVYAEEITTAWETGENLERVARYSMEDAKVTYELGKEFLPMEAQLSRLIGQSLWDVSRSSTGNLVEWFLLRKAYERNELAPNKPDEKELARRRQSYEGGYVKEPERGLWENIVYLDFRSLYPSIIITHNVSPDTLNREGCKEYDVAPQVGHRFCKDFPGFIPSLLGDLLEERQKIKKKMKATIDPIERKLLDYRQRAIKILANSYYGYYGYARARWYCKECAESVTAWGREYITMTIKEIEEKYGFKVIYSDTDGFFATIPGADAETVKKKAMEFLKYINAKLPGALELEYEGFYKRGFFVTKKKYAVIDEEGKITTRGLEIVRRDWSEIAKETQARVLEALLKDGDVEKAVRIVKEVTEKLSKYEVPPEKLVIHEQITRDLKDYKATGPHVAVAKRLAARGVKIRPGTVISYIVLKGSGRIGDRAIPFDEFDPTKHKYDAEYYIENQVLPAVERILRAFGYRKEDLRYQKTRQVGLSAWLKPKGT

SEQ ID NO: 1800 - protein, 774 aa, synthetic construct
MILDTDCITEDGKPVFRIFKKENGEFKIEYDRTFEPYFYALLKDDSAIEEVKKITAERHGTVVTVKRVEKVQKKFLGRPVEVWKLYFTHPQDRPAIADKIREHPAVIDIYEYDIPFAKQYLIDKGLVPMEGDEELKMLAFDIETLYHEGEEFAEGPILMISYADEEGARVITWKNVDLPYVDVVSTEREMIKRFLRVVKEKDPDVLITYNGDNFDFAYLKKRCEKLGINFALGRDGSEPKIQRMGDRFAVEVKGRIHFDLYPVIRRTINLPTYTLEAVYEAVFGQPKEKVYAEEITTAWETGENLERVARYSMEDAKVTYELGKEFLPMEAQLSRLIGQSLWDVSRSSTGNLVEWFLLRKAYERNELAPNKPDEKELARRRQSYEGGYVKEPERGLWENIVYLDFRSLYPSIIITHNVSPDTLNREGCKEYDVAPQVGHRFCKDFPGFIPSLLGDLLEERQKIKKKMKATIDPIERKLLDYRQRAIKILANSYYGYYGYARARWYCKECAESVTAWGREYITMTIKEIEEKYGFKVIYSDTDGFFATIPGADAETVKKKAMEFLKYINAKLPGALELEYEGFYKRGFFVTKKKYAVIDEEGKITTRGLEIVRRDWSEIAKETQARVLEALLKDGDVEKAVRIVKEVTEKLSKYEVPPEKLVIHEQITRDLKDYKATGPHVAVAKRLAARGVKIRPGTVISYIVLKGSGRIGDRAIPFDEFDPTKHKYDAEYYIENQVLPAVERILRAFGYRKEDLRYQKTRQVGLSAWLKPKGT

SEQ ID NO: 1801 - protein, 774 aa, synthetic construct
MILDTDCITEDGKPVFRIFKKENGEFKIEYDRTFEPYFYALLKDDSAIEEVKKITAERHGTVVTVKRVEKVQKKFLGRPVEVWKLYFTHPQDRPAIFDKIREHPAVIDIYEYDIPFAKRYLIDKGLVPMEGDEELKMLAFDIETLYHEGEEFAEGPILMISYADEEGARVITWKNVDLPYVDVVSTEREMIKRFLRVVKEKDPDVLITYNGDNFDFAYLKKRCEKLGINFALGRDGSEPKIQRMGDRFAVEVKGRIHFDLYPVIRRTINLPTYTLEAVYEAVFGQPKEKVYAEEITTAWETGENLERVARYSMEDAKVTYELGKEFLPMEAQLSRLIGQSLWDVSRSSTGNLVEWFLLRKAYERNELAPNKPDEKELARRRQSYEGGYVKEPERGLWENIVYLDFRSLYPSIIITHNVSPDTLNREGCKEYDVAPQVGHRFCKDFPGFIPSLLGDLLEERQKIKKKMKATIDPIERKLLDYRQRAIKILANSYYGYYGYARARWYCKECAESVTAWGREYITMTIKEIEEKYGFKVIYSDTDGFFATIPGADAETVKKKAMEFLKYINAKLPGALELEYEGFYKRGFFVTKKKYAVIDEEGKITTRGLEIVRRDWSEIAKETQARVLEALLKDGDVEKAVRIVKEVTEKLSKYEVPPEKLVIHEQITRDLKDYKATGPHVAVAKRLAARGVKIRPGTVISYIVLKGSGRIGDRAIPFDEFDPTKHKYDAEYYIENQVLPAVERILRAFGYRKEDLRYQKTRQVGLSAWLKPKGT

SEQ ID NO: 1802 - protein, 774 aa, synthetic construct
MILDTDCITEDGKPVFRIFKKENGEFKIEYDRTFEPYFYALLKDDSAIEEVKKITAERHGTVVTVKRVEKVQKKFLGRPVEVWKLYFTHPQDRPAIWDKIREHPAVIDIYEYDIPFAKRYLIDKGLVPMEGDEELKMLAFDIETLYHEGEEFAEGPILMISYADEEGARVITWKNVDLPYVDVVSTEREMIKRFLRVVKEKDPDVLITYNGDNFDFAYLKKRCEKLGINFALGRDGSEPKIQRMGDRFAVEVKGRIHFDLYPVIRRTINLPTYTLEAVYEAVFGQPKEKVYAEEITTAWETGENLERVARYSMEDAKVTYELGKEFLPMEAQLSRLIGQSLWDVSRSSTGNLVEWFLLRKAYERNELAPNKPDEKELARRRQSYEGGYVKEPERGLWENIVYLDFRSLYPSIIITHNVSPDTLNREGCKEYDVAPQVGHRFCKDFPGFIPSLLGDLLEERQKIKKKMKATIDPIERKLLDYRQRAIKILANSYYGYYGYARARWYCKECAESVTAWGREYITMTIKEIEEKYGFKVIYSDTDGFFATIPGADAETVKKKAMEFLKYINAKLPGALELEYEGFYKRGFFVTKKKYAVIDEEGKITTRGLEIVRRDWSEIAKETQARVLEALLKDGDVEKAVRIVKEVTEKLSKYEVPPEKLVIHEQITRDLKDYKATGPHVAVAKRLAARGVKIRPGTVISYIVLKGSGRIGDRAIPFDEFDPTKHKYDAEYYIENQVLPAVERILRAFGYRKEDLRYQKTRQVGLSAWLKPKGT

SEQ ID NO: 1803 - protein, 774 aa, synthetic construct
MILDTDCITEDGKPVLRIFKKENGEFKIEYDRTFEAYFYALLKDDSAIEEVKKITAERHGTVVTVKRVEKVQKKFLGRPVEVWKLYFTHFQDIPAIRDKIREHPAVIDIYEYDIPFAKRYLIDKGLVPMEGDEELKMLAFDIETLYHEGEEFAEGPILMISYADEEGARVITWKNVDLPYVDVVSTEREMIKRFLRVVKEKDPDVLITYNGDNFDFAYLKKRCEKLGINFALGRDGSEPKIQRMGDRFAVEVKGRIHFDLYPVIRRTINLPTYTLEAVYEAVFGQPKEKVYAEEITTAWETGENLERVARYSMEDAKVTYELGKEFLPMEAQLSRLIGQSLWDVSRSSTGNLVEWFLLRKAYERNELAPNKPDEKELARRRQSYEGGYVKEPERGLWENIVYLDFRSLYPSIIITHNVSPDTLNREGCKEYDVAPQVGHRFCKDFPGFIPSLLGDLLEERQKIKKKMKATIDPIERKLLDYRQRAIKILANSYYGYYGYARARWYCKECAESVTAWGREYITMTIKEIEEKYGFKVIYSDTDGFFATIPGADAETVKKKAMEFLKYINAKLPGALELEYEGFYKRGFFVTKKKYAVIDEEGKITTRGLEIVRRDWSEIAKETQARVLEALLKDGDVEKAVRIVKEVTEKLSKYEVPPEKLVIHEQITRDLKDYKATGPHVAVAKRLAARGVKIRPGTVISYIVLKGSGRIGDRAIPFDEFDPTKHKYDAEYYIENQVLPAVERILRAFGYRKEDLRYQKTRQVGLSAWLKPKGT

SEQ ID NO: 1804 - protein, 774 aa, synthetic construct
MILDTDCITEDGKPVLRIFKKENGEFKIEYDRTFEAYFYALLKDDSAIEEVKKITAERHGTVVTVKRVEKVQKKFLGRPVEVWKLYFTHWQDIPAIRDKIREHPAVIDIYEYDIPFAKRYLIDKGLVPMEGDEELKMLAFDIETLYHEGEEFAEGPILMISYADEEGARVITWKNVDLPYVDVVSTEREMIKRFLRVVKEKDPDVLITYNGDNFDFAYLKKRCEKLGINFALGRDGSEPKIQRMGDRFAVEVKGRIHFDLYPVIRRTINLPTYTLEAVYEAVFGQPKEKVYAEEITTAWETGENLERVARYSMEDAKVTYELGKEFLPMEAQLSRLIGQSLWDVSRSSTGNLVEWFLLRKAYERNELAPNKPDEKELARRRQSYEGGYVKEPERGLWENIVYLDFRSLYPSIIITHNVSPDTLNREGCKEYDVAPQVGHRFCKDFPGFIPSLLGDLLEERQKIKKKMKATIDPIERKLLDYRQRAIKILANSYYGYYGYARARWYCKECAESVTAWGREYITMTIKEIEEKYGFKVIYSDTDGFFATIPGADAETVKKKAMEFLKYINAKLPGALELEYEGFYKRGFFVTKKKYAVIDEEGKITTRGLEIVRRDWSEIAKETQARVLEALLKDGDVEKAVRIVKEVTEKLSKYEVPPEKLVIHEQITRDLKDYKATGPHVAVAKRLAARGVKIRPGTVISYIVLKGSGRIGDRAIPFDEFDPTKHKYDAEYYIENQVLPAVERILRAFGYRKEDLRYQKTRQVGLSAWLKPKGT

SEQ ID NO: 1805 - protein, 774 aa, synthetic construct
MILDTDCITEDGKPVLRIFKKENGEFKIEYDRTFEAYFYALLKDDSAIEEVKKITAERHGTVVTVKRVEKVQKKFLGRPVEVWKLYFTHWQDIPAIADKIREHPAVIDIYEYDIPFAKRYLIDKGLVPMEGDEELKMLAFDIETLYHEGEEFAEGPILMISYADEEGARVITWKNVDLPYVDVVSTEREMIKRFLRVVKEKDPDVLITYNGDNFDFAYLKKRCEKLGINFALGRDGSEPKIQRMGDRFAVEVKGRIHFDLYPVIRRTINLPTYTLEAVYEAVFGQPKEKVYAEEITTAWETGENLERVARYSMEDAKVTYELGKEFLPMEAQLSRLIGQSLWDVSRSSTGNLVEWFLLRKAYERNELAPNKPDEKELARRRQSYEGGYVKEPERGLWENIVYLDFRSLYPSIIITHNVSPDTLNREGCKEYDVAPQVGHRFCKDFPGFIPSLLGDLLEERQKIKKKMKATIDPIERKLLDYRQRAIKILANSYYGYYGYARARWYCKECAESVTAWGREYITMTIKEIEEKYGFKVIYSDTDGFFATIPGADAETVKKKAMEFLKYINAKLPGALELEYEGFYKRGFFVTKKKYAVIDEEGKITTRGLEIVRRDWSEIAKETQARVLEALLKDGDVEKAVRIVKEVTEKLSKYEVPPEKLVIHEQITRDLKDYKATGPHVAVAKRLAARGVKIRPGTVISYIVLKGSGRIGDRAIPFDEFDPTKHKYDAEYYIENQVLPAVERILRAFGYRKEDLRYQKTRQVGLSAWLKPKGT

SEQ ID NO: 1806 - protein, 774 aa, synthetic construct
MILDTDCITEDGKPVLRIFKKENGEFKIEYDRTFEAYFYALLKDDSAIEEVKKITAERHGTVVTVKRVEKVQKKFLGRPVEVWKLYFTHYQDVPAIHDKIREHPAVIDIYEYDIPFAKRYLIDKGLVPMEGDEELKMLAFDIETLYHEGEEFAEGPILMISYADEEGARVITWKNVDLPYVDVVSTEREMIKRFLRVVKEKDPDVLITYNGDNFDFAYLKKRCEKLGINFALGRDGSEPKIQRMGDRFAVEVKGRIHFDLYPVIRRTINLPTYTLEAVYEAVFGQPKEKVYAEEITTAWETGENLERVARYSMEDAKVTYELGKEFLPMEAQLSRLIGQSLWDVSRSSTGNLVEWFLLRKAYERNELAPNKPDEKELARRRQSYEGGYVKEPERGLWENIVYLDFRSLYPSIIITHNVSPDTLNREGCKEYDVAPQVGHRFCKDFPGFIPSLLGDLLEERQKIKKKMKATIDPIERKLLDYRQRAIKILANSYYGYYGYARARWYCKECAESVTAWGREYITMTIKEIEEKYGFKVIYSDTDGFFATIPGADAETVKKKAMEFLKYINAKLPGALELEYEGFYKRGFFVTKKKYAVIDEEGKITTRGLEIVRRDWSEIAKETQARVLEALLKDGDVEKAVRIVKEVTEKLSKYEVPPEKLVIHEQITRDLKDYKATGPHVAVAKRLAARGVKIRPGTVISYIVLKGSGRIGDRAIPFDEFDPTKHKYDAEYYIENQVLPAVERILRAFGYRKEDLRYQKTRQVGLSAWLKPKGT

SEQ ID NO: 1807 - protein, 774 aa, synthetic construct
MILDTDCITEDGKPVLRIFKKENGEFKIEYDRTFEAYFYALLKDDSAIEEVKKITAERHGTVVTVKRVEKVQKKFLGRPVEVWKLYFTHYQDIPAIRDKIREHPAVIDIYEYDIPFAKRYLIDKGLVPMEGDEELKMLAFDIETLYHEGEEFAEGPILMISYADEEGARVITWKNVDLPYVDVVSTEREMIKRFLRVVKEKDPDVLITYNGDNFDFAYLKKRCEKLGINFALGRDGSEPKIQRMGDRFAVEVKGRIHFDLYPVIRRTINLPTYTLEAVYEAVFGQPKEKVYAEEITTAWETGENLERVARYSMEDAKVTYELGKEFLPMEAQLSRLIGQSLWDVSRSSTGNLVEWFLLRKAYERNELAPNKPDEKELARRRQSYEGGYVKEPERGLWENIVYLDFRSLYPSIIITHNVSPDTLNREGCKEYDVAPQVGHRFCKDFPGFIPSLLGDLLEERQKIKKKMKATIDPIERKLLDYRQRAIKILANSYYGYYGYARARWYCKECAESVTAWGREYITMTIKEIEEKYGFKVIYSDTDGFFATIPGADAETVKKKAMEFLKYINAKLPGALELEYEGFYKRGFFVTKKKYAVIDEEGKITTRGLEIVRRDWSEIAKETQARVLEALLKDGDVEKAVRIVKEVTEKLSKYEVPPEKLVIHEQITRDLKDYKATGPHVAVAKRLAARGVKIRPGTVISYIVLKGSGRIGDRAIPFDEFDPTKHKYDAEYYIENQVLPAVERILRAFGYRKEDLRYQKTRQVGLSAWLKPKGT

SEQ ID NO: 1808 - protein, 774 aa, synthetic construct
MILDTDCITEDGKPVLRIFKKENGEFKIEYDRTFEAYFYALLKDDSAIEEVKKITAERHGTVVTVKRVEKVQKKFLGRPVEVWKLYFTHYQDQPAIRDKIREHPAVIDIYEYDIPFAKRYLIDKGLVPMEGDEELKMLAFDIETLYHEGEEFAEGPILMISYADEEGARVITWKNVDLPYVDVVSTEREMIKRFLRVVKEKDPDVLITYNGDNFDFAYLKKRCEKLGINFALGRDGSEPKIQRMGDRFAVEVKGRIHFDLYPVIRRTINLPTYTLEAVYEAVFGQPKEKVYAEEITTAWETGENLERVARYSMEDAKVTYELGKEFLPMEAQLSRLIGQSLWDVSRSSTGNLVEWFLLRKAYERNELAPNKPDEKELARRRQSYEGGYVKEPERGLWENIVYLDFRSLYPSIIITHNVSPDTLNREGCKEYDVAPQVGHRFCKDFPGFIPSLLGDLLEERQKIKKKMKATIDPIERKLLDYRQRAIKILANSYYGYYGYARARWYCKECAESVTAWGREYITMTIKEIEEKYGFKVIYSDTDGFFATIPGADAETVKKKAMEFLKYINAKLPGALELEYEGFYKRGFFVTKKKYAVIDEEGKITTRGLEIVRRDWSEIAKETQARVLEALLKDGDVEKAVRIVKEVTEKLSKYEVPPEKLVIHEQITRDLKDYKATGPHVAVAKRLAARGVKIRPGTVISYIVLKGSGRIGDRAIPFDEFDPTKHKYDAEYYIENQVLPAVERILRAFGYRKEDLRYQKTRQVGLSAWLKPKGT

SEQ ID NO: 1809 - protein, 774 aa, synthetic construct
MILDTDCITEDGKPVLRIFKKENGEFKIEYDRTFEHYFYALLKDDSAIEEVKKITAERHGTVVTVKRVEKVQKKFLGRPVEVWKLYFTHWQDIPAIRDKIREHPAVIDIYEYDIPFAKRYLIDKGLVPMEGDEELKMLAFDIETLYHEGEEFAEGPILMISYADEEGARVITWKNVDLPYVDVVSTEREMIKRFLRVVKEKDPDVLITYNGDNFDFAYLKKRCEKLGINFALGRDGSEPKIQRMGDRFAVEVKGRIHFDLYPVIRRTINLPTYTLEAVYEAVFGQPKEKVYAEEITTAWETGENLERVARYSMEDAKVTYELGKEFLPMEAQLSRLIGQSLWDVSRSSTGNLVEWFLLRKAYERNELAPNKPDEKELARRRQSYEGGYVKEPERGLWENIVYLDFRSLYPSIIITHNVSPDTLNREGCKEYDVAPQVGHRFCKDFPGFIPSLLGDLLEERQKIKKKMKATIDPIERKLLDYRQRAIKILANSYYGYYGYARARWYCKECAESVTAWGREYITMTIKEIEEKYGFKVIYSDTDGFFATIPGADAETVKKKAMEFLKYINAKLPGALELEYEGFYKRGFFVTKKKYAVIDEEGKITTRGLEIVRRDWSEIAKETQARVLEALLKDGDVEKAVRIVKEVTEKLSKYEVPPEKLVIHEQITRDLKDYKATGPHVAVAKRLAARGVKIRPGTVISYIVLKGSGRIGDRAIPFDEFDPTKHKYDAEYYIENQVLPAVERILRAFGYRKEDLRYQKTRQVGLSAWLKPKGT

SEQ ID NO: 1810 - protein, 774 aa, synthetic construct
MILDTDCITEDGKPVLRIFKKENGEFKIEYDRTFEHYFYALLKDDSAIEEVKKITAERHGTVVTVKRVEKVQKKFLGRPVEVWKLYFTHPQDIPAIRDKIREHPAVIDIYEYDIPFAKRYLIDKGLVPMEGDEELKMLAFDIETLYHEGEEFAEGPILMISYADEEGARVITWKNVDLPYVDVVSTEREMIKRFLRVVKEKDPDVLITYNGDNFDFAYLKKRCEKLGINFALGRDGSEPKIQRMGDRFAVEVKGRIHFDLYPVIRRTINLPTYTLEAVYEAVFGQPKEKVYAEEITTAWETGENLERVARYSMEDAKVTYELGKEFLPMEAQLSRLIGQSLWDVSRSSTGNLVEWFLLRKAYERNELAPNKPDEKELARRRQSYEGGYVKEPERGLWENIVYLDFRSLYPSIIITHNVSPDTLNREGCKEYDVAPQVGHRFCKDFPGFIPSLLGDLLEERQKIKKKMKATIDPIERKLLDYRQRAIKILANSYYGYYGYARARWYCKECAESVTAWGREYITMTIKEIEEKYGFKVIYSDTDGFFATIPGADAETVKKKAMEFLKYINAKLPGALELEYEGFYKRGFFVTKKKYAVIDEEGKITTRGLEIVRRDWSEIAKETQARVLEALLKDGDVEKAVRIVKEVTEKLSKYEVPPEKLVIHEQITRDLKDYKATGPHVAVAKRLAARGVKIRPGTVISYIVLKGSGRIGDRAIPFDEFDPTKHKYDAEYYIENQVLPAVERILRAFGYRKEDLRYQKTRQVGLSAWLKPKGT

SEQ ID NO: 1811 - protein, 774 aa, synthetic construct
MILDTDCITEDGKPVLRIFKKENGEFKIEYDRTFESYFYALLKDDSAIEEVKKITAERHGTVVTVKRVEKVQKKFLGRPVEVWKLYFTHFQDVPAIRDKIREHPAVIDIYEYDIPFAKRYLIDKGLVPMEGDEELKMLAFDIETLYHEGEEFAEGPILMISYADEEGARVITWKNVDLPYVDVVSTEREMIKRFLRVVKEKDPDVLITYNGDNFDFAYLKKRCEKLGINFALGRDGSEPKIQRMGDRFAVEVKGRIHFDLYPVIRRTINLPTYTLEAVYEAVFGQPKEKVYAEEITTAWETGENLERVARYSMEDAKVTYELGKEFLPMEAQLSRLIGQSLWDVSRSSTGNLVEWFLLRKAYERNELAPNKPDEKELARRRQSYEGGYVKEPERGLWENIVYLDFRSLYPSIIITHNVSPDTLNREGCKEYDVAPQVGHRFCKDFPGFIPSLLGDLLEERQKIKKKMKATIDPIERKLLDYRQRAIKILANSYYGYYGYARARWYCKECAESVTAWGREYITMTIKEIEEKYGFKVIYSDTDGFFATIPGADAETVKKKAMEFLKYINAKLPGALELEYEGFYKRGFFVTKKKYAVIDEEGKITTRGLEIVRRDWSEIAKETQARVLEALLKDGDVEKAVRIVKEVTEKLSKYEVPPEKLVIHEQITRDLKDYKATGPHVAVAKRLAARGVKIRPGTVISYIVLKGSGRIGDRAIPFDEFDPTKHKYDAEYYIENQVLPAVERILRAFGYRKEDLRYQKTRQVGLSAWLKPKGT

SEQ ID NO: 1812 - protein, 774 aa, synthetic construct
MILDTDCITEDGKPVLRIFKKENGEFKIEYDRTFESYFYALLKDDSAIEEVKKITAERHGTVVTVKRVEKVQKKFLGRPVEVWKLYFTHWQDVPAIRDKIREHPAVIDIYEYDIPFAKRYLIDKGLVPMEGDEELKMLAFDIETLYHEGEEFAEGPILMISYADEEGARVITWKNVDLPYVDVVSTEREMIKRFLRVVKEKDPDVLITYNGDNFDFAYLKKRCEKLGINFALGRDGSEPKIQRMGDRFAVEVKGRIHFDLYPVIRRTINLPTYTLEAVYEAVFGQPKEKVYAEEITTAWETGENLERVARYSMEDAKVTYELGKEFLPMEAQLSRLIGQSLWDVSRSSTGNLVEWFLLRKAYERNELAPNKPDEKELARRRQSYEGGYVKEPERGLWENIVYLDFRSLYPSIIITHNVSPDTLNREGCKEYDVAPQVGHRFCKDFPGFIPSLLGDLLEERQKIKKKMKATIDPIERKLLDYRQRAIKILANSYYGYYGYARARWYCKECAESVTAWGREYITMTIKEIEEKYGFKVIYSDTDGFFATIPGADAETVKKKAMEFLKYINAKLPGALELEYEGFYKRGFFVTKKKYAVIDEEGKITTRGLEIVRRDWSEIAKETQARVLEALLKDGDVEKAVRIVKEVTEKLSKYEVPPEKLVIHEQITRDLKDYKATGPHVAVAKRLAARGVKIRPGTVISYIVLKGSGRIGDRAIPFDEFDPTKHKYDAEYYIENQVLPAVERILRAFGYRKEDLRYQKTRQVGLSAWLKPKGT

SEQ ID NO: 1813 - protein, 774 aa, synthetic construct
MILDTDCITEDGKPVLRIFKKENGEFKIEYDRTFEWYFYALLKDDSAIEEVKKITAERHGTVVTVKRVEKVQKKFLGRPVEVWKLYFTHFQDVPAIRDKIREHPAVIDIYEYDIPFAKRYLIDKGLVPMEGDEELKMLAFDIETLYHEGEEFAEGPILMISYADEEGARVITWKNVDLPYVDVVSTEREMIKRFLRVVKEKDPDVLITYNGDNFDFAYLKKRCEKLGINFALGRDGSEPKIQRMGDRFAVEVKGRIHFDLYPVIRRTINLPTYTLEAVYEAVFGQPKEKVYAEEITTAWETGENLERVARYSMEDAKVTYELGKEFLPMEAQLSRLIGQSLWDVSRSSTGNLVEWFLLRKAYERNELAPNKPDEKELARRRQSYEGGYVKEPERGLWENIVYLDFRSLYPSIIITHNVSPDTLNREGCKEYDVAPQVGHRFCKDFPGFIPSLLGDLLEERQKIKKKMKATIDPIERKLLDYRQRAIKILANSYYGYYGYARARWYCKECAESVTAWGREYITMTIKEIEEKYGFKVIYSDTDGFFATIPGADAETVKKKAMEFLKYINAKLPGALELEYEGFYKRGFFVTKKKYAVIDEEGKITTRGLEIVRRDWSEIAKETQARVLEALLKDGDVEKAVRIVKEVTEKLSKYEVPPEKLVIHEQITRDLKDYKATGPHVAVAKRLAARGVKIRPGTVISYIVLKGSGRIGDRAIPFDEFDPTKHKYDAEYYIENQVLPAVERILRAFGYRKEDLRYQKTRQVGLSAWLKPKGT

SEQ ID NO: 1814 - protein, 774 aa, synthetic construct
MILDTDCITEDGKPVLRIFKKENGEFKIEYDRTFEWYFYALLKDDSAIEEVKKITAERHGTVVTVKRVEKVQKKFLGRPVEVWKLYFTHFQDVPAIADKIREHPAVIDIYEYDIPFAKRYLIDKGLVPMEGDEELKMLAFDIETLYHEGEEFAEGPILMISYADEEGARVITWKNVDLPYVDVVSTEREMIKRFLRVVKEKDPDVLITYNGDNFDFAYLKKRCEKLGINFALGRDGSEPKIQRMGDRFAVEVKGRIHFDLYPVIRRTINLPTYTLEAVYEAVFGQPKEKVYAEEITTAWETGENLERVARYSMEDAKVTYELGKEFLPMEAQLSRLIGQSLWDVSRSSTGNLVEWFLLRKAYERNELAPNKPDEKELARRRQSYEGGYVKEPERGLWENIVYLDFRSLYPSIIITHNVSPDTLNREGCKEYDVAPQVGHRFCKDFPGFIPSLLGDLLEERQKIKKKMKATIDPIERKLLDYRQRAIKILANSYYGYYGYARARWYCKECAESVTAWGREYITMTIKEIEEKYGFKVIYSDTDGFFATIPGADAETVKKKAMEFLKYINAKLPGALELEYEGFYKRGFFVTKKKYAVIDEEGKITTRGLEIVRRDWSEIAKETQARVLEALLKDGDVEKAVRIVKEVTEKLSKYEVPPEKLVIHEQITRDLKDYKATGPHVAVAKRLAARGVKIRPGTVISYIVLKGSGRIGDRAIPFDEFDPTKHKYDAEYYIENQVLPAVERILRAFGYRKEDLRYQKTRQVGLSAWLKPKGT

SEQ ID NO: 1815 - protein, 774 aa, synthetic construct
MILDTDCITEDGKPVLRIFKKENGEFKIEYDRTFEWYFYALLKDDSAIEEVKKITAERHGTVVTVKRVEKVQKKFLGRPVEVWKLYFTHFQDIPAIRDKIREHPAVIDIYEYDIPFAKRYLIDKGLVPMEGDEELKMLAFDIETLYHEGEEFAEGPILMISYADEEGARVITWKNVDLPYVDVVSTEREMIKRFLRVVKEKDPDVLITYNGDNFDFAYLKKRCEKLGINFALGRDGSEPKIQRMGDRFAVEVKGRIHFDLYPVIRRTINLPTYTLEAVYEAVFGQPKEKVYAEEITTAWETGENLERVARYSMEDAKVTYELGKEFLPMEAQLSRLIGQSLWDVSRSSTGNLVEWFLLRKAYERNELAPNKPDEKELARRRQSYEGGYVKEPERGLWENIVYLDFRSLYPSIIITHNVSPDTLNREGCKEYDVAPQVGHRFCKDFPGFIPSLLGDLLEERQKIKKKMKATIDPIERKLLDYRQRAIKILANSYYGYYGYARARWYCKECAESVTAWGREYITMTIKEIEEKYGFKVIYSDTDGFFATIPGADAETVKKKAMEFLKYINAKLPGALELEYEGFYKRGFFVTKKKYAVIDEEGKITTRGLEIVRRDWSEIAKETQARVLEALLKDGDVEKAVRIVKEVTEKLSKYEVPPEKLVIHEQITRDLKDYKATGPHVAVAKRLAARGVKIRPGTVISYIVLKGSGRIGDRAIPFDEFDPTKHKYDAEYYIENQVLPAVERILRAFGYRKEDLRYQKTRQVGLSAWLKPKGT

SEQ ID NO: 1816 - protein, 774 aa, synthetic construct
MILDTDCITEDGKPVLRIFKKENGEFKIEYDRTFEWYFYALLKDDSAIEEVKKITAERHGTVVTVKRVEKVQKKFLGRPVEVWKLYFTHFQDIPAIFDKIREHPAVIDIYEYDIPFAKRYLIDKGLVPMEGDEELKMLAFDIETLYHEGEEFAEGPILMISYADEEGARVITWKNVDLPYVDVVSTEREMIKRFLRVVKEKDPDVLITYNGDNFDFAYLKKRCEKLGINFALGRDGSEPKIQRMGDRFAVEVKGRIHFDLYPVIRRTINLPTYTLEAVYEAVFGQPKEKVYAEEITTAWETGENLERVARYSMEDAKVTYELGKEFLPMEAQLSRLIGQSLWDVSRSSTGNLVEWFLLRKAYERNELAPNKPDEKELARRRQSYEGGYVKEPERGLWENIVYLDFRSLYPSIIITHNVSPDTLNREGCKEYDVAPQVGHRFCKDFPGFIPSLLGDLLEERQKIKKKMKATIDPIERKLLDYRQRAIKILANSYYGYYGYARARWYCKECAESVTAWGREYITMTIKEIEEKYGFKVIYSDTDGFFATIPGADAETVKKKAMEFLKYINAKLPGALELEYEGFYKRGFFVTKKKYAVIDEEGKITTRGLEIVRRDWSEIAKETQARVLEALLKDGDVEKAVRIVKEVTEKLSKYEVPPEKLVIHEQITRDLKDYKATGPHVAVAKRLAARGVKIRPGTVISYIVLKGSGRIGDRAIPFDEFDPTKHKYDAEYYIENQVLPAVERILRAFGYRKEDLRYQKTRQVGLSAWLKPKGT

SEQ ID NO: 1817 - protein, 774 aa, synthetic construct
MILDTDCITEDGKPVLRIFKKENGEFKIEYDRTFEWYFYALLKDDSAIEEVKKITAERHGTVVTVKRVEKVQKKFLGRPVEVWKLYFTHWQDIPAIRDKIREHPAVIDIYEYDIPFAKRYLIDKGLVPMEGDEELKMLAFDIETLYHEGEEFAEGPILMISYADEEGARVITWKNVDLPYVDVVSTEREMIKRFLRVVKEKDPDVLITYNGDNFDFAYLKKRCEKLGINFALGRDGSEPKIQRMGDRFAVEVKGRIHFDLYPVIRRTINLPTYTLEAVYEAVFGQPKEKVYAEEITTAWETGENLERVARYSMEDAKVTYELGKEFLPMEAQLSRLIGQSLWDVSRSSTGNLVEWFLLRKAYERNELAPNKPDEKELARRRQSYEGGYVKEPERGLWENIVYLDFRSLYPSIIITHNVSPDTLNREGCKEYDVAPQVGHRFCKDFPGFIPSLLGDLLEERQKIKKKMKATIDPIERKLLDYRQRAIKILANSYYGYYGYARARWYCKECAESVTAWGREYITMTIKEIEEKYGFKVIYSDTDGFFATIPGADAETVKKKAMEFLKYINAKLPGALELEYEGFYKRGFFVTKKKYAVIDEEGKITTRGLEIVRRDWSEIAKETQARVLEALLKDGDVEKAVRIVKEVTEKLSKYEVPPEKLVIHEQITRDLKDYKATGPHVAVAKRLAARGVKIRPGTVISYIVLKGSGRIGDRAIPFDEFDPTKHKYDAEYYIENQVLPAVERILRAFGYRKEDLRYQKTRQVGLSAWLKPKGT

SEQ ID NO: 1818 - protein, 774 aa, synthetic construct
MILDTDCITEDGKPVLRIFKKENGEFKIEYDRTFEWYFYALLKDDSAIEEVKKITAERHGTVVTVKRVEKVQKKFLGRPVEVWKLYFTHWQDIPAIADKIREHPAVIDIYEYDIPFAKRYLIDKGLVPMEGDEELKMLAFDIETLYHEGEEFAEGPILMISYADEEGARVITWKNVDLPYVDVVSTEREMIKRFLRVVKEKDPDVLITYNGDNFDFAYLKKRCEKLGINFALGRDGSEPKIQRMGDRFAVEVKGRIHFDLYPVIRRTINLPTYTLEAVYEAVFGQPKEKVYAEEITTAWETGENLERVARYSMEDAKVTYELGKEFLPMEAQLSRLIGQSLWDVSRSSTGNLVEWFLLRKAYERNELAPNKPDEKELARRRQSYEGGYVKEPERGLWENIVYLDFRSLYPSIIITHNVSPDTLNREGCKEYDVAPQVGHRFCKDFPGFIPSLLGDLLEERQKIKKKMKATIDPIERKLLDYRQRAIKILANSYYGYYGYARARWYCKECAESVTAWGREYITMTIKEIEEKYGFKVIYSDTDGFFATIPGADAETVKKKAMEFLKYINAKLPGALELEYEGFYKRGFFVTKKKYAVIDEEGKITTRGLEIVRRDWSEIAKETQARVLEALLKDGDVEKAVRIVKEVTEKLSKYEVPPEKLVIHEQITRDLKDYKATGPHVAVAKRLAARGVKIRPGTVISYIVLKGSGRIGDRAIPFDEFDPTKHKYDAEYYIENQVLPAVERILRAFGYRKEDLRYQKTRQVGLSAWLKPKGT

SEQ ID NO: 1819 - protein, 774 aa, synthetic construct
MILDTDCITEDGKPVLRIFKKENGEFKIEYDRTFEWYFYALLKDDSAIEEVKKITAERHGTVVTVKRVEKVQKKFLGRPVEVWKLYFTHYQDVPAIRDKIREHPAVIDIYEYDIPFAKRYLIDKGLVPMEGDEELKMLAFDIETLYHEGEEFAEGPILMISYADEEGARVITWKNVDLPYVDVVSTEREMIKRFLRVVKEKDPDVLITYNGDNFDFAYLKKRCEKLGINFALGRDGSEPKIQRMGDRFAVEVKGRIHFDLYPVIRRTINLPTYTLEAVYEAVFGQPKEKVYAEEITTAWETGENLERVARYSMEDAKVTYELGKEFLPMEAQLSRLIGQSLWDVSRSSTGNLVEWFLLRKAYERNELAPNKPDEKELARRRQSYEGGYVKEPERGLWENIVYLDFRSLYPSIIITHNVSPDTLNREGCKEYDVAPQVGHRFCKDFPGFIPSLLGDLLEERQKIKKKMKATIDPIERKLLDYRQRAIKILANSYYGYYGYARARWYCKECAESVTAWGREYITMTIKEIEEKYGFKVIYSDTDGFFATIPGADAETVKKKAMEFLKYINAKLPGALELEYEGFYKRGFFVTKKKYAVIDEEGKITTRGLEIVRRDWSEIAKETQARVLEALLKDGDVEKAVRIVKEVTEKLSKYEVPPEKLVIHEQITRDLKDYKATGPHVAVAKRLAARGVKIRPGTVISYIVLKGSGRIGDRAIPFDEFDPTKHKYDAEYYIENQVLPAVERILRAFGYRKEDLRYQKTRQVGLSAWLKPKGT

SEQ ID NO: 1820 - protein, 774 aa, synthetic construct
MILDTDCITEDGKPVLRIFKKENGEFKIEYDRTFEWYFYALLKDDSAIEEVKKITAERHGTVVTVKRVEKVQKKFLGRPVEVWKLYFTHYQDIPAIRDKIREHPAVIDIYEYDIPFAKRYLIDKGLVPMEGDEELKMLAFDIETLYHEGEEFAEGPILMISYADEEGARVITWKNVDLPYVDVVSTEREMIKRFLRVVKEKDPDVLITYNGDNFDFAYLKKRCEKLGINFALGRDGSEPKIQRMGDRFAVEVKGRIHFDLYPVIRRTINLPTYTLEAVYEAVFGQPKEKVYAEEITTAWETGENLERVARYSMEDAKVTYELGKEFLPMEAQLSRLIGQSLWDVSRSSTGNLVEWFLLRKAYERNELAPNKPDEKELARRRQSYEGGYVKEPERGLWENIVYLDFRSLYPSIIITHNVSPDTLNREGCKEYDVAPQVGHRFCKDFPGFIPSLLGDLLEERQKIKKKMKATIDPIERKLLDYRQRAIKILANSYYGYYGYARARWYCKECAESVTAWGREYITMTIKEIEEKYGFKVIYSDTDGFFATIPGADAETVKKKAMEFLKYINAKLPGALELEYEGFYKRGFFVTKKKYAVIDEEGKITTRGLEIVRRDWSEIAKETQARVLEALLKDGDVEKAVRIVKEVTEKLSKYEVPPEKLVIHEQITRDLKDYKATGPHVAVAKRLAARGVKIRPGTVISYIVLKGSGRIGDRAIPFDEFDPTKHKYDAEYYIENQVLPAVERILRAFGYRKEDLRYQKTRQVGLSAWLKPKGT

SEQ ID NO: 1821 - protein, 774 aa, synthetic construct
MILDTDCITEDGKPVLRIFKKENGEFKIEYDRTFEWYFYALLKDDSAIEEVKKITAERHGTVVTVKRVEKVQKKFLGRPVEVWKLYFTHPQDIPAIRDKIREHPAVIDIYEYDIPFAKRYLIDKGLVPMEGDEELKMLAFDIETLYHEGEEFAEGPILMISYADEEGARVITWKNVDLPYVDVVSTEREMIKRFLRVVKEKDPDVLITYNGDNFDFAYLKKRCEKLGINFALGRDGSEPKIQRMGDRFAVEVKGRIHFDLYPVIRRTINLPTYTLEAVYEAVFGQPKEKVYAEEITTAWETGENLERVARYSMEDAKVTYELGKEFLPMEAQLSRLIGQSLWDVSRSSTGNLVEWFLLRKAYERNELAPNKPDEKELARRRQSYEGGYVKEPERGLWENIVYLDFRSLYPSIIITHNVSPDTLNREGCKEYDVAPQVGHRFCKDFPGFIPSLLGDLLEERQKIKKKMKATIDPIERKLLDYRQRAIKILANSYYGYYGYARARWYCKECAESVTAWGREYITMTIKEIEEKYGFKVIYSDTDGFFATIPGADAETVKKKAMEFLKYINAKLPGALELEYEGFYKRGFFVTKKKYAVIDEEGKITTRGLEIVRRDWSEIAKETQARVLEALLKDGDVEKAVRIVKEVTEKLSKYEVPPEKLVIHEQITRDLKDYKATGPHVAVAKRLAARGVKIRPGTVISYIVLKGSGRIGDRAIPFDEFDPTKHKYDAEYYIENQVLPAVERILRAFGYRKEDLRYQKTRQVGLSAWLKPKGT

SEQ ID NO: 1822 - protein, 774 aa, synthetic construct
MILDTDCITEDGKPVLRIFKKENGEFKIEYDRTFEPYFYALLKDDSAIEEVKKITAERHGTVVTVKRVEKVQKKFLGRPVEVWKLYFTHFQDVPAIRDKIREHPAVIDIYEYDIPFAKRYLIDKGLVPMEGDEELKMLAFDIETLYHEGEEFAEGPILMISYADEEGARVITWKNVDLPYVDVVSTEREMIKRFLRVVKEKDPDVLITYNGDNFDFAYLKKRCEKLGINFALGRDGSEPKIQRMGDRFAVEVKGRIHFDLYPVIRRTINLPTYTLEAVYEAVFGQPKEKVYAEEITTAWETGENLERVARYSMEDAKVTYELGKEFLPMEAQLSRLIGQSLWDVSRSSTGNLVEWFLLRKAYERNELAPNKPDEKELARRRQSYEGGYVKEPERGLWENIVYLDFRSLYPSIIITHNVSPDTLNREGCKEYDVAPQVGHRFCKDFPGFIPSLLGDLLEERQKIKKKMKATIDPIERKLLDYRQRAIKILANSYYGYYGYARARWYCKECAESVTAWGREYITMTIKEIEEKYGFKVIYSDTDGFFATIPGADAETVKKKAMEFLKYINAKLPGALELEYEGFYKRGFFVTKKKYAVIDEEGKITTRGLEIVRRDWSEIAKETQARVLEALLKDGDVEKAVRIVKEVTEKLSKYEVPPEKLVIHEQITRDLKDYKATGPHVAVAKRLAARGVKIRPGTVISYIVLKGSGRIGDRAIPFDEFDPTKHKYDAEYYIENQVLPAVERILRAFGYRKEDLRYQKTRQVGLSAWLKPKGT

SEQ ID NO: 1823 - protein, 774 aa, synthetic construct
MILDTDCITEDGKPVLRIFKKENGEFKIEYDRTFEPYFYALLKDDSAIEEVKKITAERHGTVVTVKRVEKVQKKFLGRPVEVWKLYFTHFQDIPAIRDKIREHPAVIDIYEYDIPFAKRYLIDKGLVPMEGDEELKMLAFDIETLYHEGEEFAEGPILMISYADEEGARVITWKNVDLPYVDVVSTEREMIKRFLRVVKEKDPDVLITYNGDNFDFAYLKKRCEKLGINFALGRDGSEPKIQRMGDRFAVEVKGRIHFDLYPVIRRTINLPTYTLEAVYEAVFGQPKEKVYAEEITTAWETGENLERVARYSMEDAKVTYELGKEFLPMEAQLSRLIGQSLWDVSRSSTGNLVEWFLLRKAYERNELAPNKPDEKELARRRQSYEGGYVKEPERGLWENIVYLDFRSLYPSIIITHNVSPDTLNREGCKEYDVAPQVGHRFCKDFPGFIPSLLGDLLEERQKIKKKMKATIDPIERKLLDYRQRAIKILANSYYGYYGYARARWYCKECAESVTAWGREYITMTIKEIEEKYGFKVIYSDTDGFFATIPGADAETVKKKAMEFLKYINAKLPGALELEYEGFYKRGFFVTKKKYAVIDEEGKITTRGLEIVRRDWSEIAKETQARVLEALLKDGDVEKAVRIVKEVTEKLSKYEVPPEKLVIHEQITRDLKDYKATGPHVAVAKRLAARGVKIRPGTVISYIVLKGSGRIGDRAIPFDEFDPTKHKYDAEYYIENQVLPAVERILRAFGYRKEDLRYQKTRQVGLSAWLKPKGT

SEQ ID NO: 1824 - protein, 774 aa, synthetic construct
MILDTDCITEDGKPVLRIFKKENGEFKIEYDRTFEPYFYALLKDDSAIEEVKKITAERHGTVVTVKRVEKVQKKFLGRPVEVWKLYFTHFQDIPAIADKIREHPAVIDIYEYDIPFAKRYLIDKGLVPMEGDEELKMLAFDIETLYHEGEEFAEGPILMISYADEEGARVITWKNVDLPYVDVVSTEREMIKRFLRVVKEKDPDVLITYNGDNFDFAYLKKRCEKLGINFALGRDGSEPKIQRMGDRFAVEVKGRIHFDLYPVIRRTINLPTYTLEAVYEAVFGQPKEKVYAEEITTAWETGENLERVARYSMEDAKVTYELGKEFLPMEAQLSRLIGQSLWDVSRSSTGNLVEWFLLRKAYERNELAPNKPDEKELARRRQSYEGGYVKEPERGLWENIVYLDFRSLYPSIIITHNVSPDTLNREGCKEYDVAPQVGHRFCKDFPGFIPSLLGDLLEERQKIKKKMKATIDPIERKLLDYRQRAIKILANSYYGYYGYARARWYCKECAESVTAWGREYITMTIKEIEEKYGFKVIYSDTDGFFATIPGADAETVKKKAMEFLKYINAKLPGALELEYEGFYKRGFFVTKKKYAVIDEEGKITTRGLEIVRRDWSEIAKETQARVLEALLKDGDVEKAVRIVKEVTEKLSKYEVPPEKLVIHEQITRDLKDYKATGPHVAVAKRLAARGVKIRPGTVISYIVLKGSGRIGDRAIPFDEFDPTKHKYDAEYYIENQVLPAVERILRAFGYRKEDLRYQKTRQVGLSAWLKPKGT

SEQ ID NO: 1825 - protein, 774 aa, synthetic construct
MILDTDCITEDGKPVLRIFKKENGEFKIEYDRTFEPYFYALLKDDSAIEEVKKITAERHGTVVTVKRVEKVQKKFLGRPVEVWKLYFTHFQDIPAIWDKIREHPAVIDIYEYDIPFAKRYLIDKGLVPMEGDEELKMLAFDIETLYHEGEEFAEGPILMISYADEEGARVITWKNVDLPYVDVVSTEREMIKRFLRVVKEKDPDVLITYNGDNFDFAYLKKRCEKLGINFALGRDGSEPKIQRMGDRFAVEVKGRIHFDLYPVIRRTINLPTYTLEAVYEAVFGQPKEKVYAEEITTAWETGENLERVARYSMEDAKVTYELGKEFLPMEAQLSRLIGQSLWDVSRSSTGNLVEWFLLRKAYERNELAPNKPDEKELARRRQSYEGGYVKEPERGLWENIVYLDFRSLYPSIIITHNVSPDTLNREGCKEYDVAPQVGHRFCKDFPGFIPSLLGDLLEERQKIKKKMKATIDPIERKLLDYRQRAIKILANSYYGYYGYARARWYCKECAESVTAWGREYITMTIKEIEEKYGFKVIYSDTDGFFATIPGADAETVKKKAMEFLKYINAKLPGALELEYEGFYKRGFFVTKKKYAVIDEEGKITTRGLEIVRRDWSEIAKETQARVLEALLKDGDVEKAVRIVKEVTEKLSKYEVPPEKLVIHEQITRDLKDYKATGPHVAVAKRLAARGVKIRPGTVISYIVLKGSGRIGDRAIPFDEFDPTKHKYDAEYYIENQVLPAVERILRAFGYRKEDLRYQKTRQVGLSAWLKPKGT

SEQ ID NO: 1826 - protein, 774 aa, synthetic construct
MILDTDCITEDGKPVLRIFKKENGEFKIEYDRTFEPYFYALLKDDSAIEEVKKITAERHGTVVTVKRVEKVQKKFLGRPVEVWKLYFTHFQDQPAIRDKIREHPAVIDIYEYDIPFAKRYLIDKGLVPMEGDEELKMLAFDIETLYHEGEEFAEGPILMISYADEEGARVITWKNVDLPYVDVVSTEREMIKRFLRVVKEKDPDVLITYNGDNFDFAYLKKRCEKLGINFALGRDGSEPKIQRMGDRFAVEVKGRIHFDLYPVIRRTINLPTYTLEAVYEAVFGQPKEKVYAEEITTAWETGENLERVARYSMEDAKVTYELGKEFLPMEAQLSRLIGQSLWDVSRSSTGNLVEWFLLRKAYERNELAPNKPDEKELARRRQSYEGGYVKEPERGLWENIVYLDFRSLYPSIIITHNVSPDTLNREGCKEYDVAPQVGHRFCKDFPGFIPSLLGDLLEERQKIKKKMKATIDPIERKLLDYRQRAIKILANSYYGYYGYARARWYCKECAESVTAWGREYITMTIKEIEEKYGFKVIYSDTDGFFATIPGADAETVKKKAMEFLKYINAKLPGALELEYEGFYKRGFFVTKKKYAVIDEEGKITTRGLEIVRRDWSEIAKETQARVLEALLKDGDVEKAVRIVKEVTEKLSKYEVPPEKLVIHEQITRDLKDYKATGPHVAVAKRLAARGVKIRPGTVISYIVLKGSGRIGDRAIPFDEFDPTKHKYDAEYYIENQVLPAVERILRAFGYRKEDLRYQKTRQVGLSAWLKPKGT

SEQ ID NO: 1827 - protein, 774 aa, synthetic construct
MILDTDCITEDGKPVLRIFKKENGEFKIEYDRTFEPYFYALLKDDSAIEEVKKITAERHGTVVTVKRVEKVQKKFLGRPVEVWKLYFTHFQDQPAIFDKIREHPAVIDIYEYDIPFAKRYLIDKGLVPMEGDEELKMLAFDIETLYHEGEEFAEGPILMISYADEEGARVITWKNVDLPYVDVVSTEREMIKRFLRVVKEKDPDVLITYNGDNFDFAYLKKRCEKLGINFALGRDGSEPKIQRMGDRFAVEVKGRIHFDLYPVIRRTINLPTYTLEAVYEAVFGQPKEKVYAEEITTAWETGENLERVARYSMEDAKVTYELGKEFLPMEAQLSRLIGQSLWDVSRSSTGNLVEWFLLRKAYERNELAPNKPDEKELARRRQSYEGGYVKEPERGLWENIVYLDFRSLYPSIIITHNVSPDTLNREGCKEYDVAPQVGHRFCKDFPGFIPSLLGDLLEERQKIKKKMKATIDPIERKLLDYRQRAIKILANSYYGYYGYARARWYCKECAESVTAWGREYITMTIKEIEEKYGFKVIYSDTDGFFATIPGADAETVKKKAMEFLKYINAKLPGALELEYEGFYKRGFFVTKKKYAVIDEEGKITTRGLEIVRRDWSEIAKETQARVLEALLKDGDVEKAVRIVKEVTEKLSKYEVPPEKLVIHEQITRDLKDYKATGPHVAVAKRLAARGVKIRPGTVISYIVLKGSGRIGDRAIPFDEFDPTKHKYDAEYYIENQVLPAVERILRAFGYRKEDLRYQKTRQVGLSAWLKPKGT

SEQ ID NO: 1828 - protein, 774 aa, synthetic construct
MILDTDCITEDGKPVLRIFKKENGEFKIEYDRTFEPYFYALLKDDSAIEEVKKITAERHGTVVTVKRVEKVQKKFLGRPVEVWKLYFTHIQDVPAIRDKIREHPAVIDIYEYDIPFAKRYLIDKGLVPMEGDEELKMLAFDIETLYHEGEEFAEGPILMISYADEEGARVITWKNVDLPYVDVVSTEREMIKRFLRVVKEKDPDVLITYNGDNFDFAYLKKRCEKLGINFALGRDGSEPKIQRMGDRFAVEVKGRIHFDLYPVIRRTINLPTYTLEAVYEAVFGQPKEKVYAEEITTAWETGENLERVARYSMEDAKVTYELGKEFLPMEAQLSRLIGQSLWDVSRSSTGNLVEWFLLRKAYERNELAPNKPDEKELARRRQSYEGGYVKEPERGLWENIVYLDFRSLYPSIIITHNVSPDTLNREGCKEYDVAPQVGHRFCKDFPGFIPSLLGDLLEERQKIKKKMKATIDPIERKLLDYRQRAIKILANSYYGYYGYARARWYCKECAESVTAWGREYITMTIKEIEEKYGFKVIYSDTDGFFATIPGADAETVKKKAMEFLKYINAKLPGALELEYEGFYKRGFFVTKKKYAVIDEEGKITTRGLEIVRRDWSEIAKETQARVLEALLKDGDVEKAVRIVKEVTEKLSKYEVPPEKLVIHEQITRDLKDYKATGPHVAVAKRLAARGVKIRPGTVISYIVLKGSGRIGDRAIPFDEFDPTKHKYDAEYYIENQVLPAVERILRAFGYRKEDLRYQKTRQVGLSAWLKPKGT

SEQ ID NO: 1829 - protein, 774 aa, synthetic construct
MILDTDCITEDGKPVLRIFKKENGEFKIEYDRTFEPYFYALLKDDSAIEEVKKITAERHGTVVTVKRVEKVQKKFLGRPVEVWKLYFTHIQDIPAIRDKIREHPAVIDIYEYDIPFAKRYLIDKGLVPMEGDEELKMLAFDIETLYHEGEEFAEGPILMISYADEEGARVITWKNVDLPYVDVVSTEREMIKRFLRVVKEKDPDVLITYNGDNFDFAYLKKRCEKLGINFALGRDGSEPKIQRMGDRFAVEVKGRIHFDLYPVIRRTINLPTYTLEAVYEAVFGQPKEKVYAEEITTAWETGENLERVARYSMEDAKVTYELGKEFLPMEAQLSRLIGQSLWDVSRSSTGNLVEWFLLRKAYERNELAPNKPDEKELARRRQSYEGGYVKEPERGLWENIVYLDFRSLYPSIIITHNVSPDTLNREGCKEYDVAPQVGHRFCKDFPGFIPSLLGDLLEERQKIKKKMKATIDPIERKLLDYRQRAIKILANSYYGYYGYARARWYCKECAESVTAWGREYITMTIKEIEEKYGFKVIYSDTDGFFATIPGADAETVKKKAMEFLKYINAKLPGALELEYEGFYKRGFFVTKKKYAVIDEEGKITTRGLEIVRRDWSEIAKETQARVLEALLKDGDVEKAVRIVKEVTEKLSKYEVPPEKLVIHEQITRDLKDYKATGPHVAVAKRLAARGVKIRPGTVISYIVLKGSGRIGDRAIPFDEFDPTKHKYDAEYYIENQVLPAVERILRAFGYRKEDLRYQKTRQVGLSAWLKPKGT

SEQ ID NO: 1830 - protein, 774 aa, synthetic construct
MILDTDCITEDGKPVLRIFKKENGEFKIEYDRTFEPYFYALLKDDSAIEEVKKITAERHGTVVTVKRVEKVQKKFLGRPVEVWKLYFTHIQDIPAIADKIREHPAVIDIYEYDIPFAKRYLIDKGLVPMEGDEELKMLAFDIETLYHEGEEFAEGPILMISYADEEGARVITWKNVDLPYVDVVSTEREMIKRFLRVVKEKDPDVLITYNGDNFDFAYLKKRCEKLGINFALGRDGSEPKIQRMGDRFAVEVKGRIHFDLYPVIRRTINLPTYTLEAVYEAVFGQPKEKVYAEEITTAWETGENLERVARYSMEDAKVTYELGKEFLPMEAQLSRLIGQSLWDVSRSSTGNLVEWFLLRKAYERNELAPNKPDEKELARRRQSYEGGYVKEPERGLWENIVYLDFRSLYPSIIITHNVSPDTLNREGCKEYDVAPQVGHRFCKDFPGFIPSLLGDLLEERQKIKKKMKATIDPIERKLLDYRQRAIKILANSYYGYYGYARARWYCKECAESVTAWGREYITMTIKEIEEKYGFKVIYSDTDGFFATIPGADAETVKKKAMEFLKYINAKLPGALELEYEGFYKRGFFVTKKKYAVIDEEGKITTRGLEIVRRDWSEIAKETQARVLEALLKDGDVEKAVRIVKEVTEKLSKYEVPPEKLVIHEQITRDLKDYKATGPHVAVAKRLAARGVKIRPGTVISYIVLKGSGRIGDRAIPFDEFDPTKHKYDAEYYIENQVLPAVERILRAFGYRKEDLRYQKTRQVGLSAWLKPKGT

SEQ ID NO: 1831 - protein, 774 aa, synthetic construct
MILDTDCITEDGKPVLRIFKKENGEFKIEYDRTFEPYFYALLKDDSAIEEVKKITAERHGTVVTVKRVEKVQKKFLGRPVEVWKLYFTHWQDVPAIRDKIREHPAVIDIYEYDIPFAKRYLIDKGLVPMEGDEELKMLAFDIETLYHEGEEFAEGPILMISYADEEGARVITWKNVDLPYVDVVSTEREMIKRFLRVVKEKDPDVLITYNGDNFDFAYLKKRCEKLGINFALGRDGSEPKIQRMGDRFAVEVKGRIHFDLYPVIRRTINLPTYTLEAVYEAVFGQPKEKVYAEEITTAWETGENLERVARYSMEDAKVTYELGKEFLPMEAQLSRLIGQSLWDVSRSSTGNLVEWFLLRKAYERNELAPNKPDEKELARRRQSYEGGYVKEPERGLWENIVYLDFRSLYPSIIITHNVSPDTLNREGCKEYDVAPQVGHRFCKDFPGFIPSLLGDLLEERQKIKKKMKATIDPIERKLLDYRQRAIKILANSYYGYYGYARARWYCKECAESVTAWGREYITMTIKEIEEKYGFKVIYSDTDGFFATIPGADAETVKKKAMEFLKYINAKLPGALELEYEGFYKRGFFVTKKKYAVIDEEGKITTRGLEIVRRDWSEIAKETQARVLEALLKDGDVEKAVRIVKEVTEKLSKYEVPPEKLVIHEQITRDLKDYKATGPHVAVAKRLAARGVKIRPGTVISYIVLKGSGRIGDRAIPFDEFDPTKHKYDAEYYIENQVLPAVERILRAFGYRKEDLRYQKTRQVGLSAWLKPKGT

SEQ ID NO: 1832 - protein, 774 aa, synthetic construct
MILDTDCITEDGKPVLRIFKKENGEFKIEYDRTFEPYFYALLKDDSAIEEVKKITAERHGTVVTVKRVEKVQKKFLGRPVEVWKLYFTHWQDVPAIADKIREHPAVIDIYEYDIPFAKRYLIDKGLVPMEGDEELKMLAFDIETLYHEGEEFAEGPILMISYADEEGARVITWKNVDLPYVDVVSTEREMIKRFLRVVKEKDPDVLITYNGDNFDFAYLKKRCEKLGINFALGRDGSEPKIQRMGDRFAVEVKGRIHFDLYPVIRRTINLPTYTLEAVYEAVFGQPKEKVYAEEITTAWETGENLERVARYSMEDAKVTYELGKEFLPMEAQLSRLIGQSLWDVSRSSTGNLVEWFLLRKAYERNELAPNKPDEKELARRRQSYEGGYVKEPERGLWENIVYLDFRSLYPSIIITHNVSPDTLNREGCKEYDVAPQVGHRFCKDFPGFIPSLLGDLLEERQKIKKKMKATIDPIERKLLDYRQRAIKILANSYYGYYGYARARWYCKECAESVTAWGREYITMTIKEIEEKYGFKVIYSDTDGFFATIPGADAETVKKKAMEFLKYINAKLPGALELEYEGFYKRGFFVTKKKYAVIDEEGKITTRGLEIVRRDWSEIAKETQARVLEALLKDGDVEKAVRIVKEVTEKLSKYEVPPEKLVIHEQITRDLKDYKATGPHVAVAKRLAARGVKIRPGTVISYIVLKGSGRIGDRAIPFDEFDPTKHKYDAEYYIENQVLPAVERILRAFGYRKEDLRYQKTRQVGLSAWLKPKGT

SEQ ID NO: 1833 - protein, 774 aa, synthetic construct
MILDTDCITEDGKPVLRIFKKENGEFKIEYDRTFEPYFYALLKDDSAIEEVKKITAERHGTVVTVKRVEKVQKKFLGRPVEVWKLYFTHWQDVPAIFDKIREHPAVIDIYEYDIPFAKRYLIDKGLVPMEGDEELKMLAFDIETLYHEGEEFAEGPILMISYADEEGARVITWKNVDLPYVDVVSTEREMIKRFLRVVKEKDPDVLITYNGDNFDFAYLKKRCEKLGINFALGRDGSEPKIQRMGDRFAVEVKGRIHFDLYPVIRRTINLPTYTLEAVYEAVFGQPKEKVYAEEITTAWETGENLERVARYSMEDAKVTYELGKEFLPMEAQLSRLIGQSLWDVSRSSTGNLVEWFLLRKAYERNELAPNKPDEKELARRRQSYEGGYVKEPERGLWENIVYLDFRSLYPSIIITHNVSPDTLNREGCKEYDVAPQVGHRFCKDFPGFIPSLLGDLLEERQKIKKKMKATIDPIERKLLDYRQRAIKILANSYYGYYGYARARWYCKECAESVTAWGREYITMTIKEIEEKYGFKVIYSDTDGFFATIPGADAETVKKKAMEFLKYINAKLPGALELEYEGFYKRGFFVTKKKYAVIDEEGKITTRGLEIVRRDWSEIAKETQARVLEALLKDGDVEKAVRIVKEVTEKLSKYEVPPEKLVIHEQITRDLKDYKATGPHVAVAKRLAARGVKIRPGTVISYIVLKGSGRIGDRAIPFDEFDPTKHKYDAEYYIENQVLPAVERILRAFGYRKEDLRYQKTRQVGLSAWLKPKGT

SEQ ID NO: 1834 - protein, 774 aa, synthetic construct
MILDTDCITEDGKPVLRIFKKENGEFKIEYDRTFEPYFYALLKDDSAIEEVKKITAERHGTVVTVKRVEKVQKKFLGRPVEVWKLYFTHWQDVPAIHDKIREHPAVIDIYEYDIPFAKRYLIDKGLVPMEGDEELKMLAFDIETLYHEGEEFAEGPILMISYADEEGARVITWKNVDLPYVDVVSTEREMIKRFLRVVKEKDPDVLITYNGDNFDFAYLKKRCEKLGINFALGRDGSEPKIQRMGDRFAVEVKGRIHFDLYPVIRRTINLPTYTLEAVYEAVFGQPKEKVYAEEITTAWETGENLERVARYSMEDAKVTYELGKEFLPMEAQLSRLIGQSLWDVSRSSTGNLVEWFLLRKAYERNELAPNKPDEKELARRRQSYEGGYVKEPERGLWENIVYLDFRSLYPSIIITHNVSPDTLNREGCKEYDVAPQVGHRFCKDFPGFIPSLLGDLLEERQKIKKKMKATIDPIERKLLDYRQRAIKILANSYYGYYGYARARWYCKECAESVTAWGREYITMTIKEIEEKYGFKVIYSDTDGFFATIPGADAETVKKKAMEFLKYINAKLPGALELEYEGFYKRGFFVTKKKYAVIDEEGKITTRGLEIVRRDWSEIAKETQARVLEALLKDGDVEKAVRIVKEVTEKLSKYEVPPEKLVIHEQITRDLKDYKATGPHVAVAKRLAARGVKIRPGTVISYIVLKGSGRIGDRAIPFDEFDPTKHKYDAEYYIENQVLPAVERILRAFGYRKEDLRYQKTRQVGLSAWLKPKGT

SEQ ID NO: 1835 - protein, 774 aa, synthetic construct
MILDTDCITEDGKPVLRIFKKENGEFKIEYDRTFEPYFYALLKDDSAIEEVKKITAERHGTVVTVKRVEKVQKKFLGRPVEVWKLYFTHWQDIPAIRDKIREHPAVIDIYEYDIPFAKRYLIDKGLVPMEGDEELKMLAFDIETLYHEGEEFAEGPILMISYADEEGARVITWKNVDLPYVDVVSTEREMIKRFLRVVKEKDPDVLITYNGDNFDFAYLKKRCEKLGINFALGRDGSEPKIQRMGDRFAVEVKGRIHFDLYPVIRRTINLPTYTLEAVYEAVFGQPKEKVYAEEITTAWETGENLERVARYSMEDAKVTYELGKEFLPMEAQLSRLIGQSLWDVSRSSTGNLVEWFLLRKAYERNELAPNKPDEKELARRRQSYEGGYVKEPERGLWENIVYLDFRSLYPSIIITHNVSPDTLNREGCKEYDVAPQVGHRFCKDFPGFIPSLLGDLLEERQKIKKKMKATIDPIERKLLDYRQRAIKILANSYYGYYGYARARWYCKECAESVTAWGREYITMTIKEIEEKYGFKVIYSDTDGFFATIPGADAETVKKKAMEFLKYINAKLPGALELEYEGFYKRGFFVTKKKYAVIDEEGKITTRGLEIVRRDWSEIAKETQARVLEALLKDGDVEKAVRIVKEVTEKLSKYEVPPEKLVIHEQITRDLKDYKATGPHVAVAKRLAARGVKIRPGTVISYIVLKGSGRIGDRAIPFDEFDPTKHKYDAEYYIENQVLPAVERILRAFGYRKEDLRYQKTRQVGLSAWLKPKGT

SEQ ID NO: 1836 - protein, 774 aa, synthetic construct
MILDTDCITEDGKPVLRIFKKENGEFKIEYDRTFEPYFYALLKDDSAIEEVKKITAERHGTVVTVKRVEKVQKKFLGRPVEVWKLYFTHWQDIPAIADKIREHPAVIDIYEYDIPFAKRYLIDKGLVPMEGDEELKMLAFDIETLYHEGEEFAEGPILMISYADEEGARVITWKNVDLPYVDVVSTEREMIKRFLRVVKEKDPDVLITYNGDNFDFAYLKKRCEKLGINFALGRDGSEPKIQRMGDRFAVEVKGRIHFDLYPVIRRTINLPTYTLEAVYEAVFGQPKEKVYAEEITTAWETGENLERVARYSMEDAKVTYELGKEFLPMEAQLSRLIGQSLWDVSRSSTGNLVEWFLLRKAYERNELAPNKPDEKELARRRQSYEGGYVKEPERGLWENIVYLDFRSLYPSIIITHNVSPDTLNREGCKEYDVAPQVGHRFCKDFPGFIPSLLGDLLEERQKIKKKMKATIDPIERKLLDYRQRAIKILANSYYGYYGYARARWYCKECAESVTAWGREYITMTIKEIEEKYGFKVIYSDTDGFFATIPGADAETVKKKAMEFLKYINAKLPGALELEYEGFYKRGFFVTKKKYAVIDEEGKITTRGLEIVRRDWSEIAKETQARVLEALLKDGDVEKAVRIVKEVTEKLSKYEVPPEKLVIHEQITRDLKDYKATGPHVAVAKRLAARGVKIRPGTVISYIVLKGSGRIGDRAIPFDEFDPTKHKYDAEYYIENQVLPAVERILRAFGYRKEDLRYQKTRQVGLSAWLKPKGT

SEQ ID NO: 1837 - protein, 774 aa, synthetic construct
MILDTDCITEDGKPVLRIFKKENGEFKIEYDRTFEPYFYALLKDDSAIEEVKKITAERHGTVVTVKRVEKVQKKFLGRPVEVWKLYFTHWQDIPAIFDKIREHPAVIDIYEYDIPFAKRYLIDKGLVPMEGDEELKMLAFDIETLYHEGEEFAEGPILMISYADEEGARVITWKNVDLPYVDVVSTEREMIKRFLRVVKEKDPDVLITYNGDNFDFAYLKKRCEKLGINFALGRDGSEPKIQRMGDRFAVEVKGRIHFDLYPVIRRTINLPTYTLEAVYEAVFGQPKEKVYAEEITTAWETGENLERVARYSMEDAKVTYELGKEFLPMEAQLSRLIGQSLWDVSRSSTGNLVEWFLLRKAYERNELAPNKPDEKELARRRQSYEGGYVKEPERGLWENIVYLDFRSLYPSIIITHNVSPDTLNREGCKEYDVAPQVGHRFCKDFPGFIPSLLGDLLEERQKIKKKMKATIDPIERKLLDYRQRAIKILANSYYGYYGYARARWYCKECAESVTAWGREYITMTIKEIEEKYGFKVIYSDTDGFFATIPGADAETVKKKAMEFLKYINAKLPGALELEYEGFYKRGFFVTKKKYAVIDEEGKITTRGLEIVRRDWSEIAKETQARVLEALLKDGDVEKAVRIVKEVTEKLSKYEVPPEKLVIHEQITRDLKDYKATGPHVAVAKRLAARGVKIRPGTVISYIVLKGSGRIGDRAIPFDEFDPTKHKYDAEYYIENQVLPAVERILRAFGYRKEDLRYQKTRQVGLSAWLKPKGT

SEQ ID NO: 1838 - protein, 774 aa, synthetic construct
MILDTDCITEDGKPVLRIFKKENGEFKIEYDRTFEPYFYALLKDDSAIEEVKKITAERHGTVVTVKRVEKVQKKFLGRPVEVWKLYFTHWQDIPAIHDKIREHPAVIDIYEYDIPFAKRYLIDKGLVPMEGDEELKMLAFDIETLYHEGEEFAEGPILMISYADEEGARVITWKNVDLPYVDVVSTEREMIKRFLRVVKEKDPDVLITYNGDNFDFAYLKKRCEKLGINFALGRDGSEPKIQRMGDRFAVEVKGRIHFDLYPVIRRTINLPTYTLEAVYEAVFGQPKEKVYAEEITTAWETGENLERVARYSMEDAKVTYELGKEFLPMEAQLSRLIGQSLWDVSRSSTGNLVEWFLLRKAYERNELAPNKPDEKELARRRQSYEGGYVKEPERGLWENIVYLDFRSLYPSIIITHNVSPDTLNREGCKEYDVAPQVGHRFCKDFPGFIPSLLGDLLEERQKIKKKMKATIDPIERKLLDYRQRAIKILANSYYGYYGYARARWYCKECAESVTAWGREYITMTIKEIEEKYGFKVIYSDTDGFFATIPGADAETVKKKAMEFLKYINAKLPGALELEYEGFYKRGFFVTKKKYAVIDEEGKITTRGLEIVRRDWSEIAKETQARVLEALLKDGDVEKAVRIVKEVTEKLSKYEVPPEKLVIHEQITRDLKDYKATGPHVAVAKRLAARGVKIRPGTVISYIVLKGSGRIGDRAIPFDEFDPTKHKYDAEYYIENQVLPAVERILRAFGYRKEDLRYQKTRQVGLSAWLKPKGT

SEQ ID NO: 1839 - protein, 774 aa, synthetic construct
MILDTDCITEDGKPVLRIFKKENGEFKIEYDRTFEPYFYALLKDDSAIEEVKKITAERHGTVVTVKRVEKVQKKFLGRPVEVWKLYFTHWQDQPAIRDKIREHPAVIDIYEYDIPFAKRYLIDKGLVPMEGDEELKMLAFDIETLYHEGEEFAEGPILMISYADEEGARVITWKNVDLPYVDVVSTEREMIKRFLRVVKEKDPDVLITYNGDNFDFAYLKKRCEKLGINFALGRDGSEPKIQRMGDRFAVEVKGRIHFDLYPVIRRTINLPTYTLEAVYEAVFGQPKEKVYAEEITTAWETGENLERVARYSMEDAKVTYELGKEFLPMEAQLSRLIGQSLWDVSRSSTGNLVEWFLLRKAYERNELAPNKPDEKELARRRQSYEGGYVKEPERGLWENIVYLDFRSLYPSIIITHNVSPDTLNREGCKEYDVAPQVGHRFCKDFPGFIPSLLGDLLEERQKIKKKMKATIDPIERKLLDYRQRAIKILANSYYGYYGYARARWYCKECAESVTAWGREYITMTIKEIEEKYGFKVIYSDTDGFFATIPGADAETVKKKAMEFLKYINAKLPGALELEYEGFYKRGFFVTKKKYAVIDEEGKITTRGLEIVRRDWSEIAKETQARVLEALLKDGDVEKAVRIVKEVTEKLSKYEVPPEKLVIHEQITRDLKDYKATGPHVAVAKRLAARGVKIRPGTVISYIVLKGSGRIGDRAIPFDEFDPTKHKYDAEYYIENQVLPAVERILRAFGYRKEDLRYQKTRQVGLSAWLKPKGT

SEQ ID NO: 1840 - protein, 774 aa, synthetic construct
MILDTDCITEDGKPVLRIFKKENGEFKIEYDRTFEPYFYALLKDDSAIEEVKKITAERHGTVVTVKRVEKVQKKFLGRPVEVWKLYFTHWQDQPAIADKIREHPAVIDIYEYDIPFAKRYLIDKGLVPMEGDEELKMLAFDIETLYHEGEEFAEGPILMISYADEEGARVITWKNVDLPYVDVVSTEREMIKRFLRVVKEKDPDVLITYNGDNFDFAYLKKRCEKLGINFALGRDGSEPKIQRMGDRFAVEVKGRIHFDLYPVIRRTINLPTYTLEAVYEAVFGQPKEKVYAEEITTAWETGENLERVARYSMEDAKVTYELGKEFLPMEAQLSRLIGQSLWDVSRSSTGNLVEWFLLRKAYERNELAPNKPDEKELARRRQSYEGGYVKEPERGLWENIVYLDFRSLYPSIIITHNVSPDTLNREGCKEYDVAPQVGHRFCKDFPGFIPSLLGDLLEERQKIKKKMKATIDPIERKLLDYRQRAIKILANSYYGYYGYARARWYCKECAESVTAWGREYITMTIKEIEEKYGFKVIYSDTDGFFATIPGADAETVKKKAMEFLKYINAKLPGALELEYEGFYKRGFFVTKKKYAVIDEEGKITTRGLEIVRRDWSEIAKETQARVLEALLKDGDVEKAVRIVKEVTEKLSKYEVPPEKLVIHEQITRDLKDYKATGPHVAVAKRLAARGVKIRPGTVISYIVLKGSGRIGDRAIPFDEFDPTKHKYDAEYYIENQVLPAVERILRAFGYRKEDLRYQKTRQVGLSAWLKPKGT

SEQ ID NO: 1841 - protein, 774 aa, synthetic construct
MILDTDCITEDGKPVLRIFKKENGEFKIEYDRTFEPYFYALLKDDSAIEEVKKITAERHGTVVTVKRVEKVQKKFLGRPVEVWKLYFTHWQDRPAIRDKIREHPAVIDIYEYDIPFAKRYLIDKGLVPMEGDEELKMLAFDIETLYHEGEEFAEGPILMISYADEEGARVITWKNVDLPYVDVVSTEREMIKRFLRVVKEKDPDVLITYNGDNFDFAYLKKRCEKLGINFALGRDGSEPKIQRMGDRFAVEVKGRIHFDLYPVIRRTINLPTYTLEAVYEAVFGQPKEKVYAEEITTAWETGENLERVARYSMEDAKVTYELGKEFLPMEAQLSRLIGQSLWDVSRSSTGNLVEWFLLRKAYERNELAPNKPDEKELARRRQSYEGGYVKEPERGLWENIVYLDFRSLYPSIIITHNVSPDTLNREGCKEYDVAPQVGHRFCKDFPGFIPSLLGDLLEERQKIKKKMKATIDPIERKLLDYRQRAIKILANSYYGYYGYARARWYCKECAESVTAWGREYITMTIKEIEEKYGFKVIYSDTDGFFATIPGADAETVKKKAMEFLKYINAKLPGALELEYEGFYKRGFFVTKKKYAVIDEEGKITTRGLEIVRRDWSEIAKETQARVLEALLKDGDVEKAVRIVKEVTEKLSKYEVPPEKLVIHEQITRDLKDYKATGPHVAVAKRLAARGVKIRPGTVISYIVLKGSGRIGDRAIPFDEFDPTKHKYDAEYYIENQVLPAVERILRAFGYRKEDLRYQKTRQVGLSAWLKPKGT

SEQ ID NO: 1842 - protein, 774 aa, synthetic construct
MILDTDCITEDGKPVLRIFKKENGEFKIEYDRTFEPYFYALLKDDSAIEEVKKITAERHGTVVTVKRVEKVQKKFLGRPVEVWKLYFTHWQDRPAIADKIREHPAVIDIYEYDIPFAKRYLIDKGLVPMEGDEELKMLAFDIETLYHEGEEFAEGPILMISYADEEGARVITWKNVDLPYVDVVSTEREMIKRFLRVVKEKDPDVLITYNGDNFDFAYLKKRCEKLGINFALGRDGSEPKIQRMGDRFAVEVKGRIHFDLYPVIRRTINLPTYTLEAVYEAVFGQPKEKVYAEEITTAWETGENLERVARYSMEDAKVTYELGKEFLPMEAQLSRLIGQSLWDVSRSSTGNLVEWFLLRKAYERNELAPNKPDEKELARRRQSYEGGYVKEPERGLWENIVYLDFRSLYPSIIITHNVSPDTLNREGCKEYDVAPQVGHRFCKDFPGFIPSLLGDLLEERQKIKKKMKATIDPIERKLLDYRQRAIKILANSYYGYYGYARARWYCKECAESVTAWGREYITMTIKEIEEKYGFKVIYSDTDGFFATIPGADAETVKKKAMEFLKYINAKLPGALELEYEGFYKRGFFVTKKKYAVIDEEGKITTRGLEIVRRDWSEIAKETQARVLEALLKDGDVEKAVRIVKEVTEKLSKYEVPPEKLVIHEQITRDLKDYKATGPHVAVAKRLAARGVKIRPGTVISYIVLKGSGRIGDRAIPFDEFDPTKHKYDAEYYIENQVLPAVERILRAFGYRKEDLRYQKTRQVGLSAWLKPKGT

SEQ ID NO: 1843 - protein, 774 aa, synthetic construct
MILDTDCITEDGKPVLRIFKKENGEFKIEYDRTFEPYFYALLKDDSAIEEVKKITAERHGTVVTVKRVEKVQKKFLGRPVEVWKLYFTHYQDVPAIRDKIREHPAVIDIYEYDIPFAKRYLIDKGLVPMEGDEELKMLAFDIETLYHEGEEFAEGPILMISYADEEGARVITWKNVDLPYVDVVSTEREMIKRFLRVVKEKDPDVLITYNGDNFDFAYLKKRCEKLGINFALGRDGSEPKIQRMGDRFAVEVKGRIHFDLYPVIRRTINLPTYTLEAVYEAVFGQPKEKVYAEEITTAWETGENLERVARYSMEDAKVTYELGKEFLPMEAQLSRLIGQSLWDVSRSSTGNLVEWFLLRKAYERNELAPNKPDEKELARRRQSYEGGYVKEPERGLWENIVYLDFRSLYPSIIITHNVSPDTLNREGCKEYDVAPQVGHRFCKDFPGFIPSLLGDLLEERQKIKKKMKATIDPIERKLLDYRQRAIKILANSYYGYYGYARARWYCKECAESVTAWGREYITMTIKEIEEKYGFKVIYSDTDGFFATIPGADAETVKKKAMEFLKYINAKLPGALELEYEGFYKRGFFVTKKKYAVIDEEGKITTRGLEIVRRDWSEIAKETQARVLEALLKDGDVEKAVRIVKEVTEKLSKYEVPPEKLVIHEQITRDLKDYKATGPHVAVAKRLAARGVKIRPGTVISYIVLKGSGRIGDRAIPFDEFDPTKHKYDAEYYIENQVLPAVERILRAFGYRKEDLRYQKTRQVGLSAWLKPKGT

SEQ ID NO: 1844 - protein, 774 aa, synthetic construct
MILDTDCITEDGKPVLRIFKKENGEFKIEYDRTFEPYFYALLKDDSAIEEVKKITAERHGTVVTVKRVEKVQKKFLGRPVEVWKLYFTHYQDIPAIRDKIREHPAVIDIYEYDIPFAKRYLIDKGLVPMEGDEELKMLAFDIETLYHEGEEFAEGPILMISYADEEGARVITWKNVDLPYVDVVSTEREMIKRFLRVVKEKDPDVLITYNGDNFDFAYLKKRCEKLGINFALGRDGSEPKIQRMGDRFAVEVKGRIHFDLYPVIRRTINLPTYTLEAVYEAVFGQPKEKVYAEEITTAWETGENLERVARYSMEDAKVTYELGKEFLPMEAQLSRLIGQSLWDVSRSSTGNLVEWFLLRKAYERNELAPNKPDEKELARRRQSYEGGYVKEPERGLWENIVYLDFRSLYPSIIITHNVSPDTLNREGCKEYDVAPQVGHRFCKDFPGFIPSLLGDLLEERQKIKKKMKATIDPIERKLLDYRQRAIKILANSYYGYYGYARARWYCKECAESVTAWGREYITMTIKEIEEKYGFKVIYSDTDGFFATIPGADAETVKKKAMEFLKYINAKLPGALELEYEGFYKRGFFVTKKKYAVIDEEGKITTRGLEIVRRDWSEIAKETQARVLEALLKDGDVEKAVRIVKEVTEKLSKYEVPPEKLVIHEQITRDLKDYKATGPHVAVAKRLAARGVKIRPGTVISYIVLKGSGRIGDRAIPFDEFDPTKHKYDAEYYIENQVLPAVERILRAFGYRKEDLRYQKTRQVGLSAWLKPKGT

SEQ ID NO: 1845 - protein, 774 aa, synthetic construct
MILDTDCITEDGKPVLRIFKKENGEFKIEYDRTFEPYFYALLKDDSAIEEVKKITAERHGTVVTVKRVEKVQKKFLGRPVEVWKLYFTHYQDIPAIADKIREHPAVIDIYEYDIPFAKRYLIDKGLVPMEGDEELKMLAFDIETLYHEGEEFAEGPILMISYADEEGARVITWKNVDLPYVDVVSTEREMIKRFLRVVKEKDPDVLITYNGDNFDFAYLKKRCEKLGINFALGRDGSEPKIQRMGDRFAVEVKGRIHFDLYPVIRRTINLPTYTLEAVYEAVFGQPKEKVYAEEITTAWETGENLERVARYSMEDAKVTYELGKEFLPMEAQLSRLIGQSLWDVSRSSTGNLVEWFLLRKAYERNELAPNKPDEKELARRRQSYEGGYVKEPERGLWENIVYLDFRSLYPSIIITHNVSPDTLNREGCKEYDVAPQVGHRFCKDFPGFIPSLLGDLLEERQKIKKKMKATIDPIERKLLDYRQRAIKILANSYYGYYGYARARWYCKECAESVTAWGREYITMTIKEIEEKYGFKVIYSDTDGFFATIPGADAETVKKKAMEFLKYINAKLPGALELEYEGFYKRGFFVTKKKYAVIDEEGKITTRGLEIVRRDWSEIAKETQARVLEALLKDGDVEKAVRIVKEVTEKLSKYEVPPEKLVIHEQITRDLKDYKATGPHVAVAKRLAARGVKIRPGTVISYIVLKGSGRIGDRAIPFDEFDPTKHKYDAEYYIENQVLPAVERILRAFGYRKEDLRYQKTRQVGLSAWLKPKGT

SEQ ID NO: 1846 - protein, 774 aa, synthetic construct
MILDTDCITEDGKPVLRIFKKENGEFKIEYDRTFEPYFYALLKDDSAIEEVKKITAERHGTVVTVKRVEKVQKKFLGRPVEVWKLYFTHYQDIPAIFDKIREHPAVIDIYEYDIPFAKRYLIDKGLVPMEGDEELKMLAFDIETLYHEGEEFAEGPILMISYADEEGARVITWKNVDLPYVDVVSTEREMIKRFLRVVKEKDPDVLITYNGDNFDFAYLKKRCEKLGINFALGRDGSEPKIQRMGDRFAVEVKGRIHFDLYPVIRRTINLPTYTLEAVYEAVFGQPKEKVYAEEITTAWETGENLERVARYSMEDAKVTYELGKEFLPMEAQLSRLIGQSLWDVSRSSTGNLVEWFLLRKAYERNELAPNKPDEKELARRRQSYEGGYVKEPERGLWENIVYLDFRSLYPSIIITHNVSPDTLNREGCKEYDVAPQVGHRFCKDFPGFIPSLLGDLLEERQKIKKKMKATIDPIERKLLDYRQRAIKILANSYYGYYGYARARWYCKECAESVTAWGREYITMTIKEIEEKYGFKVIYSDTDGFFATIPGADAETVKKKAMEFLKYINAKLPGALELEYEGFYKRGFFVTKKKYAVIDEEGKITTRGLEIVRRDWSEIAKETQARVLEALLKDGDVEKAVRIVKEVTEKLSKYEVPPEKLVIHEQITRDLKDYKATGPHVAVAKRLAARGVKIRPGTVISYIVLKGSGRIGDRAIPFDEFDPTKHKYDAEYYIENQVLPAVERILRAFGYRKEDLRYQKTRQVGLSAWLKPKGT

SEQ ID NO: 1847 - protein, 774 aa, synthetic construct
MILDTDCITEDGKPVLRIFKKENGEFKIEYDRTFEPYFYALLKDDSAIEEVKKITAERHGTVVTVKRVEKVQKKFLGRPVEVWKLYFTHYQDQPAIRDKIREHPAVIDIYEYDIPFAKRYLIDKGLVPMEGDEELKMLAFDIETLYHEGEEFAEGPILMISYADEEGARVITWKNVDLPYVDVVSTEREMIKRFLRVVKEKDPDVLITYNGDNFDFAYLKKRCEKLGINFALGRDGSEPKIQRMGDRFAVEVKGRIHFDLYPVIRRTINLPTYTLEAVYEAVFGQPKEKVYAEEITTAWETGENLERVARYSMEDAKVTYELGKEFLPMEAQLSRLIGQSLWDVSRSSTGNLVEWFLLRKAYERNELAPNKPDEKELARRRQSYEGGYVKEPERGLWENIVYLDFRSLYPSIIITHNVSPDTLNREGCKEYDVAPQVGHRFCKDFPGFIPSLLGDLLEERQKIKKKMKATIDPIERKLLDYRQRAIKILANSYYGYYGYARARWYCKECAESVTAWGREYITMTIKEIEEKYGFKVIYSDTDGFFATIPGADAETVKKKAMEFLKYINAKLPGALELEYEGFYKRGFFVTKKKYAVIDEEGKITTRGLEIVRRDWSEIAKETQARVLEALLKDGDVEKAVRIVKEVTEKLSKYEVPPEKLVIHEQITRDLKDYKATGPHVAVAKRLAARGVKIRPGTVISYIVLKGSGRIGDRAIPFDEFDPTKHKYDAEYYIENQVLPAVERILRAFGYRKEDLRYQKTRQVGLSAWLKPKGT

SEQ ID NO: 1848 - protein, 774 aa, synthetic construct
MILDTDCITEDGKPVLRIFKKENGEFKIEYDRTFEPYFYALLKDDSAIEEVKKITAERHGTVVTVKRVEKVQKKFLGRPVEVWKLYFTHPQDIPAIFDKIREHPAVIDIYEYDIPFAKRYLIDKGLVPMEGDEELKMLAFDIETLYHEGEEFAEGPILMISYADEEGARVITWKNVDLPYVDVVSTEREMIKRFLRVVKEKDPDVLITYNGDNFDFAYLKKRCEKLGINFALGRDGSEPKIQRMGDRFAVEVKGRIHFDLYPVIRRTINLPTYTLEAVYEAVFGQPKEKVYAEEITTAWETGENLERVARYSMEDAKVTYELGKEFLPMEAQLSRLIGQSLWDVSRSSTGNLVEWFLLRKAYERNELAPNKPDEKELARRRQSYEGGYVKEPERGLWENIVYLDFRSLYPSIIITHNVSPDTLNREGCKEYDVAPQVGHRFCKDFPGFIPSLLGDLLEERQKIKKKMKATIDPIERKLLDYRQRAIKILANSYYGYYGYARARWYCKECAESVTAWGREYITMTIKEIEEKYGFKVIYSDTDGFFATIPGADAETVKKKAMEFLKYINAKLPGALELEYEGFYKRGFFVTKKKYAVIDEEGKITTRGLEIVRRDWSEIAKETQARVLEALLKDGDVEKAVRIVKEVTEKLSKYEVPPEKLVIHEQITRDLKDYKATGPHVAVAKRLAARGVKIRPGTVISYIVLKGSGRIGDRAIPFDEFDPTKHKYDAEYYIENQVLPAVERILRAFGYRKEDLRYQKTRQVGLSAWLKPKGT

SEQ ID NO: 1849 - protein, 774 aa, synthetic construct
MILDTDCITEDGKPVLRIFKKENGEFKIEYDRTFEPYFYALLKDDSAIEEVKKITAERHGTVVTVKRVEKVQKKFLGRPVEVWKLYFTHPQDQPAIRDKIREHPAVIDIYEYDIPFAKRYLIDKGLVPMEGDEELKMLAFDIETLYHEGEEFAEGPILMISYADEEGARVITWKNVDLPYVDVVSTEREMIKRFLRVVKEKDPDVLITYNGDNFDFAYLKKRCEKLGINFALGRDGSEPKIQRMGDRFAVEVKGRIHFDLYPVIRRTINLPTYTLEAVYEAVFGQPKEKVYAEEITTAWETGENLERVARYSMEDAKVTYELGKEFLPMEAQLSRLIGQSLWDVSRSSTGNLVEWFLLRKAYERNELAPNKPDEKELARRRQSYEGGYVKEPERGLWENIVYLDFRSLYPSIIITHNVSPDTLNREGCKEYDVAPQVGHRFCKDFPGFIPSLLGDLLEERQKIKKKMKATIDPIERKLLDYRQRAIKILANSYYGYYGYARARWYCKECAESVTAWGREYITMTIKEIEEKYGFKVIYSDTDGFFATIPGADAETVKKKAMEFLKYINAKLPGALELEYEGFYKRGFFVTKKKYAVIDEEGKITTRGLEIVRRDWSEIAKETQARVLEALLKDGDVEKAVRIVKEVTEKLSKYEVPPEKLVIHEQITRDLKDYKATGPHVAVAKRLAARGVKIRPGTVISYIVLKGSGRIGDRAIPFDEFDPTKHKYDAEYYIENQVLPAVERILRAFGYRKEDLRYQKTRQVGLSAWLKPKGT

SEQ ID NO: 1850 - protein, 774 aa, synthetic construct
MILDTDCITEDGKPVLRIFKKENGEFKIEYDRTFEPYFYALLKDDSAIEEVKKITAERHGTVVTVKRVEKVQKKFLGRPVEVWKLYFTHPQDRPAIRDKIREHPAVIDIYEYDIPFAKRYLIDKGLVPMEGDEELKMLAFDIETLYHEGEEFAEGPILMISYADEEGARVITWKNVDLPYVDVVSTEREMIKRFLRVVKEKDPDVLITYNGDNFDFAYLKKRCEKLGINFALGRDGSEPKIQRMGDRFAVEVKGRIHFDLYPVIRRTINLPTYTLEAVYEAVFGQPKEKVYAEEITTAWETGENLERVARYSMEDAKVTYELGKEFLPMEAQLSRLIGQSLWDVSRSSTGNLVEWFLLRKAYERNELAPNKPDEKELARRRQSYEGGYVKEPERGLWENIVYLDFRSLYPSIIITHNVSPDTLNREGCKEYDVAPQVGHRFCKDFPGFIPSLLGDLLEERQKIKKKMKATIDPIERKLLDYRQRAIKILANSYYGYYGYARARWYCKECAESVTAWGREYITMTIKEIEEKYGFKVIYSDTDGFFATIPGADAETVKKKAMEFLKYINAKLPGALELEYEGFYKRGFFVTKKKYAVIDEEGKITTRGLEIVRRDWSEIAKETQARVLEALLKDGDVEKAVRIVKEVTEKLSKYEVPPEKLVIHEQITRDLKDYKATGPHVAVAKRLAARGVKIRPGTVISYIVLKGSGRIGDRAIPFDEFDPTKHKYDAEYYIENQVLPAVERILRAFGYRKEDLRYQKTRQVGLSAWLKPKGT

SEQ ID NO: 1851 - protein, 774 aa, synthetic construct
MILDTDCITEDGKPVLRIFKKENGEFKIEYDRTFEPYFYALLKDDSAIEEVKKITAERHGTVVTVKRVEKVQKKFLGRPVEVWKLYFTHPQDRPAIWDKIREHPAVIDIYEYDIPFAKRYLIDKGLVPMEGDEELKMLAFDIETLYHEGEEFAEGPILMISYADEEGARVITWKNVDLPYVDVVSTEREMIKRFLRVVKEKDPDVLITYNGDNFDFAYLKKRCEKLGINFALGRDGSEPKIQRMGDRFAVEVKGRIHFDLYPVIRRTINLPTYTLEAVYEAVFGQPKEKVYAEEITTAWETGENLERVARYSMEDAKVTYELGKEFLPMEAQLSRLIGQSLWDVSRSSTGNLVEWFLLRKAYERNELAPNKPDEKELARRRQSYEGGYVKEPERGLWENIVYLDFRSLYPSIIITHNVSPDTLNREGCKEYDVAPQVGHRFCKDFPGFIPSLLGDLLEERQKIKKKMKATIDPIERKLLDYRQRAIKILANSYYGYYGYARARWYCKECAESVTAWGREYITMTIKEIEEKYGFKVIYSDTDGFFATIPGADAETVKKKAMEFLKYINAKLPGALELEYEGFYKRGFFVTKKKYAVIDEEGKITTRGLEIVRRDWSEIAKETQARVLEALLKDGDVEKAVRIVKEVTEKLSKYEVPPEKLVIHEQITRDLKDYKATGPHVAVAKRLAARGVKIRPGTVISYIVLKGSGRIGDRAIPFDEFDPTKHKYDAEYYIENQVLPAVERILRAFGYRKEDLRYQKTRQVGLSAWLKPKGT

SEQ ID NO: 1852 - protein, 774 aa, synthetic construct
MILDTDCITEDGKPVLRIFKKENGEFKIEYDRTFEPYFYALLKDDSAIEEVKKITAERHGTVVTVKRVEKVQKKFLGRPVEVWKLYFTHPQDRPAIRDKIREHPAVIDIYEYDIPFAKQYLIDKGLVPMEGDEELKMLAFDIETLYHEGEEFAEGPILMISYADEEGARVITWKNVDLPYVDVVSTEREMIKRFLRVVKEKDPDVLITYNGDNFDFAYLKKRCEKLGINFALGRDGSEPKIQRMGDRFAVEVKGRIHFDLYPVIRRTINLPTYTLEAVYEAVFGQPKEKVYAEEITTAWETGENLERVARYSMEDAKVTYELGKEFLPMEAQLSRLIGQSLWDVSRSSTGNLVEWFLLRKAYERNELAPNKPDEKELARRRQSYEGGYVKEPERGLWENIVYLDFRSLYPSIIITHNVSPDTLNREGCKEYDVAPQVGHRFCKDFPGFIPSLLGDLLEERQKIKKKMKATIDPIERKLLDYRQRAIKILANSYYGYYGYARARWYCKECAESVTAWGREYITMTIKEIEEKYGFKVIYSDTDGFFATIPGADAETVKKKAMEFLKYINAKLPGALELEYEGFYKRGFFVTKKKYAVIDEEGKITTRGLEIVRRDWSEIAKETQARVLEALLKDGDVEKAVRIVKEVTEKLSKYEVPPEKLVIHEQITRDLKDYKATGPHVAVAKRLAARGVKIRPGTVISYIVLKGSGRIGDRAIPFDEFDPTKHKYDAEYYIENQVLPAVERILRAFGYRKEDLRYQKTRQVGLSAWLKPKGT

SEQ ID NO: 1853 - protein, 774 aa, synthetic construct
MILDTDCITEDGKPVMRIFKKENGEFKIEYDRTFEPYFYALLKDDSAIEEVKKITAERHGTVVTVKRVEKVQKKFLGRPVEVWKLYFTHPQDVPAIRDKIREHPAVIDIYEYDIPFAKRYLIDKGLVPMEGDEELKMLAFDIETLYHEGEEFAEGPILMISYADEEGARVITWKNVDLPYVDVVSTEREMIKRFLRVVKEKDPDVLITYNGDNFDFAYLKKRCEKLGINFALGRDGSEPKIQRMGDRFAVEVKGRIHFDLYPVIRRTINLPTYTLEAVYEAVFGQPKEKVYAEEITTAWETGENLERVARYSMEDAKVTYELGKEFLPMEAQLSRLIGQSLWDVSRSSTGNLVEWFLLRKAYERNELAPNKPDEKELARRRQSYEGGYVKEPERGLWENIVYLDFRSLYPSIIITHNVSPDTLNREGCKEYDVAPQVGHRFCKDFPGFIPSLLGDLLEERQKIKKKMKATIDPIERKLLDYRQRAIKILANSYYGYYGYARARWYCKECAESVTAWGREYITMTIKEIEEKYGFKVIYSDTDGFFATIPGADAETVKKKAMEFLKYINAKLPGALELEYEGFYKRGFFVTKKKYAVIDEEGKITTRGLEIVRRDWSEIAKETQARVLEALLKDGDVEKAVRIVKEVTEKLSKYEVPPEKLVIHEQITRDLKDYKATGPHVAVAKRLAARGVKIRPGTVISYIVLKGSGRIGDRAIPFDEFDPTKHKYDAEYYIENQVLPAVERILRAFGYRKEDLRYQKTRQVGLSAWLKPKGT

SEQ ID NO: 1854 - protein, 774 aa, synthetic construct
MILDTDCITEDGKPVMRIFKKENGEFKIEYDRTFEAYFYALLKDDSAIEEVKKITAERHGTVVTVKRVEKVQKKFLGRPVEVWKLYFTHFQDVPAIRDKIREHPAVIDIYEYDIPFAKRYLIDKGLVPMEGDEELKMLAFDIETLYHEGEEFAEGPILMISYADEEGARVITWKNVDLPYVDVVSTEREMIKRFLRVVKEKDPDVLITYNGDNFDFAYLKKRCEKLGINFALGRDGSEPKIQRMGDRFAVEVKGRIHFDLYPVIRRTINLPTYTLEAVYEAVFGQPKEKVYAEEITTAWETGENLERVARYSMEDAKVTYELGKEFLPMEAQLSRLIGQSLWDVSRSSTGNLVEWFLLRKAYERNELAPNKPDEKELARRRQSYEGGYVKEPERGLWENIVYLDFRSLYPSIIITHNVSPDTLNREGCKEYDVAPQVGHRFCKDFPGFIPSLLGDLLEERQKIKKKMKATIDPIERKLLDYRQRAIKILANSYYGYYGYARARWYCKECAESVTAWGREYITMTIKEIEEKYGFKVIYSDTDGFFATIPGADAETVKKKAMEFLKYINAKLPGALELEYEGFYKRGFFVTKKKYAVIDEEGKITTRGLEIVRRDWSEIAKETQARVLEALLKDGDVEKAVRIVKEVTEKLSKYEVPPEKLVIHEQITRDLKDYKATGPHVAVAKRLAARGVKIRPGTVISYIVLKGSGRIGDRAIPFDEFDPTKHKYDAEYYIENQVLPAVERILRAFGYRKEDLRYQKTRQVGLSAWLKPKGT

SEQ ID NO: 1855 - protein, 774 aa, synthetic construct
MILDTDCITEDGKPVMRIFKKENGEFKIEYDRTFEAYFYALLKDDSAIEEVKKITAERHGTVVTVKRVEKVQKKFLGRPVEVWKLYFTHFQDIPAIRDKIREHPAVIDIYEYDIPFAKRYLIDKGLVPMEGDEELKMLAFDIETLYHEGEEFAEGPILMISYADEEGARVITWKNVDLPYVDVVSTEREMIKRFLRVVKEKDPDVLITYNGDNFDFAYLKKRCEKLGINFALGRDGSEPKIQRMGDRFAVEVKGRIHFDLYPVIRRTINLPTYTLEAVYEAVFGQPKEKVYAEEITTAWETGENLERVARYSMEDAKVTYELGKEFLPMEAQLSRLIGQSLWDVSRSSTGNLVEWFLLRKAYERNELAPNKPDEKELARRRQSYEGGYVKEPERGLWENIVYLDFRSLYPSIIITHNVSPDTLNREGCKEYDVAPQVGHRFCKDFPGFIPSLLGDLLEERQKIKKKMKATIDPIERKLLDYRQRAIKILANSYYGYYGYARARWYCKECAESVTAWGREYITMTIKEIEEKYGFKVIYSDTDGFFATIPGADAETVKKKAMEFLKYINAKLPGALELEYEGFYKRGFFVTKKKYAVIDEEGKITTRGLEIVRRDWSEIAKETQARVLEALLKDGDVEKAVRIVKEVTEKLSKYEVPPEKLVIHEQITRDLKDYKATGPHVAVAKRLAARGVKIRPGTVISYIVLKGSGRIGDRAIPFDEFDPTKHKYDAEYYIENQVLPAVERILRAFGYRKEDLRYQKTRQVGLSAWLKPKGT

SEQ ID NO: 1856 - protein, 774 aa, synthetic construct
MILDTDCITEDGKPVMRIFKKENGEFKIEYDRTFEAYFYALLKDDSAIEEVKKITAERHGTVVTVKRVEKVQKKFLGRPVEVWKLYFTHWQDVPAIRDKIREHPAVIDIYEYDIPFAKRYLIDKGLVPMEGDEELKMLAFDIETLYHEGEEFAEGPILMISYADEEGARVITWKNVDLPYVDVVSTEREMIKRFLRVVKEKDPDVLITYNGDNFDFAYLKKRCEKLGINFALGRDGSEPKIQRMGDRFAVEVKGRIHFDLYPVIRRTINLPTYTLEAVYEAVFGQPKEKVYAEEITTAWETGENLERVARYSMEDAKVTYELGKEFLPMEAQLSRLIGQSLWDVSRSSTGNLVEWFLLRKAYERNELAPNKPDEKELARRRQSYEGGYVKEPERGLWENIVYLDFRSLYPSIIITHNVSPDTLNREGCKEYDVAPQVGHRFCKDFPGFIPSLLGDLLEERQKIKKKMKATIDPIERKLLDYRQRAIKILANSYYGYYGYARARWYCKECAESVTAWGREYITMTIKEIEEKYGFKVIYSDTDGFFATIPGADAETVKKKAMEFLKYINAKLPGALELEYEGFYKRGFFVTKKKYAVIDEEGKITTRGLEIVRRDWSEIAKETQARVLEALLKDGDVEKAVRIVKEVTEKLSKYEVPPEKLVIHEQITRDLKDYKATGPHVAVAKRLAARGVKIRPGTVISYIVLKGSGRIGDRAIPFDEFDPTKHKYDAEYYIENQVLPAVERILRAFGYRKEDLRYQKTRQVGLSAWLKPKGT

SEQ ID NO: 1857 - protein, 774 aa, synthetic construct
MILDTDCITEDGKPVMRIFKKENGEFKIEYDRTFEAYFYALLKDDSAIEEVKKITAERHGTVVTVKRVEKVQKKFLGRPVEVWKLYFTHWQDIPAIRDKIREHPAVIDIYEYDIPFAKRYLIDKGLVPMEGDEELKMLAFDIETLYHEGEEFAEGPILMISYADEEGARVITWKNVDLPYVDVVSTEREMIKRFLRVVKEKDPDVLITYNGDNFDFAYLKKRCEKLGINFALGRDGSEPKIQRMGDRFAVEVKGRIHFDLYPVIRRTINLPTYTLEAVYEAVFGQPKEKVYAEEITTAWETGENLERVARYSMEDAKVTYELGKEFLPMEAQLSRLIGQSLWDVSRSSTGNLVEWFLLRKAYERNELAPNKPDEKELARRRQSYEGGYVKEPERGLWENIVYLDFRSLYPSIIITHNVSPDTLNREGCKEYDVAPQVGHRFCKDFPGFIPSLLGDLLEERQKIKKKMKATIDPIERKLLDYRQRAIKILANSYYGYYGYARARWYCKECAESVTAWGREYITMTIKEIEEKYGFKVIYSDTDGFFATIPGADAETVKKKAMEFLKYINAKLPGALELEYEGFYKRGFFVTKKKYAVIDEEGKITTRGLEIVRRDWSEIAKETQARVLEALLKDGDVEKAVRIVKEVTEKLSKYEVPPEKLVIHEQITRDLKDYKATGPHVAVAKRLAARGVKIRPGTVISYIVLKGSGRIGDRAIPFDEFDPTKHKYDAEYYIENQVLPAVERILRAFGYRKEDLRYQKTRQVGLSAWLKPKGT

SEQ ID NO: 1858 - protein, 774 aa, synthetic construct
MILDTDCITEDGKPVMRIFKKENGEFKIEYDRTFEAYFYALLKDDSAIEEVKKITAERHGTVVTVKRVEKVQKKFLGRPVEVWKLYFTHWQDIPAIHDKIREHPAVIDIYEYDIPFAKRYLIDKGLVPMEGDEELKMLAFDIETLYHEGEEFAEGPILMISYADEEGARVITWKNVDLPYVDVVSTEREMIKRFLRVVKEKDPDVLITYNGDNFDFAYLKKRCEKLGINFALGRDGSEPKIQRMGDRFAVEVKGRIHFDLYPVIRRTINLPTYTLEAVYEAVFGQPKEKVYAEEITTAWETGENLERVARYSMEDAKVTYELGKEFLPMEAQLSRLIGQSLWDVSRSSTGNLVEWFLLRKAYERNELAPNKPDEKELARRRQSYEGGYVKEPERGLWENIVYLDFRSLYPSIIITHNVSPDTLNREGCKEYDVAPQVGHRFCKDFPGFIPSLLGDLLEERQKIKKKMKATIDPIERKLLDYRQRAIKILANSYYGYYGYARARWYCKECAESVTAWGREYITMTIKEIEEKYGFKVIYSDTDGFFATIPGADAETVKKKAMEFLKYINAKLPGALELEYEGFYKRGFFVTKKKYAVIDEEGKITTRGLEIVRRDWSEIAKETQARVLEALLKDGDVEKAVRIVKEVTEKLSKYEVPPEKLVIHEQITRDLKDYKATGPHVAVAKRLAARGVKIRPGTVISYIVLKGSGRIGDRAIPFDEFDPTKHKYDAEYYIENQVLPAVERILRAFGYRKEDLRYQKTRQVGLSAWLKPKGT

SEQ ID NO: 1859 - protein, 774 aa, synthetic construct
MILDTDCITEDGKPVMRIFKKENGEFKIEYDRTFEAYFYALLKDDSAIEEVKKITAERHGTVVTVKRVEKVQKKFLGRPVEVWKLYFTHPQDRPAIADKIREHPAVIDIYEYDIPFAKRYLIDKGLVPMEGDEELKMLAFDIETLYHEGEEFAEGPILMISYADEEGARVITWKNVDLPYVDVVSTEREMIKRFLRVVKEKDPDVLITYNGDNFDFAYLKKRCEKLGINFALGRDGSEPKIQRMGDRFAVEVKGRIHFDLYPVIRRTINLPTYTLEAVYEAVFGQPKEKVYAEEITTAWETGENLERVARYSMEDAKVTYELGKEFLPMEAQLSRLIGQSLWDVSRSSTGNLVEWFLLRKAYERNELAPNKPDEKELARRRQSYEGGYVKEPERGLWENIVYLDFRSLYPSIIITHNVSPDTLNREGCKEYDVAPQVGHRFCKDFPGFIPSLLGDLLEERQKIKKKMKATIDPIERKLLDYRQRAIKILANSYYGYYGYARARWYCKECAESVTAWGREYITMTIKEIEEKYGFKVIYSDTDGFFATIPGADAETVKKKAMEFLKYINAKLPGALELEYEGFYKRGFFVTKKKYAVIDEEGKITTRGLEIVRRDWSEIAKETQARVLEALLKDGDVEKAVRIVKEVTEKLSKYEVPPEKLVIHEQITRDLKDYKATGPHVAVAKRLAARGVKIRPGTVISYIVLKGSGRIGDRAIPFDEFDPTKHKYDAEYYIENQVLPAVERILRAFGYRKEDLRYQKTRQVGLSAWLKPKGT

SEQ ID NO: 1860 - protein, 774 aa, synthetic construct
MILDTDCITEDGKPVMRIFKKENGEFKIEYDRTFEHYFYALLKDDSAIEEVKKITAERHGTVVTVKRVEKVQKKFLGRPVEVWKLYFTHPQDIPAIHDKIREHPAVIDIYEYDIPFAKRYLIDKGLVPMEGDEELKMLAFDIETLYHEGEEFAEGPILMISYADEEGARVITWKNVDLPYVDVVSTEREMIKRFLRVVKEKDPDVLITYNGDNFDFAYLKKRCEKLGINFALGRDGSEPKIQRMGDRFAVEVKGRIHFDLYPVIRRTINLPTYTLEAVYEAVFGQPKEKVYAEEITTAWETGENLERVARYSMEDAKVTYELGKEFLPMEAQLSRLIGQSLWDVSRSSTGNLVEWFLLRKAYERNELAPNKPDEKELARRRQSYEGGYVKEPERGLWENIVYLDFRSLYPSIIITHNVSPDTLNREGCKEYDVAPQVGHRFCKDFPGFIPSLLGDLLEERQKIKKKMKATIDPIERKLLDYRQRAIKILANSYYGYYGYARARWYCKECAESVTAWGREYITMTIKEIEEKYGFKVIYSDTDGFFATIPGADAETVKKKAMEFLKYINAKLPGALELEYEGFYKRGFFVTKKKYAVIDEEGKITTRGLEIVRRDWSEIAKETQARVLEALLKDGDVEKAVRIVKEVTEKLSKYEVPPEKLVIHEQITRDLKDYKATGPHVAVAKRLAARGVKIRPGTVISYIVLKGSGRIGDRAIPFDEFDPTKHKYDAEYYIENQVLPAVERILRAFGYRKEDLRYQKTRQVGLSAWLKPKGT

SEQ ID NO: 1861 - protein, 774 aa, synthetic construct
MILDTDCITEDGKPVMRIFKKENGEFKIEYDRTFEWYFYALLKDDSAIEEVKKITAERHGTVVTVKRVEKVQKKFLGRPVEVWKLYFTHPQDVPAIRDKIREHPAVIDIYEYDIPFAKRYLIDKGLVPMEGDEELKMLAFDIETLYHEGEEFAEGPILMISYADEEGARVITWKNVDLPYVDVVSTEREMIKRFLRVVKEKDPDVLITYNGDNFDFAYLKKRCEKLGINFALGRDGSEPKIQRMGDRFAVEVKGRIHFDLYPVIRRTINLPTYTLEAVYEAVFGQPKEKVYAEEITTAWETGENLERVARYSMEDAKVTYELGKEFLPMEAQLSRLIGQSLWDVSRSSTGNLVEWFLLRKAYERNELAPNKPDEKELARRRQSYEGGYVKEPERGLWENIVYLDFRSLYPSIIITHNVSPDTLNREGCKEYDVAPQVGHRFCKDFPGFIPSLLGDLLEERQKIKKKMKATIDPIERKLLDYRQRAIKILANSYYGYYGYARARWYCKECAESVTAWGREYITMTIKEIEEKYGFKVIYSDTDGFFATIPGADAETVKKKAMEFLKYINAKLPGALELEYEGFYKRGFFVTKKKYAVIDEEGKITTRGLEIVRRDWSEIAKETQARVLEALLKDGDVEKAVRIVKEVTEKLSKYEVPPEKLVIHEQITRDLKDYKATGPHVAVAKRLAARGVKIRPGTVISYIVLKGSGRIGDRAIPFDEFDPTKHKYDAEYYIENQVLPAVERILRAFGYRKEDLRYQKTRQVGLSAWLKPKGT

SEQ ID NO: 1862 - protein, 774 aa, synthetic construct
MILDTDCITEDGKPVMRIFKKENGEFKIEYDRTFEWYFYALLKDDSAIEEVKKITAERHGTVVTVKRVEKVQKKFLGRPVEVWKLYFTHFQDVPAIRDKIREHPAVIDIYEYDIPFAKRYLIDKGLVPMEGDEELKMLAFDIETLYHEGEEFAEGPILMISYADEEGARVITWKNVDLPYVDVVSTEREMIKRFLRVVKEKDPDVLITYNGDNFDFAYLKKRCEKLGINFALGRDGSEPKIQRMGDRFAVEVKGRIHFDLYPVIRRTINLPTYTLEAVYEAVFGQPKEKVYAEEITTAWETGENLERVARYSMEDAKVTYELGKEFLPMEAQLSRLIGQSLWDVSRSSTGNLVEWFLLRKAYERNELAPNKPDEKELARRRQSYEGGYVKEPERGLWENIVYLDFRSLYPSIIITHNVSPDTLNREGCKEYDVAPQVGHRFCKDFPGFIPSLLGDLLEERQKIKKKMKATIDPIERKLLDYRQRAIKILANSYYGYYGYARARWYCKECAESVTAWGREYITMTIKEIEEKYGFKVIYSDTDGFFATIPGADAETVKKKAMEFLKYINAKLPGALELEYEGFYKRGFFVTKKKYAVIDEEGKITTRGLEIVRRDWSEIAKETQARVLEALLKDGDVEKAVRIVKEVTEKLSKYEVPPEKLVIHEQITRDLKDYKATGPHVAVAKRLAARGVKIRPGTVISYIVLKGSGRIGDRAIPFDEFDPTKHKYDAEYYIENQVLPAVERILRAFGYRKEDLRYQKTRQVGLSAWLKPKGT

SEQ ID NO: 1863 - protein, 774 aa, synthetic construct
MILDTDCITEDGKPVMRIFKKENGEFKIEYDRTFEWYFYALLKDDSAIEEVKKITAERHGTVVTVKRVEKVQKKFLGRPVEVWKLYFTHFQDIPAIRDKIREHPAVIDIYEYDIPFAKRYLIDKGLVPMEGDEELKMLAFDIETLYHEGEEFAEGPILMISYADEEGARVITWKNVDLPYVDVVSTEREMIKRFLRVVKEKDPDVLITYNGDNFDFAYLKKRCEKLGINFALGRDGSEPKIQRMGDRFAVEVKGRIHFDLYPVIRRTINLPTYTLEAVYEAVFGQPKEKVYAEEITTAWETGENLERVARYSMEDAKVTYELGKEFLPMEAQLSRLIGQSLWDVSRSSTGNLVEWFLLRKAYERNELAPNKPDEKELARRRQSYEGGYVKEPERGLWENIVYLDFRSLYPSIIITHNVSPDTLNREGCKEYDVAPQVGHRFCKDFPGFIPSLLGDLLEERQKIKKKMKATIDPIERKLLDYRQRAIKILANSYYGYYGYARARWYCKECAESVTAWGREYITMTIKEIEEKYGFKVIYSDTDGFFATIPGADAETVKKKAMEFLKYINAKLPGALELEYEGFYKRGFFVTKKKYAVIDEEGKITTRGLEIVRRDWSEIAKETQARVLEALLKDGDVEKAVRIVKEVTEKLSKYEVPPEKLVIHEQITRDLKDYKATGPHVAVAKRLAARGVKIRPGTVISYIVLKGSGRIGDRAIPFDEFDPTKHKYDAEYYIENQVLPAVERILRAFGYRKEDLRYQKTRQVGLSAWLKPKGT

SEQ ID NO: 1864 - protein, 774 aa, synthetic construct
MILDTDCITEDGKPVMRIFKKENGEFKIEYDRTFEWYFYALLKDDSAIEEVKKITAERHGTVVTVKRVEKVQKKFLGRPVEVWKLYFTHIQDKPAIRDKIREHPAVIDIYEYDIPFAKRYLIDKGLVPMEGDEELKMLAFDIETLYHEGEEFAEGPILMISYADEEGARVITWKNVDLPYVDVVSTEREMIKRFLRVVKEKDPDVLITYNGDNFDFAYLKKRCEKLGINFALGRDGSEPKIQRMGDRFAVEVKGRIHFDLYPVIRRTINLPTYTLEAVYEAVFGQPKEKVYAEEITTAWETGENLERVARYSMEDAKVTYELGKEFLPMEAQLSRLIGQSLWDVSRSSTGNLVEWFLLRKAYERNELAPNKPDEKELARRRQSYEGGYVKEPERGLWENIVYLDFRSLYPSIIITHNVSPDTLNREGCKEYDVAPQVGHRFCKDFPGFIPSLLGDLLEERQKIKKKMKATIDPIERKLLDYRQRAIKILANSYYGYYGYARARWYCKECAESVTAWGREYITMTIKEIEEKYGFKVIYSDTDGFFATIPGADAETVKKKAMEFLKYINAKLPGALELEYEGFYKRGFFVTKKKYAVIDEEGKITTRGLEIVRRDWSEIAKETQARVLEALLKDGDVEKAVRIVKEVTEKLSKYEVPPEKLVIHEQITRDLKDYKATGPHVAVAKRLAARGVKIRPGTVISYIVLKGSGRIGDRAIPFDEFDPTKHKYDAEYYIENQVLPAVERILRAFGYRKEDLRYQKTRQVGLSAWLKPKGT

SEQ ID NO: 1865 - protein, 774 aa, synthetic construct
MILDTDCITEDGKPVMRIFKKENGEFKIEYDRTFEWYFYALLKDDSAIEEVKKITAERHGTVVTVKRVEKVQKKFLGRPVEVWKLYFTHWQDVPAIRDKIREHPAVIDIYEYDIPFAKRYLIDKGLVPMEGDEELKMLAFDIETLYHEGEEFAEGPILMISYADEEGARVITWKNVDLPYVDVVSTEREMIKRFLRVVKEKDPDVLITYNGDNFDFAYLKKRCEKLGINFALGRDGSEPKIQRMGDRFAVEVKGRIHFDLYPVIRRTINLPTYTLEAVYEAVFGQPKEKVYAEEITTAWETGENLERVARYSMEDAKVTYELGKEFLPMEAQLSRLIGQSLWDVSRSSTGNLVEWFLLRKAYERNELAPNKPDEKELARRRQSYEGGYVKEPERGLWENIVYLDFRSLYPSIIITHNVSPDTLNREGCKEYDVAPQVGHRFCKDFPGFIPSLLGDLLEERQKIKKKMKATIDPIERKLLDYRQRAIKILANSYYGYYGYARARWYCKECAESVTAWGREYITMTIKEIEEKYGFKVIYSDTDGFFATIPGADAETVKKKAMEFLKYINAKLPGALELEYEGFYKRGFFVTKKKYAVIDEEGKITTRGLEIVRRDWSEIAKETQARVLEALLKDGDVEKAVRIVKEVTEKLSKYEVPPEKLVIHEQITRDLKDYKATGPHVAVAKRLAARGVKIRPGTVISYIVLKGSGRIGDRAIPFDEFDPTKHKYDAEYYIENQVLPAVERILRAFGYRKEDLRYQKTRQVGLSAWLKPKGT

SEQ ID NO: 1866 - protein, 774 aa, synthetic construct
MILDTDCITEDGKPVMRIFKKENGEFKIEYDRTFEWYFYALLKDDSAIEEVKKITAERHGTVVTVKRVEKVQKKFLGRPVEVWKLYFTHWQDIPAIRDKIREHPAVIDIYEYDIPFAKRYLIDKGLVPMEGDEELKMLAFDIETLYHEGEEFAEGPILMISYADEEGARVITWKNVDLPYVDVVSTEREMIKRFLRVVKEKDPDVLITYNGDNFDFAYLKKRCEKLGINFALGRDGSEPKIQRMGDRFAVEVKGRIHFDLYPVIRRTINLPTYTLEAVYEAVFGQPKEKVYAEEITTAWETGENLERVARYSMEDAKVTYELGKEFLPMEAQLSRLIGQSLWDVSRSSTGNLVEWFLLRKAYERNELAPNKPDEKELARRRQSYEGGYVKEPERGLWENIVYLDFRSLYPSIIITHNVSPDTLNREGCKEYDVAPQVGHRFCKDFPGFIPSLLGDLLEERQKIKKKMKATIDPIERKLLDYRQRAIKILANSYYGYYGYARARWYCKECAESVTAWGREYITMTIKEIEEKYGFKVIYSDTDGFFATIPGADAETVKKKAMEFLKYINAKLPGALELEYEGFYKRGFFVTKKKYAVIDEEGKITTRGLEIVRRDWSEIAKETQARVLEALLKDGDVEKAVRIVKEVTEKLSKYEVPPEKLVIHEQITRDLKDYKATGPHVAVAKRLAARGVKIRPGTVISYIVLKGSGRIGDRAIPFDEFDPTKHKYDAEYYIENQVLPAVERILRAFGYRKEDLRYQKTRQVGLSAWLKPKGT

SEQ ID NO: 1867 - protein, 774 aa, synthetic construct
MILDTDCITEDGKPVMRIFKKENGEFKIEYDRTFEWYFYALLKDDSAIEEVKKITAERHGTVVTVKRVEKVQKKFLGRPVEVWKLYFTHWQDIPAIWDKIREHPAVIDIYEYDIPFAKRYLIDKGLVPMEGDEELKMLAFDIETLYHEGEEFAEGPILMISYADEEGARVITWKNVDLPYVDVVSTEREMIKRFLRVVKEKDPDVLITYNGDNFDFAYLKKRCEKLGINFALGRDGSEPKIQRMGDRFAVEVKGRIHFDLYPVIRRTINLPTYTLEAVYEAVFGQPKEKVYAEEITTAWETGENLERVARYSMEDAKVTYELGKEFLPMEAQLSRLIGQSLWDVSRSSTGNLVEWFLLRKAYERNELAPNKPDEKELARRRQSYEGGYVKEPERGLWENIVYLDFRSLYPSIIITHNVSPDTLNREGCKEYDVAPQVGHRFCKDFPGFIPSLLGDLLEERQKIKKKMKATIDPIERKLLDYRQRAIKILANSYYGYYGYARARWYCKECAESVTAWGREYITMTIKEIEEKYGFKVIYSDTDGFFATIPGADAETVKKKAMEFLKYINAKLPGALELEYEGFYKRGFFVTKKKYAVIDEEGKITTRGLEIVRRDWSEIAKETQARVLEALLKDGDVEKAVRIVKEVTEKLSKYEVPPEKLVIHEQITRDLKDYKATGPHVAVAKRLAARGVKIRPGTVISYIVLKGSGRIGDRAIPFDEFDPTKHKYDAEYYIENQVLPAVERILRAFGYRKEDLRYQKTRQVGLSAWLKPKGT

SEQ ID NO: 1868 - protein, 774 aa, synthetic construct
MILDTDCITEDGKPVMRIFKKENGEFKIEYDRTFEWYFYALLKDDSAIEEVKKITAERHGTVVTVKRVEKVQKKFLGRPVEVWKLYFTHYQDIPAIRDKIREHPAVIDIYEYDIPFAKRYLIDKGLVPMEGDEELKMLAFDIETLYHEGEEFAEGPILMISYADEEGARVITWKNVDLPYVDVVSTEREMIKRFLRVVKEKDPDVLITYNGDNFDFAYLKKRCEKLGINFALGRDGSEPKIQRMGDRFAVEVKGRIHFDLYPVIRRTINLPTYTLEAVYEAVFGQPKEKVYAEEITTAWETGENLERVARYSMEDAKVTYELGKEFLPMEAQLSRLIGQSLWDVSRSSTGNLVEWFLLRKAYERNELAPNKPDEKELARRRQSYEGGYVKEPERGLWENIVYLDFRSLYPSIIITHNVSPDTLNREGCKEYDVAPQVGHRFCKDFPGFIPSLLGDLLEERQKIKKKMKATIDPIERKLLDYRQRAIKILANSYYGYYGYARARWYCKECAESVTAWGREYITMTIKEIEEKYGFKVIYSDTDGFFATIPGADAETVKKKAMEFLKYINAKLPGALELEYEGFYKRGFFVTKKKYAVIDEEGKITTRGLEIVRRDWSEIAKETQARVLEALLKDGDVEKAVRIVKEVTEKLSKYEVPPEKLVIHEQITRDLKDYKATGPHVAVAKRLAARGVKIRPGTVISYIVLKGSGRIGDRAIPFDEFDPTKHKYDAEYYIENQVLPAVERILRAFGYRKEDLRYQKTRQVGLSAWLKPKGT

SEQ ID NO: 1869 - protein, 774 aa, synthetic construct
MILDTDCITEDGKPVMRIFKKENGEFKIEYDRTFEWYFYALLKDDSAIEEVKKITAERHGTVVTVKRVEKVQKKFLGRPVEVWKLYFTHPQDIPAIRDKIREHPAVIDIYEYDIPFAKRYLIDKGLVPMEGDEELKMLAFDIETLYHEGEEFAEGPILMISYADEEGARVITWKNVDLPYVDVVSTEREMIKRFLRVVKEKDPDVLITYNGDNFDFAYLKKRCEKLGINFALGRDGSEPKIQRMGDRFAVEVKGRIHFDLYPVIRRTINLPTYTLEAVYEAVFGQPKEKVYAEEITTAWETGENLERVARYSMEDAKVTYELGKEFLPMEAQLSRLIGQSLWDVSRSSTGNLVEWFLLRKAYERNELAPNKPDEKELARRRQSYEGGYVKEPERGLWENIVYLDFRSLYPSIIITHNVSPDTLNREGCKEYDVAPQVGHRFCKDFPGFIPSLLGDLLEERQKIKKKMKATIDPIERKLLDYRQRAIKILANSYYGYYGYARARWYCKECAESVTAWGREYITMTIKEIEEKYGFKVIYSDTDGFFATIPGADAETVKKKAMEFLKYINAKLPGALELEYEGFYKRGFFVTKKKYAVIDEEGKITTRGLEIVRRDWSEIAKETQARVLEALLKDGDVEKAVRIVKEVTEKLSKYEVPPEKLVIHEQITRDLKDYKATGPHVAVAKRLAARGVKIRPGTVISYIVLKGSGRIGDRAIPFDEFDPTKHKYDAEYYIENQVLPAVERILRAFGYRKEDLRYQKTRQVGLSAWLKPKGT

SEQ ID NO: 1870 - protein, 774 aa, synthetic construct
MILDTDCITEDGKPVMRIFKKENGEFKIEYDRTFEWYFYALLKDDSAIEEVKKITAERHGTVVTVKRVEKVQKKFLGRPVEVWKLYFTHPQDIPAIADKIREHPAVIDIYEYDIPFAKRYLIDKGLVPMEGDEELKMLAFDIETLYHEGEEFAEGPILMISYADEEGARVITWKNVDLPYVDVVSTEREMIKRFLRVVKEKDPDVLITYNGDNFDFAYLKKRCEKLGINFALGRDGSEPKIQRMGDRFAVEVKGRIHFDLYPVIRRTINLPTYTLEAVYEAVFGQPKEKVYAEEITTAWETGENLERVARYSMEDAKVTYELGKEFLPMEAQLSRLIGQSLWDVSRSSTGNLVEWFLLRKAYERNELAPNKPDEKELARRRQSYEGGYVKEPERGLWENIVYLDFRSLYPSIIITHNVSPDTLNREGCKEYDVAPQVGHRFCKDFPGFIPSLLGDLLEERQKIKKKMKATIDPIERKLLDYRQRAIKILANSYYGYYGYARARWYCKECAESVTAWGREYITMTIKEIEEKYGFKVIYSDTDGFFATIPGADAETVKKKAMEFLKYINAKLPGALELEYEGFYKRGFFVTKKKYAVIDEEGKITTRGLEIVRRDWSEIAKETQARVLEALLKDGDVEKAVRIVKEVTEKLSKYEVPPEKLVIHEQITRDLKDYKATGPHVAVAKRLAARGVKIRPGTVISYIVLKGSGRIGDRAIPFDEFDPTKHKYDAEYYIENQVLPAVERILRAFGYRKEDLRYQKTRQVGLSAWLKPKGT

SEQ ID NO: 1871 - protein, 774 aa, synthetic construct
MILDTDCITEDGKPVMRIFKKENGEFKIEYDRTFEPYFYALLKDDSAIEEVKKITAERHGTVVTVKRVEKVQKKFLGRPVEVWKLYFTHFQDVPAIRDKIREHPAVIDIYEYDIPFAKRYLIDKGLVPMEGDEELKMLAFDIETLYHEGEEFAEGPILMISYADEEGARVITWKNVDLPYVDVVSTEREMIKRFLRVVKEKDPDVLITYNGDNFDFAYLKKRCEKLGINFALGRDGSEPKIQRMGDRFAVEVKGRIHFDLYPVIRRTINLPTYTLEAVYEAVFGQPKEKVYAEEITTAWETGENLERVARYSMEDAKVTYELGKEFLPMEAQLSRLIGQSLWDVSRSSTGNLVEWFLLRKAYERNELAPNKPDEKELARRRQSYEGGYVKEPERGLWENIVYLDFRSLYPSIIITHNVSPDTLNREGCKEYDVAPQVGHRFCKDFPGFIPSLLGDLLEERQKIKKKMKATIDPIERKLLDYRQRAIKILANSYYGYYGYARARWYCKECAESVTAWGREYITMTIKEIEEKYGFKVIYSDTDGFFATIPGADAETVKKKAMEFLKYINAKLPGALELEYEGFYKRGFFVTKKKYAVIDEEGKITTRGLEIVRRDWSEIAKETQARVLEALLKDGDVEKAVRIVKEVTEKLSKYEVPPEKLVIHEQITRDLKDYKATGPHVAVAKRLAARGVKIRPGTVISYIVLKGSGRIGDRAIPFDEFDPTKHKYDAEYYIENQVLPAVERILRAFGYRKEDLRYQKTRQVGLSAWLKPKGT

SEQ ID NO: 1872 - protein, 774 aa, synthetic construct
MILDTDCITEDGKPVMRIFKKENGEFKIEYDRTFEPYFYALLKDDSAIEEVKKITAERHGTVVTVKRVEKVQKKFLGRPVEVWKLYFTHFQDIPAIRDKIREHPAVIDIYEYDIPFAKRYLIDKGLVPMEGDEELKMLAFDIETLYHEGEEFAEGPILMISYADEEGARVITWKNVDLPYVDVVSTEREMIKRFLRVVKEKDPDVLITYNGDNFDFAYLKKRCEKLGINFALGRDGSEPKIQRMGDRFAVEVKGRIHFDLYPVIRRTINLPTYTLEAVYEAVFGQPKEKVYAEEITTAWETGENLERVARYSMEDAKVTYELGKEFLPMEAQLSRLIGQSLWDVSRSSTGNLVEWFLLRKAYERNELAPNKPDEKELARRRQSYEGGYVKEPERGLWENIVYLDFRSLYPSIIITHNVSPDTLNREGCKEYDVAPQVGHRFCKDFPGFIPSLLGDLLEERQKIKKKMKATIDPIERKLLDYRQRAIKILANSYYGYYGYARARWYCKECAESVTAWGREYITMTIKEIEEKYGFKVIYSDTDGFFATIPGADAETVKKKAMEFLKYINAKLPGALELEYEGFYKRGFFVTKKKYAVIDEEGKITTRGLEIVRRDWSEIAKETQARVLEALLKDGDVEKAVRIVKEVTEKLSKYEVPPEKLVIHEQITRDLKDYKATGPHVAVAKRLAARGVKIRPGTVISYIVLKGSGRIGDRAIPFDEFDPTKHKYDAEYYIENQVLPAVERILRAFGYRKEDLRYQKTRQVGLSAWLKPKGT

SEQ ID NO: 1873 - protein, 774 aa, synthetic construct
MILDTDCITEDGKPVMRIFKKENGEFKIEYDRTFEPYFYALLKDDSAIEEVKKITAERHGTVVTVKRVEKVQKKFLGRPVEVWKLYFTHFQDKPAIADKIREHPAVIDIYEYDIPFAKRYLIDKGLVPMEGDEELKMLAFDIETLYHEGEEFAEGPILMISYADEEGARVITWKNVDLPYVDVVSTEREMIKRFLRVVKEKDPDVLITYNGDNFDFAYLKKRCEKLGINFALGRDGSEPKIQRMGDRFAVEVKGRIHFDLYPVIRRTINLPTYTLEAVYEAVFGQPKEKVYAEEITTAWETGENLERVARYSMEDAKVTYELGKEFLPMEAQLSRLIGQSLWDVSRSSTGNLVEWFLLRKAYERNELAPNKPDEKELARRRQSYEGGYVKEPERGLWENIVYLDFRSLYPSIIITHNVSPDTLNREGCKEYDVAPQVGHRFCKDFPGFIPSLLGDLLEERQKIKKKMKATIDPIERKLLDYRQRAIKILANSYYGYYGYARARWYCKECAESVTAWGREYITMTIKEIEEKYGFKVIYSDTDGFFATIPGADAETVKKKAMEFLKYINAKLPGALELEYEGFYKRGFFVTKKKYAVIDEEGKITTRGLEIVRRDWSEIAKETQARVLEALLKDGDVEKAVRIVKEVTEKLSKYEVPPEKLVIHEQITRDLKDYKATGPHVAVAKRLAARGVKIRPGTVISYIVLKGSGRIGDRAIPFDEFDPTKHKYDAEYYIENQVLPAVERILRAFGYRKEDLRYQKTRQVGLSAWLKPKGT

SEQ ID NO: 1874 - protein, 774 aa, synthetic construct
MILDTDCITEDGKPVMRIFKKENGEFKIEYDRTFEPYFYALLKDDSAIEEVKKITAERHGTVVTVKRVEKVQKKFLGRPVEVWKLYFTHFQDQPAIRDKIREHPAVIDIYEYDIPFAKRYLIDKGLVPMEGDEELKMLAFDIETLYHEGEEFAEGPILMISYADEEGARVITWKNVDLPYVDVVSTEREMIKRFLRVVKEKDPDVLITYNGDNFDFAYLKKRCEKLGINFALGRDGSEPKIQRMGDRFAVEVKGRIHFDLYPVIRRTINLPTYTLEAVYEAVFGQPKEKVYAEEITTAWETGENLERVARYSMEDAKVTYELGKEFLPMEAQLSRLIGQSLWDVSRSSTGNLVEWFLLRKAYERNELAPNKPDEKELARRRQSYEGGYVKEPERGLWENIVYLDFRSLYPSIIITHNVSPDTLNREGCKEYDVAPQVGHRFCKDFPGFIPSLLGDLLEERQKIKKKMKATIDPIERKLLDYRQRAIKILANSYYGYYGYARARWYCKECAESVTAWGREYITMTIKEIEEKYGFKVIYSDTDGFFATIPGADAETVKKKAMEFLKYINAKLPGALELEYEGFYKRGFFVTKKKYAVIDEEGKITTRGLEIVRRDWSEIAKETQARVLEALLKDGDVEKAVRIVKEVTEKLSKYEVPPEKLVIHEQITRDLKDYKATGPHVAVAKRLAARGVKIRPGTVISYIVLKGSGRIGDRAIPFDEFDPTKHKYDAEYYIENQVLPAVERILRAFGYRKEDLRYQKTRQVGLSAWLKPKGT

SEQ ID NO: 1875 - protein, 774 aa, synthetic construct
MILDTDCITEDGKPVMRIFKKENGEFKIEYDRTFEPYFYALLKDDSAIEEVKKITAERHGTVVTVKRVEKVQKKFLGRPVEVWKLYFTHIQDIPAIRDKIREHPAVIDIYEYDIPFAKRYLIDKGLVPMEGDEELKMLAFDIETLYHEGEEFAEGPILMISYADEEGARVITWKNVDLPYVDVVSTEREMIKRFLRVVKEKDPDVLITYNGDNFDFAYLKKRCEKLGINFALGRDGSEPKIQRMGDRFAVEVKGRIHFDLYPVIRRTINLPTYTLEAVYEAVFGQPKEKVYAEEITTAWETGENLERVARYSMEDAKVTYELGKEFLPMEAQLSRLIGQSLWDVSRSSTGNLVEWFLLRKAYERNELAPNKPDEKELARRRQSYEGGYVKEPERGLWENIVYLDFRSLYPSIIITHNVSPDTLNREGCKEYDVAPQVGHRFCKDFPGFIPSLLGDLLEERQKIKKKMKATIDPIERKLLDYRQRAIKILANSYYGYYGYARARWYCKECAESVTAWGREYITMTIKEIEEKYGFKVIYSDTDGFFATIPGADAETVKKKAMEFLKYINAKLPGALELEYEGFYKRGFFVTKKKYAVIDEEGKITTRGLEIVRRDWSEIAKETQARVLEALLKDGDVEKAVRIVKEVTEKLSKYEVPPEKLVIHEQITRDLKDYKATGPHVAVAKRLAARGVKIRPGTVISYIVLKGSGRIGDRAIPFDEFDPTKHKYDAEYYIENQVLPAVERILRAFGYRKEDLRYQKTRQVGLSAWLKPKGT

SEQ ID NO: 1876 - protein, 774 aa, synthetic construct
MILDTDCITEDGKPVMRIFKKENGEFKIEYDRTFEPYFYALLKDDSAIEEVKKITAERHGTVVTVKRVEKVQKKFLGRPVEVWKLYFTHIQDRPAIRDKIREHPAVIDIYEYDIPFAKRYLIDKGLVPMEGDEELKMLAFDIETLYHEGEEFAEGPILMISYADEEGARVITWKNVDLPYVDVVSTEREMIKRFLRVVKEKDPDVLITYNGDNFDFAYLKKRCEKLGINFALGRDGSEPKIQRMGDRFAVEVKGRIHFDLYPVIRRTINLPTYTLEAVYEAVFGQPKEKVYAEEITTAWETGENLERVARYSMEDAKVTYELGKEFLPMEAQLSRLIGQSLWDVSRSSTGNLVEWFLLRKAYERNELAPNKPDEKELARRRQSYEGGYVKEPERGLWENIVYLDFRSLYPSIIITHNVSPDTLNREGCKEYDVAPQVGHRFCKDFPGFIPSLLGDLLEERQKIKKKMKATIDPIERKLLDYRQRAIKILANSYYGYYGYARARWYCKECAESVTAWGREYITMTIKEIEEKYGFKVIYSDTDGFFATIPGADAETVKKKAMEFLKYINAKLPGALELEYEGFYKRGFFVTKKKYAVIDEEGKITTRGLEIVRRDWSEIAKETQARVLEALLKDGDVEKAVRIVKEVTEKLSKYEVPPEKLVIHEQITRDLKDYKATGPHVAVAKRLAARGVKIRPGTVISYIVLKGSGRIGDRAIPFDEFDPTKHKYDAEYYIENQVLPAVERILRAFGYRKEDLRYQKTRQVGLSAWLKPKGT

SEQ ID NO: 1877 - protein, 774 aa, synthetic construct
MILDTDCITEDGKPVMRIFKKENGEFKIEYDRTFEPYFYALLKDDSAIEEVKKITAERHGTVVTVKRVEKVQKKFLGRPVEVWKLYFTHWQDVPAIRDKIREHPAVIDIYEYDIPFAKRYLIDKGLVPMEGDEELKMLAFDIETLYHEGEEFAEGPILMISYADEEGARVITWKNVDLPYVDVVSTEREMIKRFLRVVKEKDPDVLITYNGDNFDFAYLKKRCEKLGINFALGRDGSEPKIQRMGDRFAVEVKGRIHFDLYPVIRRTINLPTYTLEAVYEAVFGQPKEKVYAEEITTAWETGENLERVARYSMEDAKVTYELGKEFLPMEAQLSRLIGQSLWDVSRSSTGNLVEWFLLRKAYERNELAPNKPDEKELARRRQSYEGGYVKEPERGLWENIVYLDFRSLYPSIIITHNVSPDTLNREGCKEYDVAPQVGHRFCKDFPGFIPSLLGDLLEERQKIKKKMKATIDPIERKLLDYRQRAIKILANSYYGYYGYARARWYCKECAESVTAWGREYITMTIKEIEEKYGFKVIYSDTDGFFATIPGADAETVKKKAMEFLKYINAKLPGALELEYEGFYKRGFFVTKKKYAVIDEEGKITTRGLEIVRRDWSEIAKETQARVLEALLKDGDVEKAVRIVKEVTEKLSKYEVPPEKLVIHEQITRDLKDYKATGPHVAVAKRLAARGVKIRPGTVISYIVLKGSGRIGDRAIPFDEFDPTKHKYDAEYYIENQVLPAVERILRAFGYRKEDLRYQKTRQVGLSAWLKPKGT

SEQ ID NO: 1878 - protein, 774 aa, synthetic construct
MILDTDCITEDGKPVMRIFKKENGEFKIEYDRTFEPYFYALLKDDSAIEEVKKITAERHGTVVTVKRVEKVQKKFLGRPVEVWKLYFTHWQDVPAIHDKIREHPAVIDIYEYDIPFAKRYLIDKGLVPMEGDEELKMLAFDIETLYHEGEEFAEGPILMISYADEEGARVITWKNVDLPYVDVVSTEREMIKRFLRVVKEKDPDVLITYNGDNFDFAYLKKRCEKLGINFALGRDGSEPKIQRMGDRFAVEVKGRIHFDLYPVIRRTINLPTYTLEAVYEAVFGQPKEKVYAEEITTAWETGENLERVARYSMEDAKVTYELGKEFLPMEAQLSRLIGQSLWDVSRSSTGNLVEWFLLRKAYERNELAPNKPDEKELARRRQSYEGGYVKEPERGLWENIVYLDFRSLYPSIIITHNVSPDTLNREGCKEYDVAPQVGHRFCKDFPGFIPSLLGDLLEERQKIKKKMKATIDPIERKLLDYRQRAIKILANSYYGYYGYARARWYCKECAESVTAWGREYITMTIKEIEEKYGFKVIYSDTDGFFATIPGADAETVKKKAMEFLKYINAKLPGALELEYEGFYKRGFFVTKKKYAVIDEEGKITTRGLEIVRRDWSEIAKETQARVLEALLKDGDVEKAVRIVKEVTEKLSKYEVPPEKLVIHEQITRDLKDYKATGPHVAVAKRLAARGVKIRPGTVISYIVLKGSGRIGDRAIPFDEFDPTKHKYDAEYYIENQVLPAVERILRAFGYRKEDLRYQKTRQVGLSAWLKPKGT

SEQ ID NO: 1879 - protein, 774 aa, synthetic construct
MILDTDCITEDGKPVMRIFKKENGEFKIEYDRTFEPYFYALLKDDSAIEEVKKITAERHGTVVTVKRVEKVQKKFLGRPVEVWKLYFTHWQDIPAIRDKIREHPAVIDIYEYDIPFAKRYLIDKGLVPMEGDEELKMLAFDIETLYHEGEEFAEGPILMISYADEEGARVITWKNVDLPYVDVVSTEREMIKRFLRVVKEKDPDVLITYNGDNFDFAYLKKRCEKLGINFALGRDGSEPKIQRMGDRFAVEVKGRIHFDLYPVIRRTINLPTYTLEAVYEAVFGQPKEKVYAEEITTAWETGENLERVARYSMEDAKVTYELGKEFLPMEAQLSRLIGQSLWDVSRSSTGNLVEWFLLRKAYERNELAPNKPDEKELARRRQSYEGGYVKEPERGLWENIVYLDFRSLYPSIIITHNVSPDTLNREGCKEYDVAPQVGHRFCKDFPGFIPSLLGDLLEERQKIKKKMKATIDPIERKLLDYRQRAIKILANSYYGYYGYARARWYCKECAESVTAWGREYITMTIKEIEEKYGFKVIYSDTDGFFATIPGADAETVKKKAMEFLKYINAKLPGALELEYEGFYKRGFFVTKKKYAVIDEEGKITTRGLEIVRRDWSEIAKETQARVLEALLKDGDVEKAVRIVKEVTEKLSKYEVPPEKLVIHEQITRDLKDYKATGPHVAVAKRLAARGVKIRPGTVISYIVLKGSGRIGDRAIPFDEFDPTKHKYDAEYYIENQVLPAVERILRAFGYRKEDLRYQKTRQVGLSAWLKPKGT

SEQ ID NO: 1880 - protein, 774 aa, synthetic construct
MILDTDCITEDGKPVMRIFKKENGEFKIEYDRTFEPYFYALLKDDSAIEEVKKITAERHGTVVTVKRVEKVQKKFLGRPVEVWKLYFTHWQDIPAIADKIREHPAVIDIYEYDIPFAKRYLIDKGLVPMEGDEELKMLAFDIETLYHEGEEFAEGPILMISYADEEGARVITWKNVDLPYVDVVSTEREMIKRFLRVVKEKDPDVLITYNGDNFDFAYLKKRCEKLGINFALGRDGSEPKIQRMGDRFAVEVKGRIHFDLYPVIRRTINLPTYTLEAVYEAVFGQPKEKVYAEEITTAWETGENLERVARYSMEDAKVTYELGKEFLPMEAQLSRLIGQSLWDVSRSSTGNLVEWFLLRKAYERNELAPNKPDEKELARRRQSYEGGYVKEPERGLWENIVYLDFRSLYPSIIITHNVSPDTLNREGCKEYDVAPQVGHRFCKDFPGFIPSLLGDLLEERQKIKKKMKATIDPIERKLLDYRQRAIKILANSYYGYYGYARARWYCKECAESVTAWGREYITMTIKEIEEKYGFKVIYSDTDGFFATIPGADAETVKKKAMEFLKYINAKLPGALELEYEGFYKRGFFVTKKKYAVIDEEGKITTRGLEIVRRDWSEIAKETQARVLEALLKDGDVEKAVRIVKEVTEKLSKYEVPPEKLVIHEQITRDLKDYKATGPHVAVAKRLAARGVKIRPGTVISYIVLKGSGRIGDRAIPFDEFDPTKHKYDAEYYIENQVLPAVERILRAFGYRKEDLRYQKTRQVGLSAWLKPKGT

SEQ ID NO: 1881 - protein, 774 aa, synthetic construct
MILDTDCITEDGKPVMRIFKKENGEFKIEYDRTFEPYFYALLKDDSAIEEVKKITAERHGTVVTVKRVEKVQKKFLGRPVEVWKLYFTHWQDIPAIFDKIREHPAVIDIYEYDIPFAKRYLIDKGLVPMEGDEELKMLAFDIETLYHEGEEFAEGPILMISYADEEGARVITWKNVDLPYVDVVSTEREMIKRFLRVVKEKDPDVLITYNGDNFDFAYLKKRCEKLGINFALGRDGSEPKIQRMGDRFAVEVKGRIHFDLYPVIRRTINLPTYTLEAVYEAVFGQPKEKVYAEEITTAWETGENLERVARYSMEDAKVTYELGKEFLPMEAQLSRLIGQSLWDVSRSSTGNLVEWFLLRKAYERNELAPNKPDEKELARRRQSYEGGYVKEPERGLWENIVYLDFRSLYPSIIITHNVSPDTLNREGCKEYDVAPQVGHRFCKDFPGFIPSLLGDLLEERQKIKKKMKATIDPIERKLLDYRQRAIKILANSYYGYYGYARARWYCKECAESVTAWGREYITMTIKEIEEKYGFKVIYSDTDGFFATIPGADAETVKKKAMEFLKYINAKLPGALELEYEGFYKRGFFVTKKKYAVIDEEGKITTRGLEIVRRDWSEIAKETQARVLEALLKDGDVEKAVRIVKEVTEKLSKYEVPPEKLVIHEQITRDLKDYKATGPHVAVAKRLAARGVKIRPGTVISYIVLKGSGRIGDRAIPFDEFDPTKHKYDAEYYIENQVLPAVERILRAFGYRKEDLRYQKTRQVGLSAWLKPKGT

SEQ ID NO: 1882 - protein, 774 aa, synthetic construct
MILDTDCITEDGKPVMRIFKKENGEFKIEYDRTFEPYFYALLKDDSAIEEVKKITAERHGTVVTVKRVEKVQKKFLGRPVEVWKLYFTHWQDIPAIHDKIREHPAVIDIYEYDIPFAKRYLIDKGLVPMEGDEELKMLAFDIETLYHEGEEFAEGPILMISYADEEGARVITWKNVDLPYVDVVSTEREMIKRFLRVVKEKDPDVLITYNGDNFDFAYLKKRCEKLGINFALGRDGSEPKIQRMGDRFAVEVKGRIHFDLYPVIRRTINLPTYTLEAVYEAVFGQPKEKVYAEEITTAWETGENLERVARYSMEDAKVTYELGKEFLPMEAQLSRLIGQSLWDVSRSSTGNLVEWFLLRKAYERNELAPNKPDEKELARRRQSYEGGYVKEPERGLWENIVYLDFRSLYPSIIITHNVSPDTLNREGCKEYDVAPQVGHRFCKDFPGFIPSLLGDLLEERQKIKKKMKATIDPIERKLLDYRQRAIKILANSYYGYYGYARARWYCKECAESVTAWGREYITMTIKEIEEKYGFKVIYSDTDGFFATIPGADAETVKKKAMEFLKYINAKLPGALELEYEGFYKRGFFVTKKKYAVIDEEGKITTRGLEIVRRDWSEIAKETQARVLEALLKDGDVEKAVRIVKEVTEKLSKYEVPPEKLVIHEQITRDLKDYKATGPHVAVAKRLAARGVKIRPGTVISYIVLKGSGRIGDRAIPFDEFDPTKHKYDAEYYIENQVLPAVERILRAFGYRKEDLRYQKTRQVGLSAWLKPKGT

SEQ ID NO: 1883 - protein, 774 aa, synthetic construct
MILDTDCITEDGKPVMRIFKKENGEFKIEYDRTFEPYFYALLKDDSAIEEVKKITAERHGTVVTVKRVEKVQKKFLGRPVEVWKLYFTHWQDQPAIRDKIREHPAVIDIYEYDIPFAKRYLIDKGLVPMEGDEELKMLAFDIETLYHEGEEFAEGPILMISYADEEGARVITWKNVDLPYVDVVSTEREMIKRFLRVVKEKDPDVLITYNGDNFDFAYLKKRCEKLGINFALGRDGSEPKIQRMGDRFAVEVKGRIHFDLYPVIRRTINLPTYTLEAVYEAVFGQPKEKVYAEEITTAWETGENLERVARYSMEDAKVTYELGKEFLPMEAQLSRLIGQSLWDVSRSSTGNLVEWFLLRKAYERNELAPNKPDEKELARRRQSYEGGYVKEPERGLWENIVYLDFRSLYPSIIITHNVSPDTLNREGCKEYDVAPQVGHRFCKDFPGFIPSLLGDLLEERQKIKKKMKATIDPIERKLLDYRQRAIKILANSYYGYYGYARARWYCKECAESVTAWGREYITMTIKEIEEKYGFKVIYSDTDGFFATIPGADAETVKKKAMEFLKYINAKLPGALELEYEGFYKRGFFVTKKKYAVIDEEGKITTRGLEIVRRDWSEIAKETQARVLEALLKDGDVEKAVRIVKEVTEKLSKYEVPPEKLVIHEQITRDLKDYKATGPHVAVAKRLAARGVKIRPGTVISYIVLKGSGRIGDRAIPFDEFDPTKHKYDAEYYIENQVLPAVERILRAFGYRKEDLRYQKTRQVGLSAWLKPKGT

SEQ ID NO: 1884 - protein, 774 aa, synthetic construct
MILDTDCITEDGKPVMRIFKKENGEFKIEYDRTFEPYFYALLKDDSAIEEVKKITAERHGTVVTVKRVEKVQKKFLGRPVEVWKLYFTHYQDVPAIRDKIREHPAVIDIYEYDIPFAKRYLIDKGLVPMEGDEELKMLAFDIETLYHEGEEFAEGPILMISYADEEGARVITWKNVDLPYVDVVSTEREMIKRFLRVVKEKDPDVLITYNGDNFDFAYLKKRCEKLGINFALGRDGSEPKIQRMGDRFAVEVKGRIHFDLYPVIRRTINLPTYTLEAVYEAVFGQPKEKVYAEEITTAWETGENLERVARYSMEDAKVTYELGKEFLPMEAQLSRLIGQSLWDVSRSSTGNLVEWFLLRKAYERNELAPNKPDEKELARRRQSYEGGYVKEPERGLWENIVYLDFRSLYPSIIITHNVSPDTLNREGCKEYDVAPQVGHRFCKDFPGFIPSLLGDLLEERQKIKKKMKATIDPIERKLLDYRQRAIKILANSYYGYYGYARARWYCKECAESVTAWGREYITMTIKEIEEKYGFKVIYSDTDGFFATIPGADAETVKKKAMEFLKYINAKLPGALELEYEGFYKRGFFVTKKKYAVIDEEGKITTRGLEIVRRDWSEIAKETQARVLEALLKDGDVEKAVRIVKEVTEKLSKYEVPPEKLVIHEQITRDLKDYKATGPHVAVAKRLAARGVKIRPGTVISYIVLKGSGRIGDRAIPFDEFDPTKHKYDAEYYIENQVLPAVERILRAFGYRKEDLRYQKTRQVGLSAWLKPKGT

SEQ ID NO: 1885 - protein, 774 aa, synthetic construct
MILDTDCITEDGKPVMRIFKKENGEFKIEYDRTFEPYFYALLKDDSAIEEVKKITAERHGTVVTVKRVEKVQKKFLGRPVEVWKLYFTHYQDIPAIRDKIREHPAVIDIYEYDIPFAKRYLIDKGLVPMEGDEELKMLAFDIETLYHEGEEFAEGPILMISYADEEGARVITWKNVDLPYVDVVSTEREMIKRFLRVVKEKDPDVLITYNGDNFDFAYLKKRCEKLGINFALGRDGSEPKIQRMGDRFAVEVKGRIHFDLYPVIRRTINLPTYTLEAVYEAVFGQPKEKVYAEEITTAWETGENLERVARYSMEDAKVTYELGKEFLPMEAQLSRLIGQSLWDVSRSSTGNLVEWFLLRKAYERNELAPNKPDEKELARRRQSYEGGYVKEPERGLWENIVYLDFRSLYPSIIITHNVSPDTLNREGCKEYDVAPQVGHRFCKDFPGFIPSLLGDLLEERQKIKKKMKATIDPIERKLLDYRQRAIKILANSYYGYYGYARARWYCKECAESVTAWGREYITMTIKEIEEKYGFKVIYSDTDGFFATIPGADAETVKKKAMEFLKYINAKLPGALELEYEGFYKRGFFVTKKKYAVIDEEGKITTRGLEIVRRDWSEIAKETQARVLEALLKDGDVEKAVRIVKEVTEKLSKYEVPPEKLVIHEQITRDLKDYKATGPHVAVAKRLAARGVKIRPGTVISYIVLKGSGRIGDRAIPFDEFDPTKHKYDAEYYIENQVLPAVERILRAFGYRKEDLRYQKTRQVGLSAWLKPKGT

SEQ ID NO: 1886 - protein, 774 aa, synthetic construct
MILDTDCITEDGKPVMRIFKKENGEFKIEYDRTFEPYFYALLKDDSAIEEVKKITAERHGTVVTVKRVEKVQKKFLGRPVEVWKLYFTHYQDIPAIFDKIREHPAVIDIYEYDIPFAKRYLIDKGLVPMEGDEELKMLAFDIETLYHEGEEFAEGPILMISYADEEGARVITWKNVDLPYVDVVSTEREMIKRFLRVVKEKDPDVLITYNGDNFDFAYLKKRCEKLGINFALGRDGSEPKIQRMGDRFAVEVKGRIHFDLYPVIRRTINLPTYTLEAVYEAVFGQPKEKVYAEEITTAWETGENLERVARYSMEDAKVTYELGKEFLPMEAQLSRLIGQSLWDVSRSSTGNLVEWFLLRKAYERNELAPNKPDEKELARRRQSYEGGYVKEPERGLWENIVYLDFRSLYPSIIITHNVSPDTLNREGCKEYDVAPQVGHRFCKDFPGFIPSLLGDLLEERQKIKKKMKATIDPIERKLLDYRQRAIKILANSYYGYYGYARARWYCKECAESVTAWGREYITMTIKEIEEKYGFKVIYSDTDGFFATIPGADAETVKKKAMEFLKYINAKLPGALELEYEGFYKRGFFVTKKKYAVIDEEGKITTRGLEIVRRDWSEIAKETQARVLEALLKDGDVEKAVRIVKEVTEKLSKYEVPPEKLVIHEQITRDLKDYKATGPHVAVAKRLAARGVKIRPGTVISYIVLKGSGRIGDRAIPFDEFDPTKHKYDAEYYIENQVLPAVERILRAFGYRKEDLRYQKTRQVGLSAWLKPKGT

SEQ ID NO: 1887 - protein, 774 aa, synthetic construct
MILDTDCITEDGKPVMRIFKKENGEFKIEYDRTFEPYFYALLKDDSAIEEVKKITAERHGTVVTVKRVEKVQKKFLGRPVEVWKLYFTHYQDRPAIADKIREHPAVIDIYEYDIPFAKRYLIDKGLVPMEGDEELKMLAFDIETLYHEGEEFAEGPILMISYADEEGARVITWKNVDLPYVDVVSTEREMIKRFLRVVKEKDPDVLITYNGDNFDFAYLKKRCEKLGINFALGRDGSEPKIQRMGDRFAVEVKGRIHFDLYPVIRRTINLPTYTLEAVYEAVFGQPKEKVYAEEITTAWETGENLERVARYSMEDAKVTYELGKEFLPMEAQLSRLIGQSLWDVSRSSTGNLVEWFLLRKAYERNELAPNKPDEKELARRRQSYEGGYVKEPERGLWENIVYLDFRSLYPSIIITHNVSPDTLNREGCKEYDVAPQVGHRFCKDFPGFIPSLLGDLLEERQKIKKKMKATIDPIERKLLDYRQRAIKILANSYYGYYGYARARWYCKECAESVTAWGREYITMTIKEIEEKYGFKVIYSDTDGFFATIPGADAETVKKKAMEFLKYINAKLPGALELEYEGFYKRGFFVTKKKYAVIDEEGKITTRGLEIVRRDWSEIAKETQARVLEALLKDGDVEKAVRIVKEVTEKLSKYEVPPEKLVIHEQITRDLKDYKATGPHVAVAKRLAARGVKIRPGTVISYIVLKGSGRIGDRAIPFDEFDPTKHKYDAEYYIENQVLPAVERILRAFGYRKEDLRYQKTRQVGLSAWLKPKGT

SEQ ID NO: 1888 - protein, 774 aa, synthetic construct
MILDTDCITEDGKPVMRIFKKENGEFKIEYDRTFEPYFYALLKDDSAIEEVKKITAERHGTVVTVKRVEKVQKKFLGRPVEVWKLYFTHPQDIPAIRDKIREHPAVIDIYEYDIPFAKRYLIDKGLVPMEGDEELKMLAFDIETLYHEGEEFAEGPILMISYADEEGARVITWKNVDLPYVDVVSTEREMIKRFLRVVKEKDPDVLITYNGDNFDFAYLKKRCEKLGINFALGRDGSEPKIQRMGDRFAVEVKGRIHFDLYPVIRRTINLPTYTLEAVYEAVFGQPKEKVYAEEITTAWETGENLERVARYSMEDAKVTYELGKEFLPMEAQLSRLIGQSLWDVSRSSTGNLVEWFLLRKAYERNELAPNKPDEKELARRRQSYEGGYVKEPERGLWENIVYLDFRSLYPSIIITHNVSPDTLNREGCKEYDVAPQVGHRFCKDFPGFIPSLLGDLLEERQKIKKKMKATIDPIERKLLDYRQRAIKILANSYYGYYGYARARWYCKECAESVTAWGREYITMTIKEIEEKYGFKVIYSDTDGFFATIPGADAETVKKKAMEFLKYINAKLPGALELEYEGFYKRGFFVTKKKYAVIDEEGKITTRGLEIVRRDWSEIAKETQARVLEALLKDGDVEKAVRIVKEVTEKLSKYEVPPEKLVIHEQITRDLKDYKATGPHVAVAKRLAARGVKIRPGTVISYIVLKGSGRIGDRAIPFDEFDPTKHKYDAEYYIENQVLPAVERILRAFGYRKEDLRYQKTRQVGLSAWLKPKGT

SEQ ID NO: 1889 - protein, 774 aa, synthetic construct
MILDTDCITEDGKPVMRIFKKENGEFKIEYDRTFEPYFYALLKDDSAIEEVKKITAERHGTVVTVKRVEKVQKKFLGRPVEVWKLYFTHPQDIPAIFDKIREHPAVIDIYEYDIPFAKRYLIDKGLVPMEGDEELKMLAFDIETLYHEGEEFAEGPILMISYADEEGARVITWKNVDLPYVDVVSTEREMIKRFLRVVKEKDPDVLITYNGDNFDFAYLKKRCEKLGINFALGRDGSEPKIQRMGDRFAVEVKGRIHFDLYPVIRRTINLPTYTLEAVYEAVFGQPKEKVYAEEITTAWETGENLERVARYSMEDAKVTYELGKEFLPMEAQLSRLIGQSLWDVSRSSTGNLVEWFLLRKAYERNELAPNKPDEKELARRRQSYEGGYVKEPERGLWENIVYLDFRSLYPSIIITHNVSPDTLNREGCKEYDVAPQVGHRFCKDFPGFIPSLLGDLLEERQKIKKKMKATIDPIERKLLDYRQRAIKILANSYYGYYGYARARWYCKECAESVTAWGREYITMTIKEIEEKYGFKVIYSDTDGFFATIPGADAETVKKKAMEFLKYINAKLPGALELEYEGFYKRGFFVTKKKYAVIDEEGKITTRGLEIVRRDWSEIAKETQARVLEALLKDGDVEKAVRIVKEVTEKLSKYEVPPEKLVIHEQITRDLKDYKATGPHVAVAKRLAARGVKIRPGTVISYIVLKGSGRIGDRAIPFDEFDPTKHKYDAEYYIENQVLPAVERILRAFGYRKEDLRYQKTRQVGLSAWLKPKGT

SEQ ID NO: 1890 - protein, 774 aa, synthetic construct
MILDTDCITEDGKPVMRIFKKENGEFKIEYDRTFEPYFYALLKDDSAIEEVKKITAERHGTVVTVKRVEKVQKKFLGRPVEVWKLYFTHPQDRPAIRDKIREHPAVIDIYEYDIPFAKRYLIDKGLVPMEGDEELKMLAFDIETLYHEGEEFAEGPILMISYADEEGARVITWKNVDLPYVDVVSTEREMIKRFLRVVKEKDPDVLITYNGDNFDFAYLKKRCEKLGINFALGRDGSEPKIQRMGDRFAVEVKGRIHFDLYPVIRRTINLPTYTLEAVYEAVFGQPKEKVYAEEITTAWETGENLERVARYSMEDAKVTYELGKEFLPMEAQLSRLIGQSLWDVSRSSTGNLVEWFLLRKAYERNELAPNKPDEKELARRRQSYEGGYVKEPERGLWENIVYLDFRSLYPSIIITHNVSPDTLNREGCKEYDVAPQVGHRFCKDFPGFIPSLLGDLLEERQKIKKKMKATIDPIERKLLDYRQRAIKILANSYYGYYGYARARWYCKECAESVTAWGREYITMTIKEIEEKYGFKVIYSDTDGFFATIPGADAETVKKKAMEFLKYINAKLPGALELEYEGFYKRGFFVTKKKYAVIDEEGKITTRGLEIVRRDWSEIAKETQARVLEALLKDGDVEKAVRIVKEVTEKLSKYEVPPEKLVIHEQITRDLKDYKATGPHVAVAKRLAARGVKIRPGTVISYIVLKGSGRIGDRAIPFDEFDPTKHKYDAEYYIENQVLPAVERILRAFGYRKEDLRYQKTRQVGLSAWLKPKGT

SEQ ID NO: 1891 - protein, 774 aa, synthetic construct
MILDTDCITEDGKPVWRIFKKENGEFKIEYDRTFEPYFYALLKDDSAIEEVKKITAERHGTVVTVKRVEKVQKKFLGRPVEVWKLYFTHPQDVPAIRDKIREHPAVIDIYEYDIPFAKRYLIDKGLVPMEGDEELKMLAFDIETLYHEGEEFAEGPILMISYADEEGARVITWKNVDLPYVDVVSTEREMIKRFLRVVKEKDPDVLITYNGDNFDFAYLKKRCEKLGINFALGRDGSEPKIQRMGDRFAVEVKGRIHFDLYPVIRRTINLPTYTLEAVYEAVFGQPKEKVYAEEITTAWETGENLERVARYSMEDAKVTYELGKEFLPMEAQLSRLIGQSLWDVSRSSTGNLVEWFLLRKAYERNELAPNKPDEKELARRRQSYEGGYVKEPERGLWENIVYLDFRSLYPSIIITHNVSPDTLNREGCKEYDVAPQVGHRFCKDFPGFIPSLLGDLLEERQKIKKKMKATIDPIERKLLDYRQRAIKILANSYYGYYGYARARWYCKECAESVTAWGREYITMTIKEIEEKYGFKVIYSDTDGFFATIPGADAETVKKKAMEFLKYINAKLPGALELEYEGFYKRGFFVTKKKYAVIDEEGKITTRGLEIVRRDWSEIAKETQARVLEALLKDGDVEKAVRIVKEVTEKLSKYEVPPEKLVIHEQITRDLKDYKATGPHVAVAKRLAARGVKIRPGTVISYIVLKGSGRIGDRAIPFDEFDPTKHKYDAEYYIENQVLPAVERILRAFGYRKEDLRYQKTRQVGLSAWLKPKGT

SEQ ID NO: 1892 - protein, 774 aa, synthetic construct
MILDTDCITEDGKPVWRIFKKENGEFKIEYDRTFEPYFYALLKDDSAIEEVKKITAERHGTVVTVKRVEKVQKKFLGRPVEVWKLYFTHFQDVPAIRDKIREHPAVIDIYEYDIPFAKRYLIDKGLVPMEGDEELKMLAFDIETLYHEGEEFAEGPILMISYADEEGARVITWKNVDLPYVDVVSTEREMIKRFLRVVKEKDPDVLITYNGDNFDFAYLKKRCEKLGINFALGRDGSEPKIQRMGDRFAVEVKGRIHFDLYPVIRRTINLPTYTLEAVYEAVFGQPKEKVYAEEITTAWETGENLERVARYSMEDAKVTYELGKEFLPMEAQLSRLIGQSLWDVSRSSTGNLVEWFLLRKAYERNELAPNKPDEKELARRRQSYEGGYVKEPERGLWENIVYLDFRSLYPSIIITHNVSPDTLNREGCKEYDVAPQVGHRFCKDFPGFIPSLLGDLLEERQKIKKKMKATIDPIERKLLDYRQRAIKILANSYYGYYGYARARWYCKECAESVTAWGREYITMTIKEIEEKYGFKVIYSDTDGFFATIPGADAETVKKKAMEFLKYINAKLPGALELEYEGFYKRGFFVTKKKYAVIDEEGKITTRGLEIVRRDWSEIAKETQARVLEALLKDGDVEKAVRIVKEVTEKLSKYEVPPEKLVIHEQITRDLKDYKATGPHVAVAKRLAARGVKIRPGTVISYIVLKGSGRIGDRAIPFDEFDPTKHKYDAEYYIENQVLPAVERILRAFGYRKEDLRYQKTRQVGLSAWLKPKGT

SEQ ID NO: 1893 - protein, 774 aa, synthetic construct
MILDTDCITEDGKPVWRIFKKENGEFKIEYDRTFEPYFYALLKDDSAIEEVKKITAERHGTVVTVKRVEKVQKKFLGRPVEVWKLYFTHFQDVPAIADKIREHPAVIDIYEYDIPFAKRYLIDKGLVPMEGDEELKMLAFDIETLYHEGEEFAEGPILMISYADEEGARVITWKNVDLPYVDVVSTEREMIKRFLRVVKEKDPDVLITYNGDNFDFAYLKKRCEKLGINFALGRDGSEPKIQRMGDRFAVEVKGRIHFDLYPVIRRTINLPTYTLEAVYEAVFGQPKEKVYAEEITTAWETGENLERVARYSMEDAKVTYELGKEFLPMEAQLSRLIGQSLWDVSRSSTGNLVEWFLLRKAYERNELAPNKPDEKELARRRQSYEGGYVKEPERGLWENIVYLDFRSLYPSIIITHNVSPDTLNREGCKEYDVAPQVGHRFCKDFPGFIPSLLGDLLEERQKIKKKMKATIDPIERKLLDYRQRAIKILANSYYGYYGYARARWYCKECAESVTAWGREYITMTIKEIEEKYGFKVIYSDTDGFFATIPGADAETVKKKAMEFLKYINAKLPGALELEYEGFYKRGFFVTKKKYAVIDEEGKITTRGLEIVRRDWSEIAKETQARVLEALLKDGDVEKAVRIVKEVTEKLSKYEVPPEKLVIHEQITRDLKDYKATGPHVAVAKRLAARGVKIRPGTVISYIVLKGSGRIGDRAIPFDEFDPTKHKYDAEYYIENQVLPAVERILRAFGYRKEDLRYQKTRQVGLSAWLKPKGT

SEQ ID NO: 1894 - protein, 774 aa, synthetic construct
MILDTDCITEDGKPVWRIFKKENGEFKIEYDRTFEPYFYALLKDDSAIEEVKKITAERHGTVVTVKRVEKVQKKFLGRPVEVWKLYFTHIQDVPAIRDKIREHPAVIDIYEYDIPFAKRYLIDKGLVPMEGDEELKMLAFDIETLYHEGEEFAEGPILMISYADEEGARVITWKNVDLPYVDVVSTEREMIKRFLRVVKEKDPDVLITYNGDNFDFAYLKKRCEKLGINFALGRDGSEPKIQRMGDRFAVEVKGRIHFDLYPVIRRTINLPTYTLEAVYEAVFGQPKEKVYAEEITTAWETGENLERVARYSMEDAKVTYELGKEFLPMEAQLSRLIGQSLWDVSRSSTGNLVEWFLLRKAYERNELAPNKPDEKELARRRQSYEGGYVKEPERGLWENIVYLDFRSLYPSIIITHNVSPDTLNREGCKEYDVAPQVGHRFCKDFPGFIPSLLGDLLEERQKIKKKMKATIDPIERKLLDYRQRAIKILANSYYGYYGYARARWYCKECAESVTAWGREYITMTIKEIEEKYGFKVIYSDTDGFFATIPGADAETVKKKAMEFLKYINAKLPGALELEYEGFYKRGFFVTKKKYAVIDEEGKITTRGLEIVRRDWSEIAKETQARVLEALLKDGDVEKAVRIVKEVTEKLSKYEVPPEKLVIHEQITRDLKDYKATGPHVAVAKRLAARGVKIRPGTVISYIVLKGSGRIGDRAIPFDEFDPTKHKYDAEYYIENQVLPAVERILRAFGYRKEDLRYQKTRQVGLSAWLKPKGT

SEQ ID NO: 1895 - protein, 774 aa, synthetic construct
MILDTDCITEDGKPVWRIFKKENGEFKIEYDRTFEPYFYALLKDDSAIEEVKKITAERHGTVVTVKRVEKVQKKFLGRPVEVWKLYFTHPQDIPAIRDKIREHPAVIDIYEYDIPFAKRYLIDKGLVPMEGDEELKMLAFDIETLYHEGEEFAEGPILMISYADEEGARVITWKNVDLPYVDVVSTEREMIKRFLRVVKEKDPDVLITYNGDNFDFAYLKKRCEKLGINFALGRDGSEPKIQRMGDRFAVEVKGRIHFDLYPVIRRTINLPTYTLEAVYEAVFGQPKEKVYAEEITTAWETGENLERVARYSMEDAKVTYELGKEFLPMEAQLSRLIGQSLWDVSRSSTGNLVEWFLLRKAYERNELAPNKPDEKELARRRQSYEGGYVKEPERGLWENIVYLDFRSLYPSIIITHNVSPDTLNREGCKEYDVAPQVGHRFCKDFPGFIPSLLGDLLEERQKIKKKMKATIDPIERKLLDYRQRAIKILANSYYGYYGYARARWYCKECAESVTAWGREYITMTIKEIEEKYGFKVIYSDTDGFFATIPGADAETVKKKAMEFLKYINAKLPGALELEYEGFYKRGFFVTKKKYAVIDEEGKITTRGLEIVRRDWSEIAKETQARVLEALLKDGDVEKAVRIVKEVTEKLSKYEVPPEKLVIHEQITRDLKDYKATGPHVAVAKRLAARGVKIRPGTVISYIVLKGSGRIGDRAIPFDEFDPTKHKYDAEYYIENQVLPAVERILRAFGYRKEDLRYQKTRQVGLSAWLKPKGT

SEQ ID NO: 1896 - protein, 774 aa, synthetic construct
MILDTDCITEDGKPVIRIFKKENGEFKIEYDRTFEAYFYALLKDDSAIEEVKKITAERHGTVVTVKRVEKVQKKFLGRPVEVWKLYFTHPQDVPAIRDKIREHPAVIDIYEYDIPFAKRYLIDKGLVPMEGDEELKMLAFDIETLYHEGEEFAEGPILMISYADEEGARVITWKNVDLPYVDVVSTEREMIKRFLRVVKEKDPDVLITYNGDNFDFAYLKKRCEKLGINFALGRDGSEPKIQRMGDRFAVEVKGRIHFDLYPVIRRTINLPTYTLEAVYEAVFGQPKEKVYAEEITTAWETGENLERVARYSMEDAKVTYELGKEFLPMEAQLSRLIGQSLWDVSRSSTGNLVEWFLLRKAYERNELAPNKPDEKELARRRQSYEGGYVKEPERGLWENIVYLDFRSLYPSIIITHNVSPDTLNREGCKEYDVAPQVGHRFCKDFPGFIPSLLGDLLEERQKIKKKMKATIDPIERKLLDYRQRAIKILANSYYGYYGYARARWYCKECAESVTAWGREYITMTIKEIEEKYGFKVIYSDTDGFFATIPGADAETVKKKAMEFLKYINAKLPGALELEYEGFYKRGFFVTKKKYAVIDEEGKITTRGLEIVRRDWSEIAKETQARVLEALLKDGDVEKAVRIVKEVTEKLSKYEVPPEKLVIHEQITRDLKDYKATGPHVAVAKRLAARGVKIRPGTVISYIVLKGSGRIGDRAIPFDEFDPTKHKYDAEYYIENQVLPAVERILRAFGYRKEDLRYQKTRQVGLSAWLKPKGT

SEQ ID NO: 1897 - protein, 774 aa, synthetic construct
MILDTDCITEDGKPVIRIFKKENGEFKIEYDRTFEAYFYALLKDDSAIEEVKKITAERHGTVVTVKRVEKVQKKFLGRPVEVWKLYFTHFQDVPAIRDKIREHPAVIDIYEYDIPFAKRYLIDKGLVPMEGDEELKMLAFDIETLYHEGEEFAEGPILMISYADEEGARVITWKNVDLPYVDVVSTEREMIKRFLRVVKEKDPDVLITYNGDNFDFAYLKKRCEKLGINFALGRDGSEPKIQRMGDRFAVEVKGRIHFDLYPVIRRTINLPTYTLEAVYEAVFGQPKEKVYAEEITTAWETGENLERVARYSMEDAKVTYELGKEFLPMEAQLSRLIGQSLWDVSRSSTGNLVEWFLLRKAYERNELAPNKPDEKELARRRQSYEGGYVKEPERGLWENIVYLDFRSLYPSIIITHNVSPDTLNREGCKEYDVAPQVGHRFCKDFPGFIPSLLGDLLEERQKIKKKMKATIDPIERKLLDYRQRAIKILANSYYGYYGYARARWYCKECAESVTAWGREYITMTIKEIEEKYGFKVIYSDTDGFFATIPGADAETVKKKAMEFLKYINAKLPGALELEYEGFYKRGFFVTKKKYAVIDEEGKITTRGLEIVRRDWSEIAKETQARVLEALLKDGDVEKAVRIVKEVTEKLSKYEVPPEKLVIHEQITRDLKDYKATGPHVAVAKRLAARGVKIRPGTVISYIVLKGSGRIGDRAIPFDEFDPTKHKYDAEYYIENQVLPAVERILRAFGYRKEDLRYQKTRQVGLSAWLKPKGT

SEQ ID NO: 1898 - protein, 774 aa, synthetic construct
MILDTDCITEDGKPVIRIFKKENGEFKIEYDRTFEAYFYALLKDDSAIEEVKKITAERHGTVVTVKRVEKVQKKFLGRPVEVWKLYFTHFQDIPAIRDKIREHPAVIDIYEYDIPFAKRYLIDKGLVPMEGDEELKMLAFDIETLYHEGEEFAEGPILMISYADEEGARVITWKNVDLPYVDVVSTEREMIKRFLRVVKEKDPDVLITYNGDNFDFAYLKKRCEKLGINFALGRDGSEPKIQRMGDRFAVEVKGRIHFDLYPVIRRTINLPTYTLEAVYEAVFGQPKEKVYAEEITTAWETGENLERVARYSMEDAKVTYELGKEFLPMEAQLSRLIGQSLWDVSRSSTGNLVEWFLLRKAYERNELAPNKPDEKELARRRQSYEGGYVKEPERGLWENIVYLDFRSLYPSIIITHNVSPDTLNREGCKEYDVAPQVGHRFCKDFPGFIPSLLGDLLEERQKIKKKMKATIDPIERKLLDYRQRAIKILANSYYGYYGYARARWYCKECAESVTAWGREYITMTIKEIEEKYGFKVIYSDTDGFFATIPGADAETVKKKAMEFLKYINAKLPGALELEYEGFYKRGFFVTKKKYAVIDEEGKITTRGLEIVRRDWSEIAKETQARVLEALLKDGDVEKAVRIVKEVTEKLSKYEVPPEKLVIHEQITRDLKDYKATGPHVAVAKRLAARGVKIRPGTVISYIVLKGSGRIGDRAIPFDEFDPTKHKYDAEYYIENQVLPAVERILRAFGYRKEDLRYQKTRQVGLSAWLKPKGT

SEQ ID NO: 1899 - protein, 774 aa, synthetic construct
MILDTDCITEDGKPVIRIFKKENGEFKIEYDRTFEAYFYALLKDDSAIEEVKKITAERHGTVVTVKRVEKVQKKFLGRPVEVWKLYFTHFQDIPAIHDKIREHPAVIDIYEYDIPFAKRYLIDKGLVPMEGDEELKMLAFDIETLYHEGEEFAEGPILMISYADEEGARVITWKNVDLPYVDVVSTEREMIKRFLRVVKEKDPDVLITYNGDNFDFAYLKKRCEKLGINFALGRDGSEPKIQRMGDRFAVEVKGRIHFDLYPVIRRTINLPTYTLEAVYEAVFGQPKEKVYAEEITTAWETGENLERVARYSMEDAKVTYELGKEFLPMEAQLSRLIGQSLWDVSRSSTGNLVEWFLLRKAYERNELAPNKPDEKELARRRQSYEGGYVKEPERGLWENIVYLDFRSLYPSIIITHNVSPDTLNREGCKEYDVAPQVGHRFCKDFPGFIPSLLGDLLEERQKIKKKMKATIDPIERKLLDYRQRAIKILANSYYGYYGYARARWYCKECAESVTAWGREYITMTIKEIEEKYGFKVIYSDTDGFFATIPGADAETVKKKAMEFLKYINAKLPGALELEYEGFYKRGFFVTKKKYAVIDEEGKITTRGLEIVRRDWSEIAKETQARVLEALLKDGDVEKAVRIVKEVTEKLSKYEVPPEKLVIHEQITRDLKDYKATGPHVAVAKRLAARGVKIRPGTVISYIVLKGSGRIGDRAIPFDEFDPTKHKYDAEYYIENQVLPAVERILRAFGYRKEDLRYQKTRQVGLSAWLKPKGT

SEQ ID NO: 1900 - protein, 774 aa, synthetic construct
MILDTDCITEDGKPVIRIFKKENGEFKIEYDRTFEAYFYALLKDDSAIEEVKKITAERHGTVVTVKRVEKVQKKFLGRPVEVWKLYFTHFQDQPAIRDKIREHPAVIDIYEYDIPFAKRYLIDKGLVPMEGDEELKMLAFDIETLYHEGEEFAEGPILMISYADEEGARVITWKNVDLPYVDVVSTEREMIKRFLRVVKEKDPDVLITYNGDNFDFAYLKKRCEKLGINFALGRDGSEPKIQRMGDRFAVEVKGRIHFDLYPVIRRTINLPTYTLEAVYEAVFGQPKEKVYAEEITTAWETGENLERVARYSMEDAKVTYELGKEFLPMEAQLSRLIGQSLWDVSRSSTGNLVEWFLLRKAYERNELAPNKPDEKELARRRQSYEGGYVKEPERGLWENIVYLDFRSLYPSIIITHNVSPDTLNREGCKEYDVAPQVGHRFCKDFPGFIPSLLGDLLEERQKIKKKMKATIDPIERKLLDYRQRAIKILANSYYGYYGYARARWYCKECAESVTAWGREYITMTIKEIEEKYGFKVIYSDTDGFFATIPGADAETVKKKAMEFLKYINAKLPGALELEYEGFYKRGFFVTKKKYAVIDEEGKITTRGLEIVRRDWSEIAKETQARVLEALLKDGDVEKAVRIVKEVTEKLSKYEVPPEKLVIHEQITRDLKDYKATGPHVAVAKRLAARGVKIRPGTVISYIVLKGSGRIGDRAIPFDEFDPTKHKYDAEYYIENQVLPAVERILRAFGYRKEDLRYQKTRQVGLSAWLKPKGT

SEQ ID NO: 1901 - protein, 774 aa, synthetic construct
MILDTDCITEDGKPVIRIFKKENGEFKIEYDRTFEAYFYALLKDDSAIEEVKKITAERHGTVVTVKRVEKVQKKFLGRPVEVWKLYFTHIQDVPAIRDKIREHPAVIDIYEYDIPFAKRYLIDKGLVPMEGDEELKMLAFDIETLYHEGEEFAEGPILMISYADEEGARVITWKNVDLPYVDVVSTEREMIKRFLRVVKEKDPDVLITYNGDNFDFAYLKKRCEKLGINFALGRDGSEPKIQRMGDRFAVEVKGRIHFDLYPVIRRTINLPTYTLEAVYEAVFGQPKEKVYAEEITTAWETGENLERVARYSMEDAKVTYELGKEFLPMEAQLSRLIGQSLWDVSRSSTGNLVEWFLLRKAYERNELAPNKPDEKELARRRQSYEGGYVKEPERGLWENIVYLDFRSLYPSIIITHNVSPDTLNREGCKEYDVAPQVGHRFCKDFPGFIPSLLGDLLEERQKIKKKMKATIDPIERKLLDYRQRAIKILANSYYGYYGYARARWYCKECAESVTAWGREYITMTIKEIEEKYGFKVIYSDTDGFFATIPGADAETVKKKAMEFLKYINAKLPGALELEYEGFYKRGFFVTKKKYAVIDEEGKITTRGLEIVRRDWSEIAKETQARVLEALLKDGDVEKAVRIVKEVTEKLSKYEVPPEKLVIHEQITRDLKDYKATGPHVAVAKRLAARGVKIRPGTVISYIVLKGSGRIGDRAIPFDEFDPTKHKYDAEYYIENQVLPAVERILRAFGYRKEDLRYQKTRQVGLSAWLKPKGT

SEQ ID NO: 1902 - protein, 774 aa, synthetic construct
MILDTDCITEDGKPVIRIFKKENGEFKIEYDRTFEAYFYALLKDDSAIEEVKKITAERHGTVVTVKRVEKVQKKFLGRPVEVWKLYFTHIQDIPAIRDKIREHPAVIDIYEYDIPFAKRYLIDKGLVPMEGDEELKMLAFDIETLYHEGEEFAEGPILMISYADEEGARVITWKNVDLPYVDVVSTEREMIKRFLRVVKEKDPDVLITYNGDNFDFAYLKKRCEKLGINFALGRDGSEPKIQRMGDRFAVEVKGRIHFDLYPVIRRTINLPTYTLEAVYEAVFGQPKEKVYAEEITTAWETGENLERVARYSMEDAKVTYELGKEFLPMEAQLSRLIGQSLWDVSRSSTGNLVEWFLLRKAYERNELAPNKPDEKELARRRQSYEGGYVKEPERGLWENIVYLDFRSLYPSIIITHNVSPDTLNREGCKEYDVAPQVGHRFCKDFPGFIPSLLGDLLEERQKIKKKMKATIDPIERKLLDYRQRAIKILANSYYGYYGYARARWYCKECAESVTAWGREYITMTIKEIEEKYGFKVIYSDTDGFFATIPGADAETVKKKAMEFLKYINAKLPGALELEYEGFYKRGFFVTKKKYAVIDEEGKITTRGLEIVRRDWSEIAKETQARVLEALLKDGDVEKAVRIVKEVTEKLSKYEVPPEKLVIHEQITRDLKDYKATGPHVAVAKRLAARGVKIRPGTVISYIVLKGSGRIGDRAIPFDEFDPTKHKYDAEYYIENQVLPAVERILRAFGYRKEDLRYQKTRQVGLSAWLKPKGT

SEQ ID NO: 1903 - protein, 774 aa, synthetic construct
MILDTDCITEDGKPVIRIFKKENGEFKIEYDRTFEAYFYALLKDDSAIEEVKKITAERHGTVVTVKRVEKVQKKFLGRPVEVWKLYFTHWQDVPAIRDKIREHPAVIDIYEYDIPFAKRYLIDKGLVPMEGDEELKMLAFDIETLYHEGEEFAEGPILMISYADEEGARVITWKNVDLPYVDVVSTEREMIKRFLRVVKEKDPDVLITYNGDNFDFAYLKKRCEKLGINFALGRDGSEPKIQRMGDRFAVEVKGRIHFDLYPVIRRTINLPTYTLEAVYEAVFGQPKEKVYAEEITTAWETGENLERVARYSMEDAKVTYELGKEFLPMEAQLSRLIGQSLWDVSRSSTGNLVEWFLLRKAYERNELAPNKPDEKELARRRQSYEGGYVKEPERGLWENIVYLDFRSLYPSIIITHNVSPDTLNREGCKEYDVAPQVGHRFCKDFPGFIPSLLGDLLEERQKIKKKMKATIDPIERKLLDYRQRAIKILANSYYGYYGYARARWYCKECAESVTAWGREYITMTIKEIEEKYGFKVIYSDTDGFFATIPGADAETVKKKAMEFLKYINAKLPGALELEYEGFYKRGFFVTKKKYAVIDEEGKITTRGLEIVRRDWSEIAKETQARVLEALLKDGDVEKAVRIVKEVTEKLSKYEVPPEKLVIHEQITRDLKDYKATGPHVAVAKRLAARGVKIRPGTVISYIVLKGSGRIGDRAIPFDEFDPTKHKYDAEYYIENQVLPAVERILRAFGYRKEDLRYQKTRQVGLSAWLKPKGT

SEQ ID NO: 1904 - protein, 774 aa, synthetic construct
MILDTDCITEDGKPVIRIFKKENGEFKIEYDRTFEAYFYALLKDDSAIEEVKKITAERHGTVVTVKRVEKVQKKFLGRPVEVWKLYFTHWQDIPAIRDKIREHPAVIDIYEYDIPFAKRYLIDKGLVPMEGDEELKMLAFDIETLYHEGEEFAEGPILMISYADEEGARVITWKNVDLPYVDVVSTEREMIKRFLRVVKEKDPDVLITYNGDNFDFAYLKKRCEKLGINFALGRDGSEPKIQRMGDRFAVEVKGRIHFDLYPVIRRTINLPTYTLEAVYEAVFGQPKEKVYAEEITTAWETGENLERVARYSMEDAKVTYELGKEFLPMEAQLSRLIGQSLWDVSRSSTGNLVEWFLLRKAYERNELAPNKPDEKELARRRQSYEGGYVKEPERGLWENIVYLDFRSLYPSIIITHNVSPDTLNREGCKEYDVAPQVGHRFCKDFPGFIPSLLGDLLEERQKIKKKMKATIDPIERKLLDYRQRAIKILANSYYGYYGYARARWYCKECAESVTAWGREYITMTIKEIEEKYGFKVIYSDTDGFFATIPGADAETVKKKAMEFLKYINAKLPGALELEYEGFYKRGFFVTKKKYAVIDEEGKITTRGLEIVRRDWSEIAKETQARVLEALLKDGDVEKAVRIVKEVTEKLSKYEVPPEKLVIHEQITRDLKDYKATGPHVAVAKRLAARGVKIRPGTVISYIVLKGSGRIGDRAIPFDEFDPTKHKYDAEYYIENQVLPAVERILRAFGYRKEDLRYQKTRQVGLSAWLKPKGT

SEQ ID NO: 1905 - protein, 774 aa, synthetic construct
MILDTDCITEDGKPVIRIFKKENGEFKIEYDRTFEAYFYALLKDDSAIEEVKKITAERHGTVVTVKRVEKVQKKFLGRPVEVWKLYFTHWQDIPAIADKIREHPAVIDIYEYDIPFAKRYLIDKGLVPMEGDEELKMLAFDIETLYHEGEEFAEGPILMISYADEEGARVITWKNVDLPYVDVVSTEREMIKRFLRVVKEKDPDVLITYNGDNFDFAYLKKRCEKLGINFALGRDGSEPKIQRMGDRFAVEVKGRIHFDLYPVIRRTINLPTYTLEAVYEAVFGQPKEKVYAEEITTAWETGENLERVARYSMEDAKVTYELGKEFLPMEAQLSRLIGQSLWDVSRSSTGNLVEWFLLRKAYERNELAPNKPDEKELARRRQSYEGGYVKEPERGLWENIVYLDFRSLYPSIIITHNVSPDTLNREGCKEYDVAPQVGHRFCKDFPGFIPSLLGDLLEERQKIKKKMKATIDPIERKLLDYRQRAIKILANSYYGYYGYARARWYCKECAESVTAWGREYITMTIKEIEEKYGFKVIYSDTDGFFATIPGADAETVKKKAMEFLKYINAKLPGALELEYEGFYKRGFFVTKKKYAVIDEEGKITTRGLEIVRRDWSEIAKETQARVLEALLKDGDVEKAVRIVKEVTEKLSKYEVPPEKLVIHEQITRDLKDYKATGPHVAVAKRLAARGVKIRPGTVISYIVLKGSGRIGDRAIPFDEFDPTKHKYDAEYYIENQVLPAVERILRAFGYRKEDLRYQKTRQVGLSAWLKPKGT

SEQ ID NO: 1906 - protein, 774 aa, synthetic construct
MILDTDCITEDGKPVIRIFKKENGEFKIEYDRTFEAYFYALLKDDSAIEEVKKITAERHGTVVTVKRVEKVQKKFLGRPVEVWKLYFTHWQDIPAIHDKIREHPAVIDIYEYDIPFAKRYLIDKGLVPMEGDEELKMLAFDIETLYHEGEEFAEGPILMISYADEEGARVITWKNVDLPYVDVVSTEREMIKRFLRVVKEKDPDVLITYNGDNFDFAYLKKRCEKLGINFALGRDGSEPKIQRMGDRFAVEVKGRIHFDLYPVIRRTINLPTYTLEAVYEAVFGQPKEKVYAEEITTAWETGENLERVARYSMEDAKVTYELGKEFLPMEAQLSRLIGQSLWDVSRSSTGNLVEWFLLRKAYERNELAPNKPDEKELARRRQSYEGGYVKEPERGLWENIVYLDFRSLYPSIIITHNVSPDTLNREGCKEYDVAPQVGHRFCKDFPGFIPSLLGDLLEERQKIKKKMKATIDPIERKLLDYRQRAIKILANSYYGYYGYARARWYCKECAESVTAWGREYITMTIKEIEEKYGFKVIYSDTDGFFATIPGADAETVKKKAMEFLKYINAKLPGALELEYEGFYKRGFFVTKKKYAVIDEEGKITTRGLEIVRRDWSEIAKETQARVLEALLKDGDVEKAVRIVKEVTEKLSKYEVPPEKLVIHEQITRDLKDYKATGPHVAVAKRLAARGVKIRPGTVISYIVLKGSGRIGDRAIPFDEFDPTKHKYDAEYYIENQVLPAVERILRAFGYRKEDLRYQKTRQVGLSAWLKPKGT

SEQ ID NO: 1907 - protein, 774 aa, synthetic construct
MILDTDCITEDGKPVIRIFKKENGEFKIEYDRTFEAYFYALLKDDSAIEEVKKITAERHGTVVTVKRVEKVQKKFLGRPVEVWKLYFTHWQDRPAIADKIREHPAVIDIYEYDIPFAKRYLIDKGLVPMEGDEELKMLAFDIETLYHEGEEFAEGPILMISYADEEGARVITWKNVDLPYVDVVSTEREMIKRFLRVVKEKDPDVLITYNGDNFDFAYLKKRCEKLGINFALGRDGSEPKIQRMGDRFAVEVKGRIHFDLYPVIRRTINLPTYTLEAVYEAVFGQPKEKVYAEEITTAWETGENLERVARYSMEDAKVTYELGKEFLPMEAQLSRLIGQSLWDVSRSSTGNLVEWFLLRKAYERNELAPNKPDEKELARRRQSYEGGYVKEPERGLWENIVYLDFRSLYPSIIITHNVSPDTLNREGCKEYDVAPQVGHRFCKDFPGFIPSLLGDLLEERQKIKKKMKATIDPIERKLLDYRQRAIKILANSYYGYYGYARARWYCKECAESVTAWGREYITMTIKEIEEKYGFKVIYSDTDGFFATIPGADAETVKKKAMEFLKYINAKLPGALELEYEGFYKRGFFVTKKKYAVIDEEGKITTRGLEIVRRDWSEIAKETQARVLEALLKDGDVEKAVRIVKEVTEKLSKYEVPPEKLVIHEQITRDLKDYKATGPHVAVAKRLAARGVKIRPGTVISYIVLKGSGRIGDRAIPFDEFDPTKHKYDAEYYIENQVLPAVERILRAFGYRKEDLRYQKTRQVGLSAWLKPKGT

SEQ ID NO: 1908 - protein, 774 aa, synthetic construct
MILDTDCITEDGKPVIRIFKKENGEFKIEYDRTFEAYFYALLKDDSAIEEVKKITAERHGTVVTVKRVEKVQKKFLGRPVEVWKLYFTHYQDVPAIRDKIREHPAVIDIYEYDIPFAKRYLIDKGLVPMEGDEELKMLAFDIETLYHEGEEFAEGPILMISYADEEGARVITWKNVDLPYVDVVSTEREMIKRFLRVVKEKDPDVLITYNGDNFDFAYLKKRCEKLGINFALGRDGSEPKIQRMGDRFAVEVKGRIHFDLYPVIRRTINLPTYTLEAVYEAVFGQPKEKVYAEEITTAWETGENLERVARYSMEDAKVTYELGKEFLPMEAQLSRLIGQSLWDVSRSSTGNLVEWFLLRKAYERNELAPNKPDEKELARRRQSYEGGYVKEPERGLWENIVYLDFRSLYPSIIITHNVSPDTLNREGCKEYDVAPQVGHRFCKDFPGFIPSLLGDLLEERQKIKKKMKATIDPIERKLLDYRQRAIKILANSYYGYYGYARARWYCKECAESVTAWGREYITMTIKEIEEKYGFKVIYSDTDGFFATIPGADAETVKKKAMEFLKYINAKLPGALELEYEGFYKRGFFVTKKKYAVIDEEGKITTRGLEIVRRDWSEIAKETQARVLEALLKDGDVEKAVRIVKEVTEKLSKYEVPPEKLVIHEQITRDLKDYKATGPHVAVAKRLAARGVKIRPGTVISYIVLKGSGRIGDRAIPFDEFDPTKHKYDAEYYIENQVLPAVERILRAFGYRKEDLRYQKTRQVGLSAWLKPKGT

SEQ ID NO: 1909 - protein, 774 aa, synthetic construct
MILDTDCITEDGKPVIRIFKKENGEFKIEYDRTFEAYFYALLKDDSAIEEVKKITAERHGTVVTVKRVEKVQKKFLGRPVEVWKLYFTHYQDIPAIRDKIREHPAVIDIYEYDIPFAKRYLIDKGLVPMEGDEELKMLAFDIETLYHEGEEFAEGPILMISYADEEGARVITWKNVDLPYVDVVSTEREMIKRFLRVVKEKDPDVLITYNGDNFDFAYLKKRCEKLGINFALGRDGSEPKIQRMGDRFAVEVKGRIHFDLYPVIRRTINLPTYTLEAVYEAVFGQPKEKVYAEEITTAWETGENLERVARYSMEDAKVTYELGKEFLPMEAQLSRLIGQSLWDVSRSSTGNLVEWFLLRKAYERNELAPNKPDEKELARRRQSYEGGYVKEPERGLWENIVYLDFRSLYPSIIITHNVSPDTLNREGCKEYDVAPQVGHRFCKDFPGFIPSLLGDLLEERQKIKKKMKATIDPIERKLLDYRQRAIKILANSYYGYYGYARARWYCKECAESVTAWGREYITMTIKEIEEKYGFKVIYSDTDGFFATIPGADAETVKKKAMEFLKYINAKLPGALELEYEGFYKRGFFVTKKKYAVIDEEGKITTRGLEIVRRDWSEIAKETQARVLEALLKDGDVEKAVRIVKEVTEKLSKYEVPPEKLVIHEQITRDLKDYKATGPHVAVAKRLAARGVKIRPGTVISYIVLKGSGRIGDRAIPFDEFDPTKHKYDAEYYIENQVLPAVERILRAFGYRKEDLRYQKTRQVGLSAWLKPKGT

SEQ ID NO: 1910 - protein, 774 aa, synthetic construct
MILDTDCITEDGKPVIRIFKKENGEFKIEYDRTFEAYFYALLKDDSAIEEVKKITAERHGTVVTVKRVEKVQKKFLGRPVEVWKLYFTHYQDIPAIADKIREHPAVIDIYEYDIPFAKRYLIDKGLVPMEGDEELKMLAFDIETLYHEGEEFAEGPILMISYADEEGARVITWKNVDLPYVDVVSTEREMIKRFLRVVKEKDPDVLITYNGDNFDFAYLKKRCEKLGINFALGRDGSEPKIQRMGDRFAVEVKGRIHFDLYPVIRRTINLPTYTLEAVYEAVFGQPKEKVYAEEITTAWETGENLERVARYSMEDAKVTYELGKEFLPMEAQLSRLIGQSLWDVSRSSTGNLVEWFLLRKAYERNELAPNKPDEKELARRRQSYEGGYVKEPERGLWENIVYLDFRSLYPSIIITHNVSPDTLNREGCKEYDVAPQVGHRFCKDFPGFIPSLLGDLLEERQKIKKKMKATIDPIERKLLDYRQRAIKILANSYYGYYGYARARWYCKECAESVTAWGREYITMTIKEIEEKYGFKVIYSDTDGFFATIPGADAETVKKKAMEFLKYINAKLPGALELEYEGFYKRGFFVTKKKYAVIDEEGKITTRGLEIVRRDWSEIAKETQARVLEALLKDGDVEKAVRIVKEVTEKLSKYEVPPEKLVIHEQITRDLKDYKATGPHVAVAKRLAARGVKIRPGTVISYIVLKGSGRIGDRAIPFDEFDPTKHKYDAEYYIENQVLPAVERILRAFGYRKEDLRYQKTRQVGLSAWLKPKGT

SEQ ID NO: 1911 - protein, 774 aa, synthetic construct
MILDTDCITEDGKPVIRIFKKENGEFKIEYDRTFEAYFYALLKDDSAIEEVKKITAERHGTVVTVKRVEKVQKKFLGRPVEVWKLYFTHYQDIPAIWDKIREHPAVIDIYEYDIPFAKRYLIDKGLVPMEGDEELKMLAFDIETLYHEGEEFAEGPILMISYADEEGARVITWKNVDLPYVDVVSTEREMIKRFLRVVKEKDPDVLITYNGDNFDFAYLKKRCEKLGINFALGRDGSEPKIQRMGDRFAVEVKGRIHFDLYPVIRRTINLPTYTLEAVYEAVFGQPKEKVYAEEITTAWETGENLERVARYSMEDAKVTYELGKEFLPMEAQLSRLIGQSLWDVSRSSTGNLVEWFLLRKAYERNELAPNKPDEKELARRRQSYEGGYVKEPERGLWENIVYLDFRSLYPSIIITHNVSPDTLNREGCKEYDVAPQVGHRFCKDFPGFIPSLLGDLLEERQKIKKKMKATIDPIERKLLDYRQRAIKILANSYYGYYGYARARWYCKECAESVTAWGREYITMTIKEIEEKYGFKVIYSDTDGFFATIPGADAETVKKKAMEFLKYINAKLPGALELEYEGFYKRGFFVTKKKYAVIDEEGKITTRGLEIVRRDWSEIAKETQARVLEALLKDGDVEKAVRIVKEVTEKLSKYEVPPEKLVIHEQITRDLKDYKATGPHVAVAKRLAARGVKIRPGTVISYIVLKGSGRIGDRAIPFDEFDPTKHKYDAEYYIENQVLPAVERILRAFGYRKEDLRYQKTRQVGLSAWLKPKGT

SEQ ID NO: 1912 - protein, 774 aa, synthetic construct
MILDTDCITEDGKPVIRIFKKENGEFKIEYDRTFEAYFYALLKDDSAIEEVKKITAERHGTVVTVKRVEKVQKKFLGRPVEVWKLYFTHPQDIPAIRDKIREHPAVIDIYEYDIPFAKRYLIDKGLVPMEGDEELKMLAFDIETLYHEGEEFAEGPILMISYADEEGARVITWKNVDLPYVDVVSTEREMIKRFLRVVKEKDPDVLITYNGDNFDFAYLKKRCEKLGINFALGRDGSEPKIQRMGDRFAVEVKGRIHFDLYPVIRRTINLPTYTLEAVYEAVFGQPKEKVYAEEITTAWETGENLERVARYSMEDAKVTYELGKEFLPMEAQLSRLIGQSLWDVSRSSTGNLVEWFLLRKAYERNELAPNKPDEKELARRRQSYEGGYVKEPERGLWENIVYLDFRSLYPSIIITHNVSPDTLNREGCKEYDVAPQVGHRFCKDFPGFIPSLLGDLLEERQKIKKKMKATIDPIERKLLDYRQRAIKILANSYYGYYGYARARWYCKECAESVTAWGREYITMTIKEIEEKYGFKVIYSDTDGFFATIPGADAETVKKKAMEFLKYINAKLPGALELEYEGFYKRGFFVTKKKYAVIDEEGKITTRGLEIVRRDWSEIAKETQARVLEALLKDGDVEKAVRIVKEVTEKLSKYEVPPEKLVIHEQITRDLKDYKATGPHVAVAKRLAARGVKIRPGTVISYIVLKGSGRIGDRAIPFDEFDPTKHKYDAEYYIENQVLPAVERILRAFGYRKEDLRYQKTRQVGLSAWLKPKGT

SEQ ID NO: 1913 - protein, 774 aa, synthetic construct
MILDTDCITEDGKPVIRIFKKENGEFKIEYDRTFEHYFYALLKDDSAIEEVKKITAERHGTVVTVKRVEKVQKKFLGRPVEVWKLYFTHPQDVPAIRDKIREHPAVIDIYEYDIPFAKRYLIDKGLVPMEGDEELKMLAFDIETLYHEGEEFAEGPILMISYADEEGARVITWKNVDLPYVDVVSTEREMIKRFLRVVKEKDPDVLITYNGDNFDFAYLKKRCEKLGINFALGRDGSEPKIQRMGDRFAVEVKGRIHFDLYPVIRRTINLPTYTLEAVYEAVFGQPKEKVYAEEITTAWETGENLERVARYSMEDAKVTYELGKEFLPMEAQLSRLIGQSLWDVSRSSTGNLVEWFLLRKAYERNELAPNKPDEKELARRRQSYEGGYVKEPERGLWENIVYLDFRSLYPSIIITHNVSPDTLNREGCKEYDVAPQVGHRFCKDFPGFIPSLLGDLLEERQKIKKKMKATIDPIERKLLDYRQRAIKILANSYYGYYGYARARWYCKECAESVTAWGREYITMTIKEIEEKYGFKVIYSDTDGFFATIPGADAETVKKKAMEFLKYINAKLPGALELEYEGFYKRGFFVTKKKYAVIDEEGKITTRGLEIVRRDWSEIAKETQARVLEALLKDGDVEKAVRIVKEVTEKLSKYEVPPEKLVIHEQITRDLKDYKATGPHVAVAKRLAARGVKIRPGTVISYIVLKGSGRIGDRAIPFDEFDPTKHKYDAEYYIENQVLPAVERILRAFGYRKEDLRYQKTRQVGLSAWLKPKGT

SEQ ID NO: 1914 - protein, 774 aa, synthetic construct
MILDTDCITEDGKPVIRIFKKENGEFKIEYDRTFEHYFYALLKDDSAIEEVKKITAERHGTVVTVKRVEKVQKKFLGRPVEVWKLYFTHFQDVPAIRDKIREHPAVIDIYEYDIPFAKRYLIDKGLVPMEGDEELKMLAFDIETLYHEGEEFAEGPILMISYADEEGARVITWKNVDLPYVDVVSTEREMIKRFLRVVKEKDPDVLITYNGDNFDFAYLKKRCEKLGINFALGRDGSEPKIQRMGDRFAVEVKGRIHFDLYPVIRRTINLPTYTLEAVYEAVFGQPKEKVYAEEITTAWETGENLERVARYSMEDAKVTYELGKEFLPMEAQLSRLIGQSLWDVSRSSTGNLVEWFLLRKAYERNELAPNKPDEKELARRRQSYEGGYVKEPERGLWENIVYLDFRSLYPSIIITHNVSPDTLNREGCKEYDVAPQVGHRFCKDFPGFIPSLLGDLLEERQKIKKKMKATIDPIERKLLDYRQRAIKILANSYYGYYGYARARWYCKECAESVTAWGREYITMTIKEIEEKYGFKVIYSDTDGFFATIPGADAETVKKKAMEFLKYINAKLPGALELEYEGFYKRGFFVTKKKYAVIDEEGKITTRGLEIVRRDWSEIAKETQARVLEALLKDGDVEKAVRIVKEVTEKLSKYEVPPEKLVIHEQITRDLKDYKATGPHVAVAKRLAARGVKIRPGTVISYIVLKGSGRIGDRAIPFDEFDPTKHKYDAEYYIENQVLPAVERILRAFGYRKEDLRYQKTRQVGLSAWLKPKGT

SEQ ID NO: 1915 - protein, 774 aa, synthetic construct
MILDTDCITEDGKPVIRIFKKENGEFKIEYDRTFEHYFYALLKDDSAIEEVKKITAERHGTVVTVKRVEKVQKKFLGRPVEVWKLYFTHFQDVPAIHDKIREHPAVIDIYEYDIPFAKRYLIDKGLVPMEGDEELKMLAFDIETLYHEGEEFAEGPILMISYADEEGARVITWKNVDLPYVDVVSTEREMIKRFLRVVKEKDPDVLITYNGDNFDFAYLKKRCEKLGINFALGRDGSEPKIQRMGDRFAVEVKGRIHFDLYPVIRRTINLPTYTLEAVYEAVFGQPKEKVYAEEITTAWETGENLERVARYSMEDAKVTYELGKEFLPMEAQLSRLIGQSLWDVSRSSTGNLVEWFLLRKAYERNELAPNKPDEKELARRRQSYEGGYVKEPERGLWENIVYLDFRSLYPSIIITHNVSPDTLNREGCKEYDVAPQVGHRFCKDFPGFIPSLLGDLLEERQKIKKKMKATIDPIERKLLDYRQRAIKILANSYYGYYGYARARWYCKECAESVTAWGREYITMTIKEIEEKYGFKVIYSDTDGFFATIPGADAETVKKKAMEFLKYINAKLPGALELEYEGFYKRGFFVTKKKYAVIDEEGKITTRGLEIVRRDWSEIAKETQARVLEALLKDGDVEKAVRIVKEVTEKLSKYEVPPEKLVIHEQITRDLKDYKATGPHVAVAKRLAARGVKIRPGTVISYIVLKGSGRIGDRAIPFDEFDPTKHKYDAEYYIENQVLPAVERILRAFGYRKEDLRYQKTRQVGLSAWLKPKGT

SEQ ID NO: 1916 - protein, 774 aa, synthetic construct
MILDTDCITEDGKPVIRIFKKENGEFKIEYDRTFEHYFYALLKDDSAIEEVKKITAERHGTVVTVKRVEKVQKKFLGRPVEVWKLYFTHFQDIPAIRDKIREHPAVIDIYEYDIPFAKRYLIDKGLVPMEGDEELKMLAFDIETLYHEGEEFAEGPILMISYADEEGARVITWKNVDLPYVDVVSTEREMIKRFLRVVKEKDPDVLITYNGDNFDFAYLKKRCEKLGINFALGRDGSEPKIQRMGDRFAVEVKGRIHFDLYPVIRRTINLPTYTLEAVYEAVFGQPKEKVYAEEITTAWETGENLERVARYSMEDAKVTYELGKEFLPMEAQLSRLIGQSLWDVSRSSTGNLVEWFLLRKAYERNELAPNKPDEKELARRRQSYEGGYVKEPERGLWENIVYLDFRSLYPSIIITHNVSPDTLNREGCKEYDVAPQVGHRFCKDFPGFIPSLLGDLLEERQKIKKKMKATIDPIERKLLDYRQRAIKILANSYYGYYGYARARWYCKECAESVTAWGREYITMTIKEIEEKYGFKVIYSDTDGFFATIPGADAETVKKKAMEFLKYINAKLPGALELEYEGFYKRGFFVTKKKYAVIDEEGKITTRGLEIVRRDWSEIAKETQARVLEALLKDGDVEKAVRIVKEVTEKLSKYEVPPEKLVIHEQITRDLKDYKATGPHVAVAKRLAARGVKIRPGTVISYIVLKGSGRIGDRAIPFDEFDPTKHKYDAEYYIENQVLPAVERILRAFGYRKEDLRYQKTRQVGLSAWLKPKGT

SEQ ID NO: 1917 - protein, 774 aa, synthetic construct
MILDTDCITEDGKPVIRIFKKENGEFKIEYDRTFEHYFYALLKDDSAIEEVKKITAERHGTVVTVKRVEKVQKKFLGRPVEVWKLYFTHFQDIPAIHDKIREHPAVIDIYEYDIPFAKRYLIDKGLVPMEGDEELKMLAFDIETLYHEGEEFAEGPILMISYADEEGARVITWKNVDLPYVDVVSTEREMIKRFLRVVKEKDPDVLITYNGDNFDFAYLKKRCEKLGINFALGRDGSEPKIQRMGDRFAVEVKGRIHFDLYPVIRRTINLPTYTLEAVYEAVFGQPKEKVYAEEITTAWETGENLERVARYSMEDAKVTYELGKEFLPMEAQLSRLIGQSLWDVSRSSTGNLVEWFLLRKAYERNELAPNKPDEKELARRRQSYEGGYVKEPERGLWENIVYLDFRSLYPSIIITHNVSPDTLNREGCKEYDVAPQVGHRFCKDFPGFIPSLLGDLLEERQKIKKKMKATIDPIERKLLDYRQRAIKILANSYYGYYGYARARWYCKECAESVTAWGREYITMTIKEIEEKYGFKVIYSDTDGFFATIPGADAETVKKKAMEFLKYINAKLPGALELEYEGFYKRGFFVTKKKYAVIDEEGKITTRGLEIVRRDWSEIAKETQARVLEALLKDGDVEKAVRIVKEVTEKLSKYEVPPEKLVIHEQITRDLKDYKATGPHVAVAKRLAARGVKIRPGTVISYIVLKGSGRIGDRAIPFDEFDPTKHKYDAEYYIENQVLPAVERILRAFGYRKEDLRYQKTRQVGLSAWLKPKGT

SEQ ID NO: 1918 - protein, 774 aa, synthetic construct
MILDTDCITEDGKPVIRIFKKENGEFKIEYDRTFEHYFYALLKDDSAIEEVKKITAERHGTVVTVKRVEKVQKKFLGRPVEVWKLYFTHWQDVPAIRDKIREHPAVIDIYEYDIPFAKRYLIDKGLVPMEGDEELKMLAFDIETLYHEGEEFAEGPILMISYADEEGARVITWKNVDLPYVDVVSTEREMIKRFLRVVKEKDPDVLITYNGDNFDFAYLKKRCEKLGINFALGRDGSEPKIQRMGDRFAVEVKGRIHFDLYPVIRRTINLPTYTLEAVYEAVFGQPKEKVYAEEITTAWETGENLERVARYSMEDAKVTYELGKEFLPMEAQLSRLIGQSLWDVSRSSTGNLVEWFLLRKAYERNELAPNKPDEKELARRRQSYEGGYVKEPERGLWENIVYLDFRSLYPSIIITHNVSPDTLNREGCKEYDVAPQVGHRFCKDFPGFIPSLLGDLLEERQKIKKKMKATIDPIERKLLDYRQRAIKILANSYYGYYGYARARWYCKECAESVTAWGREYITMTIKEIEEKYGFKVIYSDTDGFFATIPGADAETVKKKAMEFLKYINAKLPGALELEYEGFYKRGFFVTKKKYAVIDEEGKITTRGLEIVRRDWSEIAKETQARVLEALLKDGDVEKAVRIVKEVTEKLSKYEVPPEKLVIHEQITRDLKDYKATGPHVAVAKRLAARGVKIRPGTVISYIVLKGSGRIGDRAIPFDEFDPTKHKYDAEYYIENQVLPAVERILRAFGYRKEDLRYQKTRQVGLSAWLKPKGT

SEQ ID NO: 1919 - protein, 774 aa, synthetic construct
MILDTDCITEDGKPVIRIFKKENGEFKIEYDRTFEHYFYALLKDDSAIEEVKKITAERHGTVVTVKRVEKVQKKFLGRPVEVWKLYFTHWQDVPAIHDKIREHPAVIDIYEYDIPFAKRYLIDKGLVPMEGDEELKMLAFDIETLYHEGEEFAEGPILMISYADEEGARVITWKNVDLPYVDVVSTEREMIKRFLRVVKEKDPDVLITYNGDNFDFAYLKKRCEKLGINFALGRDGSEPKIQRMGDRFAVEVKGRIHFDLYPVIRRTINLPTYTLEAVYEAVFGQPKEKVYAEEITTAWETGENLERVARYSMEDAKVTYELGKEFLPMEAQLSRLIGQSLWDVSRSSTGNLVEWFLLRKAYERNELAPNKPDEKELARRRQSYEGGYVKEPERGLWENIVYLDFRSLYPSIIITHNVSPDTLNREGCKEYDVAPQVGHRFCKDFPGFIPSLLGDLLEERQKIKKKMKATIDPIERKLLDYRQRAIKILANSYYGYYGYARARWYCKECAESVTAWGREYITMTIKEIEEKYGFKVIYSDTDGFFATIPGADAETVKKKAMEFLKYINAKLPGALELEYEGFYKRGFFVTKKKYAVIDEEGKITTRGLEIVRRDWSEIAKETQARVLEALLKDGDVEKAVRIVKEVTEKLSKYEVPPEKLVIHEQITRDLKDYKATGPHVAVAKRLAARGVKIRPGTVISYIVLKGSGRIGDRAIPFDEFDPTKHKYDAEYYIENQVLPAVERILRAFGYRKEDLRYQKTRQVGLSAWLKPKGT

SEQ ID NO: 1920 - protein, 774 aa, synthetic construct
MILDTDCITEDGKPVIRIFKKENGEFKIEYDRTFEHYFYALLKDDSAIEEVKKITAERHGTVVTVKRVEKVQKKFLGRPVEVWKLYFTHWQDIPAIRDKIREHPAVIDIYEYDIPFAKRYLIDKGLVPMEGDEELKMLAFDIETLYHEGEEFAEGPILMISYADEEGARVITWKNVDLPYVDVVSTEREMIKRFLRVVKEKDPDVLITYNGDNFDFAYLKKRCEKLGINFALGRDGSEPKIQRMGDRFAVEVKGRIHFDLYPVIRRTINLPTYTLEAVYEAVFGQPKEKVYAEEITTAWETGENLERVARYSMEDAKVTYELGKEFLPMEAQLSRLIGQSLWDVSRSSTGNLVEWFLLRKAYERNELAPNKPDEKELARRRQSYEGGYVKEPERGLWENIVYLDFRSLYPSIIITHNVSPDTLNREGCKEYDVAPQVGHRFCKDFPGFIPSLLGDLLEERQKIKKKMKATIDPIERKLLDYRQRAIKILANSYYGYYGYARARWYCKECAESVTAWGREYITMTIKEIEEKYGFKVIYSDTDGFFATIPGADAETVKKKAMEFLKYINAKLPGALELEYEGFYKRGFFVTKKKYAVIDEEGKITTRGLEIVRRDWSEIAKETQARVLEALLKDGDVEKAVRIVKEVTEKLSKYEVPPEKLVIHEQITRDLKDYKATGPHVAVAKRLAARGVKIRPGTVISYIVLKGSGRIGDRAIPFDEFDPTKHKYDAEYYIENQVLPAVERILRAFGYRKEDLRYQKTRQVGLSAWLKPKGT

SEQ ID NO: 1921 - protein, 774 aa, synthetic construct
MILDTDCITEDGKPVIRIFKKENGEFKIEYDRTFEHYFYALLKDDSAIEEVKKITAERHGTVVTVKRVEKVQKKFLGRPVEVWKLYFTHPQDIPAIRDKIREHPAVIDIYEYDIPFAKRYLIDKGLVPMEGDEELKMLAFDIETLYHEGEEFAEGPILMISYADEEGARVITWKNVDLPYVDVVSTEREMIKRFLRVVKEKDPDVLITYNGDNFDFAYLKKRCEKLGINFALGRDGSEPKIQRMGDRFAVEVKGRIHFDLYPVIRRTINLPTYTLEAVYEAVFGQPKEKVYAEEITTAWETGENLERVARYSMEDAKVTYELGKEFLPMEAQLSRLIGQSLWDVSRSSTGNLVEWFLLRKAYERNELAPNKPDEKELARRRQSYEGGYVKEPERGLWENIVYLDFRSLYPSIIITHNVSPDTLNREGCKEYDVAPQVGHRFCKDFPGFIPSLLGDLLEERQKIKKKMKATIDPIERKLLDYRQRAIKILANSYYGYYGYARARWYCKECAESVTAWGREYITMTIKEIEEKYGFKVIYSDTDGFFATIPGADAETVKKKAMEFLKYINAKLPGALELEYEGFYKRGFFVTKKKYAVIDEEGKITTRGLEIVRRDWSEIAKETQARVLEALLKDGDVEKAVRIVKEVTEKLSKYEVPPEKLVIHEQITRDLKDYKATGPHVAVAKRLAARGVKIRPGTVISYIVLKGSGRIGDRAIPFDEFDPTKHKYDAEYYIENQVLPAVERILRAFGYRKEDLRYQKTRQVGLSAWLKPKGT

SEQ ID NO: 1922 - protein, 774 aa, synthetic construct
MILDTDCITEDGKPVIRIFKKENGEFKIEYDRTFERYFYALLKDDSAIEEVKKITAERHGTVVTVKRVEKVQKKFLGRPVEVWKLYFTHPQDVPAIADKIREHPAVIDIYEYDIPFAKRYLIDKGLVPMEGDEELKMLAFDIETLYHEGEEFAEGPILMISYADEEGARVITWKNVDLPYVDVVSTEREMIKRFLRVVKEKDPDVLITYNGDNFDFAYLKKRCEKLGINFALGRDGSEPKIQRMGDRFAVEVKGRIHFDLYPVIRRTINLPTYTLEAVYEAVFGQPKEKVYAEEITTAWETGENLERVARYSMEDAKVTYELGKEFLPMEAQLSRLIGQSLWDVSRSSTGNLVEWFLLRKAYERNELAPNKPDEKELARRRQSYEGGYVKEPERGLWENIVYLDFRSLYPSIIITHNVSPDTLNREGCKEYDVAPQVGHRFCKDFPGFIPSLLGDLLEERQKIKKKMKATIDPIERKLLDYRQRAIKILANSYYGYYGYARARWYCKECAESVTAWGREYITMTIKEIEEKYGFKVIYSDTDGFFATIPGADAETVKKKAMEFLKYINAKLPGALELEYEGFYKRGFFVTKKKYAVIDEEGKITTRGLEIVRRDWSEIAKETQARVLEALLKDGDVEKAVRIVKEVTEKLSKYEVPPEKLVIHEQITRDLKDYKATGPHVAVAKRLAARGVKIRPGTVISYIVLKGSGRIGDRAIPFDEFDPTKHKYDAEYYIENQVLPAVERILRAFGYRKEDLRYQKTRQVGLSAWLKPKGT

SEQ ID NO: 1923 - protein, 774 aa, synthetic construct
MILDTDCITEDGKPVIRIFKKENGEFKIEYDRTFERYFYALLKDDSAIEEVKKITAERHGTVVTVKRVEKVQKKFLGRPVEVWKLYFTHPQDIPAIADKIREHPAVIDIYEYDIPFAKRYLIDKGLVPMEGDEELKMLAFDIETLYHEGEEFAEGPILMISYADEEGARVITWKNVDLPYVDVVSTEREMIKRFLRVVKEKDPDVLITYNGDNFDFAYLKKRCEKLGINFALGRDGSEPKIQRMGDRFAVEVKGRIHFDLYPVIRRTINLPTYTLEAVYEAVFGQPKEKVYAEEITTAWETGENLERVARYSMEDAKVTYELGKEFLPMEAQLSRLIGQSLWDVSRSSTGNLVEWFLLRKAYERNELAPNKPDEKELARRRQSYEGGYVKEPERGLWENIVYLDFRSLYPSIIITHNVSPDTLNREGCKEYDVAPQVGHRFCKDFPGFIPSLLGDLLEERQKIKKKMKATIDPIERKLLDYRQRAIKILANSYYGYYGYARARWYCKECAESVTAWGREYITMTIKEIEEKYGFKVIYSDTDGFFATIPGADAETVKKKAMEFLKYINAKLPGALELEYEGFYKRGFFVTKKKYAVIDEEGKITTRGLEIVRRDWSEIAKETQARVLEALLKDGDVEKAVRIVKEVTEKLSKYEVPPEKLVIHEQITRDLKDYKATGPHVAVAKRLAARGVKIRPGTVISYIVLKGSGRIGDRAIPFDEFDPTKHKYDAEYYIENQVLPAVERILRAFGYRKEDLRYQKTRQVGLSAWLKPKGT

SEQ ID NO: 1924 - protein, 774 aa, synthetic construct
MILDTDCITEDGKPVIRIFKKENGEFKIEYDRTFESYFYALLKDDSAIEEVKKITAERHGTVVTVKRVEKVQKKFLGRPVEVWKLYFTHFQDVPAIFDKIREHPAVIDIYEYDIPFAKRYLIDKGLVPMEGDEELKMLAFDIETLYHEGEEFAEGPILMISYADEEGARVITWKNVDLPYVDVVSTEREMIKRFLRVVKEKDPDVLITYNGDNFDFAYLKKRCEKLGINFALGRDGSEPKIQRMGDRFAVEVKGRIHFDLYPVIRRTINLPTYTLEAVYEAVFGQPKEKVYAEEITTAWETGENLERVARYSMEDAKVTYELGKEFLPMEAQLSRLIGQSLWDVSRSSTGNLVEWFLLRKAYERNELAPNKPDEKELARRRQSYEGGYVKEPERGLWENIVYLDFRSLYPSIIITHNVSPDTLNREGCKEYDVAPQVGHRFCKDFPGFIPSLLGDLLEERQKIKKKMKATIDPIERKLLDYRQRAIKILANSYYGYYGYARARWYCKECAESVTAWGREYITMTIKEIEEKYGFKVIYSDTDGFFATIPGADAETVKKKAMEFLKYINAKLPGALELEYEGFYKRGFFVTKKKYAVIDEEGKITTRGLEIVRRDWSEIAKETQARVLEALLKDGDVEKAVRIVKEVTEKLSKYEVPPEKLVIHEQITRDLKDYKATGPHVAVAKRLAARGVKIRPGTVISYIVLKGSGRIGDRAIPFDEFDPTKHKYDAEYYIENQVLPAVERILRAFGYRKEDLRYQKTRQVGLSAWLKPKGT

SEQ ID NO: 1925 - protein, 774 aa, synthetic construct
MILDTDCITEDGKPVIRIFKKENGEFKIEYDRTFESYFYALLKDDSAIEEVKKITAERHGTVVTVKRVEKVQKKFLGRPVEVWKLYFTHFQDIPAIRDKIREHPAVIDIYEYDIPFAKRYLIDKGLVPMEGDEELKMLAFDIETLYHEGEEFAEGPILMISYADEEGARVITWKNVDLPYVDVVSTEREMIKRFLRVVKEKDPDVLITYNGDNFDFAYLKKRCEKLGINFALGRDGSEPKIQRMGDRFAVEVKGRIHFDLYPVIRRTINLPTYTLEAVYEAVFGQPKEKVYAEEITTAWETGENLERVARYSMEDAKVTYELGKEFLPMEAQLSRLIGQSLWDVSRSSTGNLVEWFLLRKAYERNELAPNKPDEKELARRRQSYEGGYVKEPERGLWENIVYLDFRSLYPSIIITHNVSPDTLNREGCKEYDVAPQVGHRFCKDFPGFIPSLLGDLLEERQKIKKKMKATIDPIERKLLDYRQRAIKILANSYYGYYGYARARWYCKECAESVTAWGREYITMTIKEIEEKYGFKVIYSDTDGFFATIPGADAETVKKKAMEFLKYINAKLPGALELEYEGFYKRGFFVTKKKYAVIDEEGKITTRGLEIVRRDWSEIAKETQARVLEALLKDGDVEKAVRIVKEVTEKLSKYEVPPEKLVIHEQITRDLKDYKATGPHVAVAKRLAARGVKIRPGTVISYIVLKGSGRIGDRAIPFDEFDPTKHKYDAEYYIENQVLPAVERILRAFGYRKEDLRYQKTRQVGLSAWLKPKGT

SEQ ID NO: 1926 - protein, 774 aa, synthetic construct
MILDTDCITEDGKPVIRIFKKENGEFKIEYDRTFESYFYALLKDDSAIEEVKKITAERHGTVVTVKRVEKVQKKFLGRPVEVWKLYFTHFQDIPAIADKIREHPAVIDIYEYDIPFAKRYLIDKGLVPMEGDEELKMLAFDIETLYHEGEEFAEGPILMISYADEEGARVITWKNVDLPYVDVVSTEREMIKRFLRVVKEKDPDVLITYNGDNFDFAYLKKRCEKLGINFALGRDGSEPKIQRMGDRFAVEVKGRIHFDLYPVIRRTINLPTYTLEAVYEAVFGQPKEKVYAEEITTAWETGENLERVARYSMEDAKVTYELGKEFLPMEAQLSRLIGQSLWDVSRSSTGNLVEWFLLRKAYERNELAPNKPDEKELARRRQSYEGGYVKEPERGLWENIVYLDFRSLYPSIIITHNVSPDTLNREGCKEYDVAPQVGHRFCKDFPGFIPSLLGDLLEERQKIKKKMKATIDPIERKLLDYRQRAIKILANSYYGYYGYARARWYCKECAESVTAWGREYITMTIKEIEEKYGFKVIYSDTDGFFATIPGADAETVKKKAMEFLKYINAKLPGALELEYEGFYKRGFFVTKKKYAVIDEEGKITTRGLEIVRRDWSEIAKETQARVLEALLKDGDVEKAVRIVKEVTEKLSKYEVPPEKLVIHEQITRDLKDYKATGPHVAVAKRLAARGVKIRPGTVISYIVLKGSGRIGDRAIPFDEFDPTKHKYDAEYYIENQVLPAVERILRAFGYRKEDLRYQKTRQVGLSAWLKPKGT

SEQ ID NO: 1927 - protein, 774 aa, synthetic construct
MILDTDCITEDGKPVIRIFKKENGEFKIEYDRTFESYFYALLKDDSAIEEVKKITAERHGTVVTVKRVEKVQKKFLGRPVEVWKLYFTHIQDVPAIRDKIREHPAVIDIYEYDIPFAKRYLIDKGLVPMEGDEELKMLAFDIETLYHEGEEFAEGPILMISYADEEGARVITWKNVDLPYVDVVSTEREMIKRFLRVVKEKDPDVLITYNGDNFDFAYLKKRCEKLGINFALGRDGSEPKIQRMGDRFAVEVKGRIHFDLYPVIRRTINLPTYTLEAVYEAVFGQPKEKVYAEEITTAWETGENLERVARYSMEDAKVTYELGKEFLPMEAQLSRLIGQSLWDVSRSSTGNLVEWFLLRKAYERNELAPNKPDEKELARRRQSYEGGYVKEPERGLWENIVYLDFRSLYPSIIITHNVSPDTLNREGCKEYDVAPQVGHRFCKDFPGFIPSLLGDLLEERQKIKKKMKATIDPIERKLLDYRQRAIKILANSYYGYYGYARARWYCKECAESVTAWGREYITMTIKEIEEKYGFKVIYSDTDGFFATIPGADAETVKKKAMEFLKYINAKLPGALELEYEGFYKRGFFVTKKKYAVIDEEGKITTRGLEIVRRDWSEIAKETQARVLEALLKDGDVEKAVRIVKEVTEKLSKYEVPPEKLVIHEQITRDLKDYKATGPHVAVAKRLAARGVKIRPGTVISYIVLKGSGRIGDRAIPFDEFDPTKHKYDAEYYIENQVLPAVERILRAFGYRKEDLRYQKTRQVGLSAWLKPKGT

SEQ ID NO: 1928 - protein, 774 aa, synthetic construct
MILDTDCITEDGKPVIRIFKKENGEFKIEYDRTFESYFYALLKDDSAIEEVKKITAERHGTVVTVKRVEKVQKKFLGRPVEVWKLYFTHWQDVPAIRDKIREHPAVIDIYEYDIPFAKRYLIDKGLVPMEGDEELKMLAFDIETLYHEGEEFAEGPILMISYADEEGARVITWKNVDLPYVDVVSTEREMIKRFLRVVKEKDPDVLITYNGDNFDFAYLKKRCEKLGINFALGRDGSEPKIQRMGDRFAVEVKGRIHFDLYPVIRRTINLPTYTLEAVYEAVFGQPKEKVYAEEITTAWETGENLERVARYSMEDAKVTYELGKEFLPMEAQLSRLIGQSLWDVSRSSTGNLVEWFLLRKAYERNELAPNKPDEKELARRRQSYEGGYVKEPERGLWENIVYLDFRSLYPSIIITHNVSPDTLNREGCKEYDVAPQVGHRFCKDFPGFIPSLLGDLLEERQKIKKKMKATIDPIERKLLDYRQRAIKILANSYYGYYGYARARWYCKECAESVTAWGREYITMTIKEIEEKYGFKVIYSDTDGFFATIPGADAETVKKKAMEFLKYINAKLPGALELEYEGFYKRGFFVTKKKYAVIDEEGKITTRGLEIVRRDWSEIAKETQARVLEALLKDGDVEKAVRIVKEVTEKLSKYEVPPEKLVIHEQITRDLKDYKATGPHVAVAKRLAARGVKIRPGTVISYIVLKGSGRIGDRAIPFDEFDPTKHKYDAEYYIENQVLPAVERILRAFGYRKEDLRYQKTRQVGLSAWLKPKGT

SEQ ID NO: 1929 - protein, 774 aa, synthetic construct
MILDTDCITEDGKPVIRIFKKENGEFKIEYDRTFESYFYALLKDDSAIEEVKKITAERHGTVVTVKRVEKVQKKFLGRPVEVWKLYFTHWQDIPAIRDKIREHPAVIDIYEYDIPFAKRYLIDKGLVPMEGDEELKMLAFDIETLYHEGEEFAEGPILMISYADEEGARVITWKNVDLPYVDVVSTEREMIKRFLRVVKEKDPDVLITYNGDNFDFAYLKKRCEKLGINFALGRDGSEPKIQRMGDRFAVEVKGRIHFDLYPVIRRTINLPTYTLEAVYEAVFGQPKEKVYAEEITTAWETGENLERVARYSMEDAKVTYELGKEFLPMEAQLSRLIGQSLWDVSRSSTGNLVEWFLLRKAYERNELAPNKPDEKELARRRQSYEGGYVKEPERGLWENIVYLDFRSLYPSIIITHNVSPDTLNREGCKEYDVAPQVGHRFCKDFPGFIPSLLGDLLEERQKIKKKMKATIDPIERKLLDYRQRAIKILANSYYGYYGYARARWYCKECAESVTAWGREYITMTIKEIEEKYGFKVIYSDTDGFFATIPGADAETVKKKAMEFLKYINAKLPGALELEYEGFYKRGFFVTKKKYAVIDEEGKITTRGLEIVRRDWSEIAKETQARVLEALLKDGDVEKAVRIVKEVTEKLSKYEVPPEKLVIHEQITRDLKDYKATGPHVAVAKRLAARGVKIRPGTVISYIVLKGSGRIGDRAIPFDEFDPTKHKYDAEYYIENQVLPAVERILRAFGYRKEDLRYQKTRQVGLSAWLKPKGT

SEQ ID NO: 1930 - protein, 774 aa, synthetic construct
MILDTDCITEDGKPVIRIFKKENGEFKIEYDRTFESYFYALLKDDSAIEEVKKITAERHGTVVTVKRVEKVQKKFLGRPVEVWKLYFTHWQDQPAIRDKIREHPAVIDIYEYDIPFAKRYLIDKGLVPMEGDEELKMLAFDIETLYHEGEEFAEGPILMISYADEEGARVITWKNVDLPYVDVVSTEREMIKRFLRVVKEKDPDVLITYNGDNFDFAYLKKRCEKLGINFALGRDGSEPKIQRMGDRFAVEVKGRIHFDLYPVIRRTINLPTYTLEAVYEAVFGQPKEKVYAEEITTAWETGENLERVARYSMEDAKVTYELGKEFLPMEAQLSRLIGQSLWDVSRSSTGNLVEWFLLRKAYERNELAPNKPDEKELARRRQSYEGGYVKEPERGLWENIVYLDFRSLYPSIIITHNVSPDTLNREGCKEYDVAPQVGHRFCKDFPGFIPSLLGDLLEERQKIKKKMKATIDPIERKLLDYRQRAIKILANSYYGYYGYARARWYCKECAESVTAWGREYITMTIKEIEEKYGFKVIYSDTDGFFATIPGADAETVKKKAMEFLKYINAKLPGALELEYEGFYKRGFFVTKKKYAVIDEEGKITTRGLEIVRRDWSEIAKETQARVLEALLKDGDVEKAVRIVKEVTEKLSKYEVPPEKLVIHEQITRDLKDYKATGPHVAVAKRLAARGVKIRPGTVISYIVLKGSGRIGDRAIPFDEFDPTKHKYDAEYYIENQVLPAVERILRAFGYRKEDLRYQKTRQVGLSAWLKPKGT

SEQ ID NO: 1931 - protein, 774 aa, synthetic construct
MILDTDCITEDGKPVIRIFKKENGEFKIEYDRTFESYFYALLKDDSAIEEVKKITAERHGTVVTVKRVEKVQKKFLGRPVEVWKLYFTHYQDVPAIADKIREHPAVIDIYEYDIPFAKRYLIDKGLVPMEGDEELKMLAFDIETLYHEGEEFAEGPILMISYADEEGARVITWKNVDLPYVDVVSTEREMIKRFLRVVKEKDPDVLITYNGDNFDFAYLKKRCEKLGINFALGRDGSEPKIQRMGDRFAVEVKGRIHFDLYPVIRRTINLPTYTLEAVYEAVFGQPKEKVYAEEITTAWETGENLERVARYSMEDAKVTYELGKEFLPMEAQLSRLIGQSLWDVSRSSTGNLVEWFLLRKAYERNELAPNKPDEKELARRRQSYEGGYVKEPERGLWENIVYLDFRSLYPSIIITHNVSPDTLNREGCKEYDVAPQVGHRFCKDFPGFIPSLLGDLLEERQKIKKKMKATIDPIERKLLDYRQRAIKILANSYYGYYGYARARWYCKECAESVTAWGREYITMTIKEIEEKYGFKVIYSDTDGFFATIPGADAETVKKKAMEFLKYINAKLPGALELEYEGFYKRGFFVTKKKYAVIDEEGKITTRGLEIVRRDWSEIAKETQARVLEALLKDGDVEKAVRIVKEVTEKLSKYEVPPEKLVIHEQITRDLKDYKATGPHVAVAKRLAARGVKIRPGTVISYIVLKGSGRIGDRAIPFDEFDPTKHKYDAEYYIENQVLPAVERILRAFGYRKEDLRYQKTRQVGLSAWLKPKGT

SEQ ID NO: 1932 - protein, 774 aa, synthetic construct
MILDTDCITEDGKPVIRIFKKENGEFKIEYDRTFESYFYALLKDDSAIEEVKKITAERHGTVVTVKRVEKVQKKFLGRPVEVWKLYFTHYQDIPAIRDKIREHPAVIDIYEYDIPFAKRYLIDKGLVPMEGDEELKMLAFDIETLYHEGEEFAEGPILMISYADEEGARVITWKNVDLPYVDVVSTEREMIKRFLRVVKEKDPDVLITYNGDNFDFAYLKKRCEKLGINFALGRDGSEPKIQRMGDRFAVEVKGRIHFDLYPVIRRTINLPTYTLEAVYEAVFGQPKEKVYAEEITTAWETGENLERVARYSMEDAKVTYELGKEFLPMEAQLSRLIGQSLWDVSRSSTGNLVEWFLLRKAYERNELAPNKPDEKELARRRQSYEGGYVKEPERGLWENIVYLDFRSLYPSIIITHNVSPDTLNREGCKEYDVAPQVGHRFCKDFPGFIPSLLGDLLEERQKIKKKMKATIDPIERKLLDYRQRAIKILANSYYGYYGYARARWYCKECAESVTAWGREYITMTIKEIEEKYGFKVIYSDTDGFFATIPGADAETVKKKAMEFLKYINAKLPGALELEYEGFYKRGFFVTKKKYAVIDEEGKITTRGLEIVRRDWSEIAKETQARVLEALLKDGDVEKAVRIVKEVTEKLSKYEVPPEKLVIHEQITRDLKDYKATGPHVAVAKRLAARGVKIRPGTVISYIVLKGSGRIGDRAIPFDEFDPTKHKYDAEYYIENQVLPAVERILRAFGYRKEDLRYQKTRQVGLSAWLKPKGT

SEQ ID NO: 1933 - protein, 774 aa, synthetic construct
MILDTDCITEDGKPVIRIFKKENGEFKIEYDRTFEWYFYALLKDDSAIEEVKKITAERHGTVVTVKRVEKVQKKFLGRPVEVWKLYFTHPQDVPAIRDKIREHPAVIDIYEYDIPFAKRYLIDKGLVPMEGDEELKMLAFDIETLYHEGEEFAEGPILMISYADEEGARVITWKNVDLPYVDVVSTEREMIKRFLRVVKEKDPDVLITYNGDNFDFAYLKKRCEKLGINFALGRDGSEPKIQRMGDRFAVEVKGRIHFDLYPVIRRTINLPTYTLEAVYEAVFGQPKEKVYAEEITTAWETGENLERVARYSMEDAKVTYELGKEFLPMEAQLSRLIGQSLWDVSRSSTGNLVEWFLLRKAYERNELAPNKPDEKELARRRQSYEGGYVKEPERGLWENIVYLDFRSLYPSIIITHNVSPDTLNREGCKEYDVAPQVGHRFCKDFPGFIPSLLGDLLEERQKIKKKMKATIDPIERKLLDYRQRAIKILANSYYGYYGYARARWYCKECAESVTAWGREYITMTIKEIEEKYGFKVIYSDTDGFFATIPGADAETVKKKAMEFLKYINAKLPGALELEYEGFYKRGFFVTKKKYAVIDEEGKITTRGLEIVRRDWSEIAKETQARVLEALLKDGDVEKAVRIVKEVTEKLSKYEVPPEKLVIHEQITRDLKDYKATGPHVAVAKRLAARGVKIRPGTVISYIVLKGSGRIGDRAIPFDEFDPTKHKYDAEYYIENQVLPAVERILRAFGYRKEDLRYQKTRQVGLSAWLKPKGT

SEQ ID NO: 1934 - protein, 774 aa, synthetic construct
MILDTDCITEDGKPVIRIFKKENGEFKIEYDRTFEWYFYALLKDDSAIEEVKKITAERHGTVVTVKRVEKVQKKFLGRPVEVWKLYFTHFQDVPAIRDKIREHPAVIDIYEYDIPFAKRYLIDKGLVPMEGDEELKMLAFDIETLYHEGEEFAEGPILMISYADEEGARVITWKNVDLPYVDVVSTEREMIKRFLRVVKEKDPDVLITYNGDNFDFAYLKKRCEKLGINFALGRDGSEPKIQRMGDRFAVEVKGRIHFDLYPVIRRTINLPTYTLEAVYEAVFGQPKEKVYAEEITTAWETGENLERVARYSMEDAKVTYELGKEFLPMEAQLSRLIGQSLWDVSRSSTGNLVEWFLLRKAYERNELAPNKPDEKELARRRQSYEGGYVKEPERGLWENIVYLDFRSLYPSIIITHNVSPDTLNREGCKEYDVAPQVGHRFCKDFPGFIPSLLGDLLEERQKIKKKMKATIDPIERKLLDYRQRAIKILANSYYGYYGYARARWYCKECAESVTAWGREYITMTIKEIEEKYGFKVIYSDTDGFFATIPGADAETVKKKAMEFLKYINAKLPGALELEYEGFYKRGFFVTKKKYAVIDEEGKITTRGLEIVRRDWSEIAKETQARVLEALLKDGDVEKAVRIVKEVTEKLSKYEVPPEKLVIHEQITRDLKDYKATGPHVAVAKRLAARGVKIRPGTVISYIVLKGSGRIGDRAIPFDEFDPTKHKYDAEYYIENQVLPAVERILRAFGYRKEDLRYQKTRQVGLSAWLKPKGT

SEQ ID NO: 1935 - protein, 774 aa, synthetic construct
MILDTDCITEDGKPVIRIFKKENGEFKIEYDRTFEWYFYALLKDDSAIEEVKKITAERHGTVVTVKRVEKVQKKFLGRPVEVWKLYFTHFQDIPAIRDKIREHPAVIDIYEYDIPFAKRYLIDKGLVPMEGDEELKMLAFDIETLYHEGEEFAEGPILMISYADEEGARVITWKNVDLPYVDVVSTEREMIKRFLRVVKEKDPDVLITYNGDNFDFAYLKKRCEKLGINFALGRDGSEPKIQRMGDRFAVEVKGRIHFDLYPVIRRTINLPTYTLEAVYEAVFGQPKEKVYAEEITTAWETGENLERVARYSMEDAKVTYELGKEFLPMEAQLSRLIGQSLWDVSRSSTGNLVEWFLLRKAYERNELAPNKPDEKELARRRQSYEGGYVKEPERGLWENIVYLDFRSLYPSIIITHNVSPDTLNREGCKEYDVAPQVGHRFCKDFPGFIPSLLGDLLEERQKIKKKMKATIDPIERKLLDYRQRAIKILANSYYGYYGYARARWYCKECAESVTAWGREYITMTIKEIEEKYGFKVIYSDTDGFFATIPGADAETVKKKAMEFLKYINAKLPGALELEYEGFYKRGFFVTKKKYAVIDEEGKITTRGLEIVRRDWSEIAKETQARVLEALLKDGDVEKAVRIVKEVTEKLSKYEVPPEKLVIHEQITRDLKDYKATGPHVAVAKRLAARGVKIRPGTVISYIVLKGSGRIGDRAIPFDEFDPTKHKYDAEYYIENQVLPAVERILRAFGYRKEDLRYQKTRQVGLSAWLKPKGT

SEQ ID NO: 1936 - protein, 774 aa, synthetic construct
MILDTDCITEDGKPVIRIFKKENGEFKIEYDRTFEWYFYALLKDDSAIEEVKKITAERHGTVVTVKRVEKVQKKFLGRPVEVWKLYFTHFQDIPAIADKIREHPAVIDIYEYDIPFAKRYLIDKGLVPMEGDEELKMLAFDIETLYHEGEEFAEGPILMISYADEEGARVITWKNVDLPYVDVVSTEREMIKRFLRVVKEKDPDVLITYNGDNFDFAYLKKRCEKLGINFALGRDGSEPKIQRMGDRFAVEVKGRIHFDLYPVIRRTINLPTYTLEAVYEAVFGQPKEKVYAEEITTAWETGENLERVARYSMEDAKVTYELGKEFLPMEAQLSRLIGQSLWDVSRSSTGNLVEWFLLRKAYERNELAPNKPDEKELARRRQSYEGGYVKEPERGLWENIVYLDFRSLYPSIIITHNVSPDTLNREGCKEYDVAPQVGHRFCKDFPGFIPSLLGDLLEERQKIKKKMKATIDPIERKLLDYRQRAIKILANSYYGYYGYARARWYCKECAESVTAWGREYITMTIKEIEEKYGFKVIYSDTDGFFATIPGADAETVKKKAMEFLKYINAKLPGALELEYEGFYKRGFFVTKKKYAVIDEEGKITTRGLEIVRRDWSEIAKETQARVLEALLKDGDVEKAVRIVKEVTEKLSKYEVPPEKLVIHEQITRDLKDYKATGPHVAVAKRLAARGVKIRPGTVISYIVLKGSGRIGDRAIPFDEFDPTKHKYDAEYYIENQVLPAVERILRAFGYRKEDLRYQKTRQVGLSAWLKPKGT

SEQ ID NO: 1937 - protein, 774 aa, synthetic construct
MILDTDCITEDGKPVIRIFKKENGEFKIEYDRTFEWYFYALLKDDSAIEEVKKITAERHGTVVTVKRVEKVQKKFLGRPVEVWKLYFTHFQDIPAIHDKIREHPAVIDIYEYDIPFAKRYLIDKGLVPMEGDEELKMLAFDIETLYHEGEEFAEGPILMISYADEEGARVITWKNVDLPYVDVVSTEREMIKRFLRVVKEKDPDVLITYNGDNFDFAYLKKRCEKLGINFALGRDGSEPKIQRMGDRFAVEVKGRIHFDLYPVIRRTINLPTYTLEAVYEAVFGQPKEKVYAEEITTAWETGENLERVARYSMEDAKVTYELGKEFLPMEAQLSRLIGQSLWDVSRSSTGNLVEWFLLRKAYERNELAPNKPDEKELARRRQSYEGGYVKEPERGLWENIVYLDFRSLYPSIIITHNVSPDTLNREGCKEYDVAPQVGHRFCKDFPGFIPSLLGDLLEERQKIKKKMKATIDPIERKLLDYRQRAIKILANSYYGYYGYARARWYCKECAESVTAWGREYITMTIKEIEEKYGFKVIYSDTDGFFATIPGADAETVKKKAMEFLKYINAKLPGALELEYEGFYKRGFFVTKKKYAVIDEEGKITTRGLEIVRRDWSEIAKETQARVLEALLKDGDVEKAVRIVKEVTEKLSKYEVPPEKLVIHEQITRDLKDYKATGPHVAVAKRLAARGVKIRPGTVISYIVLKGSGRIGDRAIPFDEFDPTKHKYDAEYYIENQVLPAVERILRAFGYRKEDLRYQKTRQVGLSAWLKPKGT

SEQ ID NO: 1938 - protein, 774 aa, synthetic construct
MILDTDCITEDGKPVIRIFKKENGEFKIEYDRTFEWYFYALLKDDSAIEEVKKITAERHGTVVTVKRVEKVQKKFLGRPVEVWKLYFTHWQDVPAIRDKIREHPAVIDIYEYDIPFAKRYLIDKGLVPMEGDEELKMLAFDIETLYHEGEEFAEGPILMISYADEEGARVITWKNVDLPYVDVVSTEREMIKRFLRVVKEKDPDVLITYNGDNFDFAYLKKRCEKLGINFALGRDGSEPKIQRMGDRFAVEVKGRIHFDLYPVIRRTINLPTYTLEAVYEAVFGQPKEKVYAEEITTAWETGENLERVARYSMEDAKVTYELGKEFLPMEAQLSRLIGQSLWDVSRSSTGNLVEWFLLRKAYERNELAPNKPDEKELARRRQSYEGGYVKEPERGLWENIVYLDFRSLYPSIIITHNVSPDTLNREGCKEYDVAPQVGHRFCKDFPGFIPSLLGDLLEERQKIKKKMKATIDPIERKLLDYRQRAIKILANSYYGYYGYARARWYCKECAESVTAWGREYITMTIKEIEEKYGFKVIYSDTDGFFATIPGADAETVKKKAMEFLKYINAKLPGALELEYEGFYKRGFFVTKKKYAVIDEEGKITTRGLEIVRRDWSEIAKETQARVLEALLKDGDVEKAVRIVKEVTEKLSKYEVPPEKLVIHEQITRDLKDYKATGPHVAVAKRLAARGVKIRPGTVISYIVLKGSGRIGDRAIPFDEFDPTKHKYDAEYYIENQVLPAVERILRAFGYRKEDLRYQKTRQVGLSAWLKPKGT

SEQ ID NO: 1939 - protein, 774 aa, synthetic construct
MILDTDCITEDGKPVIRIFKKENGEFKIEYDRTFEWYFYALLKDDSAIEEVKKITAERHGTVVTVKRVEKVQKKFLGRPVEVWKLYFTHWQDVPAIADKIREHPAVIDIYEYDIPFAKRYLIDKGLVPMEGDEELKMLAFDIETLYHEGEEFAEGPILMISYADEEGARVITWKNVDLPYVDVVSTEREMIKRFLRVVKEKDPDVLITYNGDNFDFAYLKKRCEKLGINFALGRDGSEPKIQRMGDRFAVEVKGRIHFDLYPVIRRTINLPTYTLEAVYEAVFGQPKEKVYAEEITTAWETGENLERVARYSMEDAKVTYELGKEFLPMEAQLSRLIGQSLWDVSRSSTGNLVEWFLLRKAYERNELAPNKPDEKELARRRQSYEGGYVKEPERGLWENIVYLDFRSLYPSIIITHNVSPDTLNREGCKEYDVAPQVGHRFCKDFPGFIPSLLGDLLEERQKIKKKMKATIDPIERKLLDYRQRAIKILANSYYGYYGYARARWYCKECAESVTAWGREYITMTIKEIEEKYGFKVIYSDTDGFFATIPGADAETVKKKAMEFLKYINAKLPGALELEYEGFYKRGFFVTKKKYAVIDEEGKITTRGLEIVRRDWSEIAKETQARVLEALLKDGDVEKAVRIVKEVTEKLSKYEVPPEKLVIHEQITRDLKDYKATGPHVAVAKRLAARGVKIRPGTVISYIVLKGSGRIGDRAIPFDEFDPTKHKYDAEYYIENQVLPAVERILRAFGYRKEDLRYQKTRQVGLSAWLKPKGT

SEQ ID NO: 1940 - protein, 774 aa, synthetic construct
MILDTDCITEDGKPVIRIFKKENGEFKIEYDRTFEWYFYALLKDDSAIEEVKKITAERHGTVVTVKRVEKVQKKFLGRPVEVWKLYFTHWQDVPAIHDKIREHPAVIDIYEYDIPFAKRYLIDKGLVPMEGDEELKMLAFDIETLYHEGEEFAEGPILMISYADEEGARVITWKNVDLPYVDVVSTEREMIKRFLRVVKEKDPDVLITYNGDNFDFAYLKKRCEKLGINFALGRDGSEPKIQRMGDRFAVEVKGRIHFDLYPVIRRTINLPTYTLEAVYEAVFGQPKEKVYAEEITTAWETGENLERVARYSMEDAKVTYELGKEFLPMEAQLSRLIGQSLWDVSRSSTGNLVEWFLLRKAYERNELAPNKPDEKELARRRQSYEGGYVKEPERGLWENIVYLDFRSLYPSIIITHNVSPDTLNREGCKEYDVAPQVGHRFCKDFPGFIPSLLGDLLEERQKIKKKMKATIDPIERKLLDYRQRAIKILANSYYGYYGYARARWYCKECAESVTAWGREYITMTIKEIEEKYGFKVIYSDTDGFFATIPGADAETVKKKAMEFLKYINAKLPGALELEYEGFYKRGFFVTKKKYAVIDEEGKITTRGLEIVRRDWSEIAKETQARVLEALLKDGDVEKAVRIVKEVTEKLSKYEVPPEKLVIHEQITRDLKDYKATGPHVAVAKRLAARGVKIRPGTVISYIVLKGSGRIGDRAIPFDEFDPTKHKYDAEYYIENQVLPAVERILRAFGYRKEDLRYQKTRQVGLSAWLKPKGT

SEQ ID NO: 1941 - protein, 774 aa, synthetic construct
MILDTDCITEDGKPVIRIFKKENGEFKIEYDRTFEWYFYALLKDDSAIEEVKKITAERHGTVVTVKRVEKVQKKFLGRPVEVWKLYFTHWQDIPAIRDKIREHPAVIDIYEYDIPFAKRYLIDKGLVPMEGDEELKMLAFDIETLYHEGEEFAEGPILMISYADEEGARVITWKNVDLPYVDVVSTEREMIKRFLRVVKEKDPDVLITYNGDNFDFAYLKKRCEKLGINFALGRDGSEPKIQRMGDRFAVEVKGRIHFDLYPVIRRTINLPTYTLEAVYEAVFGQPKEKVYAEEITTAWETGENLERVARYSMEDAKVTYELGKEFLPMEAQLSRLIGQSLWDVSRSSTGNLVEWFLLRKAYERNELAPNKPDEKELARRRQSYEGGYVKEPERGLWENIVYLDFRSLYPSIIITHNVSPDTLNREGCKEYDVAPQVGHRFCKDFPGFIPSLLGDLLEERQKIKKKMKATIDPIERKLLDYRQRAIKILANSYYGYYGYARARWYCKECAESVTAWGREYITMTIKEIEEKYGFKVIYSDTDGFFATIPGADAETVKKKAMEFLKYINAKLPGALELEYEGFYKRGFFVTKKKYAVIDEEGKITTRGLEIVRRDWSEIAKETQARVLEALLKDGDVEKAVRIVKEVTEKLSKYEVPPEKLVIHEQITRDLKDYKATGPHVAVAKRLAARGVKIRPGTVISYIVLKGSGRIGDRAIPFDEFDPTKHKYDAEYYIENQVLPAVERILRAFGYRKEDLRYQKTRQVGLSAWLKPKGT

SEQ ID NO: 1942 - protein, 774 aa, synthetic construct
MILDTDCITEDGKPVIRIFKKENGEFKIEYDRTFEWYFYALLKDDSAIEEVKKITAERHGTVVTVKRVEKVQKKFLGRPVEVWKLYFTHWQDIPAIADKIREHPAVIDIYEYDIPFAKRYLIDKGLVPMEGDEELKMLAFDIETLYHEGEEFAEGPILMISYADEEGARVITWKNVDLPYVDVVSTEREMIKRFLRVVKEKDPDVLITYNGDNFDFAYLKKRCEKLGINFALGRDGSEPKIQRMGDRFAVEVKGRIHFDLYPVIRRTINLPTYTLEAVYEAVFGQPKEKVYAEEITTAWETGENLERVARYSMEDAKVTYELGKEFLPMEAQLSRLIGQSLWDVSRSSTGNLVEWFLLRKAYERNELAPNKPDEKELARRRQSYEGGYVKEPERGLWENIVYLDFRSLYPSIIITHNVSPDTLNREGCKEYDVAPQVGHRFCKDFPGFIPSLLGDLLEERQKIKKKMKATIDPIERKLLDYRQRAIKILANSYYGYYGYARARWYCKECAESVTAWGREYITMTIKEIEEKYGFKVIYSDTDGFFATIPGADAETVKKKAMEFLKYINAKLPGALELEYEGFYKRGFFVTKKKYAVIDEEGKITTRGLEIVRRDWSEIAKETQARVLEALLKDGDVEKAVRIVKEVTEKLSKYEVPPEKLVIHEQITRDLKDYKATGPHVAVAKRLAARGVKIRPGTVISYIVLKGSGRIGDRAIPFDEFDPTKHKYDAEYYIENQVLPAVERILRAFGYRKEDLRYQKTRQVGLSAWLKPKGT

SEQ ID NO: 1943 - protein, 774 aa, synthetic construct
MILDTDCITEDGKPVIRIFKKENGEFKIEYDRTFEWYFYALLKDDSAIEEVKKITAERHGTVVTVKRVEKVQKKFLGRPVEVWKLYFTHWQDIPAIWDKIREHPAVIDIYEYDIPFAKRYLIDKGLVPMEGDEELKMLAFDIETLYHEGEEFAEGPILMISYADEEGARVITWKNVDLPYVDVVSTEREMIKRFLRVVKEKDPDVLITYNGDNFDFAYLKKRCEKLGINFALGRDGSEPKIQRMGDRFAVEVKGRIHFDLYPVIRRTINLPTYTLEAVYEAVFGQPKEKVYAEEITTAWETGENLERVARYSMEDAKVTYELGKEFLPMEAQLSRLIGQSLWDVSRSSTGNLVEWFLLRKAYERNELAPNKPDEKELARRRQSYEGGYVKEPERGLWENIVYLDFRSLYPSIIITHNVSPDTLNREGCKEYDVAPQVGHRFCKDFPGFIPSLLGDLLEERQKIKKKMKATIDPIERKLLDYRQRAIKILANSYYGYYGYARARWYCKECAESVTAWGREYITMTIKEIEEKYGFKVIYSDTDGFFATIPGADAETVKKKAMEFLKYINAKLPGALELEYEGFYKRGFFVTKKKYAVIDEEGKITTRGLEIVRRDWSEIAKETQARVLEALLKDGDVEKAVRIVKEVTEKLSKYEVPPEKLVIHEQITRDLKDYKATGPHVAVAKRLAARGVKIRPGTVISYIVLKGSGRIGDRAIPFDEFDPTKHKYDAEYYIENQVLPAVERILRAFGYRKEDLRYQKTRQVGLSAWLKPKGT

SEQ ID NO: 1944 - protein, 774 aa, synthetic construct
MILDTDCITEDGKPVIRIFKKENGEFKIEYDRTFEWYFYALLKDDSAIEEVKKITAERHGTVVTVKRVEKVQKKFLGRPVEVWKLYFTHWQDRPAIRDKIREHPAVIDIYEYDIPFAKRYLIDKGLVPMEGDEELKMLAFDIETLYHEGEEFAEGPILMISYADEEGARVITWKNVDLPYVDVVSTEREMIKRFLRVVKEKDPDVLITYNGDNFDFAYLKKRCEKLGINFALGRDGSEPKIQRMGDRFAVEVKGRIHFDLYPVIRRTINLPTYTLEAVYEAVFGQPKEKVYAEEITTAWETGENLERVARYSMEDAKVTYELGKEFLPMEAQLSRLIGQSLWDVSRSSTGNLVEWFLLRKAYERNELAPNKPDEKELARRRQSYEGGYVKEPERGLWENIVYLDFRSLYPSIIITHNVSPDTLNREGCKEYDVAPQVGHRFCKDFPGFIPSLLGDLLEERQKIKKKMKATIDPIERKLLDYRQRAIKILANSYYGYYGYARARWYCKECAESVTAWGREYITMTIKEIEEKYGFKVIYSDTDGFFATIPGADAETVKKKAMEFLKYINAKLPGALELEYEGFYKRGFFVTKKKYAVIDEEGKITTRGLEIVRRDWSEIAKETQARVLEALLKDGDVEKAVRIVKEVTEKLSKYEVPPEKLVIHEQITRDLKDYKATGPHVAVAKRLAARGVKIRPGTVISYIVLKGSGRIGDRAIPFDEFDPTKHKYDAEYYIENQVLPAVERILRAFGYRKEDLRYQKTRQVGLSAWLKPKGT

SEQ ID NO: 1945 - protein, 774 aa, synthetic construct
MILDTDCITEDGKPVIRIFKKENGEFKIEYDRTFEWYFYALLKDDSAIEEVKKITAERHGTVVTVKRVEKVQKKFLGRPVEVWKLYFTHYQDVPAIRDKIREHPAVIDIYEYDIPFAKRYLIDKGLVPMEGDEELKMLAFDIETLYHEGEEFAEGPILMISYADEEGARVITWKNVDLPYVDVVSTEREMIKRFLRVVKEKDPDVLITYNGDNFDFAYLKKRCEKLGINFALGRDGSEPKIQRMGDRFAVEVKGRIHFDLYPVIRRTINLPTYTLEAVYEAVFGQPKEKVYAEEITTAWETGENLERVARYSMEDAKVTYELGKEFLPMEAQLSRLIGQSLWDVSRSSTGNLVEWFLLRKAYERNELAPNKPDEKELARRRQSYEGGYVKEPERGLWENIVYLDFRSLYPSIIITHNVSPDTLNREGCKEYDVAPQVGHRFCKDFPGFIPSLLGDLLEERQKIKKKMKATIDPIERKLLDYRQRAIKILANSYYGYYGYARARWYCKECAESVTAWGREYITMTIKEIEEKYGFKVIYSDTDGFFATIPGADAETVKKKAMEFLKYINAKLPGALELEYEGFYKRGFFVTKKKYAVIDEEGKITTRGLEIVRRDWSEIAKETQARVLEALLKDGDVEKAVRIVKEVTEKLSKYEVPPEKLVIHEQITRDLKDYKATGPHVAVAKRLAARGVKIRPGTVISYIVLKGSGRIGDRAIPFDEFDPTKHKYDAEYYIENQVLPAVERILRAFGYRKEDLRYQKTRQVGLSAWLKPKGT

SEQ ID NO: 1946 - protein, 774 aa, synthetic construct
MILDTDCITEDGKPVIRIFKKENGEFKIEYDRTFEWYFYALLKDDSAIEEVKKITAERHGTVVTVKRVEKVQKKFLGRPVEVWKLYFTHYQDIPAIRDKIREHPAVIDIYEYDIPFAKRYLIDKGLVPMEGDEELKMLAFDIETLYHEGEEFAEGPILMISYADEEGARVITWKNVDLPYVDVVSTEREMIKRFLRVVKEKDPDVLITYNGDNFDFAYLKKRCEKLGINFALGRDGSEPKIQRMGDRFAVEVKGRIHFDLYPVIRRTINLPTYTLEAVYEAVFGQPKEKVYAEEITTAWETGENLERVARYSMEDAKVTYELGKEFLPMEAQLSRLIGQSLWDVSRSSTGNLVEWFLLRKAYERNELAPNKPDEKELARRRQSYEGGYVKEPERGLWENIVYLDFRSLYPSIIITHNVSPDTLNREGCKEYDVAPQVGHRFCKDFPGFIPSLLGDLLEERQKIKKKMKATIDPIERKLLDYRQRAIKILANSYYGYYGYARARWYCKECAESVTAWGREYITMTIKEIEEKYGFKVIYSDTDGFFATIPGADAETVKKKAMEFLKYINAKLPGALELEYEGFYKRGFFVTKKKYAVIDEEGKITTRGLEIVRRDWSEIAKETQARVLEALLKDGDVEKAVRIVKEVTEKLSKYEVPPEKLVIHEQITRDLKDYKATGPHVAVAKRLAARGVKIRPGTVISYIVLKGSGRIGDRAIPFDEFDPTKHKYDAEYYIENQVLPAVERILRAFGYRKEDLRYQKTRQVGLSAWLKPKGT

SEQ ID NO: 1947 - protein, 774 aa, synthetic construct
MILDTDCITEDGKPVIRIFKKENGEFKIEYDRTFEWYFYALLKDDSAIEEVKKITAERHGTVVTVKRVEKVQKKFLGRPVEVWKLYFTHYQDIPAIFDKIREHPAVIDIYEYDIPFAKRYLIDKGLVPMEGDEELKMLAFDIETLYHEGEEFAEGPILMISYADEEGARVITWKNVDLPYVDVVSTEREMIKRFLRVVKEKDPDVLITYNGDNFDFAYLKKRCEKLGINFALGRDGSEPKIQRMGDRFAVEVKGRIHFDLYPVIRRTINLPTYTLEAVYEAVFGQPKEKVYAEEITTAWETGENLERVARYSMEDAKVTYELGKEFLPMEAQLSRLIGQSLWDVSRSSTGNLVEWFLLRKAYERNELAPNKPDEKELARRRQSYEGGYVKEPERGLWENIVYLDFRSLYPSIIITHNVSPDTLNREGCKEYDVAPQVGHRFCKDFPGFIPSLLGDLLEERQKIKKKMKATIDPIERKLLDYRQRAIKILANSYYGYYGYARARWYCKECAESVTAWGREYITMTIKEIEEKYGFKVIYSDTDGFFATIPGADAETVKKKAMEFLKYINAKLPGALELEYEGFYKRGFFVTKKKYAVIDEEGKITTRGLEIVRRDWSEIAKETQARVLEALLKDGDVEKAVRIVKEVTEKLSKYEVPPEKLVIHEQITRDLKDYKATGPHVAVAKRLAARGVKIRPGTVISYIVLKGSGRIGDRAIPFDEFDPTKHKYDAEYYIENQVLPAVERILRAFGYRKEDLRYQKTRQVGLSAWLKPKGT

SEQ ID NO: 1948 - protein, 774 aa, synthetic construct
MILDTDCITEDGKPVIRIFKKENGEFKIEYDRTFEWYFYALLKDDSAIEEVKKITAERHGTVVTVKRVEKVQKKFLGRPVEVWKLYFTHYQDIPAIHDKIREHPAVIDIYEYDIPFAKRYLIDKGLVPMEGDEELKMLAFDIETLYHEGEEFAEGPILMISYADEEGARVITWKNVDLPYVDVVSTEREMIKRFLRVVKEKDPDVLITYNGDNFDFAYLKKRCEKLGINFALGRDGSEPKIQRMGDRFAVEVKGRIHFDLYPVIRRTINLPTYTLEAVYEAVFGQPKEKVYAEEITTAWETGENLERVARYSMEDAKVTYELGKEFLPMEAQLSRLIGQSLWDVSRSSTGNLVEWFLLRKAYERNELAPNKPDEKELARRRQSYEGGYVKEPERGLWENIVYLDFRSLYPSIIITHNVSPDTLNREGCKEYDVAPQVGHRFCKDFPGFIPSLLGDLLEERQKIKKKMKATIDPIERKLLDYRQRAIKILANSYYGYYGYARARWYCKECAESVTAWGREYITMTIKEIEEKYGFKVIYSDTDGFFATIPGADAETVKKKAMEFLKYINAKLPGALELEYEGFYKRGFFVTKKKYAVIDEEGKITTRGLEIVRRDWSEIAKETQARVLEALLKDGDVEKAVRIVKEVTEKLSKYEVPPEKLVIHEQITRDLKDYKATGPHVAVAKRLAARGVKIRPGTVISYIVLKGSGRIGDRAIPFDEFDPTKHKYDAEYYIENQVLPAVERILRAFGYRKEDLRYQKTRQVGLSAWLKPKGT

SEQ ID NO: 1949 - protein, 774 aa, synthetic construct
MILDTDCITEDGKPVIRIFKKENGEFKIEYDRTFEWYFYALLKDDSAIEEVKKITAERHGTVVTVKRVEKVQKKFLGRPVEVWKLYFTHYQDRPAIRDKIREHPAVIDIYEYDIPFAKRYLIDKGLVPMEGDEELKMLAFDIETLYHEGEEFAEGPILMISYADEEGARVITWKNVDLPYVDVVSTEREMIKRFLRVVKEKDPDVLITYNGDNFDFAYLKKRCEKLGINFALGRDGSEPKIQRMGDRFAVEVKGRIHFDLYPVIRRTINLPTYTLEAVYEAVFGQPKEKVYAEEITTAWETGENLERVARYSMEDAKVTYELGKEFLPMEAQLSRLIGQSLWDVSRSSTGNLVEWFLLRKAYERNELAPNKPDEKELARRRQSYEGGYVKEPERGLWENIVYLDFRSLYPSIIITHNVSPDTLNREGCKEYDVAPQVGHRFCKDFPGFIPSLLGDLLEERQKIKKKMKATIDPIERKLLDYRQRAIKILANSYYGYYGYARARWYCKECAESVTAWGREYITMTIKEIEEKYGFKVIYSDTDGFFATIPGADAETVKKKAMEFLKYINAKLPGALELEYEGFYKRGFFVTKKKYAVIDEEGKITTRGLEIVRRDWSEIAKETQARVLEALLKDGDVEKAVRIVKEVTEKLSKYEVPPEKLVIHEQITRDLKDYKATGPHVAVAKRLAARGVKIRPGTVISYIVLKGSGRIGDRAIPFDEFDPTKHKYDAEYYIENQVLPAVERILRAFGYRKEDLRYQKTRQVGLSAWLKPKGT

SEQ ID NO: 1950 - protein, 774 aa, synthetic construct
MILDTDCITEDGKPVIRIFKKENGEFKIEYDRTFEWYFYALLKDDSAIEEVKKITAERHGTVVTVKRVEKVQKKFLGRPVEVWKLYFTHPQDVPAIADKIREHPAVIDIYEYDIPFAKRYLIDKGLVPMEGDEELKMLAFDIETLYHEGEEFAEGPILMISYADEEGARVITWKNVDLPYVDVVSTEREMIKRFLRVVKEKDPDVLITYNGDNFDFAYLKKRCEKLGINFALGRDGSEPKIQRMGDRFAVEVKGRIHFDLYPVIRRTINLPTYTLEAVYEAVFGQPKEKVYAEEITTAWETGENLERVARYSMEDAKVTYELGKEFLPMEAQLSRLIGQSLWDVSRSSTGNLVEWFLLRKAYERNELAPNKPDEKELARRRQSYEGGYVKEPERGLWENIVYLDFRSLYPSIIITHNVSPDTLNREGCKEYDVAPQVGHRFCKDFPGFIPSLLGDLLEERQKIKKKMKATIDPIERKLLDYRQRAIKILANSYYGYYGYARARWYCKECAESVTAWGREYITMTIKEIEEKYGFKVIYSDTDGFFATIPGADAETVKKKAMEFLKYINAKLPGALELEYEGFYKRGFFVTKKKYAVIDEEGKITTRGLEIVRRDWSEIAKETQARVLEALLKDGDVEKAVRIVKEVTEKLSKYEVPPEKLVIHEQITRDLKDYKATGPHVAVAKRLAARGVKIRPGTVISYIVLKGSGRIGDRAIPFDEFDPTKHKYDAEYYIENQVLPAVERILRAFGYRKEDLRYQKTRQVGLSAWLKPKGT

SEQ ID NO: 1951 - protein, 774 aa, synthetic construct
MILDTDCITEDGKPVIRIFKKENGEFKIEYDRTFEWYFYALLKDDSAIEEVKKITAERHGTVVTVKRVEKVQKKFLGRPVEVWKLYFTHPQDIPAIRDKIREHPAVIDIYEYDIPFAKRYLIDKGLVPMEGDEELKMLAFDIETLYHEGEEFAEGPILMISYADEEGARVITWKNVDLPYVDVVSTEREMIKRFLRVVKEKDPDVLITYNGDNFDFAYLKKRCEKLGINFALGRDGSEPKIQRMGDRFAVEVKGRIHFDLYPVIRRTINLPTYTLEAVYEAVFGQPKEKVYAEEITTAWETGENLERVARYSMEDAKVTYELGKEFLPMEAQLSRLIGQSLWDVSRSSTGNLVEWFLLRKAYERNELAPNKPDEKELARRRQSYEGGYVKEPERGLWENIVYLDFRSLYPSIIITHNVSPDTLNREGCKEYDVAPQVGHRFCKDFPGFIPSLLGDLLEERQKIKKKMKATIDPIERKLLDYRQRAIKILANSYYGYYGYARARWYCKECAESVTAWGREYITMTIKEIEEKYGFKVIYSDTDGFFATIPGADAETVKKKAMEFLKYINAKLPGALELEYEGFYKRGFFVTKKKYAVIDEEGKITTRGLEIVRRDWSEIAKETQARVLEALLKDGDVEKAVRIVKEVTEKLSKYEVPPEKLVIHEQITRDLKDYKATGPHVAVAKRLAARGVKIRPGTVISYIVLKGSGRIGDRAIPFDEFDPTKHKYDAEYYIENQVLPAVERILRAFGYRKEDLRYQKTRQVGLSAWLKPKGT

SEQ ID NO: 1952 - protein, 774 aa, synthetic construct
MILDTDCITEDGKPVIRIFKKENGEFKIEYDRTFEWYFYALLKDDSAIEEVKKITAERHGTVVTVKRVEKVQKKFLGRPVEVWKLYFTHPQDIPAIFDKIREHPAVIDIYEYDIPFAKRYLIDKGLVPMEGDEELKMLAFDIETLYHEGEEFAEGPILMISYADEEGARVITWKNVDLPYVDVVSTEREMIKRFLRVVKEKDPDVLITYNGDNFDFAYLKKRCEKLGINFALGRDGSEPKIQRMGDRFAVEVKGRIHFDLYPVIRRTINLPTYTLEAVYEAVFGQPKEKVYAEEITTAWETGENLERVARYSMEDAKVTYELGKEFLPMEAQLSRLIGQSLWDVSRSSTGNLVEWFLLRKAYERNELAPNKPDEKELARRRQSYEGGYVKEPERGLWENIVYLDFRSLYPSIIITHNVSPDTLNREGCKEYDVAPQVGHRFCKDFPGFIPSLLGDLLEERQKIKKKMKATIDPIERKLLDYRQRAIKILANSYYGYYGYARARWYCKECAESVTAWGREYITMTIKEIEEKYGFKVIYSDTDGFFATIPGADAETVKKKAMEFLKYINAKLPGALELEYEGFYKRGFFVTKKKYAVIDEEGKITTRGLEIVRRDWSEIAKETQARVLEALLKDGDVEKAVRIVKEVTEKLSKYEVPPEKLVIHEQITRDLKDYKATGPHVAVAKRLAARGVKIRPGTVISYIVLKGSGRIGDRAIPFDEFDPTKHKYDAEYYIENQVLPAVERILRAFGYRKEDLRYQKTRQVGLSAWLKPKGT

SEQ ID NO: 1953 - protein, 774 aa, synthetic construct
MILDTDCITEDGKPVIRIFKKENGEFKIEYDRTFEPYFYALLKDDSAIEEVKKITAERHGTVVTVKRVEKVQKKFLGRPVEVWKLYFTHFQDVPAIRDKIREHPAVIDIYEYDIPFAKRYLIDKGLVPMEGDEELKMLAFDIETLYHEGEEFAEGPILMISYADEEGARVITWKNVDLPYVDVVSTEREMIKRFLRVVKEKDPDVLITYNGDNFDFAYLKKRCEKLGINFALGRDGSEPKIQRMGDRFAVEVKGRIHFDLYPVIRRTINLPTYTLEAVYEAVFGQPKEKVYAEEITTAWETGENLERVARYSMEDAKVTYELGKEFLPMEAQLSRLIGQSLWDVSRSSTGNLVEWFLLRKAYERNELAPNKPDEKELARRRQSYEGGYVKEPERGLWENIVYLDFRSLYPSIIITHNVSPDTLNREGCKEYDVAPQVGHRFCKDFPGFIPSLLGDLLEERQKIKKKMKATIDPIERKLLDYRQRAIKILANSYYGYYGYARARWYCKECAESVTAWGREYITMTIKEIEEKYGFKVIYSDTDGFFATIPGADAETVKKKAMEFLKYINAKLPGALELEYEGFYKRGFFVTKKKYAVIDEEGKITTRGLEIVRRDWSEIAKETQARVLEALLKDGDVEKAVRIVKEVTEKLSKYEVPPEKLVIHEQITRDLKDYKATGPHVAVAKRLAARGVKIRPGTVISYIVLKGSGRIGDRAIPFDEFDPTKHKYDAEYYIENQVLPAVERILRAFGYRKEDLRYQKTRQVGLSAWLKPKGT

SEQ ID NO: 1954 - protein, 774 aa, synthetic construct
MILDTDCITEDGKPVIRIFKKENGEFKIEYDRTFEPYFYALLKDDSAIEEVKKITAERHGTVVTVKRVEKVQKKFLGRPVEVWKLYFTHFQDVPAIHDKIREHPAVIDIYEYDIPFAKRYLIDKGLVPMEGDEELKMLAFDIETLYHEGEEFAEGPILMISYADEEGARVITWKNVDLPYVDVVSTEREMIKRFLRVVKEKDPDVLITYNGDNFDFAYLKKRCEKLGINFALGRDGSEPKIQRMGDRFAVEVKGRIHFDLYPVIRRTINLPTYTLEAVYEAVFGQPKEKVYAEEITTAWETGENLERVARYSMEDAKVTYELGKEFLPMEAQLSRLIGQSLWDVSRSSTGNLVEWFLLRKAYERNELAPNKPDEKELARRRQSYEGGYVKEPERGLWENIVYLDFRSLYPSIIITHNVSPDTLNREGCKEYDVAPQVGHRFCKDFPGFIPSLLGDLLEERQKIKKKMKATIDPIERKLLDYRQRAIKILANSYYGYYGYARARWYCKECAESVTAWGREYITMTIKEIEEKYGFKVIYSDTDGFFATIPGADAETVKKKAMEFLKYINAKLPGALELEYEGFYKRGFFVTKKKYAVIDEEGKITTRGLEIVRRDWSEIAKETQARVLEALLKDGDVEKAVRIVKEVTEKLSKYEVPPEKLVIHEQITRDLKDYKATGPHVAVAKRLAARGVKIRPGTVISYIVLKGSGRIGDRAIPFDEFDPTKHKYDAEYYIENQVLPAVERILRAFGYRKEDLRYQKTRQVGLSAWLKPKGT

SEQ ID NO: 1955 - protein, 774 aa, synthetic construct
MILDTDCITEDGKPVIRIFKKENGEFKIEYDRTFEPYFYALLKDDSAIEEVKKITAERHGTVVTVKRVEKVQKKFLGRPVEVWKLYFTHFQDIPAIRDKIREHPAVIDIYEYDIPFAKRYLIDKGLVPMEGDEELKMLAFDIETLYHEGEEFAEGPILMISYADEEGARVITWKNVDLPYVDVVSTEREMIKRFLRVVKEKDPDVLITYNGDNFDFAYLKKRCEKLGINFALGRDGSEPKIQRMGDRFAVEVKGRIHFDLYPVIRRTINLPTYTLEAVYEAVFGQPKEKVYAEEITTAWETGENLERVARYSMEDAKVTYELGKEFLPMEAQLSRLIGQSLWDVSRSSTGNLVEWFLLRKAYERNELAPNKPDEKELARRRQSYEGGYVKEPERGLWENIVYLDFRSLYPSIIITHNVSPDTLNREGCKEYDVAPQVGHRFCKDFPGFIPSLLGDLLEERQKIKKKMKATIDPIERKLLDYRQRAIKILANSYYGYYGYARARWYCKECAESVTAWGREYITMTIKEIEEKYGFKVIYSDTDGFFATIPGADAETVKKKAMEFLKYINAKLPGALELEYEGFYKRGFFVTKKKYAVIDEEGKITTRGLEIVRRDWSEIAKETQARVLEALLKDGDVEKAVRIVKEVTEKLSKYEVPPEKLVIHEQITRDLKDYKATGPHVAVAKRLAARGVKIRPGTVISYIVLKGSGRIGDRAIPFDEFDPTKHKYDAEYYIENQVLPAVERILRAFGYRKEDLRYQKTRQVGLSAWLKPKGT

SEQ ID NO: 1956 - protein, 774 aa, synthetic construct
MILDTDCITEDGKPVIRIFKKENGEFKIEYDRTFEPYFYALLKDDSAIEEVKKITAERHGTVVTVKRVEKVQKKFLGRPVEVWKLYFTHFQDIPAIADKIREHPAVIDIYEYDIPFAKRYLIDKGLVPMEGDEELKMLAFDIETLYHEGEEFAEGPILMISYADEEGARVITWKNVDLPYVDVVSTEREMIKRFLRVVKEKDPDVLITYNGDNFDFAYLKKRCEKLGINFALGRDGSEPKIQRMGDRFAVEVKGRIHFDLYPVIRRTINLPTYTLEAVYEAVFGQPKEKVYAEEITTAWETGENLERVARYSMEDAKVTYELGKEFLPMEAQLSRLIGQSLWDVSRSSTGNLVEWFLLRKAYERNELAPNKPDEKELARRRQSYEGGYVKEPERGLWENIVYLDFRSLYPSIIITHNVSPDTLNREGCKEYDVAPQVGHRFCKDFPGFIPSLLGDLLEERQKIKKKMKATIDPIERKLLDYRQRAIKILANSYYGYYGYARARWYCKECAESVTAWGREYITMTIKEIEEKYGFKVIYSDTDGFFATIPGADAETVKKKAMEFLKYINAKLPGALELEYEGFYKRGFFVTKKKYAVIDEEGKITTRGLEIVRRDWSEIAKETQARVLEALLKDGDVEKAVRIVKEVTEKLSKYEVPPEKLVIHEQITRDLKDYKATGPHVAVAKRLAARGVKIRPGTVISYIVLKGSGRIGDRAIPFDEFDPTKHKYDAEYYIENQVLPAVERILRAFGYRKEDLRYQKTRQVGLSAWLKPKGT

SEQ ID NO: 1957 - protein, 774 aa, synthetic construct
MILDTDCITEDGKPVIRIFKKENGEFKIEYDRTFEPYFYALLKDDSAIEEVKKITAERHGTVVTVKRVEKVQKKFLGRPVEVWKLYFTHFQDIPAIFDKIREHPAVIDIYEYDIPFAKRYLIDKGLVPMEGDEELKMLAFDIETLYHEGEEFAEGPILMISYADEEGARVITWKNVDLPYVDVVSTEREMIKRFLRVVKEKDPDVLITYNGDNFDFAYLKKRCEKLGINFALGRDGSEPKIQRMGDRFAVEVKGRIHFDLYPVIRRTINLPTYTLEAVYEAVFGQPKEKVYAEEITTAWETGENLERVARYSMEDAKVTYELGKEFLPMEAQLSRLIGQSLWDVSRSSTGNLVEWFLLRKAYERNELAPNKPDEKELARRRQSYEGGYVKEPERGLWENIVYLDFRSLYPSIIITHNVSPDTLNREGCKEYDVAPQVGHRFCKDFPGFIPSLLGDLLEERQKIKKKMKATIDPIERKLLDYRQRAIKILANSYYGYYGYARARWYCKECAESVTAWGREYITMTIKEIEEKYGFKVIYSDTDGFFATIPGADAETVKKKAMEFLKYINAKLPGALELEYEGFYKRGFFVTKKKYAVIDEEGKITTRGLEIVRRDWSEIAKETQARVLEALLKDGDVEKAVRIVKEVTEKLSKYEVPPEKLVIHEQITRDLKDYKATGPHVAVAKRLAARGVKIRPGTVISYIVLKGSGRIGDRAIPFDEFDPTKHKYDAEYYIENQVLPAVERILRAFGYRKEDLRYQKTRQVGLSAWLKPKGT

SEQ ID NO: 1958 - protein, 774 aa, synthetic construct
MILDTDCITEDGKPVIRIFKKENGEFKIEYDRTFEPYFYALLKDDSAIEEVKKITAERHGTVVTVKRVEKVQKKFLGRPVEVWKLYFTHFQDIPAIWDKIREHPAVIDIYEYDIPFAKRYLIDKGLVPMEGDEELKMLAFDIETLYHEGEEFAEGPILMISYADEEGARVITWKNVDLPYVDVVSTEREMIKRFLRVVKEKDPDVLITYNGDNFDFAYLKKRCEKLGINFALGRDGSEPKIQRMGDRFAVEVKGRIHFDLYPVIRRTINLPTYTLEAVYEAVFGQPKEKVYAEEITTAWETGENLERVARYSMEDAKVTYELGKEFLPMEAQLSRLIGQSLWDVSRSSTGNLVEWFLLRKAYERNELAPNKPDEKELARRRQSYEGGYVKEPERGLWENIVYLDFRSLYPSIIITHNVSPDTLNREGCKEYDVAPQVGHRFCKDFPGFIPSLLGDLLEERQKIKKKMKATIDPIERKLLDYRQRAIKILANSYYGYYGYARARWYCKECAESVTAWGREYITMTIKEIEEKYGFKVIYSDTDGFFATIPGADAETVKKKAMEFLKYINAKLPGALELEYEGFYKRGFFVTKKKYAVIDEEGKITTRGLEIVRRDWSEIAKETQARVLEALLKDGDVEKAVRIVKEVTEKLSKYEVPPEKLVIHEQITRDLKDYKATGPHVAVAKRLAARGVKIRPGTVISYIVLKGSGRIGDRAIPFDEFDPTKHKYDAEYYIENQVLPAVERILRAFGYRKEDLRYQKTRQVGLSAWLKPKGT

SEQ ID NO: 1959 - protein, 774 aa, synthetic construct
MILDTDCITEDGKPVIRIFKKENGEFKIEYDRTFEPYFYALLKDDSAIEEVKKITAERHGTVVTVKRVEKVQKKFLGRPVEVWKLYFTHFQDKPAIRDKIREHPAVIDIYEYDIPFAKRYLIDKGLVPMEGDEELKMLAFDIETLYHEGEEFAEGPILMISYADEEGARVITWKNVDLPYVDVVSTEREMIKRFLRVVKEKDPDVLITYNGDNFDFAYLKKRCEKLGINFALGRDGSEPKIQRMGDRFAVEVKGRIHFDLYPVIRRTINLPTYTLEAVYEAVFGQPKEKVYAEEITTAWETGENLERVARYSMEDAKVTYELGKEFLPMEAQLSRLIGQSLWDVSRSSTGNLVEWFLLRKAYERNELAPNKPDEKELARRRQSYEGGYVKEPERGLWENIVYLDFRSLYPSIIITHNVSPDTLNREGCKEYDVAPQVGHRFCKDFPGFIPSLLGDLLEERQKIKKKMKATIDPIERKLLDYRQRAIKILANSYYGYYGYARARWYCKECAESVTAWGREYITMTIKEIEEKYGFKVIYSDTDGFFATIPGADAETVKKKAMEFLKYINAKLPGALELEYEGFYKRGFFVTKKKYAVIDEEGKITTRGLEIVRRDWSEIAKETQARVLEALLKDGDVEKAVRIVKEVTEKLSKYEVPPEKLVIHEQITRDLKDYKATGPHVAVAKRLAARGVKIRPGTVISYIVLKGSGRIGDRAIPFDEFDPTKHKYDAEYYIENQVLPAVERILRAFGYRKEDLRYQKTRQVGLSAWLKPKGT

SEQ ID NO: 1960 - protein, 774 aa, synthetic construct
MILDTDCITEDGKPVIRIFKKENGEFKIEYDRTFEPYFYALLKDDSAIEEVKKITAERHGTVVTVKRVEKVQKKFLGRPVEVWKLYFTHFQDQPAIRDKIREHPAVIDIYEYDIPFAKRYLIDKGLVPMEGDEELKMLAFDIETLYHEGEEFAEGPILMISYADEEGARVITWKNVDLPYVDVVSTEREMIKRFLRVVKEKDPDVLITYNGDNFDFAYLKKRCEKLGINFALGRDGSEPKIQRMGDRFAVEVKGRIHFDLYPVIRRTINLPTYTLEAVYEAVFGQPKEKVYAEEITTAWETGENLERVARYSMEDAKVTYELGKEFLPMEAQLSRLIGQSLWDVSRSSTGNLVEWFLLRKAYERNELAPNKPDEKELARRRQSYEGGYVKEPERGLWENIVYLDFRSLYPSIIITHNVSPDTLNREGCKEYDVAPQVGHRFCKDFPGFIPSLLGDLLEERQKIKKKMKATIDPIERKLLDYRQRAIKILANSYYGYYGYARARWYCKECAESVTAWGREYITMTIKEIEEKYGFKVIYSDTDGFFATIPGADAETVKKKAMEFLKYINAKLPGALELEYEGFYKRGFFVTKKKYAVIDEEGKITTRGLEIVRRDWSEIAKETQARVLEALLKDGDVEKAVRIVKEVTEKLSKYEVPPEKLVIHEQITRDLKDYKATGPHVAVAKRLAARGVKIRPGTVISYIVLKGSGRIGDRAIPFDEFDPTKHKYDAEYYIENQVLPAVERILRAFGYRKEDLRYQKTRQVGLSAWLKPKGT

SEQ ID NO: 1961 - protein, 774 aa, synthetic construct
MILDTDCITEDGKPVIRIFKKENGEFKIEYDRTFEPYFYALLKDDSAIEEVKKITAERHGTVVTVKRVEKVQKKFLGRPVEVWKLYFTHFQDQPAIADKIREHPAVIDIYEYDIPFAKRYLIDKGLVPMEGDEELKMLAFDIETLYHEGEEFAEGPILMISYADEEGARVITWKNVDLPYVDVVSTEREMIKRFLRVVKEKDPDVLITYNGDNFDFAYLKKRCEKLGINFALGRDGSEPKIQRMGDRFAVEVKGRIHFDLYPVIRRTINLPTYTLEAVYEAVFGQPKEKVYAEEITTAWETGENLERVARYSMEDAKVTYELGKEFLPMEAQLSRLIGQSLWDVSRSSTGNLVEWFLLRKAYERNELAPNKPDEKELARRRQSYEGGYVKEPERGLWENIVYLDFRSLYPSIIITHNVSPDTLNREGCKEYDVAPQVGHRFCKDFPGFIPSLLGDLLEERQKIKKKMKATIDPIERKLLDYRQRAIKILANSYYGYYGYARARWYCKECAESVTAWGREYITMTIKEIEEKYGFKVIYSDTDGFFATIPGADAETVKKKAMEFLKYINAKLPGALELEYEGFYKRGFFVTKKKYAVIDEEGKITTRGLEIVRRDWSEIAKETQARVLEALLKDGDVEKAVRIVKEVTEKLSKYEVPPEKLVIHEQITRDLKDYKATGPHVAVAKRLAARGVKIRPGTVISYIVLKGSGRIGDRAIPFDEFDPTKHKYDAEYYIENQVLPAVERILRAFGYRKEDLRYQKTRQVGLSAWLKPKGT

SEQ ID NO: 1962 - protein, 774 aa, synthetic construct
MILDTDCITEDGKPVIRIFKKENGEFKIEYDRTFEPYFYALLKDDSAIEEVKKITAERHGTVVTVKRVEKVQKKFLGRPVEVWKLYFTHIQDVPAIRDKIREHPAVIDIYEYDIPFAKRYLIDKGLVPMEGDEELKMLAFDIETLYHEGEEFAEGPILMISYADEEGARVITWKNVDLPYVDVVSTEREMIKRFLRVVKEKDPDVLITYNGDNFDFAYLKKRCEKLGINFALGRDGSEPKIQRMGDRFAVEVKGRIHFDLYPVIRRTINLPTYTLEAVYEAVFGQPKEKVYAEEITTAWETGENLERVARYSMEDAKVTYELGKEFLPMEAQLSRLIGQSLWDVSRSSTGNLVEWFLLRKAYERNELAPNKPDEKELARRRQSYEGGYVKEPERGLWENIVYLDFRSLYPSIIITHNVSPDTLNREGCKEYDVAPQVGHRFCKDFPGFIPSLLGDLLEERQKIKKKMKATIDPIERKLLDYRQRAIKILANSYYGYYGYARARWYCKECAESVTAWGREYITMTIKEIEEKYGFKVIYSDTDGFFATIPGADAETVKKKAMEFLKYINAKLPGALELEYEGFYKRGFFVTKKKYAVIDEEGKITTRGLEIVRRDWSEIAKETQARVLEALLKDGDVEKAVRIVKEVTEKLSKYEVPPEKLVIHEQITRDLKDYKATGPHVAVAKRLAARGVKIRPGTVISYIVLKGSGRIGDRAIPFDEFDPTKHKYDAEYYIENQVLPAVERILRAFGYRKEDLRYQKTRQVGLSAWLKPKGT

SEQ ID NO: 1963 - protein, 774 aa, synthetic construct
MILDTDCITEDGKPVIRIFKKENGEFKIEYDRTFEPYFYALLKDDSAIEEVKKITAERHGTVVTVKRVEKVQKKFLGRPVEVWKLYFTHIQDIPAIRDKIREHPAVIDIYEYDIPFAKRYLIDKGLVPMEGDEELKMLAFDIETLYHEGEEFAEGPILMISYADEEGARVITWKNVDLPYVDVVSTEREMIKRFLRVVKEKDPDVLITYNGDNFDFAYLKKRCEKLGINFALGRDGSEPKIQRMGDRFAVEVKGRIHFDLYPVIRRTINLPTYTLEAVYEAVFGQPKEKVYAEEITTAWETGENLERVARYSMEDAKVTYELGKEFLPMEAQLSRLIGQSLWDVSRSSTGNLVEWFLLRKAYERNELAPNKPDEKELARRRQSYEGGYVKEPERGLWENIVYLDFRSLYPSIIITHNVSPDTLNREGCKEYDVAPQVGHRFCKDFPGFIPSLLGDLLEERQKIKKKMKATIDPIERKLLDYRQRAIKILANSYYGYYGYARARWYCKECAESVTAWGREYITMTIKEIEEKYGFKVIYSDTDGFFATIPGADAETVKKKAMEFLKYINAKLPGALELEYEGFYKRGFFVTKKKYAVIDEEGKITTRGLEIVRRDWSEIAKETQARVLEALLKDGDVEKAVRIVKEVTEKLSKYEVPPEKLVIHEQITRDLKDYKATGPHVAVAKRLAARGVKIRPGTVISYIVLKGSGRIGDRAIPFDEFDPTKHKYDAEYYIENQVLPAVERILRAFGYRKEDLRYQKTRQVGLSAWLKPKGT

SEQ ID NO: 1964 - protein, 774 aa, synthetic construct
MILDTDCITEDGKPVIRIFKKENGEFKIEYDRTFEPYFYALLKDDSAIEEVKKITAERHGTVVTVKRVEKVQKKFLGRPVEVWKLYFTHIQDIPAIADKIREHPAVIDIYEYDIPFAKRYLIDKGLVPMEGDEELKMLAFDIETLYHEGEEFAEGPILMISYADEEGARVITWKNVDLPYVDVVSTEREMIKRFLRVVKEKDPDVLITYNGDNFDFAYLKKRCEKLGINFALGRDGSEPKIQRMGDRFAVEVKGRIHFDLYPVIRRTINLPTYTLEAVYEAVFGQPKEKVYAEEITTAWETGENLERVARYSMEDAKVTYELGKEFLPMEAQLSRLIGQSLWDVSRSSTGNLVEWFLLRKAYERNELAPNKPDEKELARRRQSYEGGYVKEPERGLWENIVYLDFRSLYPSIIITHNVSPDTLNREGCKEYDVAPQVGHRFCKDFPGFIPSLLGDLLEERQKIKKKMKATIDPIERKLLDYRQRAIKILANSYYGYYGYARARWYCKECAESVTAWGREYITMTIKEIEEKYGFKVIYSDTDGFFATIPGADAETVKKKAMEFLKYINAKLPGALELEYEGFYKRGFFVTKKKYAVIDEEGKITTRGLEIVRRDWSEIAKETQARVLEALLKDGDVEKAVRIVKEVTEKLSKYEVPPEKLVIHEQITRDLKDYKATGPHVAVAKRLAARGVKIRPGTVISYIVLKGSGRIGDRAIPFDEFDPTKHKYDAEYYIENQVLPAVERILRAFGYRKEDLRYQKTRQVGLSAWLKPKGT

SEQ ID NO: 1965 - protein, 774 aa, synthetic construct
MILDTDCITEDGKPVIRIFKKENGEFKIEYDRTFEPYFYALLKDDSAIEEVKKITAERHGTVVTVKRVEKVQKKFLGRPVEVWKLYFTHIQDIPAIFDKIREHPAVIDIYEYDIPFAKRYLIDKGLVPMEGDEELKMLAFDIETLYHEGEEFAEGPILMISYADEEGARVITWKNVDLPYVDVVSTEREMIKRFLRVVKEKDPDVLITYNGDNFDFAYLKKRCEKLGINFALGRDGSEPKIQRMGDRFAVEVKGRIHFDLYPVIRRTINLPTYTLEAVYEAVFGQPKEKVYAEEITTAWETGENLERVARYSMEDAKVTYELGKEFLPMEAQLSRLIGQSLWDVSRSSTGNLVEWFLLRKAYERNELAPNKPDEKELARRRQSYEGGYVKEPERGLWENIVYLDFRSLYPSIIITHNVSPDTLNREGCKEYDVAPQVGHRFCKDFPGFIPSLLGDLLEERQKIKKKMKATIDPIERKLLDYRQRAIKILANSYYGYYGYARARWYCKECAESVTAWGREYITMTIKEIEEKYGFKVIYSDTDGFFATIPGADAETVKKKAMEFLKYINAKLPGALELEYEGFYKRGFFVTKKKYAVIDEEGKITTRGLEIVRRDWSEIAKETQARVLEALLKDGDVEKAVRIVKEVTEKLSKYEVPPEKLVIHEQITRDLKDYKATGPHVAVAKRLAARGVKIRPGTVISYIVLKGSGRIGDRAIPFDEFDPTKHKYDAEYYIENQVLPAVERILRAFGYRKEDLRYQKTRQVGLSAWLKPKGT

SEQ ID NO: 1966 - protein, 774 aa, synthetic construct
MILDTDCITEDGKPVIRIFKKENGEFKIEYDRTFEPYFYALLKDDSAIEEVKKITAERHGTVVTVKRVEKVQKKFLGRPVEVWKLYFTHIQDIPAIWDKIREHPAVIDIYEYDIPFAKRYLIDKGLVPMEGDEELKMLAFDIETLYHEGEEFAEGPILMISYADEEGARVITWKNVDLPYVDVVSTEREMIKRFLRVVKEKDPDVLITYNGDNFDFAYLKKRCEKLGINFALGRDGSEPKIQRMGDRFAVEVKGRIHFDLYPVIRRTINLPTYTLEAVYEAVFGQPKEKVYAEEITTAWETGENLERVARYSMEDAKVTYELGKEFLPMEAQLSRLIGQSLWDVSRSSTGNLVEWFLLRKAYERNELAPNKPDEKELARRRQSYEGGYVKEPERGLWENIVYLDFRSLYPSIIITHNVSPDTLNREGCKEYDVAPQVGHRFCKDFPGFIPSLLGDLLEERQKIKKKMKATIDPIERKLLDYRQRAIKILANSYYGYYGYARARWYCKECAESVTAWGREYITMTIKEIEEKYGFKVIYSDTDGFFATIPGADAETVKKKAMEFLKYINAKLPGALELEYEGFYKRGFFVTKKKYAVIDEEGKITTRGLEIVRRDWSEIAKETQARVLEALLKDGDVEKAVRIVKEVTEKLSKYEVPPEKLVIHEQITRDLKDYKATGPHVAVAKRLAARGVKIRPGTVISYIVLKGSGRIGDRAIPFDEFDPTKHKYDAEYYIENQVLPAVERILRAFGYRKEDLRYQKTRQVGLSAWLKPKGT

SEQ ID NO: 1967 - protein, 774 aa, synthetic construct
MILDTDCITEDGKPVIRIFKKENGEFKIEYDRTFEPYFYALLKDDSAIEEVKKITAERHGTVVTVKRVEKVQKKFLGRPVEVWKLYFTHSQDRPAIADKIREHPAVIDIYEYDIPFAKRYLIDKGLVPMEGDEELKMLAFDIETLYHEGEEFAEGPILMISYADEEGARVITWKNVDLPYVDVVSTEREMIKRFLRVVKEKDPDVLITYNGDNFDFAYLKKRCEKLGINFALGRDGSEPKIQRMGDRFAVEVKGRIHFDLYPVIRRTINLPTYTLEAVYEAVFGQPKEKVYAEEITTAWETGENLERVARYSMEDAKVTYELGKEFLPMEAQLSRLIGQSLWDVSRSSTGNLVEWFLLRKAYERNELAPNKPDEKELARRRQSYEGGYVKEPERGLWENIVYLDFRSLYPSIIITHNVSPDTLNREGCKEYDVAPQVGHRFCKDFPGFIPSLLGDLLEERQKIKKKMKATIDPIERKLLDYRQRAIKILANSYYGYYGYARARWYCKECAESVTAWGREYITMTIKEIEEKYGFKVIYSDTDGFFATIPGADAETVKKKAMEFLKYINAKLPGALELEYEGFYKRGFFVTKKKYAVIDEEGKITTRGLEIVRRDWSEIAKETQARVLEALLKDGDVEKAVRIVKEVTEKLSKYEVPPEKLVIHEQITRDLKDYKATGPHVAVAKRLAARGVKIRPGTVISYIVLKGSGRIGDRAIPFDEFDPTKHKYDAEYYIENQVLPAVERILRAFGYRKEDLRYQKTRQVGLSAWLKPKGT

SEQ ID NO: 1968 - protein, 774 aa, synthetic construct
MILDTDCITEDGKPVIRIFKKENGEFKIEYDRTFEPYFYALLKDDSAIEEVKKITAERHGTVVTVKRVEKVQKKFLGRPVEVWKLYFTHWQDVPAIRDKIREHPAVIDIYEYDIPFAKRYLIDKGLVPMEGDEELKMLAFDIETLYHEGEEFAEGPILMISYADEEGARVITWKNVDLPYVDVVSTEREMIKRFLRVVKEKDPDVLITYNGDNFDFAYLKKRCEKLGINFALGRDGSEPKIQRMGDRFAVEVKGRIHFDLYPVIRRTINLPTYTLEAVYEAVFGQPKEKVYAEEITTAWETGENLERVARYSMEDAKVTYELGKEFLPMEAQLSRLIGQSLWDVSRSSTGNLVEWFLLRKAYERNELAPNKPDEKELARRRQSYEGGYVKEPERGLWENIVYLDFRSLYPSIIITHNVSPDTLNREGCKEYDVAPQVGHRFCKDFPGFIPSLLGDLLEERQKIKKKMKATIDPIERKLLDYRQRAIKILANSYYGYYGYARARWYCKECAESVTAWGREYITMTIKEIEEKYGFKVIYSDTDGFFATIPGADAETVKKKAMEFLKYINAKLPGALELEYEGFYKRGFFVTKKKYAVIDEEGKITTRGLEIVRRDWSEIAKETQARVLEALLKDGDVEKAVRIVKEVTEKLSKYEVPPEKLVIHEQITRDLKDYKATGPHVAVAKRLAARGVKIRPGTVISYIVLKGSGRIGDRAIPFDEFDPTKHKYDAEYYIENQVLPAVERILRAFGYRKEDLRYQKTRQVGLSAWLKPKGT

SEQ ID NO: 1969 - protein, 774 aa, synthetic construct
MILDTDCITEDGKPVIRIFKKENGEFKIEYDRTFEPYFYALLKDDSAIEEVKKITAERHGTVVTVKRVEKVQKKFLGRPVEVWKLYFTHWQDVPAIFDKIREHPAVIDIYEYDIPFAKRYLIDKGLVPMEGDEELKMLAFDIETLYHEGEEFAEGPILMISYADEEGARVITWKNVDLPYVDVVSTEREMIKRFLRVVKEKDPDVLITYNGDNFDFAYLKKRCEKLGINFALGRDGSEPKIQRMGDRFAVEVKGRIHFDLYPVIRRTINLPTYTLEAVYEAVFGQPKEKVYAEEITTAWETGENLERVARYSMEDAKVTYELGKEFLPMEAQLSRLIGQSLWDVSRSSTGNLVEWFLLRKAYERNELAPNKPDEKELARRRQSYEGGYVKEPERGLWENIVYLDFRSLYPSIIITHNVSPDTLNREGCKEYDVAPQVGHRFCKDFPGFIPSLLGDLLEERQKIKKKMKATIDPIERKLLDYRQRAIKILANSYYGYYGYARARWYCKECAESVTAWGREYITMTIKEIEEKYGFKVIYSDTDGFFATIPGADAETVKKKAMEFLKYINAKLPGALELEYEGFYKRGFFVTKKKYAVIDEEGKITTRGLEIVRRDWSEIAKETQARVLEALLKDGDVEKAVRIVKEVTEKLSKYEVPPEKLVIHEQITRDLKDYKATGPHVAVAKRLAARGVKIRPGTVISYIVLKGSGRIGDRAIPFDEFDPTKHKYDAEYYIENQVLPAVERILRAFGYRKEDLRYQKTRQVGLSAWLKPKGT

SEQ ID NO: 1970 - protein, 774 aa, synthetic construct
MILDTDCITEDGKPVIRIFKKENGEFKIEYDRTFEPYFYALLKDDSAIEEVKKITAERHGTVVTVKRVEKVQKKFLGRPVEVWKLYFTHWQDVPAIWDKIREHPAVIDIYEYDIPFAKRYLIDKGLVPMEGDEELKMLAFDIETLYHEGEEFAEGPILMISYADEEGARVITWKNVDLPYVDVVSTEREMIKRFLRVVKEKDPDVLITYNGDNFDFAYLKKRCEKLGINFALGRDGSEPKIQRMGDRFAVEVKGRIHFDLYPVIRRTINLPTYTLEAVYEAVFGQPKEKVYAEEITTAWETGENLERVARYSMEDAKVTYELGKEFLPMEAQLSRLIGQSLWDVSRSSTGNLVEWFLLRKAYERNELAPNKPDEKELARRRQSYEGGYVKEPERGLWENIVYLDFRSLYPSIIITHNVSPDTLNREGCKEYDVAPQVGHRFCKDFPGFIPSLLGDLLEERQKIKKKMKATIDPIERKLLDYRQRAIKILANSYYGYYGYARARWYCKECAESVTAWGREYITMTIKEIEEKYGFKVIYSDTDGFFATIPGADAETVKKKAMEFLKYINAKLPGALELEYEGFYKRGFFVTKKKYAVIDEEGKITTRGLEIVRRDWSEIAKETQARVLEALLKDGDVEKAVRIVKEVTEKLSKYEVPPEKLVIHEQITRDLKDYKATGPHVAVAKRLAARGVKIRPGTVISYIVLKGSGRIGDRAIPFDEFDPTKHKYDAEYYIENQVLPAVERILRAFGYRKEDLRYQKTRQVGLSAWLKPKGT

SEQ ID NO: 1971 - protein, 774 aa, synthetic construct
MILDTDCITEDGKPVIRIFKKENGEFKIEYDRTFEPYFYALLKDDSAIEEVKKITAERHGTVVTVKRVEKVQKKFLGRPVEVWKLYFTHWQDEPAIRDKIREHPAVIDIYEYDIPFAKRYLIDKGLVPMEGDEELKMLAFDIETLYHEGEEFAEGPILMISYADEEGARVITWKNVDLPYVDVVSTEREMIKRFLRVVKEKDPDVLITYNGDNFDFAYLKKRCEKLGINFALGRDGSEPKIQRMGDRFAVEVKGRIHFDLYPVIRRTINLPTYTLEAVYEAVFGQPKEKVYAEEITTAWETGENLERVARYSMEDAKVTYELGKEFLPMEAQLSRLIGQSLWDVSRSSTGNLVEWFLLRKAYERNELAPNKPDEKELARRRQSYEGGYVKEPERGLWENIVYLDFRSLYPSIIITHNVSPDTLNREGCKEYDVAPQVGHRFCKDFPGFIPSLLGDLLEERQKIKKKMKATIDPIERKLLDYRQRAIKILANSYYGYYGYARARWYCKECAESVTAWGREYITMTIKEIEEKYGFKVIYSDTDGFFATIPGADAETVKKKAMEFLKYINAKLPGALELEYEGFYKRGFFVTKKKYAVIDEEGKITTRGLEIVRRDWSEIAKETQARVLEALLKDGDVEKAVRIVKEVTEKLSKYEVPPEKLVIHEQITRDLKDYKATGPHVAVAKRLAARGVKIRPGTVISYIVLKGSGRIGDRAIPFDEFDPTKHKYDAEYYIENQVLPAVERILRAFGYRKEDLRYQKTRQVGLSAWLKPKGT

SEQ ID NO: 1972 - protein, 774 aa, synthetic construct
MILDTDCITEDGKPVIRIFKKENGEFKIEYDRTFEPYFYALLKDDSAIEEVKKITAERHGTVVTVKRVEKVQKKFLGRPVEVWKLYFTHWQDIPAIRDKIREHPAVIDIYEYDIPFAKRYLIDKGLVPMEGDEELKMLAFDIETLYHEGEEFAEGPILMISYADEEGARVITWKNVDLPYVDVVSTEREMIKRFLRVVKEKDPDVLITYNGDNFDFAYLKKRCEKLGINFALGRDGSEPKIQRMGDRFAVEVKGRIHFDLYPVIRRTINLPTYTLEAVYEAVFGQPKEKVYAEEITTAWETGENLERVARYSMEDAKVTYELGKEFLPMEAQLSRLIGQSLWDVSRSSTGNLVEWFLLRKAYERNELAPNKPDEKELARRRQSYEGGYVKEPERGLWENIVYLDFRSLYPSIIITHNVSPDTLNREGCKEYDVAPQVGHRFCKDFPGFIPSLLGDLLEERQKIKKKMKATIDPIERKLLDYRQRAIKILANSYYGYYGYARARWYCKECAESVTAWGREYITMTIKEIEEKYGFKVIYSDTDGFFATIPGADAETVKKKAMEFLKYINAKLPGALELEYEGFYKRGFFVTKKKYAVIDEEGKITTRGLEIVRRDWSEIAKETQARVLEALLKDGDVEKAVRIVKEVTEKLSKYEVPPEKLVIHEQITRDLKDYKATGPHVAVAKRLAARGVKIRPGTVISYIVLKGSGRIGDRAIPFDEFDPTKHKYDAEYYIENQVLPAVERILRAFGYRKEDLRYQKTRQVGLSAWLKPKGT

SEQ ID NO: 1973 - protein, 774 aa, synthetic construct
MILDTDCITEDGKPVIRIFKKENGEFKIEYDRTFEPYFYALLKDDSAIEEVKKITAERHGTVVTVKRVEKVQKKFLGRPVEVWKLYFTHWQDIPAIADKIREHPAVIDIYEYDIPFAKRYLIDKGLVPMEGDEELKMLAFDIETLYHEGEEFAEGPILMISYADEEGARVITWKNVDLPYVDVVSTEREMIKRFLRVVKEKDPDVLITYNGDNFDFAYLKKRCEKLGINFALGRDGSEPKIQRMGDRFAVEVKGRIHFDLYPVIRRTINLPTYTLEAVYEAVFGQPKEKVYAEEITTAWETGENLERVARYSMEDAKVTYELGKEFLPMEAQLSRLIGQSLWDVSRSSTGNLVEWFLLRKAYERNELAPNKPDEKELARRRQSYEGGYVKEPERGLWENIVYLDFRSLYPSIIITHNVSPDTLNREGCKEYDVAPQVGHRFCKDFPGFIPSLLGDLLEERQKIKKKMKATIDPIERKLLDYRQRAIKILANSYYGYYGYARARWYCKECAESVTAWGREYITMTIKEIEEKYGFKVIYSDTDGFFATIPGADAETVKKKAMEFLKYINAKLPGALELEYEGFYKRGFFVTKKKYAVIDEEGKITTRGLEIVRRDWSEIAKETQARVLEALLKDGDVEKAVRIVKEVTEKLSKYEVPPEKLVIHEQITRDLKDYKATGPHVAVAKRLAARGVKIRPGTVISYIVLKGSGRIGDRAIPFDEFDPTKHKYDAEYYIENQVLPAVERILRAFGYRKEDLRYQKTRQVGLSAWLKPKGT

SEQ ID NO: 1974 - protein, 774 aa, synthetic construct
MILDTDCITEDGKPVIRIFKKENGEFKIEYDRTFEPYFYALLKDDSAIEEVKKITAERHGTVVTVKRVEKVQKKFLGRPVEVWKLYFTHWQDIPAIWDKIREHPAVIDIYEYDIPFAKRYLIDKGLVPMEGDEELKMLAFDIETLYHEGEEFAEGPILMISYADEEGARVITWKNVDLPYVDVVSTEREMIKRFLRVVKEKDPDVLITYNGDNFDFAYLKKRCEKLGINFALGRDGSEPKIQRMGDRFAVEVKGRIHFDLYPVIRRTINLPTYTLEAVYEAVFGQPKEKVYAEEITTAWETGENLERVARYSMEDAKVTYELGKEFLPMEAQLSRLIGQSLWDVSRSSTGNLVEWFLLRKAYERNELAPNKPDEKELARRRQSYEGGYVKEPERGLWENIVYLDFRSLYPSIIITHNVSPDTLNREGCKEYDVAPQVGHRFCKDFPGFIPSLLGDLLEERQKIKKKMKATIDPIERKLLDYRQRAIKILANSYYGYYGYARARWYCKECAESVTAWGREYITMTIKEIEEKYGFKVIYSDTDGFFATIPGADAETVKKKAMEFLKYINAKLPGALELEYEGFYKRGFFVTKKKYAVIDEEGKITTRGLEIVRRDWSEIAKETQARVLEALLKDGDVEKAVRIVKEVTEKLSKYEVPPEKLVIHEQITRDLKDYKATGPHVAVAKRLAARGVKIRPGTVISYIVLKGSGRIGDRAIPFDEFDPTKHKYDAEYYIENQVLPAVERILRAFGYRKEDLRYQKTRQVGLSAWLKPKGT

SEQ ID NO: 1975 - protein, 774 aa, synthetic construct
MILDTDCITEDGKPVIRIFKKENGEFKIEYDRTFEPYFYALLKDDSAIEEVKKITAERHGTVVTVKRVEKVQKKFLGRPVEVWKLYFTHWQDIPAIRDKIREHPAVIDIYEYDIPFAKQYLIDKGLVPMEGDEELKMLAFDIETLYHEGEEFAEGPILMISYADEEGARVITWKNVDLPYVDVVSTEREMIKRFLRVVKEKDPDVLITYNGDNFDFAYLKKRCEKLGINFALGRDGSEPKIQRMGDRFAVEVKGRIHFDLYPVIRRTINLPTYTLEAVYEAVFGQPKEKVYAEEITTAWETGENLERVARYSMEDAKVTYELGKEFLPMEAQLSRLIGQSLWDVSRSSTGNLVEWFLLRKAYERNELAPNKPDEKELARRRQSYEGGYVKEPERGLWENIVYLDFRSLYPSIIITHNVSPDTLNREGCKEYDVAPQVGHRFCKDFPGFIPSLLGDLLEERQKIKKKMKATIDPIERKLLDYRQRAIKILANSYYGYYGYARARWYCKECAESVTAWGREYITMTIKEIEEKYGFKVIYSDTDGFFATIPGADAETVKKKAMEFLKYINAKLPGALELEYEGFYKRGFFVTKKKYAVIDEEGKITTRGLEIVRRDWSEIAKETQARVLEALLKDGDVEKAVRIVKEVTEKLSKYEVPPEKLVIHEQITRDLKDYKATGPHVAVAKRLAARGVKIRPGTVISYIVLKGSGRIGDRAIPFDEFDPTKHKYDAEYYIENQVLPAVERILRAFGYRKEDLRYQKTRQVGLSAWLKPKGT

SEQ ID NO: 1976 - protein, 774 aa, synthetic construct
MILDTDCITEDGKPVIRIFKKENGEFKIEYDRTFEPYFYALLKDDSAIEEVKKITAERHGTVVTVKRVEKVQKKFLGRPVEVWKLYFTHWQDKPAIRDKIREHPAVIDIYEYDIPFAKRYLIDKGLVPMEGDEELKMLAFDIETLYHEGEEFAEGPILMISYADEEGARVITWKNVDLPYVDVVSTEREMIKRFLRVVKEKDPDVLITYNGDNFDFAYLKKRCEKLGINFALGRDGSEPKIQRMGDRFAVEVKGRIHFDLYPVIRRTINLPTYTLEAVYEAVFGQPKEKVYAEEITTAWETGENLERVARYSMEDAKVTYELGKEFLPMEAQLSRLIGQSLWDVSRSSTGNLVEWFLLRKAYERNELAPNKPDEKELARRRQSYEGGYVKEPERGLWENIVYLDFRSLYPSIIITHNVSPDTLNREGCKEYDVAPQVGHRFCKDFPGFIPSLLGDLLEERQKIKKKMKATIDPIERKLLDYRQRAIKILANSYYGYYGYARARWYCKECAESVTAWGREYITMTIKEIEEKYGFKVIYSDTDGFFATIPGADAETVKKKAMEFLKYINAKLPGALELEYEGFYKRGFFVTKKKYAVIDEEGKITTRGLEIVRRDWSEIAKETQARVLEALLKDGDVEKAVRIVKEVTEKLSKYEVPPEKLVIHEQITRDLKDYKATGPHVAVAKRLAARGVKIRPGTVISYIVLKGSGRIGDRAIPFDEFDPTKHKYDAEYYIENQVLPAVERILRAFGYRKEDLRYQKTRQVGLSAWLKPKGT

SEQ ID NO: 1977 - protein, 774 aa, synthetic construct
MILDTDCITEDGKPVIRIFKKENGEFKIEYDRTFEPYFYALLKDDSAIEEVKKITAERHGTVVTVKRVEKVQKKFLGRPVEVWKLYFTHWQDQPAIRDKIREHPAVIDIYEYDIPFAKRYLIDKGLVPMEGDEELKMLAFDIETLYHEGEEFAEGPILMISYADEEGARVITWKNVDLPYVDVVSTEREMIKRFLRVVKEKDPDVLITYNGDNFDFAYLKKRCEKLGINFALGRDGSEPKIQRMGDRFAVEVKGRIHFDLYPVIRRTINLPTYTLEAVYEAVFGQPKEKVYAEEITTAWETGENLERVARYSMEDAKVTYELGKEFLPMEAQLSRLIGQSLWDVSRSSTGNLVEWFLLRKAYERNELAPNKPDEKELARRRQSYEGGYVKEPERGLWENIVYLDFRSLYPSIIITHNVSPDTLNREGCKEYDVAPQVGHRFCKDFPGFIPSLLGDLLEERQKIKKKMKATIDPIERKLLDYRQRAIKILANSYYGYYGYARARWYCKECAESVTAWGREYITMTIKEIEEKYGFKVIYSDTDGFFATIPGADAETVKKKAMEFLKYINAKLPGALELEYEGFYKRGFFVTKKKYAVIDEEGKITTRGLEIVRRDWSEIAKETQARVLEALLKDGDVEKAVRIVKEVTEKLSKYEVPPEKLVIHEQITRDLKDYKATGPHVAVAKRLAARGVKIRPGTVISYIVLKGSGRIGDRAIPFDEFDPTKHKYDAEYYIENQVLPAVERILRAFGYRKEDLRYQKTRQVGLSAWLKPKGT

SEQ ID NO: 1978 - protein, 774 aa, synthetic construct
MILDTDCITEDGKPVIRIFKKENGEFKIEYDRTFEPYFYALLKDDSAIEEVKKITAERHGTVVTVKRVEKVQKKFLGRPVEVWKLYFTHWQDRPAIRDKIREHPAVIDIYEYDIPFAKRYLIDKGLVPMEGDEELKMLAFDIETLYHEGEEFAEGPILMISYADEEGARVITWKNVDLPYVDVVSTEREMIKRFLRVVKEKDPDVLITYNGDNFDFAYLKKRCEKLGINFALGRDGSEPKIQRMGDRFAVEVKGRIHFDLYPVIRRTINLPTYTLEAVYEAVFGQPKEKVYAEEITTAWETGENLERVARYSMEDAKVTYELGKEFLPMEAQLSRLIGQSLWDVSRSSTGNLVEWFLLRKAYERNELAPNKPDEKELARRRQSYEGGYVKEPERGLWENIVYLDFRSLYPSIIITHNVSPDTLNREGCKEYDVAPQVGHRFCKDFPGFIPSLLGDLLEERQKIKKKMKATIDPIERKLLDYRQRAIKILANSYYGYYGYARARWYCKECAESVTAWGREYITMTIKEIEEKYGFKVIYSDTDGFFATIPGADAETVKKKAMEFLKYINAKLPGALELEYEGFYKRGFFVTKKKYAVIDEEGKITTRGLEIVRRDWSEIAKETQARVLEALLKDGDVEKAVRIVKEVTEKLSKYEVPPEKLVIHEQITRDLKDYKATGPHVAVAKRLAARGVKIRPGTVISYIVLKGSGRIGDRAIPFDEFDPTKHKYDAEYYIENQVLPAVERILRAFGYRKEDLRYQKTRQVGLSAWLKPKGT

SEQ ID NO: 1979 - protein, 774 aa, synthetic construct
MILDTDCITEDGKPVIRIFKKENGEFKIEYDRTFEPYFYALLKDDSAIEEVKKITAERHGTVVTVKRVEKVQKKFLGRPVEVWKLYFTHWQDRPAIFDKIREHPAVIDIYEYDIPFAKRYLIDKGLVPMEGDEELKMLAFDIETLYHEGEEFAEGPILMISYADEEGARVITWKNVDLPYVDVVSTEREMIKRFLRVVKEKDPDVLITYNGDNFDFAYLKKRCEKLGINFALGRDGSEPKIQRMGDRFAVEVKGRIHFDLYPVIRRTINLPTYTLEAVYEAVFGQPKEKVYAEEITTAWETGENLERVARYSMEDAKVTYELGKEFLPMEAQLSRLIGQSLWDVSRSSTGNLVEWFLLRKAYERNELAPNKPDEKELARRRQSYEGGYVKEPERGLWENIVYLDFRSLYPSIIITHNVSPDTLNREGCKEYDVAPQVGHRFCKDFPGFIPSLLGDLLEERQKIKKKMKATIDPIERKLLDYRQRAIKILANSYYGYYGYARARWYCKECAESVTAWGREYITMTIKEIEEKYGFKVIYSDTDGFFATIPGADAETVKKKAMEFLKYINAKLPGALELEYEGFYKRGFFVTKKKYAVIDEEGKITTRGLEIVRRDWSEIAKETQARVLEALLKDGDVEKAVRIVKEVTEKLSKYEVPPEKLVIHEQITRDLKDYKATGPHVAVAKRLAARGVKIRPGTVISYIVLKGSGRIGDRAIPFDEFDPTKHKYDAEYYIENQVLPAVERILRAFGYRKEDLRYQKTRQVGLSAWLKPKGT

SEQ ID NO: 1980 - protein, 774 aa, synthetic construct
MILDTDCITEDGKPVIRIFKKENGEFKIEYDRTFEPYFYALLKDDSAIEEVKKITAERHGTVVTVKRVEKVQKKFLGRPVEVWKLYFTHWQDRPAIRDKIREHPAVIDIYEYDIPFAKQYLIDKGLVPMEGDEELKMLAFDIETLYHEGEEFAEGPILMISYADEEGARVITWKNVDLPYVDVVSTEREMIKRFLRVVKEKDPDVLITYNGDNFDFAYLKKRCEKLGINFALGRDGSEPKIQRMGDRFAVEVKGRIHFDLYPVIRRTINLPTYTLEAVYEAVFGQPKEKVYAEEITTAWETGENLERVARYSMEDAKVTYELGKEFLPMEAQLSRLIGQSLWDVSRSSTGNLVEWFLLRKAYERNELAPNKPDEKELARRRQSYEGGYVKEPERGLWENIVYLDFRSLYPSIIITHNVSPDTLNREGCKEYDVAPQVGHRFCKDFPGFIPSLLGDLLEERQKIKKKMKATIDPIERKLLDYRQRAIKILANSYYGYYGYARARWYCKECAESVTAWGREYITMTIKEIEEKYGFKVIYSDTDGFFATIPGADAETVKKKAMEFLKYINAKLPGALELEYEGFYKRGFFVTKKKYAVIDEEGKITTRGLEIVRRDWSEIAKETQARVLEALLKDGDVEKAVRIVKEVTEKLSKYEVPPEKLVIHEQITRDLKDYKATGPHVAVAKRLAARGVKIRPGTVISYIVLKGSGRIGDRAIPFDEFDPTKHKYDAEYYIENQVLPAVERILRAFGYRKEDLRYQKTRQVGLSAWLKPKGT

SEQ ID NO: 1981 - protein, 774 aa, synthetic construct
MILDTDCITEDGKPVIRIFKKENGEFKIEYDRTFEPYFYALLKDDSAIEEVKKITAERHGTVVTVKRVEKVQKKFLGRPVEVWKLYFTHYQDVPAIRDKIREHPAVIDIYEYDIPFAKRYLIDKGLVPMEGDEELKMLAFDIETLYHEGEEFAEGPILMISYADEEGARVITWKNVDLPYVDVVSTEREMIKRFLRVVKEKDPDVLITYNGDNFDFAYLKKRCEKLGINFALGRDGSEPKIQRMGDRFAVEVKGRIHFDLYPVIRRTINLPTYTLEAVYEAVFGQPKEKVYAEEITTAWETGENLERVARYSMEDAKVTYELGKEFLPMEAQLSRLIGQSLWDVSRSSTGNLVEWFLLRKAYERNELAPNKPDEKELARRRQSYEGGYVKEPERGLWENIVYLDFRSLYPSIIITHNVSPDTLNREGCKEYDVAPQVGHRFCKDFPGFIPSLLGDLLEERQKIKKKMKATIDPIERKLLDYRQRAIKILANSYYGYYGYARARWYCKECAESVTAWGREYITMTIKEIEEKYGFKVIYSDTDGFFATIPGADAETVKKKAMEFLKYINAKLPGALELEYEGFYKRGFFVTKKKYAVIDEEGKITTRGLEIVRRDWSEIAKETQARVLEALLKDGDVEKAVRIVKEVTEKLSKYEVPPEKLVIHEQITRDLKDYKATGPHVAVAKRLAARGVKIRPGTVISYIVLKGSGRIGDRAIPFDEFDPTKHKYDAEYYIENQVLPAVERILRAFGYRKEDLRYQKTRQVGLSAWLKPKGT

SEQ ID NO: 1982 - protein, 774 aa, synthetic construct
MILDTDCITEDGKPVIRIFKKENGEFKIEYDRTFEPYFYALLKDDSAIEEVKKITAERHGTVVTVKRVEKVQKKFLGRPVEVWKLYFTHYQDVPAIHDKIREHPAVIDIYEYDIPFAKRYLIDKGLVPMEGDEELKMLAFDIETLYHEGEEFAEGPILMISYADEEGARVITWKNVDLPYVDVVSTEREMIKRFLRVVKEKDPDVLITYNGDNFDFAYLKKRCEKLGINFALGRDGSEPKIQRMGDRFAVEVKGRIHFDLYPVIRRTINLPTYTLEAVYEAVFGQPKEKVYAEEITTAWETGENLERVARYSMEDAKVTYELGKEFLPMEAQLSRLIGQSLWDVSRSSTGNLVEWFLLRKAYERNELAPNKPDEKELARRRQSYEGGYVKEPERGLWENIVYLDFRSLYPSIIITHNVSPDTLNREGCKEYDVAPQVGHRFCKDFPGFIPSLLGDLLEERQKIKKKMKATIDPIERKLLDYRQRAIKILANSYYGYYGYARARWYCKECAESVTAWGREYITMTIKEIEEKYGFKVIYSDTDGFFATIPGADAETVKKKAMEFLKYINAKLPGALELEYEGFYKRGFFVTKKKYAVIDEEGKITTRGLEIVRRDWSEIAKETQARVLEALLKDGDVEKAVRIVKEVTEKLSKYEVPPEKLVIHEQITRDLKDYKATGPHVAVAKRLAARGVKIRPGTVISYIVLKGSGRIGDRAIPFDEFDPTKHKYDAEYYIENQVLPAVERILRAFGYRKEDLRYQKTRQVGLSAWLKPKGT

SEQ ID NO: 1983 - protein, 774 aa, synthetic construct
MILDTDCITEDGKPVIRIFKKENGEFKIEYDRTFEPYFYALLKDDSAIEEVKKITAERHGTVVTVKRVEKVQKKFLGRPVEVWKLYFTHYQDIPAIRDKIREHPAVIDIYEYDIPFAKRYLIDKGLVPMEGDEELKMLAFDIETLYHEGEEFAEGPILMISYADEEGARVITWKNVDLPYVDVVSTEREMIKRFLRVVKEKDPDVLITYNGDNFDFAYLKKRCEKLGINFALGRDGSEPKIQRMGDRFAVEVKGRIHFDLYPVIRRTINLPTYTLEAVYEAVFGQPKEKVYAEEITTAWETGENLERVARYSMEDAKVTYELGKEFLPMEAQLSRLIGQSLWDVSRSSTGNLVEWFLLRKAYERNELAPNKPDEKELARRRQSYEGGYVKEPERGLWENIVYLDFRSLYPSIIITHNVSPDTLNREGCKEYDVAPQVGHRFCKDFPGFIPSLLGDLLEERQKIKKKMKATIDPIERKLLDYRQRAIKILANSYYGYYGYARARWYCKECAESVTAWGREYITMTIKEIEEKYGFKVIYSDTDGFFATIPGADAETVKKKAMEFLKYINAKLPGALELEYEGFYKRGFFVTKKKYAVIDEEGKITTRGLEIVRRDWSEIAKETQARVLEALLKDGDVEKAVRIVKEVTEKLSKYEVPPEKLVIHEQITRDLKDYKATGPHVAVAKRLAARGVKIRPGTVISYIVLKGSGRIGDRAIPFDEFDPTKHKYDAEYYIENQVLPAVERILRAFGYRKEDLRYQKTRQVGLSAWLKPKGT

SEQ ID NO: 1984 - protein, 774 aa, synthetic construct
MILDTDCITEDGKPVIRIFKKENGEFKIEYDRTFEPYFYALLKDDSAIEEVKKITAERHGTVVTVKRVEKVQKKFLGRPVEVWKLYFTHYQDIPAIFDKIREHPAVIDIYEYDIPFAKRYLIDKGLVPMEGDEELKMLAFDIETLYHEGEEFAEGPILMISYADEEGARVITWKNVDLPYVDVVSTEREMIKRFLRVVKEKDPDVLITYNGDNFDFAYLKKRCEKLGINFALGRDGSEPKIQRMGDRFAVEVKGRIHFDLYPVIRRTINLPTYTLEAVYEAVFGQPKEKVYAEEITTAWETGENLERVARYSMEDAKVTYELGKEFLPMEAQLSRLIGQSLWDVSRSSTGNLVEWFLLRKAYERNELAPNKPDEKELARRRQSYEGGYVKEPERGLWENIVYLDFRSLYPSIIITHNVSPDTLNREGCKEYDVAPQVGHRFCKDFPGFIPSLLGDLLEERQKIKKKMKATIDPIERKLLDYRQRAIKILANSYYGYYGYARARWYCKECAESVTAWGREYITMTIKEIEEKYGFKVIYSDTDGFFATIPGADAETVKKKAMEFLKYINAKLPGALELEYEGFYKRGFFVTKKKYAVIDEEGKITTRGLEIVRRDWSEIAKETQARVLEALLKDGDVEKAVRIVKEVTEKLSKYEVPPEKLVIHEQITRDLKDYKATGPHVAVAKRLAARGVKIRPGTVISYIVLKGSGRIGDRAIPFDEFDPTKHKYDAEYYIENQVLPAVERILRAFGYRKEDLRYQKTRQVGLSAWLKPKGT

SEQ ID NO: 1985 - protein, 774 aa, synthetic construct
MILDTDCITEDGKPVIRIFKKENGEFKIEYDRTFEPYFYALLKDDSAIEEVKKITAERHGTVVTVKRVEKVQKKFLGRPVEVWKLYFTHYQDIPAIHDKIREHPAVIDIYEYDIPFAKRYLIDKGLVPMEGDEELKMLAFDIETLYHEGEEFAEGPILMISYADEEGARVITWKNVDLPYVDVVSTEREMIKRFLRVVKEKDPDVLITYNGDNFDFAYLKKRCEKLGINFALGRDGSEPKIQRMGDRFAVEVKGRIHFDLYPVIRRTINLPTYTLEAVYEAVFGQPKEKVYAEEITTAWETGENLERVARYSMEDAKVTYELGKEFLPMEAQLSRLIGQSLWDVSRSSTGNLVEWFLLRKAYERNELAPNKPDEKELARRRQSYEGGYVKEPERGLWENIVYLDFRSLYPSIIITHNVSPDTLNREGCKEYDVAPQVGHRFCKDFPGFIPSLLGDLLEERQKIKKKMKATIDPIERKLLDYRQRAIKILANSYYGYYGYARARWYCKECAESVTAWGREYITMTIKEIEEKYGFKVIYSDTDGFFATIPGADAETVKKKAMEFLKYINAKLPGALELEYEGFYKRGFFVTKKKYAVIDEEGKITTRGLEIVRRDWSEIAKETQARVLEALLKDGDVEKAVRIVKEVTEKLSKYEVPPEKLVIHEQITRDLKDYKATGPHVAVAKRLAARGVKIRPGTVISYIVLKGSGRIGDRAIPFDEFDPTKHKYDAEYYIENQVLPAVERILRAFGYRKEDLRYQKTRQVGLSAWLKPKGT

SEQ ID NO: 1986 - protein, 774 aa, synthetic construct
MILDTDCITEDGKPVIRIFKKENGEFKIEYDRTFEPYFYALLKDDSAIEEVKKITAERHGTVVTVKRVEKVQKKFLGRPVEVWKLYFTHYQDKPAIRDKIREHPAVIDIYEYDIPFAKRYLIDKGLVPMEGDEELKMLAFDIETLYHEGEEFAEGPILMISYADEEGARVITWKNVDLPYVDVVSTEREMIKRFLRVVKEKDPDVLITYNGDNFDFAYLKKRCEKLGINFALGRDGSEPKIQRMGDRFAVEVKGRIHFDLYPVIRRTINLPTYTLEAVYEAVFGQPKEKVYAEEITTAWETGENLERVARYSMEDAKVTYELGKEFLPMEAQLSRLIGQSLWDVSRSSTGNLVEWFLLRKAYERNELAPNKPDEKELARRRQSYEGGYVKEPERGLWENIVYLDFRSLYPSIIITHNVSPDTLNREGCKEYDVAPQVGHRFCKDFPGFIPSLLGDLLEERQKIKKKMKATIDPIERKLLDYRQRAIKILANSYYGYYGYARARWYCKECAESVTAWGREYITMTIKEIEEKYGFKVIYSDTDGFFATIPGADAETVKKKAMEFLKYINAKLPGALELEYEGFYKRGFFVTKKKYAVIDEEGKITTRGLEIVRRDWSEIAKETQARVLEALLKDGDVEKAVRIVKEVTEKLSKYEVPPEKLVIHEQITRDLKDYKATGPHVAVAKRLAARGVKIRPGTVISYIVLKGSGRIGDRAIPFDEFDPTKHKYDAEYYIENQVLPAVERILRAFGYRKEDLRYQKTRQVGLSAWLKPKGT

SEQ ID NO: 1987 - protein, 774 aa, synthetic construct
MILDTDCITEDGKPVIRIFKKENGEFKIEYDRTFEPYFYALLKDDSAIEEVKKITAERHGTVVTVKRVEKVQKKFLGRPVEVWKLYFTHYQDQPAIRDKIREHPAVIDIYEYDIPFAKRYLIDKGLVPMEGDEELKMLAFDIETLYHEGEEFAEGPILMISYADEEGARVITWKNVDLPYVDVVSTEREMIKRFLRVVKEKDPDVLITYNGDNFDFAYLKKRCEKLGINFALGRDGSEPKIQRMGDRFAVEVKGRIHFDLYPVIRRTINLPTYTLEAVYEAVFGQPKEKVYAEEITTAWETGENLERVARYSMEDAKVTYELGKEFLPMEAQLSRLIGQSLWDVSRSSTGNLVEWFLLRKAYERNELAPNKPDEKELARRRQSYEGGYVKEPERGLWENIVYLDFRSLYPSIIITHNVSPDTLNREGCKEYDVAPQVGHRFCKDFPGFIPSLLGDLLEERQKIKKKMKATIDPIERKLLDYRQRAIKILANSYYGYYGYARARWYCKECAESVTAWGREYITMTIKEIEEKYGFKVIYSDTDGFFATIPGADAETVKKKAMEFLKYINAKLPGALELEYEGFYKRGFFVTKKKYAVIDEEGKITTRGLEIVRRDWSEIAKETQARVLEALLKDGDVEKAVRIVKEVTEKLSKYEVPPEKLVIHEQITRDLKDYKATGPHVAVAKRLAARGVKIRPGTVISYIVLKGSGRIGDRAIPFDEFDPTKHKYDAEYYIENQVLPAVERILRAFGYRKEDLRYQKTRQVGLSAWLKPKGT

SEQ ID NO: 1988 - protein, 774 aa, synthetic construct
MILDTDCITEDGKPVIRIFKKENGEFKIEYDRTFEPYFYALLKDDSAIEEVKKITAERHGTVVTVKRVEKVQKKFLGRPVEVWKLYFTHPQDIPAIWDKIREHPAVIDIYEYDIPFAKRYLIDKGLVPMEGDEELKMLAFDIETLYHEGEEFAEGPILMISYADEEGARVITWKNVDLPYVDVVSTEREMIKRFLRVVKEKDPDVLITYNGDNFDFAYLKKRCEKLGINFALGRDGSEPKIQRMGDRFAVEVKGRIHFDLYPVIRRTINLPTYTLEAVYEAVFGQPKEKVYAEEITTAWETGENLERVARYSMEDAKVTYELGKEFLPMEAQLSRLIGQSLWDVSRSSTGNLVEWFLLRKAYERNELAPNKPDEKELARRRQSYEGGYVKEPERGLWENIVYLDFRSLYPSIIITHNVSPDTLNREGCKEYDVAPQVGHRFCKDFPGFIPSLLGDLLEERQKIKKKMKATIDPIERKLLDYRQRAIKILANSYYGYYGYARARWYCKECAESVTAWGREYITMTIKEIEEKYGFKVIYSDTDGFFATIPGADAETVKKKAMEFLKYINAKLPGALELEYEGFYKRGFFVTKKKYAVIDEEGKITTRGLEIVRRDWSEIAKETQARVLEALLKDGDVEKAVRIVKEVTEKLSKYEVPPEKLVIHEQITRDLKDYKATGPHVAVAKRLAARGVKIRPGTVISYIVLKGSGRIGDRAIPFDEFDPTKHKYDAEYYIENQVLPAVERILRAFGYRKEDLRYQKTRQVGLSAWLKPKGT

SEQ ID NO: 1989 - protein, 774 aa, synthetic construct
MILDTDCITEDGKPVIRIFKKENGEFKIEYDRTFEPYFYALLKDDSAIEEVKKITAERHGTVVTVKRVEKVQKKFLGRPVEVWKLYFTHPQDKPAIRDKIREHPAVIDIYEYDIPFAKRYLIDKGLVPMEGDEELKMLAFDIETLYHEGEEFAEGPILMISYADEEGARVITWKNVDLPYVDVVSTEREMIKRFLRVVKEKDPDVLITYNGDNFDFAYLKKRCEKLGINFALGRDGSEPKIQRMGDRFAVEVKGRIHFDLYPVIRRTINLPTYTLEAVYEAVFGQPKEKVYAEEITTAWETGENLERVARYSMEDAKVTYELGKEFLPMEAQLSRLIGQSLWDVSRSSTGNLVEWFLLRKAYERNELAPNKPDEKELARRRQSYEGGYVKEPERGLWENIVYLDFRSLYPSIIITHNVSPDTLNREGCKEYDVAPQVGHRFCKDFPGFIPSLLGDLLEERQKIKKKMKATIDPIERKLLDYRQRAIKILANSYYGYYGYARARWYCKECAESVTAWGREYITMTIKEIEEKYGFKVIYSDTDGFFATIPGADAETVKKKAMEFLKYINAKLPGALELEYEGFYKRGFFVTKKKYAVIDEEGKITTRGLEIVRRDWSEIAKETQARVLEALLKDGDVEKAVRIVKEVTEKLSKYEVPPEKLVIHEQITRDLKDYKATGPHVAVAKRLAARGVKIRPGTVISYIVLKGSGRIGDRAIPFDEFDPTKHKYDAEYYIENQVLPAVERILRAFGYRKEDLRYQKTRQVGLSAWLKPKGT

SEQ ID NO: 1990 - protein, 774 aa, synthetic construct
MILDTDCITEDGKPVIRIFKKENGEFKIEYDRTFEPYFYALLKDDSAIEEVKKITAERHGTVVTVKRVEKVQKKFLGRPVEVWKLYFTHPQDRPAIRDKIREHPAVIDIYEYDIPFAKRYLIDKGLVPMEGDEELKMLAFDIETLYHEGEEFAEGPILMISYADEEGARVITWKNVDLPYVDVVSTEREMIKRFLRVVKEKDPDVLITYNGDNFDFAYLKKRCEKLGINFALGRDGSEPKIQRMGDRFAVEVKGRIHFDLYPVIRRTINLPTYTLEAVYEAVFGQPKEKVYAEEITTAWETGENLERVARYSMEDAKVTYELGKEFLPMEAQLSRLIGQSLWDVSRSSTGNLVEWFLLRKAYERNELAPNKPDEKELARRRQSYEGGYVKEPERGLWENIVYLDFRSLYPSIIITHNVSPDTLNREGCKEYDVAPQVGHRFCKDFPGFIPSLLGDLLEERQKIKKKMKATIDPIERKLLDYRQRAIKILANSYYGYYGYARARWYCKECAESVTAWGREYITMTIKEIEEKYGFKVIYSDTDGFFATIPGADAETVKKKAMEFLKYINAKLPGALELEYEGFYKRGFFVTKKKYAVIDEEGKITTRGLEIVRRDWSEIAKETQARVLEALLKDGDVEKAVRIVKEVTEKLSKYEVPPEKLVIHEQITRDLKDYKATGPHVAVAKRLAARGVKIRPGTVISYIVLKGSGRIGDRAIPFDEFDPTKHKYDAEYYIENQVLPAVERILRAFGYRKEDLRYQKTRQVGLSAWLKPKGT

SEQ ID NO: 1991 - protein, 774 aa, synthetic construct
MILDTDDITEDGKPVLRIFKKENGEFKIEYDRTFEPYFYALLKDDSAIEEVKKITAERHGTVVTVKRVEKVQKKFLGRPVEVWKLYFTHPQDVPAIRDKIREHPAVIDIYEYDIPFAKRYLIDKGLVPMEGDEELKMLAFDIETLYHEGEEFAEGPILMISYADEEGARVITWKNVDLPYVDVVSTEREMIKRFLRVVKEKDPDVLITYNGDNFDFAYLKKRCEKLGINFALGRDGSEPKIQRMGDRFAVEVKGRIHFDLYPVIRRTINLPTYTLEAVYEAVFGQPKEKVYAEEITTAWETGENLERVARYSMEDAKVTYELGKEFLPMEAQLSRLIGQSLWDVSRSSTGNLVEWFLLRKAYERNELAPNKPDEKELARRRQSYEGGYVKEPERGLWENIVYLDFRSLYPSIIITHNVSPDTLNREGCKEYDVAPQVGHRFCKDFPGFIPSLLGDLLEERQKIKKKMKATIDPIERKLLDYRQRAIKILANSYYGYYGYARARWYCKECAESVTAWGREYITMTIKEIEEKYGFKVIYSDTDGFFATIPGADAETVKKKAMEFLKYINAKLPGALELEYEGFYKRGFFVTKKKYAVIDEEGKITTRGLEIVRRDWSEIAKETQARVLEALLKDGDVEKAVRIVKEVTEKLSKYEVPPEKLVIHEQITRDLKDYKATGPHVAVAKRLAARGVKIRPGTVISYIVLKGSGRIGDRAIPFDEFDPTKHKYDAEYYIENQVLPAVERILRAFGYRKEDLRYQKTRQVGLSAWLKPKGT

SEQ ID NO: 1992 - protein, 774 aa, synthetic construct
MILDTDDITEDGKPVLRIFKKENGEFKIEYDRTFEPYFYALLKDDSAIEEVKKITAERHGTVVTVKRVEKVQKKFLGRPVEVWKLYFTHYQDVPAIRDKIREHPAVIDIYEYDIPFAKRYLIDKGLVPMEGDEELKMLAFDIETLYHEGEEFAEGPILMISYADEEGARVITWKNVDLPYVDVVSTEREMIKRFLRVVKEKDPDVLITYNGDNFDFAYLKKRCEKLGINFALGRDGSEPKIQRMGDRFAVEVKGRIHFDLYPVIRRTINLPTYTLEAVYEAVFGQPKEKVYAEEITTAWETGENLERVARYSMEDAKVTYELGKEFLPMEAQLSRLIGQSLWDVSRSSTGNLVEWFLLRKAYERNELAPNKPDEKELARRRQSYEGGYVKEPERGLWENIVYLDFRSLYPSIIITHNVSPDTLNREGCKEYDVAPQVGHRFCKDFPGFIPSLLGDLLEERQKIKKKMKATIDPIERKLLDYRQRAIKILANSYYGYYGYARARWYCKECAESVTAWGREYITMTIKEIEEKYGFKVIYSDTDGFFATIPGADAETVKKKAMEFLKYINAKLPGALELEYEGFYKRGFFVTKKKYAVIDEEGKITTRGLEIVRRDWSEIAKETQARVLEALLKDGDVEKAVRIVKEVTEKLSKYEVPPEKLVIHEQITRDLKDYKATGPHVAVAKRLAARGVKIRPGTVISYIVLKGSGRIGDRAIPFDEFDPTKHKYDAEYYIENQVLPAVERILRAFGYRKEDLRYQKTRQVGLSAWLKPKGT

SEQ ID NO: 1993 - protein, 774 aa, synthetic construct
MILDTDDITEDGKPVLRIFKKENGEFKIEYDRTFEPYFYALLKDDSAIEEVKKITAERHGTVVTVKRVEKVQKKFLGRPVEVWKLYFTHYQDIPAIRDKIREHPAVIDIYEYDIPFAKRYLIDKGLVPMEGDEELKMLAFDIETLYHEGEEFAEGPILMISYADEEGARVITWKNVDLPYVDVVSTEREMIKRFLRVVKEKDPDVLITYNGDNFDFAYLKKRCEKLGINFALGRDGSEPKIQRMGDRFAVEVKGRIHFDLYPVIRRTINLPTYTLEAVYEAVFGQPKEKVYAEEITTAWETGENLERVARYSMEDAKVTYELGKEFLPMEAQLSRLIGQSLWDVSRSSTGNLVEWFLLRKAYERNELAPNKPDEKELARRRQSYEGGYVKEPERGLWENIVYLDFRSLYPSIIITHNVSPDTLNREGCKEYDVAPQVGHRFCKDFPGFIPSLLGDLLEERQKIKKKMKATIDPIERKLLDYRQRAIKILANSYYGYYGYARARWYCKECAESVTAWGREYITMTIKEIEEKYGFKVIYSDTDGFFATIPGADAETVKKKAMEFLKYINAKLPGALELEYEGFYKRGFFVTKKKYAVIDEEGKITTRGLEIVRRDWSEIAKETQARVLEALLKDGDVEKAVRIVKEVTEKLSKYEVPPEKLVIHEQITRDLKDYKATGPHVAVAKRLAARGVKIRPGTVISYIVLKGSGRIGDRAIPFDEFDPTKHKYDAEYYIENQVLPAVERILRAFGYRKEDLRYQKTRQVGLSAWLKPKGT

SEQ ID NO: 1994 - protein, 774 aa, synthetic construct
MILDTDDITEDGKPVIRIFKKENGEFKIEYDRTFEAYFYALLKDDSAIEEVKKITAERHGTVVTVKRVEKVQKKFLGRPVEVWKLYFTHFQDIPAIADKIREHPAVIDIYEYDIPFAKQYLIDKGLVPMEGDEELKMLAFDIETLYHEGEEFAEGPILMISYADEEGARVITWKNVDLPYVDVVSTEREMIKRFLRVVKEKDPDVLITYNGDNFDFAYLKKRCEKLGINFALGRDGSEPKIQRMGDRFAVEVKGRIHFDLYPVIRRTINLPTYTLEAVYEAVFGQPKEKVYAEEITTAWETGENLERVARYSMEDAKVTYELGKEFLPMEAQLSRLIGQSLWDVSRSSTGNLVEWFLLRKAYERNELAPNKPDEKELARRRQSYEGGYVKEPERGLWENIVYLDFRSLYPSIIITHNVSPDTLNREGCKEYDVAPQVGHRFCKDFPGFIPSLLGDLLEERQKIKKKMKATIDPIERKLLDYRQRAIKILANSYYGYYGYARARWYCKECAESVTAWGREYITMTIKEIEEKYGFKVIYSDTDGFFATIPGADAETVKKKAMEFLKYINAKLPGALELEYEGFYKRGFFVTKKKYAVIDEEGKITTRGLEIVRRDWSEIAKETQARVLEALLKDGDVEKAVRIVKEVTEKLSKYEVPPEKLVIHEQITRDLKDYKATGPHVAVAKRLAARGVKIRPGTVISYIVLKGSGRIGDRAIPFDEFDPTKHKYDAEYYIENQVLPAVERILRAFGYRKEDLRYQKTRQVGLSAWLKPKGT

SEQ ID NO: 1995 - protein, 774 aa, synthetic construct
MILDTDDITEDGKPVIRIFKKENGEFKIEYDRTFEAYFYALLKDDSAIEEVKKITAERHGTVVTVKRVEKVQKKFLGRPVEVWKLYFTHWQDIPAIRDKIREHPAVIDIYEYDIPFAKRYLIDKGLVPMEGDEELKMLAFDIETLYHEGEEFAEGPILMISYADEEGARVITWKNVDLPYVDVVSTEREMIKRFLRVVKEKDPDVLITYNGDNFDFAYLKKRCEKLGINFALGRDGSEPKIQRMGDRFAVEVKGRIHFDLYPVIRRTINLPTYTLEAVYEAVFGQPKEKVYAEEITTAWETGENLERVARYSMEDAKVTYELGKEFLPMEAQLSRLIGQSLWDVSRSSTGNLVEWFLLRKAYERNELAPNKPDEKELARRRQSYEGGYVKEPERGLWENIVYLDFRSLYPSIIITHNVSPDTLNREGCKEYDVAPQVGHRFCKDFPGFIPSLLGDLLEERQKIKKKMKATIDPIERKLLDYRQRAIKILANSYYGYYGYARARWYCKECAESVTAWGREYITMTIKEIEEKYGFKVIYSDTDGFFATIPGADAETVKKKAMEFLKYINAKLPGALELEYEGFYKRGFFVTKKKYAVIDEEGKITTRGLEIVRRDWSEIAKETQARVLEALLKDGDVEKAVRIVKEVTEKLSKYEVPPEKLVIHEQITRDLKDYKATGPHVAVAKRLAARGVKIRPGTVISYIVLKGSGRIGDRAIPFDEFDPTKHKYDAEYYIENQVLPAVERILRAFGYRKEDLRYQKTRQVGLSAWLKPKGT

SEQ ID NO: 1996 - protein, 774 aa, synthetic construct
MILDTDDITEDGKPVIRIFKKENGEFKIEYDRTFEAYFYALLKDDSAIEEVKKITAERHGTVVTVKRVEKVQKKFLGRPVEVWKLYFTHYQDIPAIRDKIREHPAVIDIYEYDIPFAKRYLIDKGLVPMEGDEELKMLAFDIETLYHEGEEFAEGPILMISYADEEGARVITWKNVDLPYVDVVSTEREMIKRFLRVVKEKDPDVLITYNGDNFDFAYLKKRCEKLGINFALGRDGSEPKIQRMGDRFAVEVKGRIHFDLYPVIRRTINLPTYTLEAVYEAVFGQPKEKVYAEEITTAWETGENLERVARYSMEDAKVTYELGKEFLPMEAQLSRLIGQSLWDVSRSSTGNLVEWFLLRKAYERNELAPNKPDEKELARRRQSYEGGYVKEPERGLWENIVYLDFRSLYPSIIITHNVSPDTLNREGCKEYDVAPQVGHRFCKDFPGFIPSLLGDLLEERQKIKKKMKATIDPIERKLLDYRQRAIKILANSYYGYYGYARARWYCKECAESVTAWGREYITMTIKEIEEKYGFKVIYSDTDGFFATIPGADAETVKKKAMEFLKYINAKLPGALELEYEGFYKRGFFVTKKKYAVIDEEGKITTRGLEIVRRDWSEIAKETQARVLEALLKDGDVEKAVRIVKEVTEKLSKYEVPPEKLVIHEQITRDLKDYKATGPHVAVAKRLAARGVKIRPGTVISYIVLKGSGRIGDRAIPFDEFDPTKHKYDAEYYIENQVLPAVERILRAFGYRKEDLRYQKTRQVGLSAWLKPKGT

SEQ ID NO: 1997 - protein, 774 aa, synthetic construct
MILDTDDITEDGKPVIRIFKKENGEFKIEYDRTFEAYFYALLKDDSAIEEVKKITAERHGTVVTVKRVEKVQKKFLGRPVEVWKLYFTHPQDIPAIADKIREHPAVIDIYEYDIPFAKRYLIDKGLVPMEGDEELKMLAFDIETLYHEGEEFAEGPILMISYADEEGARVITWKNVDLPYVDVVSTEREMIKRFLRVVKEKDPDVLITYNGDNFDFAYLKKRCEKLGINFALGRDGSEPKIQRMGDRFAVEVKGRIHFDLYPVIRRTINLPTYTLEAVYEAVFGQPKEKVYAEEITTAWETGENLERVARYSMEDAKVTYELGKEFLPMEAQLSRLIGQSLWDVSRSSTGNLVEWFLLRKAYERNELAPNKPDEKELARRRQSYEGGYVKEPERGLWENIVYLDFRSLYPSIIITHNVSPDTLNREGCKEYDVAPQVGHRFCKDFPGFIPSLLGDLLEERQKIKKKMKATIDPIERKLLDYRQRAIKILANSYYGYYGYARARWYCKECAESVTAWGREYITMTIKEIEEKYGFKVIYSDTDGFFATIPGADAETVKKKAMEFLKYINAKLPGALELEYEGFYKRGFFVTKKKYAVIDEEGKITTRGLEIVRRDWSEIAKETQARVLEALLKDGDVEKAVRIVKEVTEKLSKYEVPPEKLVIHEQITRDLKDYKATGPHVAVAKRLAARGVKIRPGTVISYIVLKGSGRIGDRAIPFDEFDPTKHKYDAEYYIENQVLPAVERILRAFGYRKEDLRYQKTRQVGLSAWLKPKGT

SEQ ID NO: 1998 - protein, 774 aa, synthetic construct
MILDTDDITEDGKPVIRIFKKENGEFKIEYDRTFEPYFYALLKDDSAIEEVKKITAERHGTVVTVKRVEKVQKKFLGRPVEVWKLYFTHFQDIPAIRDKIREHPAVIDIYEYDIPFAKRYLIDKGLVPMEGDEELKMLAFDIETLYHEGEEFAEGPILMISYADEEGARVITWKNVDLPYVDVVSTEREMIKRFLRVVKEKDPDVLITYNGDNFDFAYLKKRCEKLGINFALGRDGSEPKIQRMGDRFAVEVKGRIHFDLYPVIRRTINLPTYTLEAVYEAVFGQPKEKVYAEEITTAWETGENLERVARYSMEDAKVTYELGKEFLPMEAQLSRLIGQSLWDVSRSSTGNLVEWFLLRKAYERNELAPNKPDEKELARRRQSYEGGYVKEPERGLWENIVYLDFRSLYPSIIITHNVSPDTLNREGCKEYDVAPQVGHRFCKDFPGFIPSLLGDLLEERQKIKKKMKATIDPIERKLLDYRQRAIKILANSYYGYYGYARARWYCKECAESVTAWGREYITMTIKEIEEKYGFKVIYSDTDGFFATIPGADAETVKKKAMEFLKYINAKLPGALELEYEGFYKRGFFVTKKKYAVIDEEGKITTRGLEIVRRDWSEIAKETQARVLEALLKDGDVEKAVRIVKEVTEKLSKYEVPPEKLVIHEQITRDLKDYKATGPHVAVAKRLAARGVKIRPGTVISYIVLKGSGRIGDRAIPFDEFDPTKHKYDAEYYIENQVLPAVERILRAFGYRKEDLRYQKTRQVGLSAWLKPKGT

SEQ ID NO: 1999 - protein, 774 aa, synthetic construct
MILDTDDITEDGKPVIRIFKKENGEFKIEYDRTFEPYFYALLKDDSAIEEVKKITAERHGTVVTVKRVEKVQKKFLGRPVEVWKLYFTHIQDIPAIFDKIREHPAVIDIYEYDIPFAKRYLIDKGLVPMEGDEELKMLAFDIETLYHEGEEFAEGPILMISYADEEGARVITWKNVDLPYVDVVSTEREMIKRFLRVVKEKDPDVLITYNGDNFDFAYLKKRCEKLGINFALGRDGSEPKIQRMGDRFAVEVKGRIHFDLYPVIRRTINLPTYTLEAVYEAVFGQPKEKVYAEEITTAWETGENLERVARYSMEDAKVTYELGKEFLPMEAQLSRLIGQSLWDVSRSSTGNLVEWFLLRKAYERNELAPNKPDEKELARRRQSYEGGYVKEPERGLWENIVYLDFRSLYPSIIITHNVSPDTLNREGCKEYDVAPQVGHRFCKDFPGFIPSLLGDLLEERQKIKKKMKATIDPIERKLLDYRQRAIKILANSYYGYYGYARARWYCKECAESVTAWGREYITMTIKEIEEKYGFKVIYSDTDGFFATIPGADAETVKKKAMEFLKYINAKLPGALELEYEGFYKRGFFVTKKKYAVIDEEGKITTRGLEIVRRDWSEIAKETQARVLEALLKDGDVEKAVRIVKEVTEKLSKYEVPPEKLVIHEQITRDLKDYKATGPHVAVAKRLAARGVKIRPGTVISYIVLKGSGRIGDRAIPFDEFDPTKHKYDAEYYIENQVLPAVERILRAFGYRKEDLRYQKTRQVGLSAWLKPKGT

SEQ ID NO: 2000 - protein, 774 aa, synthetic construct
MILDTDDITEDGKPVIRIFKKENGEFKIEYDRTFEPYFYALLKDDSAIEEVKKITAERHGTVVTVKRVEKVQKKFLGRPVEVWKLYFTHSQDIPAIRDKIREHPAVIDIYEYDIPFAKRYLIDKGLVPMEGDEELKMLAFDIETLYHEGEEFAEGPILMISYADEEGARVITWKNVDLPYVDVVSTEREMIKRFLRVVKEKDPDVLITYNGDNFDFAYLKKRCEKLGINFALGRDGSEPKIQRMGDRFAVEVKGRIHFDLYPVIRRTINLPTYTLEAVYEAVFGQPKEKVYAEEITTAWETGENLERVARYSMEDAKVTYELGKEFLPMEAQLSRLIGQSLWDVSRSSTGNLVEWFLLRKAYERNELAPNKPDEKELARRRQSYEGGYVKEPERGLWENIVYLDFRSLYPSIIITHNVSPDTLNREGCKEYDVAPQVGHRFCKDFPGFIPSLLGDLLEERQKIKKKMKATIDPIERKLLDYRQRAIKILANSYYGYYGYARARWYCKECAESVTAWGREYITMTIKEIEEKYGFKVIYSDTDGFFATIPGADAETVKKKAMEFLKYINAKLPGALELEYEGFYKRGFFVTKKKYAVIDEEGKITTRGLEIVRRDWSEIAKETQARVLEALLKDGDVEKAVRIVKEVTEKLSKYEVPPEKLVIHEQITRDLKDYKATGPHVAVAKRLAARGVKIRPGTVISYIVLKGSGRIGDRAIPFDEFDPTKHKYDAEYYIENQVLPAVERILRAFGYRKEDLRYQKTRQVGLSAWLKPKGT

SEQ ID NO: 2001 - protein, 774 aa, synthetic construct
MILDTDDITEDGKPVIRIFKKENGEFKIEYDRTFEPYFYALLKDDSAIEEVKKITAERHGTVVTVKRVEKVQKKFLGRPVEVWKLYFTHWQDVPAIRDKIREHPAVIDIYEYDIPFAKRYLIDKGLVPMEGDEELKMLAFDIETLYHEGEEFAEGPILMISYADEEGARVITWKNVDLPYVDVVSTEREMIKRFLRVVKEKDPDVLITYNGDNFDFAYLKKRCEKLGINFALGRDGSEPKIQRMGDRFAVEVKGRIHFDLYPVIRRTINLPTYTLEAVYEAVFGQPKEKVYAEEITTAWETGENLERVARYSMEDAKVTYELGKEFLPMEAQLSRLIGQSLWDVSRSSTGNLVEWFLLRKAYERNELAPNKPDEKELARRRQSYEGGYVKEPERGLWENIVYLDFRSLYPSIIITHNVSPDTLNREGCKEYDVAPQVGHRFCKDFPGFIPSLLGDLLEERQKIKKKMKATIDPIERKLLDYRQRAIKILANSYYGYYGYARARWYCKECAESVTAWGREYITMTIKEIEEKYGFKVIYSDTDGFFATIPGADAETVKKKAMEFLKYINAKLPGALELEYEGFYKRGFFVTKKKYAVIDEEGKITTRGLEIVRRDWSEIAKETQARVLEALLKDGDVEKAVRIVKEVTEKLSKYEVPPEKLVIHEQITRDLKDYKATGPHVAVAKRLAARGVKIRPGTVISYIVLKGSGRIGDRAIPFDEFDPTKHKYDAEYYIENQVLPAVERILRAFGYRKEDLRYQKTRQVGLSAWLKPKGT

SEQ ID NO: 2002 - protein, 774 aa, synthetic construct
MILDTDDITEDGKPVIRIFKKENGEFKIEYDRTFEPYFYALLKDDSAIEEVKKITAERHGTVVTVKRVEKVQKKFLGRPVEVWKLYFTHWQDIPAIRDKIREHPAVIDIYEYDIPFAKRYLIDKGLVPMEGDEELKMLAFDIETLYHEGEEFAEGPILMISYADEEGARVITWKNVDLPYVDVVSTEREMIKRFLRVVKEKDPDVLITYNGDNFDFAYLKKRCEKLGINFALGRDGSEPKIQRMGDRFAVEVKGRIHFDLYPVIRRTINLPTYTLEAVYEAVFGQPKEKVYAEEITTAWETGENLERVARYSMEDAKVTYELGKEFLPMEAQLSRLIGQSLWDVSRSSTGNLVEWFLLRKAYERNELAPNKPDEKELARRRQSYEGGYVKEPERGLWENIVYLDFRSLYPSIIITHNVSPDTLNREGCKEYDVAPQVGHRFCKDFPGFIPSLLGDLLEERQKIKKKMKATIDPIERKLLDYRQRAIKILANSYYGYYGYARARWYCKECAESVTAWGREYITMTIKEIEEKYGFKVIYSDTDGFFATIPGADAETVKKKAMEFLKYINAKLPGALELEYEGFYKRGFFVTKKKYAVIDEEGKITTRGLEIVRRDWSEIAKETQARVLEALLKDGDVEKAVRIVKEVTEKLSKYEVPPEKLVIHEQITRDLKDYKATGPHVAVAKRLAARGVKIRPGTVISYIVLKGSGRIGDRAIPFDEFDPTKHKYDAEYYIENQVLPAVERILRAFGYRKEDLRYQKTRQVGLSAWLKPKGT

SEQ ID NO: 2003 - protein, 774 aa, synthetic construct
MILDTDDITEDGKPVIRIFKKENGEFKIEYDRTFEPYFYALLKDDSAIEEVKKITAERHGTVVTVKRVEKVQKKFLGRPVEVWKLYFTHYQDVPAIRDKIREHPAVIDIYEYDIPFAKRYLIDKGLVPMEGDEELKMLAFDIETLYHEGEEFAEGPILMISYADEEGARVITWKNVDLPYVDVVSTEREMIKRFLRVVKEKDPDVLITYNGDNFDFAYLKKRCEKLGINFALGRDGSEPKIQRMGDRFAVEVKGRIHFDLYPVIRRTINLPTYTLEAVYEAVFGQPKEKVYAEEITTAWETGENLERVARYSMEDAKVTYELGKEFLPMEAQLSRLIGQSLWDVSRSSTGNLVEWFLLRKAYERNELAPNKPDEKELARRRQSYEGGYVKEPERGLWENIVYLDFRSLYPSIIITHNVSPDTLNREGCKEYDVAPQVGHRFCKDFPGFIPSLLGDLLEERQKIKKKMKATIDPIERKLLDYRQRAIKILANSYYGYYGYARARWYCKECAESVTAWGREYITMTIKEIEEKYGFKVIYSDTDGFFATIPGADAETVKKKAMEFLKYINAKLPGALELEYEGFYKRGFFVTKKKYAVIDEEGKITTRGLEIVRRDWSEIAKETQARVLEALLKDGDVEKAVRIVKEVTEKLSKYEVPPEKLVIHEQITRDLKDYKATGPHVAVAKRLAARGVKIRPGTVISYIVLKGSGRIGDRAIPFDEFDPTKHKYDAEYYIENQVLPAVERILRAFGYRKEDLRYQKTRQVGLSAWLKPKGT

SEQ ID NO: 2004 - protein, 774 aa, synthetic construct
MILDTDDITEDGKPVIRIFKKENGEFKIEYDRTFEPYFYALLKDDSAIEEVKKITAERHGTVVTVKRVEKVQKKFLGRPVEVWKLYFTHYQDIPAIRDKIREHPAVIDIYEYDIPFAKRYLIDKGLVPMEGDEELKMLAFDIETLYHEGEEFAEGPILMISYADEEGARVITWKNVDLPYVDVVSTEREMIKRFLRVVKEKDPDVLITYNGDNFDFAYLKKRCEKLGINFALGRDGSEPKIQRMGDRFAVEVKGRIHFDLYPVIRRTINLPTYTLEAVYEAVFGQPKEKVYAEEITTAWETGENLERVARYSMEDAKVTYELGKEFLPMEAQLSRLIGQSLWDVSRSSTGNLVEWFLLRKAYERNELAPNKPDEKELARRRQSYEGGYVKEPERGLWENIVYLDFRSLYPSIIITHNVSPDTLNREGCKEYDVAPQVGHRFCKDFPGFIPSLLGDLLEERQKIKKKMKATIDPIERKLLDYRQRAIKILANSYYGYYGYARARWYCKECAESVTAWGREYITMTIKEIEEKYGFKVIYSDTDGFFATIPGADAETVKKKAMEFLKYINAKLPGALELEYEGFYKRGFFVTKKKYAVIDEEGKITTRGLEIVRRDWSEIAKETQARVLEALLKDGDVEKAVRIVKEVTEKLSKYEVPPEKLVIHEQITRDLKDYKATGPHVAVAKRLAARGVKIRPGTVISYIVLKGSGRIGDRAIPFDEFDPTKHKYDAEYYIENQVLPAVERILRAFGYRKEDLRYQKTRQVGLSAWLKPKGT

SEQ ID NO: 2005 - protein, 774 aa, synthetic construct
MILDTDDITEDGKPVIRIFKKENGEFKIEYDRTFEPYFYALLKDDSAIEEVKKITAERHGTVVTVKRVEKVQKKFLGRPVEVWKLYFTHYQDKPAIRDKIREHPAVIDIYEYDIPFAKRYLIDKGLVPMEGDEELKMLAFDIETLYHEGEEFAEGPILMISYADEEGARVITWKNVDLPYVDVVSTEREMIKRFLRVVKEKDPDVLITYNGDNFDFAYLKKRCEKLGINFALGRDGSEPKIQRMGDRFAVEVKGRIHFDLYPVIRRTINLPTYTLEAVYEAVFGQPKEKVYAEEITTAWETGENLERVARYSMEDAKVTYELGKEFLPMEAQLSRLIGQSLWDVSRSSTGNLVEWFLLRKAYERNELAPNKPDEKELARRRQSYEGGYVKEPERGLWENIVYLDFRSLYPSIIITHNVSPDTLNREGCKEYDVAPQVGHRFCKDFPGFIPSLLGDLLEERQKIKKKMKATIDPIERKLLDYRQRAIKILANSYYGYYGYARARWYCKECAESVTAWGREYITMTIKEIEEKYGFKVIYSDTDGFFATIPGADAETVKKKAMEFLKYINAKLPGALELEYEGFYKRGFFVTKKKYAVIDEEGKITTRGLEIVRRDWSEIAKETQARVLEALLKDGDVEKAVRIVKEVTEKLSKYEVPPEKLVIHEQITRDLKDYKATGPHVAVAKRLAARGVKIRPGTVISYIVLKGSGRIGDRAIPFDEFDPTKHKYDAEYYIENQVLPAVERILRAFGYRKEDLRYQKTRQVGLSAWLKPKGT

SEQ ID NO: 2006 - protein, 774 aa, synthetic construct
MILDTDDITEDGKPVIRIFKKENGEFKIEYDRTFEPYFYALLKDDSAIEEVKKITAERHGTVVTVKRVEKVQKKFLGRPVEVWKLYFTHPQDIPAIFDKIREHPAVIDIYEYDIPFAKRYLIDKGLVPMEGDEELKMLAFDIETLYHEGEEFAEGPILMISYADEEGARVITWKNVDLPYVDVVSTEREMIKRFLRVVKEKDPDVLITYNGDNFDFAYLKKRCEKLGINFALGRDGSEPKIQRMGDRFAVEVKGRIHFDLYPVIRRTINLPTYTLEAVYEAVFGQPKEKVYAEEITTAWETGENLERVARYSMEDAKVTYELGKEFLPMEAQLSRLIGQSLWDVSRSSTGNLVEWFLLRKAYERNELAPNKPDEKELARRRQSYEGGYVKEPERGLWENIVYLDFRSLYPSIIITHNVSPDTLNREGCKEYDVAPQVGHRFCKDFPGFIPSLLGDLLEERQKIKKKMKATIDPIERKLLDYRQRAIKILANSYYGYYGYARARWYCKECAESVTAWGREYITMTIKEIEEKYGFKVIYSDTDGFFATIPGADAETVKKKAMEFLKYINAKLPGALELEYEGFYKRGFFVTKKKYAVIDEEGKITTRGLEIVRRDWSEIAKETQARVLEALLKDGDVEKAVRIVKEVTEKLSKYEVPPEKLVIHEQITRDLKDYKATGPHVAVAKRLAARGVKIRPGTVISYIVLKGSGRIGDRAIPFDEFDPTKHKYDAEYYIENQVLPAVERILRAFGYRKEDLRYQKTRQVGLSAWLKPKGT

SEQ ID NO: 2007 - protein, 774 aa, synthetic construct
MILDTDLITEDGKPVFRIFKKENGEFKIEYDRTFEPYFYALLKDDSAIEEVKKITAERHGTVVTVKRVEKVQKKFLGRPVEVWKLYFTHPQDVPAIRDKIREHPAVIDIYEYDIPFAKRYLIDKGLVPMEGDEELKMLAFDIETLYHEGEEFAEGPILMISYADEEGARVITWKNVDLPYVDVVSTEREMIKRFLRVVKEKDPDVLITYNGDNFDFAYLKKRCEKLGINFALGRDGSEPKIQRMGDRFAVEVKGRIHFDLYPVIRRTINLPTYTLEAVYEAVFGQPKEKVYAEEITTAWETGENLERVARYSMEDAKVTYELGKEFLPMEAQLSRLIGQSLWDVSRSSTGNLVEWFLLRKAYERNELAPNKPDEKELARRRQSYEGGYVKEPERGLWENIVYLDFRSLYPSIIITHNVSPDTLNREGCKEYDVAPQVGHRFCKDFPGFIPSLLGDLLEERQKIKKKMKATIDPIERKLLDYRQRAIKILANSYYGYYGYARARWYCKECAESVTAWGREYITMTIKEIEEKYGFKVIYSDTDGFFATIPGADAETVKKKAMEFLKYINAKLPGALELEYEGFYKRGFFVTKKKYAVIDEEGKITTRGLEIVRRDWSEIAKETQARVLEALLKDGDVEKAVRIVKEVTEKLSKYEVPPEKLVIHEQITRDLKDYKATGPHVAVAKRLAARGVKIRPGTVISYIVLKGSGRIGDRAIPFDEFDPTKHKYDAEYYIENQVLPAVERILRAFGYRKEDLRYQKTRQVGLSAWLKPKGT

SEQ ID NO: 2008 - protein, 774 aa, synthetic construct
MILDTDLITEDGKPVFRIFKKENGEFKIEYDRTFEAYFYALLKDDSAIEEVKKITAERHGTVVTVKRVEKVQKKFLGRPVEVWKLYFTHPQDVPAIRDKIREHPAVIDIYEYDIPFAKRYLIDKGLVPMEGDEELKMLAFDIETLYHEGEEFAEGPILMISYADEEGARVITWKNVDLPYVDVVSTEREMIKRFLRVVKEKDPDVLITYNGDNFDFAYLKKRCEKLGINFALGRDGSEPKIQRMGDRFAVEVKGRIHFDLYPVIRRTINLPTYTLEAVYEAVFGQPKEKVYAEEITTAWETGENLERVARYSMEDAKVTYELGKEFLPMEAQLSRLIGQSLWDVSRSSTGNLVEWFLLRKAYERNELAPNKPDEKELARRRQSYEGGYVKEPERGLWENIVYLDFRSLYPSIIITHNVSPDTLNREGCKEYDVAPQVGHRFCKDFPGFIPSLLGDLLEERQKIKKKMKATIDPIERKLLDYRQRAIKILANSYYGYYGYARARWYCKECAESVTAWGREYITMTIKEIEEKYGFKVIYSDTDGFFATIPGADAETVKKKAMEFLKYINAKLPGALELEYEGFYKRGFFVTKKKYAVIDEEGKITTRGLEIVRRDWSEIAKETQARVLEALLKDGDVEKAVRIVKEVTEKLSKYEVPPEKLVIHEQITRDLKDYKATGPHVAVAKRLAARGVKIRPGTVISYIVLKGSGRIGDRAIPFDEFDPTKHKYDAEYYIENQVLPAVERILRAFGYRKEDLRYQKTRQVGLSAWLKPKGT

SEQ ID NO: 2009 - protein, 774 aa, synthetic construct
MILDTDLITEDGKPVFRIFKKENGEFKIEYDRTFEAYFYALLKDDSAIEEVKKITAERHGTVVTVKRVEKVQKKFLGRPVEVWKLYFTHFQDVPAIRDKIREHPAVIDIYEYDIPFAKRYLIDKGLVPMEGDEELKMLAFDIETLYHEGEEFAEGPILMISYADEEGARVITWKNVDLPYVDVVSTEREMIKRFLRVVKEKDPDVLITYNGDNFDFAYLKKRCEKLGINFALGRDGSEPKIQRMGDRFAVEVKGRIHFDLYPVIRRTINLPTYTLEAVYEAVFGQPKEKVYAEEITTAWETGENLERVARYSMEDAKVTYELGKEFLPMEAQLSRLIGQSLWDVSRSSTGNLVEWFLLRKAYERNELAPNKPDEKELARRRQSYEGGYVKEPERGLWENIVYLDFRSLYPSIIITHNVSPDTLNREGCKEYDVAPQVGHRFCKDFPGFIPSLLGDLLEERQKIKKKMKATIDPIERKLLDYRQRAIKILANSYYGYYGYARARWYCKECAESVTAWGREYITMTIKEIEEKYGFKVIYSDTDGFFATIPGADAETVKKKAMEFLKYINAKLPGALELEYEGFYKRGFFVTKKKYAVIDEEGKITTRGLEIVRRDWSEIAKETQARVLEALLKDGDVEKAVRIVKEVTEKLSKYEVPPEKLVIHEQITRDLKDYKATGPHVAVAKRLAARGVKIRPGTVISYIVLKGSGRIGDRAIPFDEFDPTKHKYDAEYYIENQVLPAVERILRAFGYRKEDLRYQKTRQVGLSAWLKPKGT

SEQ ID NO: 2010 - protein, 774 aa, synthetic construct
MILDTDLITEDGKPVFRIFKKENGEFKIEYDRTFEAYFYALLKDDSAIEEVKKITAERHGTVVTVKRVEKVQKKFLGRPVEVWKLYFTHFQDVPAIADKIREHPAVIDIYEYDIPFAKRYLIDKGLVPMEGDEELKMLAFDIETLYHEGEEFAEGPILMISYADEEGARVITWKNVDLPYVDVVSTEREMIKRFLRVVKEKDPDVLITYNGDNFDFAYLKKRCEKLGINFALGRDGSEPKIQRMGDRFAVEVKGRIHFDLYPVIRRTINLPTYTLEAVYEAVFGQPKEKVYAEEITTAWETGENLERVARYSMEDAKVTYELGKEFLPMEAQLSRLIGQSLWDVSRSSTGNLVEWFLLRKAYERNELAPNKPDEKELARRRQSYEGGYVKEPERGLWENIVYLDFRSLYPSIIITHNVSPDTLNREGCKEYDVAPQVGHRFCKDFPGFIPSLLGDLLEERQKIKKKMKATIDPIERKLLDYRQRAIKILANSYYGYYGYARARWYCKECAESVTAWGREYITMTIKEIEEKYGFKVIYSDTDGFFATIPGADAETVKKKAMEFLKYINAKLPGALELEYEGFYKRGFFVTKKKYAVIDEEGKITTRGLEIVRRDWSEIAKETQARVLEALLKDGDVEKAVRIVKEVTEKLSKYEVPPEKLVIHEQITRDLKDYKATGPHVAVAKRLAARGVKIRPGTVISYIVLKGSGRIGDRAIPFDEFDPTKHKYDAEYYIENQVLPAVERILRAFGYRKEDLRYQKTRQVGLSAWLKPKGT

SEQ ID NO: 2011 - protein, 774 aa, synthetic construct
MILDTDLITEDGKPVFRIFKKENGEFKIEYDRTFEAYFYALLKDDSAIEEVKKITAERHGTVVTVKRVEKVQKKFLGRPVEVWKLYFTHFQDIPAIRDKIREHPAVIDIYEYDIPFAKRYLIDKGLVPMEGDEELKMLAFDIETLYHEGEEFAEGPILMISYADEEGARVITWKNVDLPYVDVVSTEREMIKRFLRVVKEKDPDVLITYNGDNFDFAYLKKRCEKLGINFALGRDGSEPKIQRMGDRFAVEVKGRIHFDLYPVIRRTINLPTYTLEAVYEAVFGQPKEKVYAEEITTAWETGENLERVARYSMEDAKVTYELGKEFLPMEAQLSRLIGQSLWDVSRSSTGNLVEWFLLRKAYERNELAPNKPDEKELARRRQSYEGGYVKEPERGLWENIVYLDFRSLYPSIIITHNVSPDTLNREGCKEYDVAPQVGHRFCKDFPGFIPSLLGDLLEERQKIKKKMKATIDPIERKLLDYRQRAIKILANSYYGYYGYARARWYCKECAESVTAWGREYITMTIKEIEEKYGFKVIYSDTDGFFATIPGADAETVKKKAMEFLKYINAKLPGALELEYEGFYKRGFFVTKKKYAVIDEEGKITTRGLEIVRRDWSEIAKETQARVLEALLKDGDVEKAVRIVKEVTEKLSKYEVPPEKLVIHEQITRDLKDYKATGPHVAVAKRLAARGVKIRPGTVISYIVLKGSGRIGDRAIPFDEFDPTKHKYDAEYYIENQVLPAVERILRAFGYRKEDLRYQKTRQVGLSAWLKPKGT

SEQ ID NO: 2012 - protein, 774 aa, synthetic construct
MILDTDLITEDGKPVFRIFKKENGEFKIEYDRTFEAYFYALLKDDSAIEEVKKITAERHGTVVTVKRVEKVQKKFLGRPVEVWKLYFTHFQDIPAIADKIREHPAVIDIYEYDIPFAKRYLIDKGLVPMEGDEELKMLAFDIETLYHEGEEFAEGPILMISYADEEGARVITWKNVDLPYVDVVSTEREMIKRFLRVVKEKDPDVLITYNGDNFDFAYLKKRCEKLGINFALGRDGSEPKIQRMGDRFAVEVKGRIHFDLYPVIRRTINLPTYTLEAVYEAVFGQPKEKVYAEEITTAWETGENLERVARYSMEDAKVTYELGKEFLPMEAQLSRLIGQSLWDVSRSSTGNLVEWFLLRKAYERNELAPNKPDEKELARRRQSYEGGYVKEPERGLWENIVYLDFRSLYPSIIITHNVSPDTLNREGCKEYDVAPQVGHRFCKDFPGFIPSLLGDLLEERQKIKKKMKATIDPIERKLLDYRQRAIKILANSYYGYYGYARARWYCKECAESVTAWGREYITMTIKEIEEKYGFKVIYSDTDGFFATIPGADAETVKKKAMEFLKYINAKLPGALELEYEGFYKRGFFVTKKKYAVIDEEGKITTRGLEIVRRDWSEIAKETQARVLEALLKDGDVEKAVRIVKEVTEKLSKYEVPPEKLVIHEQITRDLKDYKATGPHVAVAKRLAARGVKIRPGTVISYIVLKGSGRIGDRAIPFDEFDPTKHKYDAEYYIENQVLPAVERILRAFGYRKEDLRYQKTRQVGLSAWLKPKGT

SEQ ID NO: 2013 - protein, 774 aa, synthetic construct
MILDTDLITEDGKPVFRIFKKENGEFKIEYDRTFEAYFYALLKDDSAIEEVKKITAERHGTVVTVKRVEKVQKKFLGRPVEVWKLYFTHFQDIPAIFDKIREHPAVIDIYEYDIPFAKRYLIDKGLVPMEGDEELKMLAFDIETLYHEGEEFAEGPILMISYADEEGARVITWKNVDLPYVDVVSTEREMIKRFLRVVKEKDPDVLITYNGDNFDFAYLKKRCEKLGINFALGRDGSEPKIQRMGDRFAVEVKGRIHFDLYPVIRRTINLPTYTLEAVYEAVFGQPKEKVYAEEITTAWETGENLERVARYSMEDAKVTYELGKEFLPMEAQLSRLIGQSLWDVSRSSTGNLVEWFLLRKAYERNELAPNKPDEKELARRRQSYEGGYVKEPERGLWENIVYLDFRSLYPSIIITHNVSPDTLNREGCKEYDVAPQVGHRFCKDFPGFIPSLLGDLLEERQKIKKKMKATIDPIERKLLDYRQRAIKILANSYYGYYGYARARWYCKECAESVTAWGREYITMTIKEIEEKYGFKVIYSDTDGFFATIPGADAETVKKKAMEFLKYINAKLPGALELEYEGFYKRGFFVTKKKYAVIDEEGKITTRGLEIVRRDWSEIAKETQARVLEALLKDGDVEKAVRIVKEVTEKLSKYEVPPEKLVIHEQITRDLKDYKATGPHVAVAKRLAARGVKIRPGTVISYIVLKGSGRIGDRAIPFDEFDPTKHKYDAEYYIENQVLPAVERILRAFGYRKEDLRYQKTRQVGLSAWLKPKGT

SEQ ID NO: 2014 - protein, 774 aa, synthetic construct
MILDTDLITEDGKPVFRIFKKENGEFKIEYDRTFEAYFYALLKDDSAIEEVKKITAERHGTVVTVKRVEKVQKKFLGRPVEVWKLYFTHFQDIPAIHDKIREHPAVIDIYEYDIPFAKRYLIDKGLVPMEGDEELKMLAFDIETLYHEGEEFAEGPILMISYADEEGARVITWKNVDLPYVDVVSTEREMIKRFLRVVKEKDPDVLITYNGDNFDFAYLKKRCEKLGINFALGRDGSEPKIQRMGDRFAVEVKGRIHFDLYPVIRRTINLPTYTLEAVYEAVFGQPKEKVYAEEITTAWETGENLERVARYSMEDAKVTYELGKEFLPMEAQLSRLIGQSLWDVSRSSTGNLVEWFLLRKAYERNELAPNKPDEKELARRRQSYEGGYVKEPERGLWENIVYLDFRSLYPSIIITHNVSPDTLNREGCKEYDVAPQVGHRFCKDFPGFIPSLLGDLLEERQKIKKKMKATIDPIERKLLDYRQRAIKILANSYYGYYGYARARWYCKECAESVTAWGREYITMTIKEIEEKYGFKVIYSDTDGFFATIPGADAETVKKKAMEFLKYINAKLPGALELEYEGFYKRGFFVTKKKYAVIDEEGKITTRGLEIVRRDWSEIAKETQARVLEALLKDGDVEKAVRIVKEVTEKLSKYEVPPEKLVIHEQITRDLKDYKATGPHVAVAKRLAARGVKIRPGTVISYIVLKGSGRIGDRAIPFDEFDPTKHKYDAEYYIENQVLPAVERILRAFGYRKEDLRYQKTRQVGLSAWLKPKGT

SEQ ID NO: 2015 - protein, 774 aa, synthetic construct
MILDTDLITEDGKPVFRIFKKENGEFKIEYDRTFEAYFYALLKDDSAIEEVKKITAERHGTVVTVKRVEKVQKKFLGRPVEVWKLYFTHIQDVPAIRDKIREHPAVIDIYEYDIPFAKRYLIDKGLVPMEGDEELKMLAFDIETLYHEGEEFAEGPILMISYADEEGARVITWKNVDLPYVDVVSTEREMIKRFLRVVKEKDPDVLITYNGDNFDFAYLKKRCEKLGINFALGRDGSEPKIQRMGDRFAVEVKGRIHFDLYPVIRRTINLPTYTLEAVYEAVFGQPKEKVYAEEITTAWETGENLERVARYSMEDAKVTYELGKEFLPMEAQLSRLIGQSLWDVSRSSTGNLVEWFLLRKAYERNELAPNKPDEKELARRRQSYEGGYVKEPERGLWENIVYLDFRSLYPSIIITHNVSPDTLNREGCKEYDVAPQVGHRFCKDFPGFIPSLLGDLLEERQKIKKKMKATIDPIERKLLDYRQRAIKILANSYYGYYGYARARWYCKECAESVTAWGREYITMTIKEIEEKYGFKVIYSDTDGFFATIPGADAETVKKKAMEFLKYINAKLPGALELEYEGFYKRGFFVTKKKYAVIDEEGKITTRGLEIVRRDWSEIAKETQARVLEALLKDGDVEKAVRIVKEVTEKLSKYEVPPEKLVIHEQITRDLKDYKATGPHVAVAKRLAARGVKIRPGTVISYIVLKGSGRIGDRAIPFDEFDPTKHKYDAEYYIENQVLPAVERILRAFGYRKEDLRYQKTRQVGLSAWLKPKGT

SEQ ID NO: 2016 - protein, 774 aa, synthetic construct
MILDTDLITEDGKPVFRIFKKENGEFKIEYDRTFEAYFYALLKDDSAIEEVKKITAERHGTVVTVKRVEKVQKKFLGRPVEVWKLYFTHIQDVPAIHDKIREHPAVIDIYEYDIPFAKRYLIDKGLVPMEGDEELKMLAFDIETLYHEGEEFAEGPILMISYADEEGARVITWKNVDLPYVDVVSTEREMIKRFLRVVKEKDPDVLITYNGDNFDFAYLKKRCEKLGINFALGRDGSEPKIQRMGDRFAVEVKGRIHFDLYPVIRRTINLPTYTLEAVYEAVFGQPKEKVYAEEITTAWETGENLERVARYSMEDAKVTYELGKEFLPMEAQLSRLIGQSLWDVSRSSTGNLVEWFLLRKAYERNELAPNKPDEKELARRRQSYEGGYVKEPERGLWENIVYLDFRSLYPSIIITHNVSPDTLNREGCKEYDVAPQVGHRFCKDFPGFIPSLLGDLLEERQKIKKKMKATIDPIERKLLDYRQRAIKILANSYYGYYGYARARWYCKECAESVTAWGREYITMTIKEIEEKYGFKVIYSDTDGFFATIPGADAETVKKKAMEFLKYINAKLPGALELEYEGFYKRGFFVTKKKYAVIDEEGKITTRGLEIVRRDWSEIAKETQARVLEALLKDGDVEKAVRIVKEVTEKLSKYEVPPEKLVIHEQITRDLKDYKATGPHVAVAKRLAARGVKIRPGTVISYIVLKGSGRIGDRAIPFDEFDPTKHKYDAEYYIENQVLPAVERILRAFGYRKEDLRYQKTRQVGLSAWLKPKGT

SEQ ID NO: 2017 - protein, 774 aa, synthetic construct
MILDTDLITEDGKPVFRIFKKENGEFKIEYDRTFEAYFYALLKDDSAIEEVKKITAERHGTVVTVKRVEKVQKKFLGRPVEVWKLYFTHIQDIPAIRDKIREHPAVIDIYEYDIPFAKRYLIDKGLVPMEGDEELKMLAFDIETLYHEGEEFAEGPILMISYADEEGARVITWKNVDLPYVDVVSTEREMIKRFLRVVKEKDPDVLITYNGDNFDFAYLKKRCEKLGINFALGRDGSEPKIQRMGDRFAVEVKGRIHFDLYPVIRRTINLPTYTLEAVYEAVFGQPKEKVYAEEITTAWETGENLERVARYSMEDAKVTYELGKEFLPMEAQLSRLIGQSLWDVSRSSTGNLVEWFLLRKAYERNELAPNKPDEKELARRRQSYEGGYVKEPERGLWENIVYLDFRSLYPSIIITHNVSPDTLNREGCKEYDVAPQVGHRFCKDFPGFIPSLLGDLLEERQKIKKKMKATIDPIERKLLDYRQRAIKILANSYYGYYGYARARWYCKECAESVTAWGREYITMTIKEIEEKYGFKVIYSDTDGFFATIPGADAETVKKKAMEFLKYINAKLPGALELEYEGFYKRGFFVTKKKYAVIDEEGKITTRGLEIVRRDWSEIAKETQARVLEALLKDGDVEKAVRIVKEVTEKLSKYEVPPEKLVIHEQITRDLKDYKATGPHVAVAKRLAARGVKIRPGTVISYIVLKGSGRIGDRAIPFDEFDPTKHKYDAEYYIENQVLPAVERILRAFGYRKEDLRYQKTRQVGLSAWLKPKGT

SEQ ID NO: 2018 - protein, 774 aa, synthetic construct
MILDTDLITEDGKPVFRIFKKENGEFKIEYDRTFEAYFYALLKDDSAIEEVKKITAERHGTVVTVKRVEKVQKKFLGRPVEVWKLYFTHWQDVPAIRDKIREHPAVIDIYEYDIPFAKRYLIDKGLVPMEGDEELKMLAFDIETLYHEGEEFAEGPILMISYADEEGARVITWKNVDLPYVDVVSTEREMIKRFLRVVKEKDPDVLITYNGDNFDFAYLKKRCEKLGINFALGRDGSEPKIQRMGDRFAVEVKGRIHFDLYPVIRRTINLPTYTLEAVYEAVFGQPKEKVYAEEITTAWETGENLERVARYSMEDAKVTYELGKEFLPMEAQLSRLIGQSLWDVSRSSTGNLVEWFLLRKAYERNELAPNKPDEKELARRRQSYEGGYVKEPERGLWENIVYLDFRSLYPSIIITHNVSPDTLNREGCKEYDVAPQVGHRFCKDFPGFIPSLLGDLLEERQKIKKKMKATIDPIERKLLDYRQRAIKILANSYYGYYGYARARWYCKECAESVTAWGREYITMTIKEIEEKYGFKVIYSDTDGFFATIPGADAETVKKKAMEFLKYINAKLPGALELEYEGFYKRGFFVTKKKYAVIDEEGKITTRGLEIVRRDWSEIAKETQARVLEALLKDGDVEKAVRIVKEVTEKLSKYEVPPEKLVIHEQITRDLKDYKATGPHVAVAKRLAARGVKIRPGTVISYIVLKGSGRIGDRAIPFDEFDPTKHKYDAEYYIENQVLPAVERILRAFGYRKEDLRYQKTRQVGLSAWLKPKGT

SEQ ID NO: 2019 - protein, 774 aa, synthetic construct
MILDTDLITEDGKPVFRIFKKENGEFKIEYDRTFEAYFYALLKDDSAIEEVKKITAERHGTVVTVKRVEKVQKKFLGRPVEVWKLYFTHWQDIPAIRDKIREHPAVIDIYEYDIPFAKRYLIDKGLVPMEGDEELKMLAFDIETLYHEGEEFAEGPILMISYADEEGARVITWKNVDLPYVDVVSTEREMIKRFLRVVKEKDPDVLITYNGDNFDFAYLKKRCEKLGINFALGRDGSEPKIQRMGDRFAVEVKGRIHFDLYPVIRRTINLPTYTLEAVYEAVFGQPKEKVYAEEITTAWETGENLERVARYSMEDAKVTYELGKEFLPMEAQLSRLIGQSLWDVSRSSTGNLVEWFLLRKAYERNELAPNKPDEKELARRRQSYEGGYVKEPERGLWENIVYLDFRSLYPSIIITHNVSPDTLNREGCKEYDVAPQVGHRFCKDFPGFIPSLLGDLLEERQKIKKKMKATIDPIERKLLDYRQRAIKILANSYYGYYGYARARWYCKECAESVTAWGREYITMTIKEIEEKYGFKVIYSDTDGFFATIPGADAETVKKKAMEFLKYINAKLPGALELEYEGFYKRGFFVTKKKYAVIDEEGKITTRGLEIVRRDWSEIAKETQARVLEALLKDGDVEKAVRIVKEVTEKLSKYEVPPEKLVIHEQITRDLKDYKATGPHVAVAKRLAARGVKIRPGTVISYIVLKGSGRIGDRAIPFDEFDPTKHKYDAEYYIENQVLPAVERILRAFGYRKEDLRYQKTRQVGLSAWLKPKGT

SEQ ID NO: 2020 - protein, 774 aa, synthetic construct
MILDTDLITEDGKPVFRIFKKENGEFKIEYDRTFEAYFYALLKDDSAIEEVKKITAERHGTVVTVKRVEKVQKKFLGRPVEVWKLYFTHWQDIPAIFDKIREHPAVIDIYEYDIPFAKRYLIDKGLVPMEGDEELKMLAFDIETLYHEGEEFAEGPILMISYADEEGARVITWKNVDLPYVDVVSTEREMIKRFLRVVKEKDPDVLITYNGDNFDFAYLKKRCEKLGINFALGRDGSEPKIQRMGDRFAVEVKGRIHFDLYPVIRRTINLPTYTLEAVYEAVFGQPKEKVYAEEITTAWETGENLERVARYSMEDAKVTYELGKEFLPMEAQLSRLIGQSLWDVSRSSTGNLVEWFLLRKAYERNELAPNKPDEKELARRRQSYEGGYVKEPERGLWENIVYLDFRSLYPSIIITHNVSPDTLNREGCKEYDVAPQVGHRFCKDFPGFIPSLLGDLLEERQKIKKKMKATIDPIERKLLDYRQRAIKILANSYYGYYGYARARWYCKECAESVTAWGREYITMTIKEIEEKYGFKVIYSDTDGFFATIPGADAETVKKKAMEFLKYINAKLPGALELEYEGFYKRGFFVTKKKYAVIDEEGKITTRGLEIVRRDWSEIAKETQARVLEALLKDGDVEKAVRIVKEVTEKLSKYEVPPEKLVIHEQITRDLKDYKATGPHVAVAKRLAARGVKIRPGTVISYIVLKGSGRIGDRAIPFDEFDPTKHKYDAEYYIENQVLPAVERILRAFGYRKEDLRYQKTRQVGLSAWLKPKGT

SEQ ID NO: 2021 - protein, 774 aa, synthetic construct
MILDTDLITEDGKPVFRIFKKENGEFKIEYDRTFEAYFYALLKDDSAIEEVKKITAERHGTVVTVKRVEKVQKKFLGRPVEVWKLYFTHWQDIPAIHDKIREHPAVIDIYEYDIPFAKRYLIDKGLVPMEGDEELKMLAFDIETLYHEGEEFAEGPILMISYADEEGARVITWKNVDLPYVDVVSTEREMIKRFLRVVKEKDPDVLITYNGDNFDFAYLKKRCEKLGINFALGRDGSEPKIQRMGDRFAVEVKGRIHFDLYPVIRRTINLPTYTLEAVYEAVFGQPKEKVYAEEITTAWETGENLERVARYSMEDAKVTYELGKEFLPMEAQLSRLIGQSLWDVSRSSTGNLVEWFLLRKAYERNELAPNKPDEKELARRRQSYEGGYVKEPERGLWENIVYLDFRSLYPSIIITHNVSPDTLNREGCKEYDVAPQVGHRFCKDFPGFIPSLLGDLLEERQKIKKKMKATIDPIERKLLDYRQRAIKILANSYYGYYGYARARWYCKECAESVTAWGREYITMTIKEIEEKYGFKVIYSDTDGFFATIPGADAETVKKKAMEFLKYINAKLPGALELEYEGFYKRGFFVTKKKYAVIDEEGKITTRGLEIVRRDWSEIAKETQARVLEALLKDGDVEKAVRIVKEVTEKLSKYEVPPEKLVIHEQITRDLKDYKATGPHVAVAKRLAARGVKIRPGTVISYIVLKGSGRIGDRAIPFDEFDPTKHKYDAEYYIENQVLPAVERILRAFGYRKEDLRYQKTRQVGLSAWLKPKGT

SEQ ID NO: 2022 - protein, 774 aa, synthetic construct
MILDTDLITEDGKPVFRIFKKENGEFKIEYDRTFEAYFYALLKDDSAIEEVKKITAERHGTVVTVKRVEKVQKKFLGRPVEVWKLYFTHYQDVPAIRDKIREHPAVIDIYEYDIPFAKRYLIDKGLVPMEGDEELKMLAFDIETLYHEGEEFAEGPILMISYADEEGARVITWKNVDLPYVDVVSTEREMIKRFLRVVKEKDPDVLITYNGDNFDFAYLKKRCEKLGINFALGRDGSEPKIQRMGDRFAVEVKGRIHFDLYPVIRRTINLPTYTLEAVYEAVFGQPKEKVYAEEITTAWETGENLERVARYSMEDAKVTYELGKEFLPMEAQLSRLIGQSLWDVSRSSTGNLVEWFLLRKAYERNELAPNKPDEKELARRRQSYEGGYVKEPERGLWENIVYLDFRSLYPSIIITHNVSPDTLNREGCKEYDVAPQVGHRFCKDFPGFIPSLLGDLLEERQKIKKKMKATIDPIERKLLDYRQRAIKILANSYYGYYGYARARWYCKECAESVTAWGREYITMTIKEIEEKYGFKVIYSDTDGFFATIPGADAETVKKKAMEFLKYINAKLPGALELEYEGFYKRGFFVTKKKYAVIDEEGKITTRGLEIVRRDWSEIAKETQARVLEALLKDGDVEKAVRIVKEVTEKLSKYEVPPEKLVIHEQITRDLKDYKATGPHVAVAKRLAARGVKIRPGTVISYIVLKGSGRIGDRAIPFDEFDPTKHKYDAEYYIENQVLPAVERILRAFGYRKEDLRYQKTRQVGLSAWLKPKGT

SEQ ID NO: 2023 - protein, 774 aa, synthetic construct
MILDTDLITEDGKPVFRIFKKENGEFKIEYDRTFEAYFYALLKDDSAIEEVKKITAERHGTVVTVKRVEKVQKKFLGRPVEVWKLYFTHYQDVPAIADKIREHPAVIDIYEYDIPFAKRYLIDKGLVPMEGDEELKMLAFDIETLYHEGEEFAEGPILMISYADEEGARVITWKNVDLPYVDVVSTEREMIKRFLRVVKEKDPDVLITYNGDNFDFAYLKKRCEKLGINFALGRDGSEPKIQRMGDRFAVEVKGRIHFDLYPVIRRTINLPTYTLEAVYEAVFGQPKEKVYAEEITTAWETGENLERVARYSMEDAKVTYELGKEFLPMEAQLSRLIGQSLWDVSRSSTGNLVEWFLLRKAYERNELAPNKPDEKELARRRQSYEGGYVKEPERGLWENIVYLDFRSLYPSIIITHNVSPDTLNREGCKEYDVAPQVGHRFCKDFPGFIPSLLGDLLEERQKIKKKMKATIDPIERKLLDYRQRAIKILANSYYGYYGYARARWYCKECAESVTAWGREYITMTIKEIEEKYGFKVIYSDTDGFFATIPGADAETVKKKAMEFLKYINAKLPGALELEYEGFYKRGFFVTKKKYAVIDEEGKITTRGLEIVRRDWSEIAKETQARVLEALLKDGDVEKAVRIVKEVTEKLSKYEVPPEKLVIHEQITRDLKDYKATGPHVAVAKRLAARGVKIRPGTVISYIVLKGSGRIGDRAIPFDEFDPTKHKYDAEYYIENQVLPAVERILRAFGYRKEDLRYQKTRQVGLSAWLKPKGT

SEQ ID NO: 2024 - protein, 774 aa, synthetic construct
MILDTDLITEDGKPVFRIFKKENGEFKIEYDRTFEAYFYALLKDDSAIEEVKKITAERHGTVVTVKRVEKVQKKFLGRPVEVWKLYFTHYQDIPAIRDKIREHPAVIDIYEYDIPFAKRYLIDKGLVPMEGDEELKMLAFDIETLYHEGEEFAEGPILMISYADEEGARVITWKNVDLPYVDVVSTEREMIKRFLRVVKEKDPDVLITYNGDNFDFAYLKKRCEKLGINFALGRDGSEPKIQRMGDRFAVEVKGRIHFDLYPVIRRTINLPTYTLEAVYEAVFGQPKEKVYAEEITTAWETGENLERVARYSMEDAKVTYELGKEFLPMEAQLSRLIGQSLWDVSRSSTGNLVEWFLLRKAYERNELAPNKPDEKELARRRQSYEGGYVKEPERGLWENIVYLDFRSLYPSIIITHNVSPDTLNREGCKEYDVAPQVGHRFCKDFPGFIPSLLGDLLEERQKIKKKMKATIDPIERKLLDYRQRAIKILANSYYGYYGYARARWYCKECAESVTAWGREYITMTIKEIEEKYGFKVIYSDTDGFFATIPGADAETVKKKAMEFLKYINAKLPGALELEYEGFYKRGFFVTKKKYAVIDEEGKITTRGLEIVRRDWSEIAKETQARVLEALLKDGDVEKAVRIVKEVTEKLSKYEVPPEKLVIHEQITRDLKDYKATGPHVAVAKRLAARGVKIRPGTVISYIVLKGSGRIGDRAIPFDEFDPTKHKYDAEYYIENQVLPAVERILRAFGYRKEDLRYQKTRQVGLSAWLKPKGT

SEQ ID NO: 2025 - protein, 774 aa, synthetic construct
MILDTDLITEDGKPVFRIFKKENGEFKIEYDRTFEAYFYALLKDDSAIEEVKKITAERHGTVVTVKRVEKVQKKFLGRPVEVWKLYFTHYQDIPAIADKIREHPAVIDIYEYDIPFAKRYLIDKGLVPMEGDEELKMLAFDIETLYHEGEEFAEGPILMISYADEEGARVITWKNVDLPYVDVVSTEREMIKRFLRVVKEKDPDVLITYNGDNFDFAYLKKRCEKLGINFALGRDGSEPKIQRMGDRFAVEVKGRIHFDLYPVIRRTINLPTYTLEAVYEAVFGQPKEKVYAEEITTAWETGENLERVARYSMEDAKVTYELGKEFLPMEAQLSRLIGQSLWDVSRSSTGNLVEWFLLRKAYERNELAPNKPDEKELARRRQSYEGGYVKEPERGLWENIVYLDFRSLYPSIIITHNVSPDTLNREGCKEYDVAPQVGHRFCKDFPGFIPSLLGDLLEERQKIKKKMKATIDPIERKLLDYRQRAIKILANSYYGYYGYARARWYCKECAESVTAWGREYITMTIKEIEEKYGFKVIYSDTDGFFATIPGADAETVKKKAMEFLKYINAKLPGALELEYEGFYKRGFFVTKKKYAVIDEEGKITTRGLEIVRRDWSEIAKETQARVLEALLKDGDVEKAVRIVKEVTEKLSKYEVPPEKLVIHEQITRDLKDYKATGPHVAVAKRLAARGVKIRPGTVISYIVLKGSGRIGDRAIPFDEFDPTKHKYDAEYYIENQVLPAVERILRAFGYRKEDLRYQKTRQVGLSAWLKPKGT

SEQ ID NO: 2026 - protein, 774 aa, synthetic construct
MILDTDLITEDGKPVFRIFKKENGEFKIEYDRTFEAYFYALLKDDSAIEEVKKITAERHGTVVTVKRVEKVQKKFLGRPVEVWKLYFTHYQDIPAIFDKIREHPAVIDIYEYDIPFAKRYLIDKGLVPMEGDEELKMLAFDIETLYHEGEEFAEGPILMISYADEEGARVITWKNVDLPYVDVVSTEREMIKRFLRVVKEKDPDVLITYNGDNFDFAYLKKRCEKLGINFALGRDGSEPKIQRMGDRFAVEVKGRIHFDLYPVIRRTINLPTYTLEAVYEAVFGQPKEKVYAEEITTAWETGENLERVARYSMEDAKVTYELGKEFLPMEAQLSRLIGQSLWDVSRSSTGNLVEWFLLRKAYERNELAPNKPDEKELARRRQSYEGGYVKEPERGLWENIVYLDFRSLYPSIIITHNVSPDTLNREGCKEYDVAPQVGHRFCKDFPGFIPSLLGDLLEERQKIKKKMKATIDPIERKLLDYRQRAIKILANSYYGYYGYARARWYCKECAESVTAWGREYITMTIKEIEEKYGFKVIYSDTDGFFATIPGADAETVKKKAMEFLKYINAKLPGALELEYEGFYKRGFFVTKKKYAVIDEEGKITTRGLEIVRRDWSEIAKETQARVLEALLKDGDVEKAVRIVKEVTEKLSKYEVPPEKLVIHEQITRDLKDYKATGPHVAVAKRLAARGVKIRPGTVISYIVLKGSGRIGDRAIPFDEFDPTKHKYDAEYYIENQVLPAVERILRAFGYRKEDLRYQKTRQVGLSAWLKPKGT

SEQ ID NO: 2027 - protein, 774 aa, synthetic construct
MILDTDLITEDGKPVFRIFKKENGEFKIEYDRTFEAYFYALLKDDSAIEEVKKITAERHGTVVTVKRVEKVQKKFLGRPVEVWKLYFTHPQDVPAIADKIREHPAVIDIYEYDIPFAKRYLIDKGLVPMEGDEELKMLAFDIETLYHEGEEFAEGPILMISYADEEGARVITWKNVDLPYVDVVSTEREMIKRFLRVVKEKDPDVLITYNGDNFDFAYLKKRCEKLGINFALGRDGSEPKIQRMGDRFAVEVKGRIHFDLYPVIRRTINLPTYTLEAVYEAVFGQPKEKVYAEEITTAWETGENLERVARYSMEDAKVTYELGKEFLPMEAQLSRLIGQSLWDVSRSSTGNLVEWFLLRKAYERNELAPNKPDEKELARRRQSYEGGYVKEPERGLWENIVYLDFRSLYPSIIITHNVSPDTLNREGCKEYDVAPQVGHRFCKDFPGFIPSLLGDLLEERQKIKKKMKATIDPIERKLLDYRQRAIKILANSYYGYYGYARARWYCKECAESVTAWGREYITMTIKEIEEKYGFKVIYSDTDGFFATIPGADAETVKKKAMEFLKYINAKLPGALELEYEGFYKRGFFVTKKKYAVIDEEGKITTRGLEIVRRDWSEIAKETQARVLEALLKDGDVEKAVRIVKEVTEKLSKYEVPPEKLVIHEQITRDLKDYKATGPHVAVAKRLAARGVKIRPGTVISYIVLKGSGRIGDRAIPFDEFDPTKHKYDAEYYIENQVLPAVERILRAFGYRKEDLRYQKTRQVGLSAWLKPKGT

SEQ ID NO: 2028 - protein, 774 aa, synthetic construct
MILDTDLITEDGKPVFRIFKKENGEFKIEYDRTFEAYFYALLKDDSAIEEVKKITAERHGTVVTVKRVEKVQKKFLGRPVEVWKLYFTHPQDVPAIFDKIREHPAVIDIYEYDIPFAKRYLIDKGLVPMEGDEELKMLAFDIETLYHEGEEFAEGPILMISYADEEGARVITWKNVDLPYVDVVSTEREMIKRFLRVVKEKDPDVLITYNGDNFDFAYLKKRCEKLGINFALGRDGSEPKIQRMGDRFAVEVKGRIHFDLYPVIRRTINLPTYTLEAVYEAVFGQPKEKVYAEEITTAWETGENLERVARYSMEDAKVTYELGKEFLPMEAQLSRLIGQSLWDVSRSSTGNLVEWFLLRKAYERNELAPNKPDEKELARRRQSYEGGYVKEPERGLWENIVYLDFRSLYPSIIITHNVSPDTLNREGCKEYDVAPQVGHRFCKDFPGFIPSLLGDLLEERQKIKKKMKATIDPIERKLLDYRQRAIKILANSYYGYYGYARARWYCKECAESVTAWGREYITMTIKEIEEKYGFKVIYSDTDGFFATIPGADAETVKKKAMEFLKYINAKLPGALELEYEGFYKRGFFVTKKKYAVIDEEGKITTRGLEIVRRDWSEIAKETQARVLEALLKDGDVEKAVRIVKEVTEKLSKYEVPPEKLVIHEQITRDLKDYKATGPHVAVAKRLAARGVKIRPGTVISYIVLKGSGRIGDRAIPFDEFDPTKHKYDAEYYIENQVLPAVERILRAFGYRKEDLRYQKTRQVGLSAWLKPKGT

SEQ ID NO: 2029 - protein, 774 aa, synthetic construct
MILDTDLITEDGKPVFRIFKKENGEFKIEYDRTFEAYFYALLKDDSAIEEVKKITAERHGTVVTVKRVEKVQKKFLGRPVEVWKLYFTHPQDIPAIRDKIREHPAVIDIYEYDIPFAKRYLIDKGLVPMEGDEELKMLAFDIETLYHEGEEFAEGPILMISYADEEGARVITWKNVDLPYVDVVSTEREMIKRFLRVVKEKDPDVLITYNGDNFDFAYLKKRCEKLGINFALGRDGSEPKIQRMGDRFAVEVKGRIHFDLYPVIRRTINLPTYTLEAVYEAVFGQPKEKVYAEEITTAWETGENLERVARYSMEDAKVTYELGKEFLPMEAQLSRLIGQSLWDVSRSSTGNLVEWFLLRKAYERNELAPNKPDEKELARRRQSYEGGYVKEPERGLWENIVYLDFRSLYPSIIITHNVSPDTLNREGCKEYDVAPQVGHRFCKDFPGFIPSLLGDLLEERQKIKKKMKATIDPIERKLLDYRQRAIKILANSYYGYYGYARARWYCKECAESVTAWGREYITMTIKEIEEKYGFKVIYSDTDGFFATIPGADAETVKKKAMEFLKYINAKLPGALELEYEGFYKRGFFVTKKKYAVIDEEGKITTRGLEIVRRDWSEIAKETQARVLEALLKDGDVEKAVRIVKEVTEKLSKYEVPPEKLVIHEQITRDLKDYKATGPHVAVAKRLAARGVKIRPGTVISYIVLKGSGRIGDRAIPFDEFDPTKHKYDAEYYIENQVLPAVERILRAFGYRKEDLRYQKTRQVGLSAWLKPKGT

SEQ ID NO: 2030 - protein, 774 aa, synthetic construct
MILDTDLITEDGKPVFRIFKKENGEFKIEYDRTFEAYFYALLKDDSAIEEVKKITAERHGTVVTVKRVEKVQKKFLGRPVEVWKLYFTHPQDIPAIADKIREHPAVIDIYEYDIPFAKRYLIDKGLVPMEGDEELKMLAFDIETLYHEGEEFAEGPILMISYADEEGARVITWKNVDLPYVDVVSTEREMIKRFLRVVKEKDPDVLITYNGDNFDFAYLKKRCEKLGINFALGRDGSEPKIQRMGDRFAVEVKGRIHFDLYPVIRRTINLPTYTLEAVYEAVFGQPKEKVYAEEITTAWETGENLERVARYSMEDAKVTYELGKEFLPMEAQLSRLIGQSLWDVSRSSTGNLVEWFLLRKAYERNELAPNKPDEKELARRRQSYEGGYVKEPERGLWENIVYLDFRSLYPSIIITHNVSPDTLNREGCKEYDVAPQVGHRFCKDFPGFIPSLLGDLLEERQKIKKKMKATIDPIERKLLDYRQRAIKILANSYYGYYGYARARWYCKECAESVTAWGREYITMTIKEIEEKYGFKVIYSDTDGFFATIPGADAETVKKKAMEFLKYINAKLPGALELEYEGFYKRGFFVTKKKYAVIDEEGKITTRGLEIVRRDWSEIAKETQARVLEALLKDGDVEKAVRIVKEVTEKLSKYEVPPEKLVIHEQITRDLKDYKATGPHVAVAKRLAARGVKIRPGTVISYIVLKGSGRIGDRAIPFDEFDPTKHKYDAEYYIENQVLPAVERILRAFGYRKEDLRYQKTRQVGLSAWLKPKGT

SEQ ID NO: 2031 - protein, 774 aa, synthetic construct
MILDTDLITEDGKPVFRIFKKENGEFKIEYDRTFEAYFYALLKDDSAIEEVKKITAERHGTVVTVKRVEKVQKKFLGRPVEVWKLYFTHPQDIPAIFDKIREHPAVIDIYEYDIPFAKRYLIDKGLVPMEGDEELKMLAFDIETLYHEGEEFAEGPILMISYADEEGARVITWKNVDLPYVDVVSTEREMIKRFLRVVKEKDPDVLITYNGDNFDFAYLKKRCEKLGINFALGRDGSEPKIQRMGDRFAVEVKGRIHFDLYPVIRRTINLPTYTLEAVYEAVFGQPKEKVYAEEITTAWETGENLERVARYSMEDAKVTYELGKEFLPMEAQLSRLIGQSLWDVSRSSTGNLVEWFLLRKAYERNELAPNKPDEKELARRRQSYEGGYVKEPERGLWENIVYLDFRSLYPSIIITHNVSPDTLNREGCKEYDVAPQVGHRFCKDFPGFIPSLLGDLLEERQKIKKKMKATIDPIERKLLDYRQRAIKILANSYYGYYGYARARWYCKECAESVTAWGREYITMTIKEIEEKYGFKVIYSDTDGFFATIPGADAETVKKKAMEFLKYINAKLPGALELEYEGFYKRGFFVTKKKYAVIDEEGKITTRGLEIVRRDWSEIAKETQARVLEALLKDGDVEKAVRIVKEVTEKLSKYEVPPEKLVIHEQITRDLKDYKATGPHVAVAKRLAARGVKIRPGTVISYIVLKGSGRIGDRAIPFDEFDPTKHKYDAEYYIENQVLPAVERILRAFGYRKEDLRYQKTRQVGLSAWLKPKGT

SEQ ID NO: 2032 - protein, 774 aa, synthetic construct
MILDTDLITEDGKPVFRIFKKENGEFKIEYDRTFEAYFYALLKDDSAIEEVKKITAERHGTVVTVKRVEKVQKKFLGRPVEVWKLYFTHPQDIPAIHDKIREHPAVIDIYEYDIPFAKRYLIDKGLVPMEGDEELKMLAFDIETLYHEGEEFAEGPILMISYADEEGARVITWKNVDLPYVDVVSTEREMIKRFLRVVKEKDPDVLITYNGDNFDFAYLKKRCEKLGINFALGRDGSEPKIQRMGDRFAVEVKGRIHFDLYPVIRRTINLPTYTLEAVYEAVFGQPKEKVYAEEITTAWETGENLERVARYSMEDAKVTYELGKEFLPMEAQLSRLIGQSLWDVSRSSTGNLVEWFLLRKAYERNELAPNKPDEKELARRRQSYEGGYVKEPERGLWENIVYLDFRSLYPSIIITHNVSPDTLNREGCKEYDVAPQVGHRFCKDFPGFIPSLLGDLLEERQKIKKKMKATIDPIERKLLDYRQRAIKILANSYYGYYGYARARWYCKECAESVTAWGREYITMTIKEIEEKYGFKVIYSDTDGFFATIPGADAETVKKKAMEFLKYINAKLPGALELEYEGFYKRGFFVTKKKYAVIDEEGKITTRGLEIVRRDWSEIAKETQARVLEALLKDGDVEKAVRIVKEVTEKLSKYEVPPEKLVIHEQITRDLKDYKATGPHVAVAKRLAARGVKIRPGTVISYIVLKGSGRIGDRAIPFDEFDPTKHKYDAEYYIENQVLPAVERILRAFGYRKEDLRYQKTRQVGLSAWLKPKGT

SEQ ID NO: 2033 - protein, 774 aa, synthetic construct
MILDTDLITEDGKPVFRIFKKENGEFKIEYDRTFEAYFYALLKDDSAIEEVKKITAERHGTVVTVKRVEKVQKKFLGRPVEVWKLYFTHPQDIPAIWDKIREHPAVIDIYEYDIPFAKRYLIDKGLVPMEGDEELKMLAFDIETLYHEGEEFAEGPILMISYADEEGARVITWKNVDLPYVDVVSTEREMIKRFLRVVKEKDPDVLITYNGDNFDFAYLKKRCEKLGINFALGRDGSEPKIQRMGDRFAVEVKGRIHFDLYPVIRRTINLPTYTLEAVYEAVFGQPKEKVYAEEITTAWETGENLERVARYSMEDAKVTYELGKEFLPMEAQLSRLIGQSLWDVSRSSTGNLVEWFLLRKAYERNELAPNKPDEKELARRRQSYEGGYVKEPERGLWENIVYLDFRSLYPSIIITHNVSPDTLNREGCKEYDVAPQVGHRFCKDFPGFIPSLLGDLLEERQKIKKKMKATIDPIERKLLDYRQRAIKILANSYYGYYGYARARWYCKECAESVTAWGREYITMTIKEIEEKYGFKVIYSDTDGFFATIPGADAETVKKKAMEFLKYINAKLPGALELEYEGFYKRGFFVTKKKYAVIDEEGKITTRGLEIVRRDWSEIAKETQARVLEALLKDGDVEKAVRIVKEVTEKLSKYEVPPEKLVIHEQITRDLKDYKATGPHVAVAKRLAARGVKIRPGTVISYIVLKGSGRIGDRAIPFDEFDPTKHKYDAEYYIENQVLPAVERILRAFGYRKEDLRYQKTRQVGLSAWLKPKGT

SEQ ID NO: 2034 - protein, 774 aa, synthetic construct
MILDTDLITEDGKPVFRIFKKENGEFKIEYDRTFEAYFYALLKDDSAIEEVKKITAERHGTVVTVKRVEKVQKKFLGRPVEVWKLYFTHPQDQPAIADKIREHPAVIDIYEYDIPFAKRYLIDKGLVPMEGDEELKMLAFDIETLYHEGEEFAEGPILMISYADEEGARVITWKNVDLPYVDVVSTEREMIKRFLRVVKEKDPDVLITYNGDNFDFAYLKKRCEKLGINFALGRDGSEPKIQRMGDRFAVEVKGRIHFDLYPVIRRTINLPTYTLEAVYEAVFGQPKEKVYAEEITTAWETGENLERVARYSMEDAKVTYELGKEFLPMEAQLSRLIGQSLWDVSRSSTGNLVEWFLLRKAYERNELAPNKPDEKELARRRQSYEGGYVKEPERGLWENIVYLDFRSLYPSIIITHNVSPDTLNREGCKEYDVAPQVGHRFCKDFPGFIPSLLGDLLEERQKIKKKMKATIDPIERKLLDYRQRAIKILANSYYGYYGYARARWYCKECAESVTAWGREYITMTIKEIEEKYGFKVIYSDTDGFFATIPGADAETVKKKAMEFLKYINAKLPGALELEYEGFYKRGFFVTKKKYAVIDEEGKITTRGLEIVRRDWSEIAKETQARVLEALLKDGDVEKAVRIVKEVTEKLSKYEVPPEKLVIHEQITRDLKDYKATGPHVAVAKRLAARGVKIRPGTVISYIVLKGSGRIGDRAIPFDEFDPTKHKYDAEYYIENQVLPAVERILRAFGYRKEDLRYQKTRQVGLSAWLKPKGT

SEQ ID NO: 2035 - protein, 774 aa, synthetic construct
MILDTDLITEDGKPVFRIFKKENGEFKIEYDRTFEAYFYALLKDDSAIEEVKKITAERHGTVVTVKRVEKVQKKFLGRPVEVWKLYFTHPQDQPAIFDKIREHPAVIDIYEYDIPFAKRYLIDKGLVPMEGDEELKMLAFDIETLYHEGEEFAEGPILMISYADEEGARVITWKNVDLPYVDVVSTEREMIKRFLRVVKEKDPDVLITYNGDNFDFAYLKKRCEKLGINFALGRDGSEPKIQRMGDRFAVEVKGRIHFDLYPVIRRTINLPTYTLEAVYEAVFGQPKEKVYAEEITTAWETGENLERVARYSMEDAKVTYELGKEFLPMEAQLSRLIGQSLWDVSRSSTGNLVEWFLLRKAYERNELAPNKPDEKELARRRQSYEGGYVKEPERGLWENIVYLDFRSLYPSIIITHNVSPDTLNREGCKEYDVAPQVGHRFCKDFPGFIPSLLGDLLEERQKIKKKMKATIDPIERKLLDYRQRAIKILANSYYGYYGYARARWYCKECAESVTAWGREYITMTIKEIEEKYGFKVIYSDTDGFFATIPGADAETVKKKAMEFLKYINAKLPGALELEYEGFYKRGFFVTKKKYAVIDEEGKITTRGLEIVRRDWSEIAKETQARVLEALLKDGDVEKAVRIVKEVTEKLSKYEVPPEKLVIHEQITRDLKDYKATGPHVAVAKRLAARGVKIRPGTVISYIVLKGSGRIGDRAIPFDEFDPTKHKYDAEYYIENQVLPAVERILRAFGYRKEDLRYQKTRQVGLSAWLKPKGT

SEQ ID NO: 2036 - protein, 774 aa, synthetic construct
MILDTDLITEDGKPVFRIFKKENGEFKIEYDRTFEAYFYALLKDDSAIEEVKKITAERHGTVVTVKRVEKVQKKFLGRPVEVWKLYFTHPQDRPAIRDKIREHPAVIDIYEYDIPFAKRYLIDKGLVPMEGDEELKMLAFDIETLYHEGEEFAEGPILMISYADEEGARVITWKNVDLPYVDVVSTEREMIKRFLRVVKEKDPDVLITYNGDNFDFAYLKKRCEKLGINFALGRDGSEPKIQRMGDRFAVEVKGRIHFDLYPVIRRTINLPTYTLEAVYEAVFGQPKEKVYAEEITTAWETGENLERVARYSMEDAKVTYELGKEFLPMEAQLSRLIGQSLWDVSRSSTGNLVEWFLLRKAYERNELAPNKPDEKELARRRQSYEGGYVKEPERGLWENIVYLDFRSLYPSIIITHNVSPDTLNREGCKEYDVAPQVGHRFCKDFPGFIPSLLGDLLEERQKIKKKMKATIDPIERKLLDYRQRAIKILANSYYGYYGYARARWYCKECAESVTAWGREYITMTIKEIEEKYGFKVIYSDTDGFFATIPGADAETVKKKAMEFLKYINAKLPGALELEYEGFYKRGFFVTKKKYAVIDEEGKITTRGLEIVRRDWSEIAKETQARVLEALLKDGDVEKAVRIVKEVTEKLSKYEVPPEKLVIHEQITRDLKDYKATGPHVAVAKRLAARGVKIRPGTVISYIVLKGSGRIGDRAIPFDEFDPTKHKYDAEYYIENQVLPAVERILRAFGYRKEDLRYQKTRQVGLSAWLKPKGT

SEQ ID NO: 2037 - protein, 774 aa, synthetic construct
MILDTDLITEDGKPVFRIFKKENGEFKIEYDRTFEAYFYALLKDDSAIEEVKKITAERHGTVVTVKRVEKVQKKFLGRPVEVWKLYFTHPQDRPAIADKIREHPAVIDIYEYDIPFAKRYLIDKGLVPMEGDEELKMLAFDIETLYHEGEEFAEGPILMISYADEEGARVITWKNVDLPYVDVVSTEREMIKRFLRVVKEKDPDVLITYNGDNFDFAYLKKRCEKLGINFALGRDGSEPKIQRMGDRFAVEVKGRIHFDLYPVIRRTINLPTYTLEAVYEAVFGQPKEKVYAEEITTAWETGENLERVARYSMEDAKVTYELGKEFLPMEAQLSRLIGQSLWDVSRSSTGNLVEWFLLRKAYERNELAPNKPDEKELARRRQSYEGGYVKEPERGLWENIVYLDFRSLYPSIIITHNVSPDTLNREGCKEYDVAPQVGHRFCKDFPGFIPSLLGDLLEERQKIKKKMKATIDPIERKLLDYRQRAIKILANSYYGYYGYARARWYCKECAESVTAWGREYITMTIKEIEEKYGFKVIYSDTDGFFATIPGADAETVKKKAMEFLKYINAKLPGALELEYEGFYKRGFFVTKKKYAVIDEEGKITTRGLEIVRRDWSEIAKETQARVLEALLKDGDVEKAVRIVKEVTEKLSKYEVPPEKLVIHEQITRDLKDYKATGPHVAVAKRLAARGVKIRPGTVISYIVLKGSGRIGDRAIPFDEFDPTKHKYDAEYYIENQVLPAVERILRAFGYRKEDLRYQKTRQVGLSAWLKPKGT

SEQ ID NO: 2038 - protein, 774 aa, synthetic construct
MILDTDLITEDGKPVFRIFKKENGEFKIEYDRTFEHYFYALLKDDSAIEEVKKITAERHGTVVTVKRVEKVQKKFLGRPVEVWKLYFTHPQDVPAIRDKIREHPAVIDIYEYDIPFAKRYLIDKGLVPMEGDEELKMLAFDIETLYHEGEEFAEGPILMISYADEEGARVITWKNVDLPYVDVVSTEREMIKRFLRVVKEKDPDVLITYNGDNFDFAYLKKRCEKLGINFALGRDGSEPKIQRMGDRFAVEVKGRIHFDLYPVIRRTINLPTYTLEAVYEAVFGQPKEKVYAEEITTAWETGENLERVARYSMEDAKVTYELGKEFLPMEAQLSRLIGQSLWDVSRSSTGNLVEWFLLRKAYERNELAPNKPDEKELARRRQSYEGGYVKEPERGLWENIVYLDFRSLYPSIIITHNVSPDTLNREGCKEYDVAPQVGHRFCKDFPGFIPSLLGDLLEERQKIKKKMKATIDPIERKLLDYRQRAIKILANSYYGYYGYARARWYCKECAESVTAWGREYITMTIKEIEEKYGFKVIYSDTDGFFATIPGADAETVKKKAMEFLKYINAKLPGALELEYEGFYKRGFFVTKKKYAVIDEEGKITTRGLEIVRRDWSEIAKETQARVLEALLKDGDVEKAVRIVKEVTEKLSKYEVPPEKLVIHEQITRDLKDYKATGPHVAVAKRLAARGVKIRPGTVISYIVLKGSGRIGDRAIPFDEFDPTKHKYDAEYYIENQVLPAVERILRAFGYRKEDLRYQKTRQVGLSAWLKPKGT

SEQ ID NO: 2039 - protein, 774 aa, synthetic construct
MILDTDLITEDGKPVFRIFKKENGEFKIEYDRTFEHYFYALLKDDSAIEEVKKITAERHGTVVTVKRVEKVQKKFLGRPVEVWKLYFTHPQDVPAIWDKIREHPAVIDIYEYDIPFAKRYLIDKGLVPMEGDEELKMLAFDIETLYHEGEEFAEGPILMISYADEEGARVITWKNVDLPYVDVVSTEREMIKRFLRVVKEKDPDVLITYNGDNFDFAYLKKRCEKLGINFALGRDGSEPKIQRMGDRFAVEVKGRIHFDLYPVIRRTINLPTYTLEAVYEAVFGQPKEKVYAEEITTAWETGENLERVARYSMEDAKVTYELGKEFLPMEAQLSRLIGQSLWDVSRSSTGNLVEWFLLRKAYERNELAPNKPDEKELARRRQSYEGGYVKEPERGLWENIVYLDFRSLYPSIIITHNVSPDTLNREGCKEYDVAPQVGHRFCKDFPGFIPSLLGDLLEERQKIKKKMKATIDPIERKLLDYRQRAIKILANSYYGYYGYARARWYCKECAESVTAWGREYITMTIKEIEEKYGFKVIYSDTDGFFATIPGADAETVKKKAMEFLKYINAKLPGALELEYEGFYKRGFFVTKKKYAVIDEEGKITTRGLEIVRRDWSEIAKETQARVLEALLKDGDVEKAVRIVKEVTEKLSKYEVPPEKLVIHEQITRDLKDYKATGPHVAVAKRLAARGVKIRPGTVISYIVLKGSGRIGDRAIPFDEFDPTKHKYDAEYYIENQVLPAVERILRAFGYRKEDLRYQKTRQVGLSAWLKPKGT

SEQ ID NO: 2040 - protein, 774 aa, synthetic construct
MILDTDLITEDGKPVFRIFKKENGEFKIEYDRTFEHYFYALLKDDSAIEEVKKITAERHGTVVTVKRVEKVQKKFLGRPVEVWKLYFTHPQDIPAIRDKIREHPAVIDIYEYDIPFAKRYLIDKGLVPMEGDEELKMLAFDIETLYHEGEEFAEGPILMISYADEEGARVITWKNVDLPYVDVVSTEREMIKRFLRVVKEKDPDVLITYNGDNFDFAYLKKRCEKLGINFALGRDGSEPKIQRMGDRFAVEVKGRIHFDLYPVIRRTINLPTYTLEAVYEAVFGQPKEKVYAEEITTAWETGENLERVARYSMEDAKVTYELGKEFLPMEAQLSRLIGQSLWDVSRSSTGNLVEWFLLRKAYERNELAPNKPDEKELARRRQSYEGGYVKEPERGLWENIVYLDFRSLYPSIIITHNVSPDTLNREGCKEYDVAPQVGHRFCKDFPGFIPSLLGDLLEERQKIKKKMKATIDPIERKLLDYRQRAIKILANSYYGYYGYARARWYCKECAESVTAWGREYITMTIKEIEEKYGFKVIYSDTDGFFATIPGADAETVKKKAMEFLKYINAKLPGALELEYEGFYKRGFFVTKKKYAVIDEEGKITTRGLEIVRRDWSEIAKETQARVLEALLKDGDVEKAVRIVKEVTEKLSKYEVPPEKLVIHEQITRDLKDYKATGPHVAVAKRLAARGVKIRPGTVISYIVLKGSGRIGDRAIPFDEFDPTKHKYDAEYYIENQVLPAVERILRAFGYRKEDLRYQKTRQVGLSAWLKPKGT

SEQ ID NO: 2041 - protein, 774 aa, synthetic construct
MILDTDLITEDGKPVFRIFKKENGEFKIEYDRTFEHYFYALLKDDSAIEEVKKITAERHGTVVTVKRVEKVQKKFLGRPVEVWKLYFTHPQDRPAIRDKIREHPAVIDIYEYDIPFAKRYLIDKGLVPMEGDEELKMLAFDIETLYHEGEEFAEGPILMISYADEEGARVITWKNVDLPYVDVVSTEREMIKRFLRVVKEKDPDVLITYNGDNFDFAYLKKRCEKLGINFALGRDGSEPKIQRMGDRFAVEVKGRIHFDLYPVIRRTINLPTYTLEAVYEAVFGQPKEKVYAEEITTAWETGENLERVARYSMEDAKVTYELGKEFLPMEAQLSRLIGQSLWDVSRSSTGNLVEWFLLRKAYERNELAPNKPDEKELARRRQSYEGGYVKEPERGLWENIVYLDFRSLYPSIIITHNVSPDTLNREGCKEYDVAPQVGHRFCKDFPGFIPSLLGDLLEERQKIKKKMKATIDPIERKLLDYRQRAIKILANSYYGYYGYARARWYCKECAESVTAWGREYITMTIKEIEEKYGFKVIYSDTDGFFATIPGADAETVKKKAMEFLKYINAKLPGALELEYEGFYKRGFFVTKKKYAVIDEEGKITTRGLEIVRRDWSEIAKETQARVLEALLKDGDVEKAVRIVKEVTEKLSKYEVPPEKLVIHEQITRDLKDYKATGPHVAVAKRLAARGVKIRPGTVISYIVLKGSGRIGDRAIPFDEFDPTKHKYDAEYYIENQVLPAVERILRAFGYRKEDLRYQKTRQVGLSAWLKPKGT

SEQ ID NO: 2042 - protein, 774 aa, synthetic construct
MILDTDLITEDGKPVFRIFKKENGEFKIEYDRTFERYFYALLKDDSAIEEVKKITAERHGTVVTVKRVEKVQKKFLGRPVEVWKLYFTHPQDVPAIRDKIREHPAVIDIYEYDIPFAKRYLIDKGLVPMEGDEELKMLAFDIETLYHEGEEFAEGPILMISYADEEGARVITWKNVDLPYVDVVSTEREMIKRFLRVVKEKDPDVLITYNGDNFDFAYLKKRCEKLGINFALGRDGSEPKIQRMGDRFAVEVKGRIHFDLYPVIRRTINLPTYTLEAVYEAVFGQPKEKVYAEEITTAWETGENLERVARYSMEDAKVTYELGKEFLPMEAQLSRLIGQSLWDVSRSSTGNLVEWFLLRKAYERNELAPNKPDEKELARRRQSYEGGYVKEPERGLWENIVYLDFRSLYPSIIITHNVSPDTLNREGCKEYDVAPQVGHRFCKDFPGFIPSLLGDLLEERQKIKKKMKATIDPIERKLLDYRQRAIKILANSYYGYYGYARARWYCKECAESVTAWGREYITMTIKEIEEKYGFKVIYSDTDGFFATIPGADAETVKKKAMEFLKYINAKLPGALELEYEGFYKRGFFVTKKKYAVIDEEGKITTRGLEIVRRDWSEIAKETQARVLEALLKDGDVEKAVRIVKEVTEKLSKYEVPPEKLVIHEQITRDLKDYKATGPHVAVAKRLAARGVKIRPGTVISYIVLKGSGRIGDRAIPFDEFDPTKHKYDAEYYIENQVLPAVERILRAFGYRKEDLRYQKTRQVGLSAWLKPKGT

SEQ ID NO: 2043 - protein, 774 aa, synthetic construct
MILDTDLITEDGKPVFRIFKKENGEFKIEYDRTFERYFYALLKDDSAIEEVKKITAERHGTVVTVKRVEKVQKKFLGRPVEVWKLYFTHPQDVPAIADKIREHPAVIDIYEYDIPFAKRYLIDKGLVPMEGDEELKMLAFDIETLYHEGEEFAEGPILMISYADEEGARVITWKNVDLPYVDVVSTEREMIKRFLRVVKEKDPDVLITYNGDNFDFAYLKKRCEKLGINFALGRDGSEPKIQRMGDRFAVEVKGRIHFDLYPVIRRTINLPTYTLEAVYEAVFGQPKEKVYAEEITTAWETGENLERVARYSMEDAKVTYELGKEFLPMEAQLSRLIGQSLWDVSRSSTGNLVEWFLLRKAYERNELAPNKPDEKELARRRQSYEGGYVKEPERGLWENIVYLDFRSLYPSIIITHNVSPDTLNREGCKEYDVAPQVGHRFCKDFPGFIPSLLGDLLEERQKIKKKMKATIDPIERKLLDYRQRAIKILANSYYGYYGYARARWYCKECAESVTAWGREYITMTIKEIEEKYGFKVIYSDTDGFFATIPGADAETVKKKAMEFLKYINAKLPGALELEYEGFYKRGFFVTKKKYAVIDEEGKITTRGLEIVRRDWSEIAKETQARVLEALLKDGDVEKAVRIVKEVTEKLSKYEVPPEKLVIHEQITRDLKDYKATGPHVAVAKRLAARGVKIRPGTVISYIVLKGSGRIGDRAIPFDEFDPTKHKYDAEYYIENQVLPAVERILRAFGYRKEDLRYQKTRQVGLSAWLKPKGT

SEQ ID NO: 2044 - protein, 774 aa, synthetic construct
MILDTDLITEDGKPVFRIFKKENGEFKIEYDRTFESYFYALLKDDSAIEEVKKITAERHGTVVTVKRVEKVQKKFLGRPVEVWKLYFTHPQDVPAIRDKIREHPAVIDIYEYDIPFAKRYLIDKGLVPMEGDEELKMLAFDIETLYHEGEEFAEGPILMISYADEEGARVITWKNVDLPYVDVVSTEREMIKRFLRVVKEKDPDVLITYNGDNFDFAYLKKRCEKLGINFALGRDGSEPKIQRMGDRFAVEVKGRIHFDLYPVIRRTINLPTYTLEAVYEAVFGQPKEKVYAEEITTAWETGENLERVARYSMEDAKVTYELGKEFLPMEAQLSRLIGQSLWDVSRSSTGNLVEWFLLRKAYERNELAPNKPDEKELARRRQSYEGGYVKEPERGLWENIVYLDFRSLYPSIIITHNVSPDTLNREGCKEYDVAPQVGHRFCKDFPGFIPSLLGDLLEERQKIKKKMKATIDPIERKLLDYRQRAIKILANSYYGYYGYARARWYCKECAESVTAWGREYITMTIKEIEEKYGFKVIYSDTDGFFATIPGADAETVKKKAMEFLKYINAKLPGALELEYEGFYKRGFFVTKKKYAVIDEEGKITTRGLEIVRRDWSEIAKETQARVLEALLKDGDVEKAVRIVKEVTEKLSKYEVPPEKLVIHEQITRDLKDYKATGPHVAVAKRLAARGVKIRPGTVISYIVLKGSGRIGDRAIPFDEFDPTKHKYDAEYYIENQVLPAVERILRAFGYRKEDLRYQKTRQVGLSAWLKPKGT

SEQ ID NO: 2045 - protein, 774 aa, synthetic construct
MILDTDLITEDGKPVFRIFKKENGEFKIEYDRTFESYFYALLKDDSAIEEVKKITAERHGTVVTVKRVEKVQKKFLGRPVEVWKLYFTHFQDIPAIRDKIREHPAVIDIYEYDIPFAKRYLIDKGLVPMEGDEELKMLAFDIETLYHEGEEFAEGPILMISYADEEGARVITWKNVDLPYVDVVSTEREMIKRFLRVVKEKDPDVLITYNGDNFDFAYLKKRCEKLGINFALGRDGSEPKIQRMGDRFAVEVKGRIHFDLYPVIRRTINLPTYTLEAVYEAVFGQPKEKVYAEEITTAWETGENLERVARYSMEDAKVTYELGKEFLPMEAQLSRLIGQSLWDVSRSSTGNLVEWFLLRKAYERNELAPNKPDEKELARRRQSYEGGYVKEPERGLWENIVYLDFRSLYPSIIITHNVSPDTLNREGCKEYDVAPQVGHRFCKDFPGFIPSLLGDLLEERQKIKKKMKATIDPIERKLLDYRQRAIKILANSYYGYYGYARARWYCKECAESVTAWGREYITMTIKEIEEKYGFKVIYSDTDGFFATIPGADAETVKKKAMEFLKYINAKLPGALELEYEGFYKRGFFVTKKKYAVIDEEGKITTRGLEIVRRDWSEIAKETQARVLEALLKDGDVEKAVRIVKEVTEKLSKYEVPPEKLVIHEQITRDLKDYKATGPHVAVAKRLAARGVKIRPGTVISYIVLKGSGRIGDRAIPFDEFDPTKHKYDAEYYIENQVLPAVERILRAFGYRKEDLRYQKTRQVGLSAWLKPKGT

SEQ ID NO: 2046 - protein, 774 aa, synthetic construct
MILDTDLITEDGKPVFRIFKKENGEFKIEYDRTFESYFYALLKDDSAIEEVKKITAERHGTVVTVKRVEKVQKKFLGRPVEVWKLYFTHFQDIPAIADKIREHPAVIDIYEYDIPFAKRYLIDKGLVPMEGDEELKMLAFDIETLYHEGEEFAEGPILMISYADEEGARVITWKNVDLPYVDVVSTEREMIKRFLRVVKEKDPDVLITYNGDNFDFAYLKKRCEKLGINFALGRDGSEPKIQRMGDRFAVEVKGRIHFDLYPVIRRTINLPTYTLEAVYEAVFGQPKEKVYAEEITTAWETGENLERVARYSMEDAKVTYELGKEFLPMEAQLSRLIGQSLWDVSRSSTGNLVEWFLLRKAYERNELAPNKPDEKELARRRQSYEGGYVKEPERGLWENIVYLDFRSLYPSIIITHNVSPDTLNREGCKEYDVAPQVGHRFCKDFPGFIPSLLGDLLEERQKIKKKMKATIDPIERKLLDYRQRAIKILANSYYGYYGYARARWYCKECAESVTAWGREYITMTIKEIEEKYGFKVIYSDTDGFFATIPGADAETVKKKAMEFLKYINAKLPGALELEYEGFYKRGFFVTKKKYAVIDEEGKITTRGLEIVRRDWSEIAKETQARVLEALLKDGDVEKAVRIVKEVTEKLSKYEVPPEKLVIHEQITRDLKDYKATGPHVAVAKRLAARGVKIRPGTVISYIVLKGSGRIGDRAIPFDEFDPTKHKYDAEYYIENQVLPAVERILRAFGYRKEDLRYQKTRQVGLSAWLKPKGT

SEQ ID NO: 2047 - protein, 774 aa, synthetic construct
MILDTDLITEDGKPVFRIFKKENGEFKIEYDRTFESYFYALLKDDSAIEEVKKITAERHGTVVTVKRVEKVQKKFLGRPVEVWKLYFTHPQDVPAIHDKIREHPAVIDIYEYDIPFAKRYLIDKGLVPMEGDEELKMLAFDIETLYHEGEEFAEGPILMISYADEEGARVITWKNVDLPYVDVVSTEREMIKRFLRVVKEKDPDVLITYNGDNFDFAYLKKRCEKLGINFALGRDGSEPKIQRMGDRFAVEVKGRIHFDLYPVIRRTINLPTYTLEAVYEAVFGQPKEKVYAEEITTAWETGENLERVARYSMEDAKVTYELGKEFLPMEAQLSRLIGQSLWDVSRSSTGNLVEWFLLRKAYERNELAPNKPDEKELARRRQSYEGGYVKEPERGLWENIVYLDFRSLYPSIIITHNVSPDTLNREGCKEYDVAPQVGHRFCKDFPGFIPSLLGDLLEERQKIKKKMKATIDPIERKLLDYRQRAIKILANSYYGYYGYARARWYCKECAESVTAWGREYITMTIKEIEEKYGFKVIYSDTDGFFATIPGADAETVKKKAMEFLKYINAKLPGALELEYEGFYKRGFFVTKKKYAVIDEEGKITTRGLEIVRRDWSEIAKETQARVLEALLKDGDVEKAVRIVKEVTEKLSKYEVPPEKLVIHEQITRDLKDYKATGPHVAVAKRLAARGVKIRPGTVISYIVLKGSGRIGDRAIPFDEFDPTKHKYDAEYYIENQVLPAVERILRAFGYRKEDLRYQKTRQVGLSAWLKPKGT

SEQ ID NO: 2048 - protein, 774 aa, synthetic construct
MILDTDLITEDGKPVFRIFKKENGEFKIEYDRTFESYFYALLKDDSAIEEVKKITAERHGTVVTVKRVEKVQKKFLGRPVEVWKLYFTHPQDIPAIRDKIREHPAVIDIYEYDIPFAKRYLIDKGLVPMEGDEELKMLAFDIETLYHEGEEFAEGPILMISYADEEGARVITWKNVDLPYVDVVSTEREMIKRFLRVVKEKDPDVLITYNGDNFDFAYLKKRCEKLGINFALGRDGSEPKIQRMGDRFAVEVKGRIHFDLYPVIRRTINLPTYTLEAVYEAVFGQPKEKVYAEEITTAWETGENLERVARYSMEDAKVTYELGKEFLPMEAQLSRLIGQSLWDVSRSSTGNLVEWFLLRKAYERNELAPNKPDEKELARRRQSYEGGYVKEPERGLWENIVYLDFRSLYPSIIITHNVSPDTLNREGCKEYDVAPQVGHRFCKDFPGFIPSLLGDLLEERQKIKKKMKATIDPIERKLLDYRQRAIKILANSYYGYYGYARARWYCKECAESVTAWGREYITMTIKEIEEKYGFKVIYSDTDGFFATIPGADAETVKKKAMEFLKYINAKLPGALELEYEGFYKRGFFVTKKKYAVIDEEGKITTRGLEIVRRDWSEIAKETQARVLEALLKDGDVEKAVRIVKEVTEKLSKYEVPPEKLVIHEQITRDLKDYKATGPHVAVAKRLAARGVKIRPGTVISYIVLKGSGRIGDRAIPFDEFDPTKHKYDAEYYIENQVLPAVERILRAFGYRKEDLRYQKTRQVGLSAWLKPKGT

SEQ ID NO: 2049 - protein, 774 aa, synthetic construct
MILDTDLITEDGKPVFRIFKKENGEFKIEYDRTFESYFYALLKDDSAIEEVKKITAERHGTVVTVKRVEKVQKKFLGRPVEVWKLYFTHPQDIPAIADKIREHPAVIDIYEYDIPFAKRYLIDKGLVPMEGDEELKMLAFDIETLYHEGEEFAEGPILMISYADEEGARVITWKNVDLPYVDVVSTEREMIKRFLRVVKEKDPDVLITYNGDNFDFAYLKKRCEKLGINFALGRDGSEPKIQRMGDRFAVEVKGRIHFDLYPVIRRTINLPTYTLEAVYEAVFGQPKEKVYAEEITTAWETGENLERVARYSMEDAKVTYELGKEFLPMEAQLSRLIGQSLWDVSRSSTGNLVEWFLLRKAYERNELAPNKPDEKELARRRQSYEGGYVKEPERGLWENIVYLDFRSLYPSIIITHNVSPDTLNREGCKEYDVAPQVGHRFCKDFPGFIPSLLGDLLEERQKIKKKMKATIDPIERKLLDYRQRAIKILANSYYGYYGYARARWYCKECAESVTAWGREYITMTIKEIEEKYGFKVIYSDTDGFFATIPGADAETVKKKAMEFLKYINAKLPGALELEYEGFYKRGFFVTKKKYAVIDEEGKITTRGLEIVRRDWSEIAKETQARVLEALLKDGDVEKAVRIVKEVTEKLSKYEVPPEKLVIHEQITRDLKDYKATGPHVAVAKRLAARGVKIRPGTVISYIVLKGSGRIGDRAIPFDEFDPTKHKYDAEYYIENQVLPAVERILRAFGYRKEDLRYQKTRQVGLSAWLKPKGT

SEQ ID NO: 2050 - protein, 774 aa, synthetic construct
MILDTDLITEDGKPVFRIFKKENGEFKIEYDRTFESYFYALLKDDSAIEEVKKITAERHGTVVTVKRVEKVQKKFLGRPVEVWKLYFTHPQDIPAIHDKIREHPAVIDIYEYDIPFAKRYLIDKGLVPMEGDEELKMLAFDIETLYHEGEEFAEGPILMISYADEEGARVITWKNVDLPYVDVVSTEREMIKRFLRVVKEKDPDVLITYNGDNFDFAYLKKRCEKLGINFALGRDGSEPKIQRMGDRFAVEVKGRIHFDLYPVIRRTINLPTYTLEAVYEAVFGQPKEKVYAEEITTAWETGENLERVARYSMEDAKVTYELGKEFLPMEAQLSRLIGQSLWDVSRSSTGNLVEWFLLRKAYERNELAPNKPDEKELARRRQSYEGGYVKEPERGLWENIVYLDFRSLYPSIIITHNVSPDTLNREGCKEYDVAPQVGHRFCKDFPGFIPSLLGDLLEERQKIKKKMKATIDPIERKLLDYRQRAIKILANSYYGYYGYARARWYCKECAESVTAWGREYITMTIKEIEEKYGFKVIYSDTDGFFATIPGADAETVKKKAMEFLKYINAKLPGALELEYEGFYKRGFFVTKKKYAVIDEEGKITTRGLEIVRRDWSEIAKETQARVLEALLKDGDVEKAVRIVKEVTEKLSKYEVPPEKLVIHEQITRDLKDYKATGPHVAVAKRLAARGVKIRPGTVISYIVLKGSGRIGDRAIPFDEFDPTKHKYDAEYYIENQVLPAVERILRAFGYRKEDLRYQKTRQVGLSAWLKPKGT

SEQ ID NO: 2051 - protein, 774 aa, synthetic construct
MILDTDLITEDGKPVFRIFKKENGEFKIEYDRTFEWYFYALLKDDSAIEEVKKITAERHGTVVTVKRVEKVQKKFLGRPVEVWKLYFTHPQDVPAIRDKIREHPAVIDIYEYDIPFAKRYLIDKGLVPMEGDEELKMLAFDIETLYHEGEEFAEGPILMISYADEEGARVITWKNVDLPYVDVVSTEREMIKRFLRVVKEKDPDVLITYNGDNFDFAYLKKRCEKLGINFALGRDGSEPKIQRMGDRFAVEVKGRIHFDLYPVIRRTINLPTYTLEAVYEAVFGQPKEKVYAEEITTAWETGENLERVARYSMEDAKVTYELGKEFLPMEAQLSRLIGQSLWDVSRSSTGNLVEWFLLRKAYERNELAPNKPDEKELARRRQSYEGGYVKEPERGLWENIVYLDFRSLYPSIIITHNVSPDTLNREGCKEYDVAPQVGHRFCKDFPGFIPSLLGDLLEERQKIKKKMKATIDPIERKLLDYRQRAIKILANSYYGYYGYARARWYCKECAESVTAWGREYITMTIKEIEEKYGFKVIYSDTDGFFATIPGADAETVKKKAMEFLKYINAKLPGALELEYEGFYKRGFFVTKKKYAVIDEEGKITTRGLEIVRRDWSEIAKETQARVLEALLKDGDVEKAVRIVKEVTEKLSKYEVPPEKLVIHEQITRDLKDYKATGPHVAVAKRLAARGVKIRPGTVISYIVLKGSGRIGDRAIPFDEFDPTKHKYDAEYYIENQVLPAVERILRAFGYRKEDLRYQKTRQVGLSAWLKPKGT

SEQ ID NO: 2052 - protein, 774 aa, synthetic construct
MILDTDLITEDGKPVFRIFKKENGEFKIEYDRTFEWYFYALLKDDSAIEEVKKITAERHGTVVTVKRVEKVQKKFLGRPVEVWKLYFTHFQDVPAIRDKIREHPAVIDIYEYDIPFAKRYLIDKGLVPMEGDEELKMLAFDIETLYHEGEEFAEGPILMISYADEEGARVITWKNVDLPYVDVVSTEREMIKRFLRVVKEKDPDVLITYNGDNFDFAYLKKRCEKLGINFALGRDGSEPKIQRMGDRFAVEVKGRIHFDLYPVIRRTINLPTYTLEAVYEAVFGQPKEKVYAEEITTAWETGENLERVARYSMEDAKVTYELGKEFLPMEAQLSRLIGQSLWDVSRSSTGNLVEWFLLRKAYERNELAPNKPDEKELARRRQSYEGGYVKEPERGLWENIVYLDFRSLYPSIIITHNVSPDTLNREGCKEYDVAPQVGHRFCKDFPGFIPSLLGDLLEERQKIKKKMKATIDPIERKLLDYRQRAIKILANSYYGYYGYARARWYCKECAESVTAWGREYITMTIKEIEEKYGFKVIYSDTDGFFATIPGADAETVKKKAMEFLKYINAKLPGALELEYEGFYKRGFFVTKKKYAVIDEEGKITTRGLEIVRRDWSEIAKETQARVLEALLKDGDVEKAVRIVKEVTEKLSKYEVPPEKLVIHEQITRDLKDYKATGPHVAVAKRLAARGVKIRPGTVISYIVLKGSGRIGDRAIPFDEFDPTKHKYDAEYYIENQVLPAVERILRAFGYRKEDLRYQKTRQVGLSAWLKPKGT

SEQ ID NO: 2053 - protein, 774 aa, synthetic construct
MILDTDLITEDGKPVFRIFKKENGEFKIEYDRTFEWYFYALLKDDSAIEEVKKITAERHGTVVTVKRVEKVQKKFLGRPVEVWKLYFTHFQDIPAIRDKIREHPAVIDIYEYDIPFAKRYLIDKGLVPMEGDEELKMLAFDIETLYHEGEEFAEGPILMISYADEEGARVITWKNVDLPYVDVVSTEREMIKRFLRVVKEKDPDVLITYNGDNFDFAYLKKRCEKLGINFALGRDGSEPKIQRMGDRFAVEVKGRIHFDLYPVIRRTINLPTYTLEAVYEAVFGQPKEKVYAEEITTAWETGENLERVARYSMEDAKVTYELGKEFLPMEAQLSRLIGQSLWDVSRSSTGNLVEWFLLRKAYERNELAPNKPDEKELARRRQSYEGGYVKEPERGLWENIVYLDFRSLYPSIIITHNVSPDTLNREGCKEYDVAPQVGHRFCKDFPGFIPSLLGDLLEERQKIKKKMKATIDPIERKLLDYRQRAIKILANSYYGYYGYARARWYCKECAESVTAWGREYITMTIKEIEEKYGFKVIYSDTDGFFATIPGADAETVKKKAMEFLKYINAKLPGALELEYEGFYKRGFFVTKKKYAVIDEEGKITTRGLEIVRRDWSEIAKETQARVLEALLKDGDVEKAVRIVKEVTEKLSKYEVPPEKLVIHEQITRDLKDYKATGPHVAVAKRLAARGVKIRPGTVISYIVLKGSGRIGDRAIPFDEFDPTKHKYDAEYYIENQVLPAVERILRAFGYRKEDLRYQKTRQVGLSAWLKPKGT

SEQ ID NO: 2054 - protein, 774 aa, synthetic construct
MILDTDLITEDGKPVFRIFKKENGEFKIEYDRTFEWYFYALLKDDSAIEEVKKITAERHGTVVTVKRVEKVQKKFLGRPVEVWKLYFTHFQDIPAIADKIREHPAVIDIYEYDIPFAKRYLIDKGLVPMEGDEELKMLAFDIETLYHEGEEFAEGPILMISYADEEGARVITWKNVDLPYVDVVSTEREMIKRFLRVVKEKDPDVLITYNGDNFDFAYLKKRCEKLGINFALGRDGSEPKIQRMGDRFAVEVKGRIHFDLYPVIRRTINLPTYTLEAVYEAVFGQPKEKVYAEEITTAWETGENLERVARYSMEDAKVTYELGKEFLPMEAQLSRLIGQSLWDVSRSSTGNLVEWFLLRKAYERNELAPNKPDEKELARRRQSYEGGYVKEPERGLWENIVYLDFRSLYPSIIITHNVSPDTLNREGCKEYDVAPQVGHRFCKDFPGFIPSLLGDLLEERQKIKKKMKATIDPIERKLLDYRQRAIKILANSYYGYYGYARARWYCKECAESVTAWGREYITMTIKEIEEKYGFKVIYSDTDGFFATIPGADAETVKKKAMEFLKYINAKLPGALELEYEGFYKRGFFVTKKKYAVIDEEGKITTRGLEIVRRDWSEIAKETQARVLEALLKDGDVEKAVRIVKEVTEKLSKYEVPPEKLVIHEQITRDLKDYKATGPHVAVAKRLAARGVKIRPGTVISYIVLKGSGRIGDRAIPFDEFDPTKHKYDAEYYIENQVLPAVERILRAFGYRKEDLRYQKTRQVGLSAWLKPKGT

SEQ ID NO: 2055 - protein, 774 aa, synthetic construct
MILDTDLITEDGKPVFRIFKKENGEFKIEYDRTFEWYFYALLKDDSAIEEVKKITAERHGTVVTVKRVEKVQKKFLGRPVEVWKLYFTHFQDIPAIHDKIREHPAVIDIYEYDIPFAKRYLIDKGLVPMEGDEELKMLAFDIETLYHEGEEFAEGPILMISYADEEGARVITWKNVDLPYVDVVSTEREMIKRFLRVVKEKDPDVLITYNGDNFDFAYLKKRCEKLGINFALGRDGSEPKIQRMGDRFAVEVKGRIHFDLYPVIRRTINLPTYTLEAVYEAVFGQPKEKVYAEEITTAWETGENLERVARYSMEDAKVTYELGKEFLPMEAQLSRLIGQSLWDVSRSSTGNLVEWFLLRKAYERNELAPNKPDEKELARRRQSYEGGYVKEPERGLWENIVYLDFRSLYPSIIITHNVSPDTLNREGCKEYDVAPQVGHRFCKDFPGFIPSLLGDLLEERQKIKKKMKATIDPIERKLLDYRQRAIKILANSYYGYYGYARARWYCKECAESVTAWGREYITMTIKEIEEKYGFKVIYSDTDGFFATIPGADAETVKKKAMEFLKYINAKLPGALELEYEGFYKRGFFVTKKKYAVIDEEGKITTRGLEIVRRDWSEIAKETQARVLEALLKDGDVEKAVRIVKEVTEKLSKYEVPPEKLVIHEQITRDLKDYKATGPHVAVAKRLAARGVKIRPGTVISYIVLKGSGRIGDRAIPFDEFDPTKHKYDAEYYIENQVLPAVERILRAFGYRKEDLRYQKTRQVGLSAWLKPKGT

SEQ ID NO: 2056 - protein, 774 aa, synthetic construct
MILDTDLITEDGKPVFRIFKKENGEFKIEYDRTFEWYFYALLKDDSAIEEVKKITAERHGTVVTVKRVEKVQKKFLGRPVEVWKLYFTHIQDIPAIRDKIREHPAVIDIYEYDIPFAKRYLIDKGLVPMEGDEELKMLAFDIETLYHEGEEFAEGPILMISYADEEGARVITWKNVDLPYVDVVSTEREMIKRFLRVVKEKDPDVLITYNGDNFDFAYLKKRCEKLGINFALGRDGSEPKIQRMGDRFAVEVKGRIHFDLYPVIRRTINLPTYTLEAVYEAVFGQPKEKVYAEEITTAWETGENLERVARYSMEDAKVTYELGKEFLPMEAQLSRLIGQSLWDVSRSSTGNLVEWFLLRKAYERNELAPNKPDEKELARRRQSYEGGYVKEPERGLWENIVYLDFRSLYPSIIITHNVSPDTLNREGCKEYDVAPQVGHRFCKDFPGFIPSLLGDLLEERQKIKKKMKATIDPIERKLLDYRQRAIKILANSYYGYYGYARARWYCKECAESVTAWGREYITMTIKEIEEKYGFKVIYSDTDGFFATIPGADAETVKKKAMEFLKYINAKLPGALELEYEGFYKRGFFVTKKKYAVIDEEGKITTRGLEIVRRDWSEIAKETQARVLEALLKDGDVEKAVRIVKEVTEKLSKYEVPPEKLVIHEQITRDLKDYKATGPHVAVAKRLAARGVKIRPGTVISYIVLKGSGRIGDRAIPFDEFDPTKHKYDAEYYIENQVLPAVERILRAFGYRKEDLRYQKTRQVGLSAWLKPKGT

SEQ ID NO: 2057 - protein, 774 aa, synthetic construct
MILDTDLITEDGKPVFRIFKKENGEFKIEYDRTFEWYFYALLKDDSAIEEVKKITAERHGTVVTVKRVEKVQKKFLGRPVEVWKLYFTHWQDVPAIRDKIREHPAVIDIYEYDIPFAKRYLIDKGLVPMEGDEELKMLAFDIETLYHEGEEFAEGPILMISYADEEGARVITWKNVDLPYVDVVSTEREMIKRFLRVVKEKDPDVLITYNGDNFDFAYLKKRCEKLGINFALGRDGSEPKIQRMGDRFAVEVKGRIHFDLYPVIRRTINLPTYTLEAVYEAVFGQPKEKVYAEEITTAWETGENLERVARYSMEDAKVTYELGKEFLPMEAQLSRLIGQSLWDVSRSSTGNLVEWFLLRKAYERNELAPNKPDEKELARRRQSYEGGYVKEPERGLWENIVYLDFRSLYPSIIITHNVSPDTLNREGCKEYDVAPQVGHRFCKDFPGFIPSLLGDLLEERQKIKKKMKATIDPIERKLLDYRQRAIKILANSYYGYYGYARARWYCKECAESVTAWGREYITMTIKEIEEKYGFKVIYSDTDGFFATIPGADAETVKKKAMEFLKYINAKLPGALELEYEGFYKRGFFVTKKKYAVIDEEGKITTRGLEIVRRDWSEIAKETQARVLEALLKDGDVEKAVRIVKEVTEKLSKYEVPPEKLVIHEQITRDLKDYKATGPHVAVAKRLAARGVKIRPGTVISYIVLKGSGRIGDRAIPFDEFDPTKHKYDAEYYIENQVLPAVERILRAFGYRKEDLRYQKTRQVGLSAWLKPKGT

SEQ ID NO: 2058 - protein, 774 aa, synthetic construct
MILDTDLITEDGKPVFRIFKKENGEFKIEYDRTFEWYFYALLKDDSAIEEVKKITAERHGTVVTVKRVEKVQKKFLGRPVEVWKLYFTHWQDVPAIADKIREHPAVIDIYEYDIPFAKRYLIDKGLVPMEGDEELKMLAFDIETLYHEGEEFAEGPILMISYADEEGARVITWKNVDLPYVDVVSTEREMIKRFLRVVKEKDPDVLITYNGDNFDFAYLKKRCEKLGINFALGRDGSEPKIQRMGDRFAVEVKGRIHFDLYPVIRRTINLPTYTLEAVYEAVFGQPKEKVYAEEITTAWETGENLERVARYSMEDAKVTYELGKEFLPMEAQLSRLIGQSLWDVSRSSTGNLVEWFLLRKAYERNELAPNKPDEKELARRRQSYEGGYVKEPERGLWENIVYLDFRSLYPSIIITHNVSPDTLNREGCKEYDVAPQVGHRFCKDFPGFIPSLLGDLLEERQKIKKKMKATIDPIERKLLDYRQRAIKILANSYYGYYGYARARWYCKECAESVTAWGREYITMTIKEIEEKYGFKVIYSDTDGFFATIPGADAETVKKKAMEFLKYINAKLPGALELEYEGFYKRGFFVTKKKYAVIDEEGKITTRGLEIVRRDWSEIAKETQARVLEALLKDGDVEKAVRIVKEVTEKLSKYEVPPEKLVIHEQITRDLKDYKATGPHVAVAKRLAARGVKIRPGTVISYIVLKGSGRIGDRAIPFDEFDPTKHKYDAEYYIENQVLPAVERILRAFGYRKEDLRYQKTRQVGLSAWLKPKGT

SEQ ID NO: 2059 - protein, 774 aa, synthetic construct
MILDTDLITEDGKPVFRIFKKENGEFKIEYDRTFEWYFYALLKDDSAIEEVKKITAERHGTVVTVKRVEKVQKKFLGRPVEVWKLYFTHWQDVPAIHDKIREHPAVIDIYEYDIPFAKRYLIDKGLVPMEGDEELKMLAFDIETLYHEGEEFAEGPILMISYADEEGARVITWKNVDLPYVDVVSTEREMIKRFLRVVKEKDPDVLITYNGDNFDFAYLKKRCEKLGINFALGRDGSEPKIQRMGDRFAVEVKGRIHFDLYPVIRRTINLPTYTLEAVYEAVFGQPKEKVYAEEITTAWETGENLERVARYSMEDAKVTYELGKEFLPMEAQLSRLIGQSLWDVSRSSTGNLVEWFLLRKAYERNELAPNKPDEKELARRRQSYEGGYVKEPERGLWENIVYLDFRSLYPSIIITHNVSPDTLNREGCKEYDVAPQVGHRFCKDFPGFIPSLLGDLLEERQKIKKKMKATIDPIERKLLDYRQRAIKILANSYYGYYGYARARWYCKECAESVTAWGREYITMTIKEIEEKYGFKVIYSDTDGFFATIPGADAETVKKKAMEFLKYINAKLPGALELEYEGFYKRGFFVTKKKYAVIDEEGKITTRGLEIVRRDWSEIAKETQARVLEALLKDGDVEKAVRIVKEVTEKLSKYEVPPEKLVIHEQITRDLKDYKATGPHVAVAKRLAARGVKIRPGTVISYIVLKGSGRIGDRAIPFDEFDPTKHKYDAEYYIENQVLPAVERILRAFGYRKEDLRYQKTRQVGLSAWLKPKGT

SEQ ID NO: 2060 - protein, 774 aa, synthetic construct
MILDTDLITEDGKPVFRIFKKENGEFKIEYDRTFEWYFYALLKDDSAIEEVKKITAERHGTVVTVKRVEKVQKKFLGRPVEVWKLYFTHWQDVPAIWDKIREHPAVIDIYEYDIPFAKRYLIDKGLVPMEGDEELKMLAFDIETLYHEGEEFAEGPILMISYADEEGARVITWKNVDLPYVDVVSTEREMIKRFLRVVKEKDPDVLITYNGDNFDFAYLKKRCEKLGINFALGRDGSEPKIQRMGDRFAVEVKGRIHFDLYPVIRRTINLPTYTLEAVYEAVFGQPKEKVYAEEITTAWETGENLERVARYSMEDAKVTYELGKEFLPMEAQLSRLIGQSLWDVSRSSTGNLVEWFLLRKAYERNELAPNKPDEKELARRRQSYEGGYVKEPERGLWENIVYLDFRSLYPSIIITHNVSPDTLNREGCKEYDVAPQVGHRFCKDFPGFIPSLLGDLLEERQKIKKKMKATIDPIERKLLDYRQRAIKILANSYYGYYGYARARWYCKECAESVTAWGREYITMTIKEIEEKYGFKVIYSDTDGFFATIPGADAETVKKKAMEFLKYINAKLPGALELEYEGFYKRGFFVTKKKYAVIDEEGKITTRGLEIVRRDWSEIAKETQARVLEALLKDGDVEKAVRIVKEVTEKLSKYEVPPEKLVIHEQITRDLKDYKATGPHVAVAKRLAARGVKIRPGTVISYIVLKGSGRIGDRAIPFDEFDPTKHKYDAEYYIENQVLPAVERILRAFGYRKEDLRYQKTRQVGLSAWLKPKGT

SEQ ID NO: 2061 - protein, 774 aa, synthetic construct
MILDTDLITEDGKPVFRIFKKENGEFKIEYDRTFEWYFYALLKDDSAIEEVKKITAERHGTVVTVKRVEKVQKKFLGRPVEVWKLYFTHWQDIPAIRDKIREHPAVIDIYEYDIPFAKRYLIDKGLVPMEGDEELKMLAFDIETLYHEGEEFAEGPILMISYADEEGARVITWKNVDLPYVDVVSTEREMIKRFLRVVKEKDPDVLITYNGDNFDFAYLKKRCEKLGINFALGRDGSEPKIQRMGDRFAVEVKGRIHFDLYPVIRRTINLPTYTLEAVYEAVFGQPKEKVYAEEITTAWETGENLERVARYSMEDAKVTYELGKEFLPMEAQLSRLIGQSLWDVSRSSTGNLVEWFLLRKAYERNELAPNKPDEKELARRRQSYEGGYVKEPERGLWENIVYLDFRSLYPSIIITHNVSPDTLNREGCKEYDVAPQVGHRFCKDFPGFIPSLLGDLLEERQKIKKKMKATIDPIERKLLDYRQRAIKILANSYYGYYGYARARWYCKECAESVTAWGREYITMTIKEIEEKYGFKVIYSDTDGFFATIPGADAETVKKKAMEFLKYINAKLPGALELEYEGFYKRGFFVTKKKYAVIDEEGKITTRGLEIVRRDWSEIAKETQARVLEALLKDGDVEKAVRIVKEVTEKLSKYEVPPEKLVIHEQITRDLKDYKATGPHVAVAKRLAARGVKIRPGTVISYIVLKGSGRIGDRAIPFDEFDPTKHKYDAEYYIENQVLPAVERILRAFGYRKEDLRYQKTRQVGLSAWLKPKGT

SEQ ID NO: 2062 - protein, 774 aa, synthetic construct
MILDTDLITEDGKPVFRIFKKENGEFKIEYDRTFEWYFYALLKDDSAIEEVKKITAERHGTVVTVKRVEKVQKKFLGRPVEVWKLYFTHWQDIPAIFDKIREHPAVIDIYEYDIPFAKRYLIDKGLVPMEGDEELKMLAFDIETLYHEGEEFAEGPILMISYADEEGARVITWKNVDLPYVDVVSTEREMIKRFLRVVKEKDPDVLITYNGDNFDFAYLKKRCEKLGINFALGRDGSEPKIQRMGDRFAVEVKGRIHFDLYPVIRRTINLPTYTLEAVYEAVFGQPKEKVYAEEITTAWETGENLERVARYSMEDAKVTYELGKEFLPMEAQLSRLIGQSLWDVSRSSTGNLVEWFLLRKAYERNELAPNKPDEKELARRRQSYEGGYVKEPERGLWENIVYLDFRSLYPSIIITHNVSPDTLNREGCKEYDVAPQVGHRFCKDFPGFIPSLLGDLLEERQKIKKKMKATIDPIERKLLDYRQRAIKILANSYYGYYGYARARWYCKECAESVTAWGREYITMTIKEIEEKYGFKVIYSDTDGFFATIPGADAETVKKKAMEFLKYINAKLPGALELEYEGFYKRGFFVTKKKYAVIDEEGKITTRGLEIVRRDWSEIAKETQARVLEALLKDGDVEKAVRIVKEVTEKLSKYEVPPEKLVIHEQITRDLKDYKATGPHVAVAKRLAARGVKIRPGTVISYIVLKGSGRIGDRAIPFDEFDPTKHKYDAEYYIENQVLPAVERILRAFGYRKEDLRYQKTRQVGLSAWLKPKGT

SEQ ID NO: 2063 - protein, 774 aa, synthetic construct
MILDTDLITEDGKPVFRIFKKENGEFKIEYDRTFEWYFYALLKDDSAIEEVKKITAERHGTVVTVKRVEKVQKKFLGRPVEVWKLYFTHYQDVPAIADKIREHPAVIDIYEYDIPFAKRYLIDKGLVPMEGDEELKMLAFDIETLYHEGEEFAEGPILMISYADEEGARVITWKNVDLPYVDVVSTEREMIKRFLRVVKEKDPDVLITYNGDNFDFAYLKKRCEKLGINFALGRDGSEPKIQRMGDRFAVEVKGRIHFDLYPVIRRTINLPTYTLEAVYEAVFGQPKEKVYAEEITTAWETGENLERVARYSMEDAKVTYELGKEFLPMEAQLSRLIGQSLWDVSRSSTGNLVEWFLLRKAYERNELAPNKPDEKELARRRQSYEGGYVKEPERGLWENIVYLDFRSLYPSIIITHNVSPDTLNREGCKEYDVAPQVGHRFCKDFPGFIPSLLGDLLEERQKIKKKMKATIDPIERKLLDYRQRAIKILANSYYGYYGYARARWYCKECAESVTAWGREYITMTIKEIEEKYGFKVIYSDTDGFFATIPGADAETVKKKAMEFLKYINAKLPGALELEYEGFYKRGFFVTKKKYAVIDEEGKITTRGLEIVRRDWSEIAKETQARVLEALLKDGDVEKAVRIVKEVTEKLSKYEVPPEKLVIHEQITRDLKDYKATGPHVAVAKRLAARGVKIRPGTVISYIVLKGSGRIGDRAIPFDEFDPTKHKYDAEYYIENQVLPAVERILRAFGYRKEDLRYQKTRQVGLSAWLKPKGT

SEQ ID NO: 2064 - protein, 774 aa, synthetic construct
MILDTDLITEDGKPVFRIFKKENGEFKIEYDRTFEWYFYALLKDDSAIEEVKKITAERHGTVVTVKRVEKVQKKFLGRPVEVWKLYFTHYQDIPAIRDKIREHPAVIDIYEYDIPFAKRYLIDKGLVPMEGDEELKMLAFDIETLYHEGEEFAEGPILMISYADEEGARVITWKNVDLPYVDVVSTEREMIKRFLRVVKEKDPDVLITYNGDNFDFAYLKKRCEKLGINFALGRDGSEPKIQRMGDRFAVEVKGRIHFDLYPVIRRTINLPTYTLEAVYEAVFGQPKEKVYAEEITTAWETGENLERVARYSMEDAKVTYELGKEFLPMEAQLSRLIGQSLWDVSRSSTGNLVEWFLLRKAYERNELAPNKPDEKELARRRQSYEGGYVKEPERGLWENIVYLDFRSLYPSIIITHNVSPDTLNREGCKEYDVAPQVGHRFCKDFPGFIPSLLGDLLEERQKIKKKMKATIDPIERKLLDYRQRAIKILANSYYGYYGYARARWYCKECAESVTAWGREYITMTIKEIEEKYGFKVIYSDTDGFFATIPGADAETVKKKAMEFLKYINAKLPGALELEYEGFYKRGFFVTKKKYAVIDEEGKITTRGLEIVRRDWSEIAKETQARVLEALLKDGDVEKAVRIVKEVTEKLSKYEVPPEKLVIHEQITRDLKDYKATGPHVAVAKRLAARGVKIRPGTVISYIVLKGSGRIGDRAIPFDEFDPTKHKYDAEYYIENQVLPAVERILRAFGYRKEDLRYQKTRQVGLSAWLKPKGT

SEQ ID NO: 2065 - protein, 774 aa, synthetic construct
MILDTDLITEDGKPVFRIFKKENGEFKIEYDRTFEWYFYALLKDDSAIEEVKKITAERHGTVVTVKRVEKVQKKFLGRPVEVWKLYFTHYQDIPAIADKIREHPAVIDIYEYDIPFAKRYLIDKGLVPMEGDEELKMLAFDIETLYHEGEEFAEGPILMISYADEEGARVITWKNVDLPYVDVVSTEREMIKRFLRVVKEKDPDVLITYNGDNFDFAYLKKRCEKLGINFALGRDGSEPKIQRMGDRFAVEVKGRIHFDLYPVIRRTINLPTYTLEAVYEAVFGQPKEKVYAEEITTAWETGENLERVARYSMEDAKVTYELGKEFLPMEAQLSRLIGQSLWDVSRSSTGNLVEWFLLRKAYERNELAPNKPDEKELARRRQSYEGGYVKEPERGLWENIVYLDFRSLYPSIIITHNVSPDTLNREGCKEYDVAPQVGHRFCKDFPGFIPSLLGDLLEERQKIKKKMKATIDPIERKLLDYRQRAIKILANSYYGYYGYARARWYCKECAESVTAWGREYITMTIKEIEEKYGFKVIYSDTDGFFATIPGADAETVKKKAMEFLKYINAKLPGALELEYEGFYKRGFFVTKKKYAVIDEEGKITTRGLEIVRRDWSEIAKETQARVLEALLKDGDVEKAVRIVKEVTEKLSKYEVPPEKLVIHEQITRDLKDYKATGPHVAVAKRLAARGVKIRPGTVISYIVLKGSGRIGDRAIPFDEFDPTKHKYDAEYYIENQVLPAVERILRAFGYRKEDLRYQKTRQVGLSAWLKPKGT

SEQ ID NO: 2066 - protein, 774 aa, synthetic construct
MILDTDLITEDGKPVFRIFKKENGEFKIEYDRTFEWYFYALLKDDSAIEEVKKITAERHGTVVTVKRVEKVQKKFLGRPVEVWKLYFTHYQDIPAIFDKIREHPAVIDIYEYDIPFAKRYLIDKGLVPMEGDEELKMLAFDIETLYHEGEEFAEGPILMISYADEEGARVITWKNVDLPYVDVVSTEREMIKRFLRVVKEKDPDVLITYNGDNFDFAYLKKRCEKLGINFALGRDGSEPKIQRMGDRFAVEVKGRIHFDLYPVIRRTINLPTYTLEAVYEAVFGQPKEKVYAEEITTAWETGENLERVARYSMEDAKVTYELGKEFLPMEAQLSRLIGQSLWDVSRSSTGNLVEWFLLRKAYERNELAPNKPDEKELARRRQSYEGGYVKEPERGLWENIVYLDFRSLYPSIIITHNVSPDTLNREGCKEYDVAPQVGHRFCKDFPGFIPSLLGDLLEERQKIKKKMKATIDPIERKLLDYRQRAIKILANSYYGYYGYARARWYCKECAESVTAWGREYITMTIKEIEEKYGFKVIYSDTDGFFATIPGADAETVKKKAMEFLKYINAKLPGALELEYEGFYKRGFFVTKKKYAVIDEEGKITTRGLEIVRRDWSEIAKETQARVLEALLKDGDVEKAVRIVKEVTEKLSKYEVPPEKLVIHEQITRDLKDYKATGPHVAVAKRLAARGVKIRPGTVISYIVLKGSGRIGDRAIPFDEFDPTKHKYDAEYYIENQVLPAVERILRAFGYRKEDLRYQKTRQVGLSAWLKPKGT

SEQ ID NO: 2067 - protein, 774 aa, synthetic construct
MILDTDLITEDGKPVFRIFKKENGEFKIEYDRTFEWYFYALLKDDSAIEEVKKITAERHGTVVTVKRVEKVQKKFLGRPVEVWKLYFTHYQDIPAIHDKIREHPAVIDIYEYDIPFAKRYLIDKGLVPMEGDEELKMLAFDIETLYHEGEEFAEGPILMISYADEEGARVITWKNVDLPYVDVVSTEREMIKRFLRVVKEKDPDVLITYNGDNFDFAYLKKRCEKLGINFALGRDGSEPKIQRMGDRFAVEVKGRIHFDLYPVIRRTINLPTYTLEAVYEAVFGQPKEKVYAEEITTAWETGENLERVARYSMEDAKVTYELGKEFLPMEAQLSRLIGQSLWDVSRSSTGNLVEWFLLRKAYERNELAPNKPDEKELARRRQSYEGGYVKEPERGLWENIVYLDFRSLYPSIIITHNVSPDTLNREGCKEYDVAPQVGHRFCKDFPGFIPSLLGDLLEERQKIKKKMKATIDPIERKLLDYRQRAIKILANSYYGYYGYARARWYCKECAESVTAWGREYITMTIKEIEEKYGFKVIYSDTDGFFATIPGADAETVKKKAMEFLKYINAKLPGALELEYEGFYKRGFFVTKKKYAVIDEEGKITTRGLEIVRRDWSEIAKETQARVLEALLKDGDVEKAVRIVKEVTEKLSKYEVPPEKLVIHEQITRDLKDYKATGPHVAVAKRLAARGVKIRPGTVISYIVLKGSGRIGDRAIPFDEFDPTKHKYDAEYYIENQVLPAVERILRAFGYRKEDLRYQKTRQVGLSAWLKPKGT

SEQ ID NO: 2068 - protein, 774 aa, synthetic construct
MILDTDLITEDGKPVFRIFKKENGEFKIEYDRTFEWYFYALLKDDSAIEEVKKITAERHGTVVTVKRVEKVQKKFLGRPVEVWKLYFTHPQDVPAIFDKIREHPAVIDIYEYDIPFAKRYLIDKGLVPMEGDEELKMLAFDIETLYHEGEEFAEGPILMISYADEEGARVITWKNVDLPYVDVVSTEREMIKRFLRVVKEKDPDVLITYNGDNFDFAYLKKRCEKLGINFALGRDGSEPKIQRMGDRFAVEVKGRIHFDLYPVIRRTINLPTYTLEAVYEAVFGQPKEKVYAEEITTAWETGENLERVARYSMEDAKVTYELGKEFLPMEAQLSRLIGQSLWDVSRSSTGNLVEWFLLRKAYERNELAPNKPDEKELARRRQSYEGGYVKEPERGLWENIVYLDFRSLYPSIIITHNVSPDTLNREGCKEYDVAPQVGHRFCKDFPGFIPSLLGDLLEERQKIKKKMKATIDPIERKLLDYRQRAIKILANSYYGYYGYARARWYCKECAESVTAWGREYITMTIKEIEEKYGFKVIYSDTDGFFATIPGADAETVKKKAMEFLKYINAKLPGALELEYEGFYKRGFFVTKKKYAVIDEEGKITTRGLEIVRRDWSEIAKETQARVLEALLKDGDVEKAVRIVKEVTEKLSKYEVPPEKLVIHEQITRDLKDYKATGPHVAVAKRLAARGVKIRPGTVISYIVLKGSGRIGDRAIPFDEFDPTKHKYDAEYYIENQVLPAVERILRAFGYRKEDLRYQKTRQVGLSAWLKPKGT

SEQ ID NO: 2069 - protein, 774 aa, synthetic construct
MILDTDLITEDGKPVFRIFKKENGEFKIEYDRTFEWYFYALLKDDSAIEEVKKITAERHGTVVTVKRVEKVQKKFLGRPVEVWKLYFTHPQDVPAIHDKIREHPAVIDIYEYDIPFAKRYLIDKGLVPMEGDEELKMLAFDIETLYHEGEEFAEGPILMISYADEEGARVITWKNVDLPYVDVVSTEREMIKRFLRVVKEKDPDVLITYNGDNFDFAYLKKRCEKLGINFALGRDGSEPKIQRMGDRFAVEVKGRIHFDLYPVIRRTINLPTYTLEAVYEAVFGQPKEKVYAEEITTAWETGENLERVARYSMEDAKVTYELGKEFLPMEAQLSRLIGQSLWDVSRSSTGNLVEWFLLRKAYERNELAPNKPDEKELARRRQSYEGGYVKEPERGLWENIVYLDFRSLYPSIIITHNVSPDTLNREGCKEYDVAPQVGHRFCKDFPGFIPSLLGDLLEERQKIKKKMKATIDPIERKLLDYRQRAIKILANSYYGYYGYARARWYCKECAESVTAWGREYITMTIKEIEEKYGFKVIYSDTDGFFATIPGADAETVKKKAMEFLKYINAKLPGALELEYEGFYKRGFFVTKKKYAVIDEEGKITTRGLEIVRRDWSEIAKETQARVLEALLKDGDVEKAVRIVKEVTEKLSKYEVPPEKLVIHEQITRDLKDYKATGPHVAVAKRLAARGVKIRPGTVISYIVLKGSGRIGDRAIPFDEFDPTKHKYDAEYYIENQVLPAVERILRAFGYRKEDLRYQKTRQVGLSAWLKPKGT

SEQ ID NO: 2070 - protein, 774 aa, synthetic construct
MILDTDLITEDGKPVFRIFKKENGEFKIEYDRTFEWYFYALLKDDSAIEEVKKITAERHGTVVTVKRVEKVQKKFLGRPVEVWKLYFTHPQDIPAIRDKIREHPAVIDIYEYDIPFAKRYLIDKGLVPMEGDEELKMLAFDIETLYHEGEEFAEGPILMISYADEEGARVITWKNVDLPYVDVVSTEREMIKRFLRVVKEKDPDVLITYNGDNFDFAYLKKRCEKLGINFALGRDGSEPKIQRMGDRFAVEVKGRIHFDLYPVIRRTINLPTYTLEAVYEAVFGQPKEKVYAEEITTAWETGENLERVARYSMEDAKVTYELGKEFLPMEAQLSRLIGQSLWDVSRSSTGNLVEWFLLRKAYERNELAPNKPDEKELARRRQSYEGGYVKEPERGLWENIVYLDFRSLYPSIIITHNVSPDTLNREGCKEYDVAPQVGHRFCKDFPGFIPSLLGDLLEERQKIKKKMKATIDPIERKLLDYRQRAIKILANSYYGYYGYARARWYCKECAESVTAWGREYITMTIKEIEEKYGFKVIYSDTDGFFATIPGADAETVKKKAMEFLKYINAKLPGALELEYEGFYKRGFFVTKKKYAVIDEEGKITTRGLEIVRRDWSEIAKETQARVLEALLKDGDVEKAVRIVKEVTEKLSKYEVPPEKLVIHEQITRDLKDYKATGPHVAVAKRLAARGVKIRPGTVISYIVLKGSGRIGDRAIPFDEFDPTKHKYDAEYYIENQVLPAVERILRAFGYRKEDLRYQKTRQVGLSAWLKPKGT

SEQ ID NO: 2071 - protein, 774 aa, synthetic construct
MILDTDLITEDGKPVFRIFKKENGEFKIEYDRTFEWYFYALLKDDSAIEEVKKITAERHGTVVTVKRVEKVQKKFLGRPVEVWKLYFTHPQDIPAIADKIREHPAVIDIYEYDIPFAKRYLIDKGLVPMEGDEELKMLAFDIETLYHEGEEFAEGPILMISYADEEGARVITWKNVDLPYVDVVSTEREMIKRFLRVVKEKDPDVLITYNGDNFDFAYLKKRCEKLGINFALGRDGSEPKIQRMGDRFAVEVKGRIHFDLYPVIRRTINLPTYTLEAVYEAVFGQPKEKVYAEEITTAWETGENLERVARYSMEDAKVTYELGKEFLPMEAQLSRLIGQSLWDVSRSSTGNLVEWFLLRKAYERNELAPNKPDEKELARRRQSYEGGYVKEPERGLWENIVYLDFRSLYPSIIITHNVSPDTLNREGCKEYDVAPQVGHRFCKDFPGFIPSLLGDLLEERQKIKKKMKATIDPIERKLLDYRQRAIKILANSYYGYYGYARARWYCKECAESVTAWGREYITMTIKEIEEKYGFKVIYSDTDGFFATIPGADAETVKKKAMEFLKYINAKLPGALELEYEGFYKRGFFVTKKKYAVIDEEGKITTRGLEIVRRDWSEIAKETQARVLEALLKDGDVEKAVRIVKEVTEKLSKYEVPPEKLVIHEQITRDLKDYKATGPHVAVAKRLAARGVKIRPGTVISYIVLKGSGRIGDRAIPFDEFDPTKHKYDAEYYIENQVLPAVERILRAFGYRKEDLRYQKTRQVGLSAWLKPKGT

SEQ ID NO: 2072 - protein, 774 aa, synthetic construct
MILDTDLITEDGKPVFRIFKKENGEFKIEYDRTFEWYFYALLKDDSAIEEVKKITAERHGTVVTVKRVEKVQKKFLGRPVEVWKLYFTHPQDIPAIFDKIREHPAVIDIYEYDIPFAKRYLIDKGLVPMEGDEELKMLAFDIETLYHEGEEFAEGPILMISYADEEGARVITWKNVDLPYVDVVSTEREMIKRFLRVVKEKDPDVLITYNGDNFDFAYLKKRCEKLGINFALGRDGSEPKIQRMGDRFAVEVKGRIHFDLYPVIRRTINLPTYTLEAVYEAVFGQPKEKVYAEEITTAWETGENLERVARYSMEDAKVTYELGKEFLPMEAQLSRLIGQSLWDVSRSSTGNLVEWFLLRKAYERNELAPNKPDEKELARRRQSYEGGYVKEPERGLWENIVYLDFRSLYPSIIITHNVSPDTLNREGCKEYDVAPQVGHRFCKDFPGFIPSLLGDLLEERQKIKKKMKATIDPIERKLLDYRQRAIKILANSYYGYYGYARARWYCKECAESVTAWGREYITMTIKEIEEKYGFKVIYSDTDGFFATIPGADAETVKKKAMEFLKYINAKLPGALELEYEGFYKRGFFVTKKKYAVIDEEGKITTRGLEIVRRDWSEIAKETQARVLEALLKDGDVEKAVRIVKEVTEKLSKYEVPPEKLVIHEQITRDLKDYKATGPHVAVAKRLAARGVKIRPGTVISYIVLKGSGRIGDRAIPFDEFDPTKHKYDAEYYIENQVLPAVERILRAFGYRKEDLRYQKTRQVGLSAWLKPKGT

SEQ ID NO: 2073 - protein, 774 aa, synthetic construct
MILDTDLITEDGKPVFRIFKKENGEFKIEYDRTFEWYFYALLKDDSAIEEVKKITAERHGTVVTVKRVEKVQKKFLGRPVEVWKLYFTHPQDIPAIHDKIREHPAVIDIYEYDIPFAKRYLIDKGLVPMEGDEELKMLAFDIETLYHEGEEFAEGPILMISYADEEGARVITWKNVDLPYVDVVSTEREMIKRFLRVVKEKDPDVLITYNGDNFDFAYLKKRCEKLGINFALGRDGSEPKIQRMGDRFAVEVKGRIHFDLYPVIRRTINLPTYTLEAVYEAVFGQPKEKVYAEEITTAWETGENLERVARYSMEDAKVTYELGKEFLPMEAQLSRLIGQSLWDVSRSSTGNLVEWFLLRKAYERNELAPNKPDEKELARRRQSYEGGYVKEPERGLWENIVYLDFRSLYPSIIITHNVSPDTLNREGCKEYDVAPQVGHRFCKDFPGFIPSLLGDLLEERQKIKKKMKATIDPIERKLLDYRQRAIKILANSYYGYYGYARARWYCKECAESVTAWGREYITMTIKEIEEKYGFKVIYSDTDGFFATIPGADAETVKKKAMEFLKYINAKLPGALELEYEGFYKRGFFVTKKKYAVIDEEGKITTRGLEIVRRDWSEIAKETQARVLEALLKDGDVEKAVRIVKEVTEKLSKYEVPPEKLVIHEQITRDLKDYKATGPHVAVAKRLAARGVKIRPGTVISYIVLKGSGRIGDRAIPFDEFDPTKHKYDAEYYIENQVLPAVERILRAFGYRKEDLRYQKTRQVGLSAWLKPKGT

SEQ ID NO: 2074 - protein, 774 aa, synthetic construct
MILDTDLITEDGKPVFRIFKKENGEFKIEYDRTFEWYFYALLKDDSAIEEVKKITAERHGTVVTVKRVEKVQKKFLGRPVEVWKLYFTHPQDIPAIWDKIREHPAVIDIYEYDIPFAKRYLIDKGLVPMEGDEELKMLAFDIETLYHEGEEFAEGPILMISYADEEGARVITWKNVDLPYVDVVSTEREMIKRFLRVVKEKDPDVLITYNGDNFDFAYLKKRCEKLGINFALGRDGSEPKIQRMGDRFAVEVKGRIHFDLYPVIRRTINLPTYTLEAVYEAVFGQPKEKVYAEEITTAWETGENLERVARYSMEDAKVTYELGKEFLPMEAQLSRLIGQSLWDVSRSSTGNLVEWFLLRKAYERNELAPNKPDEKELARRRQSYEGGYVKEPERGLWENIVYLDFRSLYPSIIITHNVSPDTLNREGCKEYDVAPQVGHRFCKDFPGFIPSLLGDLLEERQKIKKKMKATIDPIERKLLDYRQRAIKILANSYYGYYGYARARWYCKECAESVTAWGREYITMTIKEIEEKYGFKVIYSDTDGFFATIPGADAETVKKKAMEFLKYINAKLPGALELEYEGFYKRGFFVTKKKYAVIDEEGKITTRGLEIVRRDWSEIAKETQARVLEALLKDGDVEKAVRIVKEVTEKLSKYEVPPEKLVIHEQITRDLKDYKATGPHVAVAKRLAARGVKIRPGTVISYIVLKGSGRIGDRAIPFDEFDPTKHKYDAEYYIENQVLPAVERILRAFGYRKEDLRYQKTRQVGLSAWLKPKGT

SEQ ID NO: 2075 - protein, 774 aa, synthetic construct
MILDTDLITEDGKPVFRIFKKENGEFKIEYDRTFEPYFYALLKDDSAIEEVKKITAERHGTVVTVKRVEKVQKKFLGRPVEVWKLYFTHFQDVPAIRDKIREHPAVIDIYEYDIPFAKRYLIDKGLVPMEGDEELKMLAFDIETLYHEGEEFAEGPILMISYADEEGARVITWKNVDLPYVDVVSTEREMIKRFLRVVKEKDPDVLITYNGDNFDFAYLKKRCEKLGINFALGRDGSEPKIQRMGDRFAVEVKGRIHFDLYPVIRRTINLPTYTLEAVYEAVFGQPKEKVYAEEITTAWETGENLERVARYSMEDAKVTYELGKEFLPMEAQLSRLIGQSLWDVSRSSTGNLVEWFLLRKAYERNELAPNKPDEKELARRRQSYEGGYVKEPERGLWENIVYLDFRSLYPSIIITHNVSPDTLNREGCKEYDVAPQVGHRFCKDFPGFIPSLLGDLLEERQKIKKKMKATIDPIERKLLDYRQRAIKILANSYYGYYGYARARWYCKECAESVTAWGREYITMTIKEIEEKYGFKVIYSDTDGFFATIPGADAETVKKKAMEFLKYINAKLPGALELEYEGFYKRGFFVTKKKYAVIDEEGKITTRGLEIVRRDWSEIAKETQARVLEALLKDGDVEKAVRIVKEVTEKLSKYEVPPEKLVIHEQITRDLKDYKATGPHVAVAKRLAARGVKIRPGTVISYIVLKGSGRIGDRAIPFDEFDPTKHKYDAEYYIENQVLPAVERILRAFGYRKEDLRYQKTRQVGLSAWLKPKGT

SEQ ID NO: 2076 - protein, 774 aa, synthetic construct
MILDTDLITEDGKPVFRIFKKENGEFKIEYDRTFEPYFYALLKDDSAIEEVKKITAERHGTVVTVKRVEKVQKKFLGRPVEVWKLYFTHFQDVPAIADKIREHPAVIDIYEYDIPFAKRYLIDKGLVPMEGDEELKMLAFDIETLYHEGEEFAEGPILMISYADEEGARVITWKNVDLPYVDVVSTEREMIKRFLRVVKEKDPDVLITYNGDNFDFAYLKKRCEKLGINFALGRDGSEPKIQRMGDRFAVEVKGRIHFDLYPVIRRTINLPTYTLEAVYEAVFGQPKEKVYAEEITTAWETGENLERVARYSMEDAKVTYELGKEFLPMEAQLSRLIGQSLWDVSRSSTGNLVEWFLLRKAYERNELAPNKPDEKELARRRQSYEGGYVKEPERGLWENIVYLDFRSLYPSIIITHNVSPDTLNREGCKEYDVAPQVGHRFCKDFPGFIPSLLGDLLEERQKIKKKMKATIDPIERKLLDYRQRAIKILANSYYGYYGYARARWYCKECAESVTAWGREYITMTIKEIEEKYGFKVIYSDTDGFFATIPGADAETVKKKAMEFLKYINAKLPGALELEYEGFYKRGFFVTKKKYAVIDEEGKITTRGLEIVRRDWSEIAKETQARVLEALLKDGDVEKAVRIVKEVTEKLSKYEVPPEKLVIHEQITRDLKDYKATGPHVAVAKRLAARGVKIRPGTVISYIVLKGSGRIGDRAIPFDEFDPTKHKYDAEYYIENQVLPAVERILRAFGYRKEDLRYQKTRQVGLSAWLKPKGT

SEQ ID NO: 2077 - protein, 774 aa, synthetic construct
MILDTDLITEDGKPVFRIFKKENGEFKIEYDRTFEPYFYALLKDDSAIEEVKKITAERHGTVVTVKRVEKVQKKFLGRPVEVWKLYFTHFQDVPAIFDKIREHPAVIDIYEYDIPFAKRYLIDKGLVPMEGDEELKMLAFDIETLYHEGEEFAEGPILMISYADEEGARVITWKNVDLPYVDVVSTEREMIKRFLRVVKEKDPDVLITYNGDNFDFAYLKKRCEKLGINFALGRDGSEPKIQRMGDRFAVEVKGRIHFDLYPVIRRTINLPTYTLEAVYEAVFGQPKEKVYAEEITTAWETGENLERVARYSMEDAKVTYELGKEFLPMEAQLSRLIGQSLWDVSRSSTGNLVEWFLLRKAYERNELAPNKPDEKELARRRQSYEGGYVKEPERGLWENIVYLDFRSLYPSIIITHNVSPDTLNREGCKEYDVAPQVGHRFCKDFPGFIPSLLGDLLEERQKIKKKMKATIDPIERKLLDYRQRAIKILANSYYGYYGYARARWYCKECAESVTAWGREYITMTIKEIEEKYGFKVIYSDTDGFFATIPGADAETVKKKAMEFLKYINAKLPGALELEYEGFYKRGFFVTKKKYAVIDEEGKITTRGLEIVRRDWSEIAKETQARVLEALLKDGDVEKAVRIVKEVTEKLSKYEVPPEKLVIHEQITRDLKDYKATGPHVAVAKRLAARGVKIRPGTVISYIVLKGSGRIGDRAIPFDEFDPTKHKYDAEYYIENQVLPAVERILRAFGYRKEDLRYQKTRQVGLSAWLKPKGT

SEQ ID NO: 2078 - protein, 774 aa, synthetic construct
MILDTDLITEDGKPVFRIFKKENGEFKIEYDRTFEPYFYALLKDDSAIEEVKKITAERHGTVVTVKRVEKVQKKFLGRPVEVWKLYFTHFQDVPAIHDKIREHPAVIDIYEYDIPFAKRYLIDKGLVPMEGDEELKMLAFDIETLYHEGEEFAEGPILMISYADEEGARVITWKNVDLPYVDVVSTEREMIKRFLRVVKEKDPDVLITYNGDNFDFAYLKKRCEKLGINFALGRDGSEPKIQRMGDRFAVEVKGRIHFDLYPVIRRTINLPTYTLEAVYEAVFGQPKEKVYAEEITTAWETGENLERVARYSMEDAKVTYELGKEFLPMEAQLSRLIGQSLWDVSRSSTGNLVEWFLLRKAYERNELAPNKPDEKELARRRQSYEGGYVKEPERGLWENIVYLDFRSLYPSIIITHNVSPDTLNREGCKEYDVAPQVGHRFCKDFPGFIPSLLGDLLEERQKIKKKMKATIDPIERKLLDYRQRAIKILANSYYGYYGYARARWYCKECAESVTAWGREYITMTIKEIEEKYGFKVIYSDTDGFFATIPGADAETVKKKAMEFLKYINAKLPGALELEYEGFYKRGFFVTKKKYAVIDEEGKITTRGLEIVRRDWSEIAKETQARVLEALLKDGDVEKAVRIVKEVTEKLSKYEVPPEKLVIHEQITRDLKDYKATGPHVAVAKRLAARGVKIRPGTVISYIVLKGSGRIGDRAIPFDEFDPTKHKYDAEYYIENQVLPAVERILRAFGYRKEDLRYQKTRQVGLSAWLKPKGT

SEQ ID NO: 2079 - protein, 774 aa, synthetic construct
MILDTDLITEDGKPVFRIFKKENGEFKIEYDRTFEPYFYALLKDDSAIEEVKKITAERHGTVVTVKRVEKVQKKFLGRPVEVWKLYFTHFQDVPAIWDKIREHPAVIDIYEYDIPFAKRYLIDKGLVPMEGDEELKMLAFDIETLYHEGEEFAEGPILMISYADEEGARVITWKNVDLPYVDVVSTEREMIKRFLRVVKEKDPDVLITYNGDNFDFAYLKKRCEKLGINFALGRDGSEPKIQRMGDRFAVEVKGRIHFDLYPVIRRTINLPTYTLEAVYEAVFGQPKEKVYAEEITTAWETGENLERVARYSMEDAKVTYELGKEFLPMEAQLSRLIGQSLWDVSRSSTGNLVEWFLLRKAYERNELAPNKPDEKELARRRQSYEGGYVKEPERGLWENIVYLDFRSLYPSIIITHNVSPDTLNREGCKEYDVAPQVGHRFCKDFPGFIPSLLGDLLEERQKIKKKMKATIDPIERKLLDYRQRAIKILANSYYGYYGYARARWYCKECAESVTAWGREYITMTIKEIEEKYGFKVIYSDTDGFFATIPGADAETVKKKAMEFLKYINAKLPGALELEYEGFYKRGFFVTKKKYAVIDEEGKITTRGLEIVRRDWSEIAKETQARVLEALLKDGDVEKAVRIVKEVTEKLSKYEVPPEKLVIHEQITRDLKDYKATGPHVAVAKRLAARGVKIRPGTVISYIVLKGSGRIGDRAIPFDEFDPTKHKYDAEYYIENQVLPAVERILRAFGYRKEDLRYQKTRQVGLSAWLKPKGT

SEQ ID NO: 2080 - protein, 774 aa, synthetic construct
MILDTDLITEDGKPVFRIFKKENGEFKIEYDRTFEPYFYALLKDDSAIEEVKKITAERHGTVVTVKRVEKVQKKFLGRPVEVWKLYFTHFQDIPAIRDKIREHPAVIDIYEYDIPFAKRYLIDKGLVPMEGDEELKMLAFDIETLYHEGEEFAEGPILMISYADEEGARVITWKNVDLPYVDVVSTEREMIKRFLRVVKEKDPDVLITYNGDNFDFAYLKKRCEKLGINFALGRDGSEPKIQRMGDRFAVEVKGRIHFDLYPVIRRTINLPTYTLEAVYEAVFGQPKEKVYAEEITTAWETGENLERVARYSMEDAKVTYELGKEFLPMEAQLSRLIGQSLWDVSRSSTGNLVEWFLLRKAYERNELAPNKPDEKELARRRQSYEGGYVKEPERGLWENIVYLDFRSLYPSIIITHNVSPDTLNREGCKEYDVAPQVGHRFCKDFPGFIPSLLGDLLEERQKIKKKMKATIDPIERKLLDYRQRAIKILANSYYGYYGYARARWYCKECAESVTAWGREYITMTIKEIEEKYGFKVIYSDTDGFFATIPGADAETVKKKAMEFLKYINAKLPGALELEYEGFYKRGFFVTKKKYAVIDEEGKITTRGLEIVRRDWSEIAKETQARVLEALLKDGDVEKAVRIVKEVTEKLSKYEVPPEKLVIHEQITRDLKDYKATGPHVAVAKRLAARGVKIRPGTVISYIVLKGSGRIGDRAIPFDEFDPTKHKYDAEYYIENQVLPAVERILRAFGYRKEDLRYQKTRQVGLSAWLKPKGT

SEQ ID NO: 2081 - protein, 774 aa, synthetic construct
MILDTDLITEDGKPVFRIFKKENGEFKIEYDRTFEPYFYALLKDDSAIEEVKKITAERHGTVVTVKRVEKVQKKFLGRPVEVWKLYFTHFQDIPAIADKIREHPAVIDIYEYDIPFAKRYLIDKGLVPMEGDEELKMLAFDIETLYHEGEEFAEGPILMISYADEEGARVITWKNVDLPYVDVVSTEREMIKRFLRVVKEKDPDVLITYNGDNFDFAYLKKRCEKLGINFALGRDGSEPKIQRMGDRFAVEVKGRIHFDLYPVIRRTINLPTYTLEAVYEAVFGQPKEKVYAEEITTAWETGENLERVARYSMEDAKVTYELGKEFLPMEAQLSRLIGQSLWDVSRSSTGNLVEWFLLRKAYERNELAPNKPDEKELARRRQSYEGGYVKEPERGLWENIVYLDFRSLYPSIIITHNVSPDTLNREGCKEYDVAPQVGHRFCKDFPGFIPSLLGDLLEERQKIKKKMKATIDPIERKLLDYRQRAIKILANSYYGYYGYARARWYCKECAESVTAWGREYITMTIKEIEEKYGFKVIYSDTDGFFATIPGADAETVKKKAMEFLKYINAKLPGALELEYEGFYKRGFFVTKKKYAVIDEEGKITTRGLEIVRRDWSEIAKETQARVLEALLKDGDVEKAVRIVKEVTEKLSKYEVPPEKLVIHEQITRDLKDYKATGPHVAVAKRLAARGVKIRPGTVISYIVLKGSGRIGDRAIPFDEFDPTKHKYDAEYYIENQVLPAVERILRAFGYRKEDLRYQKTRQVGLSAWLKPKGT

SEQ ID NO: 2082 - protein, 774 aa, synthetic construct
MILDTDLITEDGKPVFRIFKKENGEFKIEYDRTFEPYFYALLKDDSAIEEVKKITAERHGTVVTVKRVEKVQKKFLGRPVEVWKLYFTHFQDIPAIFDKIREHPAVIDIYEYDIPFAKRYLIDKGLVPMEGDEELKMLAFDIETLYHEGEEFAEGPILMISYADEEGARVITWKNVDLPYVDVVSTEREMIKRFLRVVKEKDPDVLITYNGDNFDFAYLKKRCEKLGINFALGRDGSEPKIQRMGDRFAVEVKGRIHFDLYPVIRRTINLPTYTLEAVYEAVFGQPKEKVYAEEITTAWETGENLERVARYSMEDAKVTYELGKEFLPMEAQLSRLIGQSLWDVSRSSTGNLVEWFLLRKAYERNELAPNKPDEKELARRRQSYEGGYVKEPERGLWENIVYLDFRSLYPSIIITHNVSPDTLNREGCKEYDVAPQVGHRFCKDFPGFIPSLLGDLLEERQKIKKKMKATIDPIERKLLDYRQRAIKILANSYYGYYGYARARWYCKECAESVTAWGREYITMTIKEIEEKYGFKVIYSDTDGFFATIPGADAETVKKKAMEFLKYINAKLPGALELEYEGFYKRGFFVTKKKYAVIDEEGKITTRGLEIVRRDWSEIAKETQARVLEALLKDGDVEKAVRIVKEVTEKLSKYEVPPEKLVIHEQITRDLKDYKATGPHVAVAKRLAARGVKIRPGTVISYIVLKGSGRIGDRAIPFDEFDPTKHKYDAEYYIENQVLPAVERILRAFGYRKEDLRYQKTRQVGLSAWLKPKGT

SEQ ID NO: 2083 - protein, 774 aa, synthetic construct
MILDTDLITEDGKPVFRIFKKENGEFKIEYDRTFEPYFYALLKDDSAIEEVKKITAERHGTVVTVKRVEKVQKKFLGRPVEVWKLYFTHFQDIPAIHDKIREHPAVIDIYEYDIPFAKRYLIDKGLVPMEGDEELKMLAFDIETLYHEGEEFAEGPILMISYADEEGARVITWKNVDLPYVDVVSTEREMIKRFLRVVKEKDPDVLITYNGDNFDFAYLKKRCEKLGINFALGRDGSEPKIQRMGDRFAVEVKGRIHFDLYPVIRRTINLPTYTLEAVYEAVFGQPKEKVYAEEITTAWETGENLERVARYSMEDAKVTYELGKEFLPMEAQLSRLIGQSLWDVSRSSTGNLVEWFLLRKAYERNELAPNKPDEKELARRRQSYEGGYVKEPERGLWENIVYLDFRSLYPSIIITHNVSPDTLNREGCKEYDVAPQVGHRFCKDFPGFIPSLLGDLLEERQKIKKKMKATIDPIERKLLDYRQRAIKILANSYYGYYGYARARWYCKECAESVTAWGREYITMTIKEIEEKYGFKVIYSDTDGFFATIPGADAETVKKKAMEFLKYINAKLPGALELEYEGFYKRGFFVTKKKYAVIDEEGKITTRGLEIVRRDWSEIAKETQARVLEALLKDGDVEKAVRIVKEVTEKLSKYEVPPEKLVIHEQITRDLKDYKATGPHVAVAKRLAARGVKIRPGTVISYIVLKGSGRIGDRAIPFDEFDPTKHKYDAEYYIENQVLPAVERILRAFGYRKEDLRYQKTRQVGLSAWLKPKGT

SEQ ID NO: 2084 - protein, 774 aa, synthetic construct
MILDTDLITEDGKPVFRIFKKENGEFKIEYDRTFEPYFYALLKDDSAIEEVKKITAERHGTVVTVKRVEKVQKKFLGRPVEVWKLYFTHFQDIPAIWDKIREHPAVIDIYEYDIPFAKRYLIDKGLVPMEGDEELKMLAFDIETLYHEGEEFAEGPILMISYADEEGARVITWKNVDLPYVDVVSTEREMIKRFLRVVKEKDPDVLITYNGDNFDFAYLKKRCEKLGINFALGRDGSEPKIQRMGDRFAVEVKGRIHFDLYPVIRRTINLPTYTLEAVYEAVFGQPKEKVYAEEITTAWETGENLERVARYSMEDAKVTYELGKEFLPMEAQLSRLIGQSLWDVSRSSTGNLVEWFLLRKAYERNELAPNKPDEKELARRRQSYEGGYVKEPERGLWENIVYLDFRSLYPSIIITHNVSPDTLNREGCKEYDVAPQVGHRFCKDFPGFIPSLLGDLLEERQKIKKKMKATIDPIERKLLDYRQRAIKILANSYYGYYGYARARWYCKECAESVTAWGREYITMTIKEIEEKYGFKVIYSDTDGFFATIPGADAETVKKKAMEFLKYINAKLPGALELEYEGFYKRGFFVTKKKYAVIDEEGKITTRGLEIVRRDWSEIAKETQARVLEALLKDGDVEKAVRIVKEVTEKLSKYEVPPEKLVIHEQITRDLKDYKATGPHVAVAKRLAARGVKIRPGTVISYIVLKGSGRIGDRAIPFDEFDPTKHKYDAEYYIENQVLPAVERILRAFGYRKEDLRYQKTRQVGLSAWLKPKGT

SEQ ID NO: 2085 - protein, 774 aa, synthetic construct
MILDTDLITEDGKPVFRIFKKENGEFKIEYDRTFEPYFYALLKDDSAIEEVKKITAERHGTVVTVKRVEKVQKKFLGRPVEVWKLYFTHFQDKPAIRDKIREHPAVIDIYEYDIPFAKRYLIDKGLVPMEGDEELKMLAFDIETLYHEGEEFAEGPILMISYADEEGARVITWKNVDLPYVDVVSTEREMIKRFLRVVKEKDPDVLITYNGDNFDFAYLKKRCEKLGINFALGRDGSEPKIQRMGDRFAVEVKGRIHFDLYPVIRRTINLPTYTLEAVYEAVFGQPKEKVYAEEITTAWETGENLERVARYSMEDAKVTYELGKEFLPMEAQLSRLIGQSLWDVSRSSTGNLVEWFLLRKAYERNELAPNKPDEKELARRRQSYEGGYVKEPERGLWENIVYLDFRSLYPSIIITHNVSPDTLNREGCKEYDVAPQVGHRFCKDFPGFIPSLLGDLLEERQKIKKKMKATIDPIERKLLDYRQRAIKILANSYYGYYGYARARWYCKECAESVTAWGREYITMTIKEIEEKYGFKVIYSDTDGFFATIPGADAETVKKKAMEFLKYINAKLPGALELEYEGFYKRGFFVTKKKYAVIDEEGKITTRGLEIVRRDWSEIAKETQARVLEALLKDGDVEKAVRIVKEVTEKLSKYEVPPEKLVIHEQITRDLKDYKATGPHVAVAKRLAARGVKIRPGTVISYIVLKGSGRIGDRAIPFDEFDPTKHKYDAEYYIENQVLPAVERILRAFGYRKEDLRYQKTRQVGLSAWLKPKGT

SEQ ID NO: 2086 - protein, 774 aa, synthetic construct
MILDTDLITEDGKPVFRIFKKENGEFKIEYDRTFEPYFYALLKDDSAIEEVKKITAERHGTVVTVKRVEKVQKKFLGRPVEVWKLYFTHFQDKPAIADKIREHPAVIDIYEYDIPFAKRYLIDKGLVPMEGDEELKMLAFDIETLYHEGEEFAEGPILMISYADEEGARVITWKNVDLPYVDVVSTEREMIKRFLRVVKEKDPDVLITYNGDNFDFAYLKKRCEKLGINFALGRDGSEPKIQRMGDRFAVEVKGRIHFDLYPVIRRTINLPTYTLEAVYEAVFGQPKEKVYAEEITTAWETGENLERVARYSMEDAKVTYELGKEFLPMEAQLSRLIGQSLWDVSRSSTGNLVEWFLLRKAYERNELAPNKPDEKELARRRQSYEGGYVKEPERGLWENIVYLDFRSLYPSIIITHNVSPDTLNREGCKEYDVAPQVGHRFCKDFPGFIPSLLGDLLEERQKIKKKMKATIDPIERKLLDYRQRAIKILANSYYGYYGYARARWYCKECAESVTAWGREYITMTIKEIEEKYGFKVIYSDTDGFFATIPGADAETVKKKAMEFLKYINAKLPGALELEYEGFYKRGFFVTKKKYAVIDEEGKITTRGLEIVRRDWSEIAKETQARVLEALLKDGDVEKAVRIVKEVTEKLSKYEVPPEKLVIHEQITRDLKDYKATGPHVAVAKRLAARGVKIRPGTVISYIVLKGSGRIGDRAIPFDEFDPTKHKYDAEYYIENQVLPAVERILRAFGYRKEDLRYQKTRQVGLSAWLKPKGT

SEQ ID NO: 2087 - protein, 774 aa, synthetic construct
MILDTDLITEDGKPVFRIFKKENGEFKIEYDRTFEPYFYALLKDDSAIEEVKKITAERHGTVVTVKRVEKVQKKFLGRPVEVWKLYFTHFQDKPAIFDKIREHPAVIDIYEYDIPFAKRYLIDKGLVPMEGDEELKMLAFDIETLYHEGEEFAEGPILMISYADEEGARVITWKNVDLPYVDVVSTEREMIKRFLRVVKEKDPDVLITYNGDNFDFAYLKKRCEKLGINFALGRDGSEPKIQRMGDRFAVEVKGRIHFDLYPVIRRTINLPTYTLEAVYEAVFGQPKEKVYAEEITTAWETGENLERVARYSMEDAKVTYELGKEFLPMEAQLSRLIGQSLWDVSRSSTGNLVEWFLLRKAYERNELAPNKPDEKELARRRQSYEGGYVKEPERGLWENIVYLDFRSLYPSIIITHNVSPDTLNREGCKEYDVAPQVGHRFCKDFPGFIPSLLGDLLEERQKIKKKMKATIDPIERKLLDYRQRAIKILANSYYGYYGYARARWYCKECAESVTAWGREYITMTIKEIEEKYGFKVIYSDTDGFFATIPGADAETVKKKAMEFLKYINAKLPGALELEYEGFYKRGFFVTKKKYAVIDEEGKITTRGLEIVRRDWSEIAKETQARVLEALLKDGDVEKAVRIVKEVTEKLSKYEVPPEKLVIHEQITRDLKDYKATGPHVAVAKRLAARGVKIRPGTVISYIVLKGSGRIGDRAIPFDEFDPTKHKYDAEYYIENQVLPAVERILRAFGYRKEDLRYQKTRQVGLSAWLKPKGT

SEQ ID NO: 2088 - protein, 774 aa, synthetic construct
MILDTDLITEDGKPVFRIFKKENGEFKIEYDRTFEPYFYALLKDDSAIEEVKKITAERHGTVVTVKRVEKVQKKFLGRPVEVWKLYFTHFQDQPAIRDKIREHPAVIDIYEYDIPFAKRYLIDKGLVPMEGDEELKMLAFDIETLYHEGEEFAEGPILMISYADEEGARVITWKNVDLPYVDVVSTEREMIKRFLRVVKEKDPDVLITYNGDNFDFAYLKKRCEKLGINFALGRDGSEPKIQRMGDRFAVEVKGRIHFDLYPVIRRTINLPTYTLEAVYEAVFGQPKEKVYAEEITTAWETGENLERVARYSMEDAKVTYELGKEFLPMEAQLSRLIGQSLWDVSRSSTGNLVEWFLLRKAYERNELAPNKPDEKELARRRQSYEGGYVKEPERGLWENIVYLDFRSLYPSIIITHNVSPDTLNREGCKEYDVAPQVGHRFCKDFPGFIPSLLGDLLEERQKIKKKMKATIDPIERKLLDYRQRAIKILANSYYGYYGYARARWYCKECAESVTAWGREYITMTIKEIEEKYGFKVIYSDTDGFFATIPGADAETVKKKAMEFLKYINAKLPGALELEYEGFYKRGFFVTKKKYAVIDEEGKITTRGLEIVRRDWSEIAKETQARVLEALLKDGDVEKAVRIVKEVTEKLSKYEVPPEKLVIHEQITRDLKDYKATGPHVAVAKRLAARGVKIRPGTVISYIVLKGSGRIGDRAIPFDEFDPTKHKYDAEYYIENQVLPAVERILRAFGYRKEDLRYQKTRQVGLSAWLKPKGT

SEQ ID NO: 2089 - protein, 774 aa, synthetic construct
MILDTDLITEDGKPVFRIFKKENGEFKIEYDRTFEPYFYALLKDDSAIEEVKKITAERHGTVVTVKRVEKVQKKFLGRPVEVWKLYFTHFQDQPAIADKIREHPAVIDIYEYDIPFAKRYLIDKGLVPMEGDEELKMLAFDIETLYHEGEEFAEGPILMISYADEEGARVITWKNVDLPYVDVVSTEREMIKRFLRVVKEKDPDVLITYNGDNFDFAYLKKRCEKLGINFALGRDGSEPKIQRMGDRFAVEVKGRIHFDLYPVIRRTINLPTYTLEAVYEAVFGQPKEKVYAEEITTAWETGENLERVARYSMEDAKVTYELGKEFLPMEAQLSRLIGQSLWDVSRSSTGNLVEWFLLRKAYERNELAPNKPDEKELARRRQSYEGGYVKEPERGLWENIVYLDFRSLYPSIIITHNVSPDTLNREGCKEYDVAPQVGHRFCKDFPGFIPSLLGDLLEERQKIKKKMKATIDPIERKLLDYRQRAIKILANSYYGYYGYARARWYCKECAESVTAWGREYITMTIKEIEEKYGFKVIYSDTDGFFATIPGADAETVKKKAMEFLKYINAKLPGALELEYEGFYKRGFFVTKKKYAVIDEEGKITTRGLEIVRRDWSEIAKETQARVLEALLKDGDVEKAVRIVKEVTEKLSKYEVPPEKLVIHEQITRDLKDYKATGPHVAVAKRLAARGVKIRPGTVISYIVLKGSGRIGDRAIPFDEFDPTKHKYDAEYYIENQVLPAVERILRAFGYRKEDLRYQKTRQVGLSAWLKPKGT

SEQ ID NO: 2090 - protein, 774 aa, synthetic construct
MILDTDLITEDGKPVFRIFKKENGEFKIEYDRTFEPYFYALLKDDSAIEEVKKITAERHGTVVTVKRVEKVQKKFLGRPVEVWKLYFTHFQDQPAIFDKIREHPAVIDIYEYDIPFAKRYLIDKGLVPMEGDEELKMLAFDIETLYHEGEEFAEGPILMISYADEEGARVITWKNVDLPYVDVVSTEREMIKRFLRVVKEKDPDVLITYNGDNFDFAYLKKRCEKLGINFALGRDGSEPKIQRMGDRFAVEVKGRIHFDLYPVIRRTINLPTYTLEAVYEAVFGQPKEKVYAEEITTAWETGENLERVARYSMEDAKVTYELGKEFLPMEAQLSRLIGQSLWDVSRSSTGNLVEWFLLRKAYERNELAPNKPDEKELARRRQSYEGGYVKEPERGLWENIVYLDFRSLYPSIIITHNVSPDTLNREGCKEYDVAPQVGHRFCKDFPGFIPSLLGDLLEERQKIKKKMKATIDPIERKLLDYRQRAIKILANSYYGYYGYARARWYCKECAESVTAWGREYITMTIKEIEEKYGFKVIYSDTDGFFATIPGADAETVKKKAMEFLKYINAKLPGALELEYEGFYKRGFFVTKKKYAVIDEEGKITTRGLEIVRRDWSEIAKETQARVLEALLKDGDVEKAVRIVKEVTEKLSKYEVPPEKLVIHEQITRDLKDYKATGPHVAVAKRLAARGVKIRPGTVISYIVLKGSGRIGDRAIPFDEFDPTKHKYDAEYYIENQVLPAVERILRAFGYRKEDLRYQKTRQVGLSAWLKPKGT

SEQ ID NO: 2091 - protein, 774 aa, synthetic construct
MILDTDLITEDGKPVFRIFKKENGEFKIEYDRTFEPYFYALLKDDSAIEEVKKITAERHGTVVTVKRVEKVQKKFLGRPVEVWKLYFTHFQDQPAIWDKIREHPAVIDIYEYDIPFAKRYLIDKGLVPMEGDEELKMLAFDIETLYHEGEEFAEGPILMISYADEEGARVITWKNVDLPYVDVVSTEREMIKRFLRVVKEKDPDVLITYNGDNFDFAYLKKRCEKLGINFALGRDGSEPKIQRMGDRFAVEVKGRIHFDLYPVIRRTINLPTYTLEAVYEAVFGQPKEKVYAEEITTAWETGENLERVARYSMEDAKVTYELGKEFLPMEAQLSRLIGQSLWDVSRSSTGNLVEWFLLRKAYERNELAPNKPDEKELARRRQSYEGGYVKEPERGLWENIVYLDFRSLYPSIIITHNVSPDTLNREGCKEYDVAPQVGHRFCKDFPGFIPSLLGDLLEERQKIKKKMKATIDPIERKLLDYRQRAIKILANSYYGYYGYARARWYCKECAESVTAWGREYITMTIKEIEEKYGFKVIYSDTDGFFATIPGADAETVKKKAMEFLKYINAKLPGALELEYEGFYKRGFFVTKKKYAVIDEEGKITTRGLEIVRRDWSEIAKETQARVLEALLKDGDVEKAVRIVKEVTEKLSKYEVPPEKLVIHEQITRDLKDYKATGPHVAVAKRLAARGVKIRPGTVISYIVLKGSGRIGDRAIPFDEFDPTKHKYDAEYYIENQVLPAVERILRAFGYRKEDLRYQKTRQVGLSAWLKPKGT

SEQ ID NO: 2092 - protein, 774 aa, synthetic construct
MILDTDLITEDGKPVFRIFKKENGEFKIEYDRTFEPYFYALLKDDSAIEEVKKITAERHGTVVTVKRVEKVQKKFLGRPVEVWKLYFTHFQDRPAIRDKIREHPAVIDIYEYDIPFAKRYLIDKGLVPMEGDEELKMLAFDIETLYHEGEEFAEGPILMISYADEEGARVITWKNVDLPYVDVVSTEREMIKRFLRVVKEKDPDVLITYNGDNFDFAYLKKRCEKLGINFALGRDGSEPKIQRMGDRFAVEVKGRIHFDLYPVIRRTINLPTYTLEAVYEAVFGQPKEKVYAEEITTAWETGENLERVARYSMEDAKVTYELGKEFLPMEAQLSRLIGQSLWDVSRSSTGNLVEWFLLRKAYERNELAPNKPDEKELARRRQSYEGGYVKEPERGLWENIVYLDFRSLYPSIIITHNVSPDTLNREGCKEYDVAPQVGHRFCKDFPGFIPSLLGDLLEERQKIKKKMKATIDPIERKLLDYRQRAIKILANSYYGYYGYARARWYCKECAESVTAWGREYITMTIKEIEEKYGFKVIYSDTDGFFATIPGADAETVKKKAMEFLKYINAKLPGALELEYEGFYKRGFFVTKKKYAVIDEEGKITTRGLEIVRRDWSEIAKETQARVLEALLKDGDVEKAVRIVKEVTEKLSKYEVPPEKLVIHEQITRDLKDYKATGPHVAVAKRLAARGVKIRPGTVISYIVLKGSGRIGDRAIPFDEFDPTKHKYDAEYYIENQVLPAVERILRAFGYRKEDLRYQKTRQVGLSAWLKPKGT

SEQ ID NO: 2093 - protein, 774 aa, synthetic construct
MILDTDLITEDGKPVFRIFKKENGEFKIEYDRTFEPYFYALLKDDSAIEEVKKITAERHGTVVTVKRVEKVQKKFLGRPVEVWKLYFTHFQDRPAIADKIREHPAVIDIYEYDIPFAKRYLIDKGLVPMEGDEELKMLAFDIETLYHEGEEFAEGPILMISYADEEGARVITWKNVDLPYVDVVSTEREMIKRFLRVVKEKDPDVLITYNGDNFDFAYLKKRCEKLGINFALGRDGSEPKIQRMGDRFAVEVKGRIHFDLYPVIRRTINLPTYTLEAVYEAVFGQPKEKVYAEEITTAWETGENLERVARYSMEDAKVTYELGKEFLPMEAQLSRLIGQSLWDVSRSSTGNLVEWFLLRKAYERNELAPNKPDEKELARRRQSYEGGYVKEPERGLWENIVYLDFRSLYPSIIITHNVSPDTLNREGCKEYDVAPQVGHRFCKDFPGFIPSLLGDLLEERQKIKKKMKATIDPIERKLLDYRQRAIKILANSYYGYYGYARARWYCKECAESVTAWGREYITMTIKEIEEKYGFKVIYSDTDGFFATIPGADAETVKKKAMEFLKYINAKLPGALELEYEGFYKRGFFVTKKKYAVIDEEGKITTRGLEIVRRDWSEIAKETQARVLEALLKDGDVEKAVRIVKEVTEKLSKYEVPPEKLVIHEQITRDLKDYKATGPHVAVAKRLAARGVKIRPGTVISYIVLKGSGRIGDRAIPFDEFDPTKHKYDAEYYIENQVLPAVERILRAFGYRKEDLRYQKTRQVGLSAWLKPKGT

SEQ ID NO: 2094 - protein, 774 aa, synthetic construct
MILDTDLITEDGKPVFRIFKKENGEFKIEYDRTFEPYFYALLKDDSAIEEVKKITAERHGTVVTVKRVEKVQKKFLGRPVEVWKLYFTHFQDRPAIFDKIREHPAVIDIYEYDIPFAKRYLIDKGLVPMEGDEELKMLAFDIETLYHEGEEFAEGPILMISYADEEGARVITWKNVDLPYVDVVSTEREMIKRFLRVVKEKDPDVLITYNGDNFDFAYLKKRCEKLGINFALGRDGSEPKIQRMGDRFAVEVKGRIHFDLYPVIRRTINLPTYTLEAVYEAVFGQPKEKVYAEEITTAWETGENLERVARYSMEDAKVTYELGKEFLPMEAQLSRLIGQSLWDVSRSSTGNLVEWFLLRKAYERNELAPNKPDEKELARRRQSYEGGYVKEPERGLWENIVYLDFRSLYPSIIITHNVSPDTLNREGCKEYDVAPQVGHRFCKDFPGFIPSLLGDLLEERQKIKKKMKATIDPIERKLLDYRQRAIKILANSYYGYYGYARARWYCKECAESVTAWGREYITMTIKEIEEKYGFKVIYSDTDGFFATIPGADAETVKKKAMEFLKYINAKLPGALELEYEGFYKRGFFVTKKKYAVIDEEGKITTRGLEIVRRDWSEIAKETQARVLEALLKDGDVEKAVRIVKEVTEKLSKYEVPPEKLVIHEQITRDLKDYKATGPHVAVAKRLAARGVKIRPGTVISYIVLKGSGRIGDRAIPFDEFDPTKHKYDAEYYIENQVLPAVERILRAFGYRKEDLRYQKTRQVGLSAWLKPKGT

SEQ ID NO: 2095 - protein, 774 aa, synthetic construct
MILDTDLITEDGKPVFRIFKKENGEFKIEYDRTFEPYFYALLKDDSAIEEVKKITAERHGTVVTVKRVEKVQKKFLGRPVEVWKLYFTHIQDVPAIRDKIREHPAVIDIYEYDIPFAKRYLIDKGLVPMEGDEELKMLAFDIETLYHEGEEFAEGPILMISYADEEGARVITWKNVDLPYVDVVSTEREMIKRFLRVVKEKDPDVLITYNGDNFDFAYLKKRCEKLGINFALGRDGSEPKIQRMGDRFAVEVKGRIHFDLYPVIRRTINLPTYTLEAVYEAVFGQPKEKVYAEEITTAWETGENLERVARYSMEDAKVTYELGKEFLPMEAQLSRLIGQSLWDVSRSSTGNLVEWFLLRKAYERNELAPNKPDEKELARRRQSYEGGYVKEPERGLWENIVYLDFRSLYPSIIITHNVSPDTLNREGCKEYDVAPQVGHRFCKDFPGFIPSLLGDLLEERQKIKKKMKATIDPIERKLLDYRQRAIKILANSYYGYYGYARARWYCKECAESVTAWGREYITMTIKEIEEKYGFKVIYSDTDGFFATIPGADAETVKKKAMEFLKYINAKLPGALELEYEGFYKRGFFVTKKKYAVIDEEGKITTRGLEIVRRDWSEIAKETQARVLEALLKDGDVEKAVRIVKEVTEKLSKYEVPPEKLVIHEQITRDLKDYKATGPHVAVAKRLAARGVKIRPGTVISYIVLKGSGRIGDRAIPFDEFDPTKHKYDAEYYIENQVLPAVERILRAFGYRKEDLRYQKTRQVGLSAWLKPKGT

SEQ ID NO: 2096 - protein, 774 aa, synthetic construct
MILDTDLITEDGKPVFRIFKKENGEFKIEYDRTFEPYFYALLKDDSAIEEVKKITAERHGTVVTVKRVEKVQKKFLGRPVEVWKLYFTHIQDVPAIADKIREHPAVIDIYEYDIPFAKRYLIDKGLVPMEGDEELKMLAFDIETLYHEGEEFAEGPILMISYADEEGARVITWKNVDLPYVDVVSTEREMIKRFLRVVKEKDPDVLITYNGDNFDFAYLKKRCEKLGINFALGRDGSEPKIQRMGDRFAVEVKGRIHFDLYPVIRRTINLPTYTLEAVYEAVFGQPKEKVYAEEITTAWETGENLERVARYSMEDAKVTYELGKEFLPMEAQLSRLIGQSLWDVSRSSTGNLVEWFLLRKAYERNELAPNKPDEKELARRRQSYEGGYVKEPERGLWENIVYLDFRSLYPSIIITHNVSPDTLNREGCKEYDVAPQVGHRFCKDFPGFIPSLLGDLLEERQKIKKKMKATIDPIERKLLDYRQRAIKILANSYYGYYGYARARWYCKECAESVTAWGREYITMTIKEIEEKYGFKVIYSDTDGFFATIPGADAETVKKKAMEFLKYINAKLPGALELEYEGFYKRGFFVTKKKYAVIDEEGKITTRGLEIVRRDWSEIAKETQARVLEALLKDGDVEKAVRIVKEVTEKLSKYEVPPEKLVIHEQITRDLKDYKATGPHVAVAKRLAARGVKIRPGTVISYIVLKGSGRIGDRAIPFDEFDPTKHKYDAEYYIENQVLPAVERILRAFGYRKEDLRYQKTRQVGLSAWLKPKGT

SEQ ID NO: 2097 - protein, 774 aa, synthetic construct
MILDTDLITEDGKPVFRIFKKENGEFKIEYDRTFEPYFYALLKDDSAIEEVKKITAERHGTVVTVKRVEKVQKKFLGRPVEVWKLYFTHIQDVPAIFDKIREHPAVIDIYEYDIPFAKRYLIDKGLVPMEGDEELKMLAFDIETLYHEGEEFAEGPILMISYADEEGARVITWKNVDLPYVDVVSTEREMIKRFLRVVKEKDPDVLITYNGDNFDFAYLKKRCEKLGINFALGRDGSEPKIQRMGDRFAVEVKGRIHFDLYPVIRRTINLPTYTLEAVYEAVFGQPKEKVYAEEITTAWETGENLERVARYSMEDAKVTYELGKEFLPMEAQLSRLIGQSLWDVSRSSTGNLVEWFLLRKAYERNELAPNKPDEKELARRRQSYEGGYVKEPERGLWENIVYLDFRSLYPSIIITHNVSPDTLNREGCKEYDVAPQVGHRFCKDFPGFIPSLLGDLLEERQKIKKKMKATIDPIERKLLDYRQRAIKILANSYYGYYGYARARWYCKECAESVTAWGREYITMTIKEIEEKYGFKVIYSDTDGFFATIPGADAETVKKKAMEFLKYINAKLPGALELEYEGFYKRGFFVTKKKYAVIDEEGKITTRGLEIVRRDWSEIAKETQARVLEALLKDGDVEKAVRIVKEVTEKLSKYEVPPEKLVIHEQITRDLKDYKATGPHVAVAKRLAARGVKIRPGTVISYIVLKGSGRIGDRAIPFDEFDPTKHKYDAEYYIENQVLPAVERILRAFGYRKEDLRYQKTRQVGLSAWLKPKGT

SEQ ID NO: 2098 - protein, 774 aa, synthetic construct
MILDTDLITEDGKPVFRIFKKENGEFKIEYDRTFEPYFYALLKDDSAIEEVKKITAERHGTVVTVKRVEKVQKKFLGRPVEVWKLYFTHIQDVPAIHDKIREHPAVIDIYEYDIPFAKRYLIDKGLVPMEGDEELKMLAFDIETLYHEGEEFAEGPILMISYADEEGARVITWKNVDLPYVDVVSTEREMIKRFLRVVKEKDPDVLITYNGDNFDFAYLKKRCEKLGINFALGRDGSEPKIQRMGDRFAVEVKGRIHFDLYPVIRRTINLPTYTLEAVYEAVFGQPKEKVYAEEITTAWETGENLERVARYSMEDAKVTYELGKEFLPMEAQLSRLIGQSLWDVSRSSTGNLVEWFLLRKAYERNELAPNKPDEKELARRRQSYEGGYVKEPERGLWENIVYLDFRSLYPSIIITHNVSPDTLNREGCKEYDVAPQVGHRFCKDFPGFIPSLLGDLLEERQKIKKKMKATIDPIERKLLDYRQRAIKILANSYYGYYGYARARWYCKECAESVTAWGREYITMTIKEIEEKYGFKVIYSDTDGFFATIPGADAETVKKKAMEFLKYINAKLPGALELEYEGFYKRGFFVTKKKYAVIDEEGKITTRGLEIVRRDWSEIAKETQARVLEALLKDGDVEKAVRIVKEVTEKLSKYEVPPEKLVIHEQITRDLKDYKATGPHVAVAKRLAARGVKIRPGTVISYIVLKGSGRIGDRAIPFDEFDPTKHKYDAEYYIENQVLPAVERILRAFGYRKEDLRYQKTRQVGLSAWLKPKGT

SEQ ID NO: 2099 - protein, 774 aa, synthetic construct
MILDTDLITEDGKPVFRIFKKENGEFKIEYDRTFEPYFYALLKDDSAIEEVKKITAERHGTVVTVKRVEKVQKKFLGRPVEVWKLYFTHIQDVPAIWDKIREHPAVIDIYEYDIPFAKRYLIDKGLVPMEGDEELKMLAFDIETLYHEGEEFAEGPILMISYADEEGARVITWKNVDLPYVDVVSTEREMIKRFLRVVKEKDPDVLITYNGDNFDFAYLKKRCEKLGINFALGRDGSEPKIQRMGDRFAVEVKGRIHFDLYPVIRRTINLPTYTLEAVYEAVFGQPKEKVYAEEITTAWETGENLERVARYSMEDAKVTYELGKEFLPMEAQLSRLIGQSLWDVSRSSTGNLVEWFLLRKAYERNELAPNKPDEKELARRRQSYEGGYVKEPERGLWENIVYLDFRSLYPSIIITHNVSPDTLNREGCKEYDVAPQVGHRFCKDFPGFIPSLLGDLLEERQKIKKKMKATIDPIERKLLDYRQRAIKILANSYYGYYGYARARWYCKECAESVTAWGREYITMTIKEIEEKYGFKVIYSDTDGFFATIPGADAETVKKKAMEFLKYINAKLPGALELEYEGFYKRGFFVTKKKYAVIDEEGKITTRGLEIVRRDWSEIAKETQARVLEALLKDGDVEKAVRIVKEVTEKLSKYEVPPEKLVIHEQITRDLKDYKATGPHVAVAKRLAARGVKIRPGTVISYIVLKGSGRIGDRAIPFDEFDPTKHKYDAEYYIENQVLPAVERILRAFGYRKEDLRYQKTRQVGLSAWLKPKGT

SEQ ID NO: 2100 - protein, 774 aa, synthetic construct
MILDTDLITEDGKPVFRIFKKENGEFKIEYDRTFEPYFYALLKDDSAIEEVKKITAERHGTVVTVKRVEKVQKKFLGRPVEVWKLYFTHIQDIPAIRDKIREHPAVIDIYEYDIPFAKRYLIDKGLVPMEGDEELKMLAFDIETLYHEGEEFAEGPILMISYADEEGARVITWKNVDLPYVDVVSTEREMIKRFLRVVKEKDPDVLITYNGDNFDFAYLKKRCEKLGINFALGRDGSEPKIQRMGDRFAVEVKGRIHFDLYPVIRRTINLPTYTLEAVYEAVFGQPKEKVYAEEITTAWETGENLERVARYSMEDAKVTYELGKEFLPMEAQLSRLIGQSLWDVSRSSTGNLVEWFLLRKAYERNELAPNKPDEKELARRRQSYEGGYVKEPERGLWENIVYLDFRSLYPSIIITHNVSPDTLNREGCKEYDVAPQVGHRFCKDFPGFIPSLLGDLLEERQKIKKKMKATIDPIERKLLDYRQRAIKILANSYYGYYGYARARWYCKECAESVTAWGREYITMTIKEIEEKYGFKVIYSDTDGFFATIPGADAETVKKKAMEFLKYINAKLPGALELEYEGFYKRGFFVTKKKYAVIDEEGKITTRGLEIVRRDWSEIAKETQARVLEALLKDGDVEKAVRIVKEVTEKLSKYEVPPEKLVIHEQITRDLKDYKATGPHVAVAKRLAARGVKIRPGTVISYIVLKGSGRIGDRAIPFDEFDPTKHKYDAEYYIENQVLPAVERILRAFGYRKEDLRYQKTRQVGLSAWLKPKGT

SEQ ID NO: 2101 - protein, 774 aa, synthetic construct
MILDTDLITEDGKPVFRIFKKENGEFKIEYDRTFEPYFYALLKDDSAIEEVKKITAERHGTVVTVKRVEKVQKKFLGRPVEVWKLYFTHIQDIPAIADKIREHPAVIDIYEYDIPFAKRYLIDKGLVPMEGDEELKMLAFDIETLYHEGEEFAEGPILMISYADEEGARVITWKNVDLPYVDVVSTEREMIKRFLRVVKEKDPDVLITYNGDNFDFAYLKKRCEKLGINFALGRDGSEPKIQRMGDRFAVEVKGRIHFDLYPVIRRTINLPTYTLEAVYEAVFGQPKEKVYAEEITTAWETGENLERVARYSMEDAKVTYELGKEFLPMEAQLSRLIGQSLWDVSRSSTGNLVEWFLLRKAYERNELAPNKPDEKELARRRQSYEGGYVKEPERGLWENIVYLDFRSLYPSIIITHNVSPDTLNREGCKEYDVAPQVGHRFCKDFPGFIPSLLGDLLEERQKIKKKMKATIDPIERKLLDYRQRAIKILANSYYGYYGYARARWYCKECAESVTAWGREYITMTIKEIEEKYGFKVIYSDTDGFFATIPGADAETVKKKAMEFLKYINAKLPGALELEYEGFYKRGFFVTKKKYAVIDEEGKITTRGLEIVRRDWSEIAKETQARVLEALLKDGDVEKAVRIVKEVTEKLSKYEVPPEKLVIHEQITRDLKDYKATGPHVAVAKRLAARGVKIRPGTVISYIVLKGSGRIGDRAIPFDEFDPTKHKYDAEYYIENQVLPAVERILRAFGYRKEDLRYQKTRQVGLSAWLKPKGT

SEQ ID NO: 2102 - protein, 774 aa, synthetic construct
MILDTDLITEDGKPVFRIFKKENGEFKIEYDRTFEPYFYALLKDDSAIEEVKKITAERHGTVVTVKRVEKVQKKFLGRPVEVWKLYFTHIQDIPAIFDKIREHPAVIDIYEYDIPFAKRYLIDKGLVPMEGDEELKMLAFDIETLYHEGEEFAEGPILMISYADEEGARVITWKNVDLPYVDVVSTEREMIKRFLRVVKEKDPDVLITYNGDNFDFAYLKKRCEKLGINFALGRDGSEPKIQRMGDRFAVEVKGRIHFDLYPVIRRTINLPTYTLEAVYEAVFGQPKEKVYAEEITTAWETGENLERVARYSMEDAKVTYELGKEFLPMEAQLSRLIGQSLWDVSRSSTGNLVEWFLLRKAYERNELAPNKPDEKELARRRQSYEGGYVKEPERGLWENIVYLDFRSLYPSIIITHNVSPDTLNREGCKEYDVAPQVGHRFCKDFPGFIPSLLGDLLEERQKIKKKMKATIDPIERKLLDYRQRAIKILANSYYGYYGYARARWYCKECAESVTAWGREYITMTIKEIEEKYGFKVIYSDTDGFFATIPGADAETVKKKAMEFLKYINAKLPGALELEYEGFYKRGFFVTKKKYAVIDEEGKITTRGLEIVRRDWSEIAKETQARVLEALLKDGDVEKAVRIVKEVTEKLSKYEVPPEKLVIHEQITRDLKDYKATGPHVAVAKRLAARGVKIRPGTVISYIVLKGSGRIGDRAIPFDEFDPTKHKYDAEYYIENQVLPAVERILRAFGYRKEDLRYQKTRQVGLSAWLKPKGT

SEQ ID NO: 2103 - protein, 774 aa, synthetic construct
MILDTDLITEDGKPVFRIFKKENGEFKIEYDRTFEPYFYALLKDDSAIEEVKKITAERHGTVVTVKRVEKVQKKFLGRPVEVWKLYFTHIQDIPAIHDKIREHPAVIDIYEYDIPFAKRYLIDKGLVPMEGDEELKMLAFDIETLYHEGEEFAEGPILMISYADEEGARVITWKNVDLPYVDVVSTEREMIKRFLRVVKEKDPDVLITYNGDNFDFAYLKKRCEKLGINFALGRDGSEPKIQRMGDRFAVEVKGRIHFDLYPVIRRTINLPTYTLEAVYEAVFGQPKEKVYAEEITTAWETGENLERVARYSMEDAKVTYELGKEFLPMEAQLSRLIGQSLWDVSRSSTGNLVEWFLLRKAYERNELAPNKPDEKELARRRQSYEGGYVKEPERGLWENIVYLDFRSLYPSIIITHNVSPDTLNREGCKEYDVAPQVGHRFCKDFPGFIPSLLGDLLEERQKIKKKMKATIDPIERKLLDYRQRAIKILANSYYGYYGYARARWYCKECAESVTAWGREYITMTIKEIEEKYGFKVIYSDTDGFFATIPGADAETVKKKAMEFLKYINAKLPGALELEYEGFYKRGFFVTKKKYAVIDEEGKITTRGLEIVRRDWSEIAKETQARVLEALLKDGDVEKAVRIVKEVTEKLSKYEVPPEKLVIHEQITRDLKDYKATGPHVAVAKRLAARGVKIRPGTVISYIVLKGSGRIGDRAIPFDEFDPTKHKYDAEYYIENQVLPAVERILRAFGYRKEDLRYQKTRQVGLSAWLKPKGT

SEQ ID NO: 2104 - protein, 774 aa, synthetic construct
MILDTDLITEDGKPVFRIFKKENGEFKIEYDRTFEPYFYALLKDDSAIEEVKKITAERHGTVVTVKRVEKVQKKFLGRPVEVWKLYFTHIQDIPAIWDKIREHPAVIDIYEYDIPFAKRYLIDKGLVPMEGDEELKMLAFDIETLYHEGEEFAEGPILMISYADEEGARVITWKNVDLPYVDVVSTEREMIKRFLRVVKEKDPDVLITYNGDNFDFAYLKKRCEKLGINFALGRDGSEPKIQRMGDRFAVEVKGRIHFDLYPVIRRTINLPTYTLEAVYEAVFGQPKEKVYAEEITTAWETGENLERVARYSMEDAKVTYELGKEFLPMEAQLSRLIGQSLWDVSRSSTGNLVEWFLLRKAYERNELAPNKPDEKELARRRQSYEGGYVKEPERGLWENIVYLDFRSLYPSIIITHNVSPDTLNREGCKEYDVAPQVGHRFCKDFPGFIPSLLGDLLEERQKIKKKMKATIDPIERKLLDYRQRAIKILANSYYGYYGYARARWYCKECAESVTAWGREYITMTIKEIEEKYGFKVIYSDTDGFFATIPGADAETVKKKAMEFLKYINAKLPGALELEYEGFYKRGFFVTKKKYAVIDEEGKITTRGLEIVRRDWSEIAKETQARVLEALLKDGDVEKAVRIVKEVTEKLSKYEVPPEKLVIHEQITRDLKDYKATGPHVAVAKRLAARGVKIRPGTVISYIVLKGSGRIGDRAIPFDEFDPTKHKYDAEYYIENQVLPAVERILRAFGYRKEDLRYQKTRQVGLSAWLKPKGT

SEQ ID NO: 2105 - protein, 774 aa, synthetic construct
MILDTDLITEDGKPVFRIFKKENGEFKIEYDRTFEPYFYALLKDDSAIEEVKKITAERHGTVVTVKRVEKVQKKFLGRPVEVWKLYFTHIQDIPAIRDKIREHPAVIDIYEYDIPFAKQYLIDKGLVPMEGDEELKMLAFDIETLYHEGEEFAEGPILMISYADEEGARVITWKNVDLPYVDVVSTEREMIKRFLRVVKEKDPDVLITYNGDNFDFAYLKKRCEKLGINFALGRDGSEPKIQRMGDRFAVEVKGRIHFDLYPVIRRTINLPTYTLEAVYEAVFGQPKEKVYAEEITTAWETGENLERVARYSMEDAKVTYELGKEFLPMEAQLSRLIGQSLWDVSRSSTGNLVEWFLLRKAYERNELAPNKPDEKELARRRQSYEGGYVKEPERGLWENIVYLDFRSLYPSIIITHNVSPDTLNREGCKEYDVAPQVGHRFCKDFPGFIPSLLGDLLEERQKIKKKMKATIDPIERKLLDYRQRAIKILANSYYGYYGYARARWYCKECAESVTAWGREYITMTIKEIEEKYGFKVIYSDTDGFFATIPGADAETVKKKAMEFLKYINAKLPGALELEYEGFYKRGFFVTKKKYAVIDEEGKITTRGLEIVRRDWSEIAKETQARVLEALLKDGDVEKAVRIVKEVTEKLSKYEVPPEKLVIHEQITRDLKDYKATGPHVAVAKRLAARGVKIRPGTVISYIVLKGSGRIGDRAIPFDEFDPTKHKYDAEYYIENQVLPAVERILRAFGYRKEDLRYQKTRQVGLSAWLKPKGT

SEQ ID NO: 2106 - protein, 774 aa, synthetic construct
MILDTDLITEDGKPVFRIFKKENGEFKIEYDRTFEPYFYALLKDDSAIEEVKKITAERHGTVVTVKRVEKVQKKFLGRPVEVWKLYFTHIQDKPAIRDKIREHPAVIDIYEYDIPFAKRYLIDKGLVPMEGDEELKMLAFDIETLYHEGEEFAEGPILMISYADEEGARVITWKNVDLPYVDVVSTEREMIKRFLRVVKEKDPDVLITYNGDNFDFAYLKKRCEKLGINFALGRDGSEPKIQRMGDRFAVEVKGRIHFDLYPVIRRTINLPTYTLEAVYEAVFGQPKEKVYAEEITTAWETGENLERVARYSMEDAKVTYELGKEFLPMEAQLSRLIGQSLWDVSRSSTGNLVEWFLLRKAYERNELAPNKPDEKELARRRQSYEGGYVKEPERGLWENIVYLDFRSLYPSIIITHNVSPDTLNREGCKEYDVAPQVGHRFCKDFPGFIPSLLGDLLEERQKIKKKMKATIDPIERKLLDYRQRAIKILANSYYGYYGYARARWYCKECAESVTAWGREYITMTIKEIEEKYGFKVIYSDTDGFFATIPGADAETVKKKAMEFLKYINAKLPGALELEYEGFYKRGFFVTKKKYAVIDEEGKITTRGLEIVRRDWSEIAKETQARVLEALLKDGDVEKAVRIVKEVTEKLSKYEVPPEKLVIHEQITRDLKDYKATGPHVAVAKRLAARGVKIRPGTVISYIVLKGSGRIGDRAIPFDEFDPTKHKYDAEYYIENQVLPAVERILRAFGYRKEDLRYQKTRQVGLSAWLKPKGT

SEQ ID NO: 2107 - protein, 774 aa, synthetic construct
MILDTDLITEDGKPVFRIFKKENGEFKIEYDRTFEPYFYALLKDDSAIEEVKKITAERHGTVVTVKRVEKVQKKFLGRPVEVWKLYFTHIQDKPAIADKIREHPAVIDIYEYDIPFAKRYLIDKGLVPMEGDEELKMLAFDIETLYHEGEEFAEGPILMISYADEEGARVITWKNVDLPYVDVVSTEREMIKRFLRVVKEKDPDVLITYNGDNFDFAYLKKRCEKLGINFALGRDGSEPKIQRMGDRFAVEVKGRIHFDLYPVIRRTINLPTYTLEAVYEAVFGQPKEKVYAEEITTAWETGENLERVARYSMEDAKVTYELGKEFLPMEAQLSRLIGQSLWDVSRSSTGNLVEWFLLRKAYERNELAPNKPDEKELARRRQSYEGGYVKEPERGLWENIVYLDFRSLYPSIIITHNVSPDTLNREGCKEYDVAPQVGHRFCKDFPGFIPSLLGDLLEERQKIKKKMKATIDPIERKLLDYRQRAIKILANSYYGYYGYARARWYCKECAESVTAWGREYITMTIKEIEEKYGFKVIYSDTDGFFATIPGADAETVKKKAMEFLKYINAKLPGALELEYEGFYKRGFFVTKKKYAVIDEEGKITTRGLEIVRRDWSEIAKETQARVLEALLKDGDVEKAVRIVKEVTEKLSKYEVPPEKLVIHEQITRDLKDYKATGPHVAVAKRLAARGVKIRPGTVISYIVLKGSGRIGDRAIPFDEFDPTKHKYDAEYYIENQVLPAVERILRAFGYRKEDLRYQKTRQVGLSAWLKPKGT

SEQ ID NO: 2108 - protein, 774 aa, synthetic construct
MILDTDLITEDGKPVFRIFKKENGEFKIEYDRTFEPYFYALLKDDSAIEEVKKITAERHGTVVTVKRVEKVQKKFLGRPVEVWKLYFTHIQDKPAIWDKIREHPAVIDIYEYDIPFAKRYLIDKGLVPMEGDEELKMLAFDIETLYHEGEEFAEGPILMISYADEEGARVITWKNVDLPYVDVVSTEREMIKRFLRVVKEKDPDVLITYNGDNFDFAYLKKRCEKLGINFALGRDGSEPKIQRMGDRFAVEVKGRIHFDLYPVIRRTINLPTYTLEAVYEAVFGQPKEKVYAEEITTAWETGENLERVARYSMEDAKVTYELGKEFLPMEAQLSRLIGQSLWDVSRSSTGNLVEWFLLRKAYERNELAPNKPDEKELARRRQSYEGGYVKEPERGLWENIVYLDFRSLYPSIIITHNVSPDTLNREGCKEYDVAPQVGHRFCKDFPGFIPSLLGDLLEERQKIKKKMKATIDPIERKLLDYRQRAIKILANSYYGYYGYARARWYCKECAESVTAWGREYITMTIKEIEEKYGFKVIYSDTDGFFATIPGADAETVKKKAMEFLKYINAKLPGALELEYEGFYKRGFFVTKKKYAVIDEEGKITTRGLEIVRRDWSEIAKETQARVLEALLKDGDVEKAVRIVKEVTEKLSKYEVPPEKLVIHEQITRDLKDYKATGPHVAVAKRLAARGVKIRPGTVISYIVLKGSGRIGDRAIPFDEFDPTKHKYDAEYYIENQVLPAVERILRAFGYRKEDLRYQKTRQVGLSAWLKPKGT

SEQ ID NO: 2109 - protein, 774 aa, synthetic construct
MILDTDLITEDGKPVFRIFKKENGEFKIEYDRTFEPYFYALLKDDSAIEEVKKITAERHGTVVTVKRVEKVQKKFLGRPVEVWKLYFTHIQDQPAIRDKIREHPAVIDIYEYDIPFAKRYLIDKGLVPMEGDEELKMLAFDIETLYHEGEEFAEGPILMISYADEEGARVITWKNVDLPYVDVVSTEREMIKRFLRVVKEKDPDVLITYNGDNFDFAYLKKRCEKLGINFALGRDGSEPKIQRMGDRFAVEVKGRIHFDLYPVIRRTINLPTYTLEAVYEAVFGQPKEKVYAEEITTAWETGENLERVARYSMEDAKVTYELGKEFLPMEAQLSRLIGQSLWDVSRSSTGNLVEWFLLRKAYERNELAPNKPDEKELARRRQSYEGGYVKEPERGLWENIVYLDFRSLYPSIIITHNVSPDTLNREGCKEYDVAPQVGHRFCKDFPGFIPSLLGDLLEERQKIKKKMKATIDPIERKLLDYRQRAIKILANSYYGYYGYARARWYCKECAESVTAWGREYITMTIKEIEEKYGFKVIYSDTDGFFATIPGADAETVKKKAMEFLKYINAKLPGALELEYEGFYKRGFFVTKKKYAVIDEEGKITTRGLEIVRRDWSEIAKETQARVLEALLKDGDVEKAVRIVKEVTEKLSKYEVPPEKLVIHEQITRDLKDYKATGPHVAVAKRLAARGVKIRPGTVISYIVLKGSGRIGDRAIPFDEFDPTKHKYDAEYYIENQVLPAVERILRAFGYRKEDLRYQKTRQVGLSAWLKPKGT

SEQ ID NO: 2110 - protein, 774 aa, synthetic construct
MILDTDLITEDGKPVFRIFKKENGEFKIEYDRTFEPYFYALLKDDSAIEEVKKITAERHGTVVTVKRVEKVQKKFLGRPVEVWKLYFTHIQDQPAIFDKIREHPAVIDIYEYDIPFAKRYLIDKGLVPMEGDEELKMLAFDIETLYHEGEEFAEGPILMISYADEEGARVITWKNVDLPYVDVVSTEREMIKRFLRVVKEKDPDVLITYNGDNFDFAYLKKRCEKLGINFALGRDGSEPKIQRMGDRFAVEVKGRIHFDLYPVIRRTINLPTYTLEAVYEAVFGQPKEKVYAEEITTAWETGENLERVARYSMEDAKVTYELGKEFLPMEAQLSRLIGQSLWDVSRSSTGNLVEWFLLRKAYERNELAPNKPDEKELARRRQSYEGGYVKEPERGLWENIVYLDFRSLYPSIIITHNVSPDTLNREGCKEYDVAPQVGHRFCKDFPGFIPSLLGDLLEERQKIKKKMKATIDPIERKLLDYRQRAIKILANSYYGYYGYARARWYCKECAESVTAWGREYITMTIKEIEEKYGFKVIYSDTDGFFATIPGADAETVKKKAMEFLKYINAKLPGALELEYEGFYKRGFFVTKKKYAVIDEEGKITTRGLEIVRRDWSEIAKETQARVLEALLKDGDVEKAVRIVKEVTEKLSKYEVPPEKLVIHEQITRDLKDYKATGPHVAVAKRLAARGVKIRPGTVISYIVLKGSGRIGDRAIPFDEFDPTKHKYDAEYYIENQVLPAVERILRAFGYRKEDLRYQKTRQVGLSAWLKPKGT

SEQ ID NO: 2111 - protein, 774 aa, synthetic construct
MILDTDLITEDGKPVFRIFKKENGEFKIEYDRTFEPYFYALLKDDSAIEEVKKITAERHGTVVTVKRVEKVQKKFLGRPVEVWKLYFTHIQDRPAIRDKIREHPAVIDIYEYDIPFAKRYLIDKGLVPMEGDEELKMLAFDIETLYHEGEEFAEGPILMISYADEEGARVITWKNVDLPYVDVVSTEREMIKRFLRVVKEKDPDVLITYNGDNFDFAYLKKRCEKLGINFALGRDGSEPKIQRMGDRFAVEVKGRIHFDLYPVIRRTINLPTYTLEAVYEAVFGQPKEKVYAEEITTAWETGENLERVARYSMEDAKVTYELGKEFLPMEAQLSRLIGQSLWDVSRSSTGNLVEWFLLRKAYERNELAPNKPDEKELARRRQSYEGGYVKEPERGLWENIVYLDFRSLYPSIIITHNVSPDTLNREGCKEYDVAPQVGHRFCKDFPGFIPSLLGDLLEERQKIKKKMKATIDPIERKLLDYRQRAIKILANSYYGYYGYARARWYCKECAESVTAWGREYITMTIKEIEEKYGFKVIYSDTDGFFATIPGADAETVKKKAMEFLKYINAKLPGALELEYEGFYKRGFFVTKKKYAVIDEEGKITTRGLEIVRRDWSEIAKETQARVLEALLKDGDVEKAVRIVKEVTEKLSKYEVPPEKLVIHEQITRDLKDYKATGPHVAVAKRLAARGVKIRPGTVISYIVLKGSGRIGDRAIPFDEFDPTKHKYDAEYYIENQVLPAVERILRAFGYRKEDLRYQKTRQVGLSAWLKPKGT

SEQ ID NO: 2112 - protein, 774 aa, synthetic construct
MILDTDLITEDGKPVFRIFKKENGEFKIEYDRTFEPYFYALLKDDSAIEEVKKITAERHGTVVTVKRVEKVQKKFLGRPVEVWKLYFTHIQDRPAIADKIREHPAVIDIYEYDIPFAKRYLIDKGLVPMEGDEELKMLAFDIETLYHEGEEFAEGPILMISYADEEGARVITWKNVDLPYVDVVSTEREMIKRFLRVVKEKDPDVLITYNGDNFDFAYLKKRCEKLGINFALGRDGSEPKIQRMGDRFAVEVKGRIHFDLYPVIRRTINLPTYTLEAVYEAVFGQPKEKVYAEEITTAWETGENLERVARYSMEDAKVTYELGKEFLPMEAQLSRLIGQSLWDVSRSSTGNLVEWFLLRKAYERNELAPNKPDEKELARRRQSYEGGYVKEPERGLWENIVYLDFRSLYPSIIITHNVSPDTLNREGCKEYDVAPQVGHRFCKDFPGFIPSLLGDLLEERQKIKKKMKATIDPIERKLLDYRQRAIKILANSYYGYYGYARARWYCKECAESVTAWGREYITMTIKEIEEKYGFKVIYSDTDGFFATIPGADAETVKKKAMEFLKYINAKLPGALELEYEGFYKRGFFVTKKKYAVIDEEGKITTRGLEIVRRDWSEIAKETQARVLEALLKDGDVEKAVRIVKEVTEKLSKYEVPPEKLVIHEQITRDLKDYKATGPHVAVAKRLAARGVKIRPGTVISYIVLKGSGRIGDRAIPFDEFDPTKHKYDAEYYIENQVLPAVERILRAFGYRKEDLRYQKTRQVGLSAWLKPKGT

SEQ ID NO: 2113 - protein, 774 aa, synthetic construct
MILDTDLITEDGKPVFRIFKKENGEFKIEYDRTFEPYFYALLKDDSAIEEVKKITAERHGTVVTVKRVEKVQKKFLGRPVEVWKLYFTHIQDRPAIWDKIREHPAVIDIYEYDIPFAKRYLIDKGLVPMEGDEELKMLAFDIETLYHEGEEFAEGPILMISYADEEGARVITWKNVDLPYVDVVSTEREMIKRFLRVVKEKDPDVLITYNGDNFDFAYLKKRCEKLGINFALGRDGSEPKIQRMGDRFAVEVKGRIHFDLYPVIRRTINLPTYTLEAVYEAVFGQPKEKVYAEEITTAWETGENLERVARYSMEDAKVTYELGKEFLPMEAQLSRLIGQSLWDVSRSSTGNLVEWFLLRKAYERNELAPNKPDEKELARRRQSYEGGYVKEPERGLWENIVYLDFRSLYPSIIITHNVSPDTLNREGCKEYDVAPQVGHRFCKDFPGFIPSLLGDLLEERQKIKKKMKATIDPIERKLLDYRQRAIKILANSYYGYYGYARARWYCKECAESVTAWGREYITMTIKEIEEKYGFKVIYSDTDGFFATIPGADAETVKKKAMEFLKYINAKLPGALELEYEGFYKRGFFVTKKKYAVIDEEGKITTRGLEIVRRDWSEIAKETQARVLEALLKDGDVEKAVRIVKEVTEKLSKYEVPPEKLVIHEQITRDLKDYKATGPHVAVAKRLAARGVKIRPGTVISYIVLKGSGRIGDRAIPFDEFDPTKHKYDAEYYIENQVLPAVERILRAFGYRKEDLRYQKTRQVGLSAWLKPKGT

SEQ ID NO: 2114 - protein, 774 aa, synthetic construct
MILDTDLITEDGKPVFRIFKKENGEFKIEYDRTFEPYFYALLKDDSAIEEVKKITAERHGTVVTVKRVEKVQKKFLGRPVEVWKLYFTHSQDVPAIRDKIREHPAVIDIYEYDIPFAKRYLIDKGLVPMEGDEELKMLAFDIETLYHEGEEFAEGPILMISYADEEGARVITWKNVDLPYVDVVSTEREMIKRFLRVVKEKDPDVLITYNGDNFDFAYLKKRCEKLGINFALGRDGSEPKIQRMGDRFAVEVKGRIHFDLYPVIRRTINLPTYTLEAVYEAVFGQPKEKVYAEEITTAWETGENLERVARYSMEDAKVTYELGKEFLPMEAQLSRLIGQSLWDVSRSSTGNLVEWFLLRKAYERNELAPNKPDEKELARRRQSYEGGYVKEPERGLWENIVYLDFRSLYPSIIITHNVSPDTLNREGCKEYDVAPQVGHRFCKDFPGFIPSLLGDLLEERQKIKKKMKATIDPIERKLLDYRQRAIKILANSYYGYYGYARARWYCKECAESVTAWGREYITMTIKEIEEKYGFKVIYSDTDGFFATIPGADAETVKKKAMEFLKYINAKLPGALELEYEGFYKRGFFVTKKKYAVIDEEGKITTRGLEIVRRDWSEIAKETQARVLEALLKDGDVEKAVRIVKEVTEKLSKYEVPPEKLVIHEQITRDLKDYKATGPHVAVAKRLAARGVKIRPGTVISYIVLKGSGRIGDRAIPFDEFDPTKHKYDAEYYIENQVLPAVERILRAFGYRKEDLRYQKTRQVGLSAWLKPKGT

SEQ ID NO: 2115 - protein, 774 aa, synthetic construct
MILDTDLITEDGKPVFRIFKKENGEFKIEYDRTFEPYFYALLKDDSAIEEVKKITAERHGTVVTVKRVEKVQKKFLGRPVEVWKLYFTHSQDVPAIADKIREHPAVIDIYEYDIPFAKRYLIDKGLVPMEGDEELKMLAFDIETLYHEGEEFAEGPILMISYADEEGARVITWKNVDLPYVDVVSTEREMIKRFLRVVKEKDPDVLITYNGDNFDFAYLKKRCEKLGINFALGRDGSEPKIQRMGDRFAVEVKGRIHFDLYPVIRRTINLPTYTLEAVYEAVFGQPKEKVYAEEITTAWETGENLERVARYSMEDAKVTYELGKEFLPMEAQLSRLIGQSLWDVSRSSTGNLVEWFLLRKAYERNELAPNKPDEKELARRRQSYEGGYVKEPERGLWENIVYLDFRSLYPSIIITHNVSPDTLNREGCKEYDVAPQVGHRFCKDFPGFIPSLLGDLLEERQKIKKKMKATIDPIERKLLDYRQRAIKILANSYYGYYGYARARWYCKECAESVTAWGREYITMTIKEIEEKYGFKVIYSDTDGFFATIPGADAETVKKKAMEFLKYINAKLPGALELEYEGFYKRGFFVTKKKYAVIDEEGKITTRGLEIVRRDWSEIAKETQARVLEALLKDGDVEKAVRIVKEVTEKLSKYEVPPEKLVIHEQITRDLKDYKATGPHVAVAKRLAARGVKIRPGTVISYIVLKGSGRIGDRAIPFDEFDPTKHKYDAEYYIENQVLPAVERILRAFGYRKEDLRYQKTRQVGLSAWLKPKGT

SEQ ID NO: 2116 - protein, 774 aa, synthetic construct
MILDTDLITEDGKPVFRIFKKENGEFKIEYDRTFEPYFYALLKDDSAIEEVKKITAERHGTVVTVKRVEKVQKKFLGRPVEVWKLYFTHSQDVPAIFDKIREHPAVIDIYEYDIPFAKRYLIDKGLVPMEGDEELKMLAFDIETLYHEGEEFAEGPILMISYADEEGARVITWKNVDLPYVDVVSTEREMIKRFLRVVKEKDPDVLITYNGDNFDFAYLKKRCEKLGINFALGRDGSEPKIQRMGDRFAVEVKGRIHFDLYPVIRRTINLPTYTLEAVYEAVFGQPKEKVYAEEITTAWETGENLERVARYSMEDAKVTYELGKEFLPMEAQLSRLIGQSLWDVSRSSTGNLVEWFLLRKAYERNELAPNKPDEKELARRRQSYEGGYVKEPERGLWENIVYLDFRSLYPSIIITHNVSPDTLNREGCKEYDVAPQVGHRFCKDFPGFIPSLLGDLLEERQKIKKKMKATIDPIERKLLDYRQRAIKILANSYYGYYGYARARWYCKECAESVTAWGREYITMTIKEIEEKYGFKVIYSDTDGFFATIPGADAETVKKKAMEFLKYINAKLPGALELEYEGFYKRGFFVTKKKYAVIDEEGKITTRGLEIVRRDWSEIAKETQARVLEALLKDGDVEKAVRIVKEVTEKLSKYEVPPEKLVIHEQITRDLKDYKATGPHVAVAKRLAARGVKIRPGTVISYIVLKGSGRIGDRAIPFDEFDPTKHKYDAEYYIENQVLPAVERILRAFGYRKEDLRYQKTRQVGLSAWLKPKGT

SEQ ID NO: 2117 - protein, 774 aa, synthetic construct
MILDTDLITEDGKPVFRIFKKENGEFKIEYDRTFEPYFYALLKDDSAIEEVKKITAERHGTVVTVKRVEKVQKKFLGRPVEVWKLYFTHSQDIPAIRDKIREHPAVIDIYEYDIPFAKRYLIDKGLVPMEGDEELKMLAFDIETLYHEGEEFAEGPILMISYADEEGARVITWKNVDLPYVDVVSTEREMIKRFLRVVKEKDPDVLITYNGDNFDFAYLKKRCEKLGINFALGRDGSEPKIQRMGDRFAVEVKGRIHFDLYPVIRRTINLPTYTLEAVYEAVFGQPKEKVYAEEITTAWETGENLERVARYSMEDAKVTYELGKEFLPMEAQLSRLIGQSLWDVSRSSTGNLVEWFLLRKAYERNELAPNKPDEKELARRRQSYEGGYVKEPERGLWENIVYLDFRSLYPSIIITHNVSPDTLNREGCKEYDVAPQVGHRFCKDFPGFIPSLLGDLLEERQKIKKKMKATIDPIERKLLDYRQRAIKILANSYYGYYGYARARWYCKECAESVTAWGREYITMTIKEIEEKYGFKVIYSDTDGFFATIPGADAETVKKKAMEFLKYINAKLPGALELEYEGFYKRGFFVTKKKYAVIDEEGKITTRGLEIVRRDWSEIAKETQARVLEALLKDGDVEKAVRIVKEVTEKLSKYEVPPEKLVIHEQITRDLKDYKATGPHVAVAKRLAARGVKIRPGTVISYIVLKGSGRIGDRAIPFDEFDPTKHKYDAEYYIENQVLPAVERILRAFGYRKEDLRYQKTRQVGLSAWLKPKGT

SEQ ID NO: 2118 - protein, 774 aa, synthetic construct
MILDTDLITEDGKPVFRIFKKENGEFKIEYDRTFEPYFYALLKDDSAIEEVKKITAERHGTVVTVKRVEKVQKKFLGRPVEVWKLYFTHSQDIPAIADKIREHPAVIDIYEYDIPFAKRYLIDKGLVPMEGDEELKMLAFDIETLYHEGEEFAEGPILMISYADEEGARVITWKNVDLPYVDVVSTEREMIKRFLRVVKEKDPDVLITYNGDNFDFAYLKKRCEKLGINFALGRDGSEPKIQRMGDRFAVEVKGRIHFDLYPVIRRTINLPTYTLEAVYEAVFGQPKEKVYAEEITTAWETGENLERVARYSMEDAKVTYELGKEFLPMEAQLSRLIGQSLWDVSRSSTGNLVEWFLLRKAYERNELAPNKPDEKELARRRQSYEGGYVKEPERGLWENIVYLDFRSLYPSIIITHNVSPDTLNREGCKEYDVAPQVGHRFCKDFPGFIPSLLGDLLEERQKIKKKMKATIDPIERKLLDYRQRAIKILANSYYGYYGYARARWYCKECAESVTAWGREYITMTIKEIEEKYGFKVIYSDTDGFFATIPGADAETVKKKAMEFLKYINAKLPGALELEYEGFYKRGFFVTKKKYAVIDEEGKITTRGLEIVRRDWSEIAKETQARVLEALLKDGDVEKAVRIVKEVTEKLSKYEVPPEKLVIHEQITRDLKDYKATGPHVAVAKRLAARGVKIRPGTVISYIVLKGSGRIGDRAIPFDEFDPTKHKYDAEYYIENQVLPAVERILRAFGYRKEDLRYQKTRQVGLSAWLKPKGT

SEQ ID NO: 2119 - protein, 774 aa, synthetic construct
MILDTDLITEDGKPVFRIFKKENGEFKIEYDRTFEPYFYALLKDDSAIEEVKKITAERHGTVVTVKRVEKVQKKFLGRPVEVWKLYFTHSQDIPAIFDKIREHPAVIDIYEYDIPFAKRYLIDKGLVPMEGDEELKMLAFDIETLYHEGEEFAEGPILMISYADEEGARVITWKNVDLPYVDVVSTEREMIKRFLRVVKEKDPDVLITYNGDNFDFAYLKKRCEKLGINFALGRDGSEPKIQRMGDRFAVEVKGRIHFDLYPVIRRTINLPTYTLEAVYEAVFGQPKEKVYAEEITTAWETGENLERVARYSMEDAKVTYELGKEFLPMEAQLSRLIGQSLWDVSRSSTGNLVEWFLLRKAYERNELAPNKPDEKELARRRQSYEGGYVKEPERGLWENIVYLDFRSLYPSIIITHNVSPDTLNREGCKEYDVAPQVGHRFCKDFPGFIPSLLGDLLEERQKIKKKMKATIDPIERKLLDYRQRAIKILANSYYGYYGYARARWYCKECAESVTAWGREYITMTIKEIEEKYGFKVIYSDTDGFFATIPGADAETVKKKAMEFLKYINAKLPGALELEYEGFYKRGFFVTKKKYAVIDEEGKITTRGLEIVRRDWSEIAKETQARVLEALLKDGDVEKAVRIVKEVTEKLSKYEVPPEKLVIHEQITRDLKDYKATGPHVAVAKRLAARGVKIRPGTVISYIVLKGSGRIGDRAIPFDEFDPTKHKYDAEYYIENQVLPAVERILRAFGYRKEDLRYQKTRQVGLSAWLKPKGT

SEQ ID NO: 2120 - protein, 774 aa, synthetic construct
MILDTDLITEDGKPVFRIFKKENGEFKIEYDRTFEPYFYALLKDDSAIEEVKKITAERHGTVVTVKRVEKVQKKFLGRPVEVWKLYFTHSQDIPAIHDKIREHPAVIDIYEYDIPFAKRYLIDKGLVPMEGDEELKMLAFDIETLYHEGEEFAEGPILMISYADEEGARVITWKNVDLPYVDVVSTEREMIKRFLRVVKEKDPDVLITYNGDNFDFAYLKKRCEKLGINFALGRDGSEPKIQRMGDRFAVEVKGRIHFDLYPVIRRTINLPTYTLEAVYEAVFGQPKEKVYAEEITTAWETGENLERVARYSMEDAKVTYELGKEFLPMEAQLSRLIGQSLWDVSRSSTGNLVEWFLLRKAYERNELAPNKPDEKELARRRQSYEGGYVKEPERGLWENIVYLDFRSLYPSIIITHNVSPDTLNREGCKEYDVAPQVGHRFCKDFPGFIPSLLGDLLEERQKIKKKMKATIDPIERKLLDYRQRAIKILANSYYGYYGYARARWYCKECAESVTAWGREYITMTIKEIEEKYGFKVIYSDTDGFFATIPGADAETVKKKAMEFLKYINAKLPGALELEYEGFYKRGFFVTKKKYAVIDEEGKITTRGLEIVRRDWSEIAKETQARVLEALLKDGDVEKAVRIVKEVTEKLSKYEVPPEKLVIHEQITRDLKDYKATGPHVAVAKRLAARGVKIRPGTVISYIVLKGSGRIGDRAIPFDEFDPTKHKYDAEYYIENQVLPAVERILRAFGYRKEDLRYQKTRQVGLSAWLKPKGT

SEQ ID NO: 2121 - protein, 774 aa, synthetic construct
MILDTDLITEDGKPVFRIFKKENGEFKIEYDRTFEPYFYALLKDDSAIEEVKKITAERHGTVVTVKRVEKVQKKFLGRPVEVWKLYFTHSQDIPAIWDKIREHPAVIDIYEYDIPFAKRYLIDKGLVPMEGDEELKMLAFDIETLYHEGEEFAEGPILMISYADEEGARVITWKNVDLPYVDVVSTEREMIKRFLRVVKEKDPDVLITYNGDNFDFAYLKKRCEKLGINFALGRDGSEPKIQRMGDRFAVEVKGRIHFDLYPVIRRTINLPTYTLEAVYEAVFGQPKEKVYAEEITTAWETGENLERVARYSMEDAKVTYELGKEFLPMEAQLSRLIGQSLWDVSRSSTGNLVEWFLLRKAYERNELAPNKPDEKELARRRQSYEGGYVKEPERGLWENIVYLDFRSLYPSIIITHNVSPDTLNREGCKEYDVAPQVGHRFCKDFPGFIPSLLGDLLEERQKIKKKMKATIDPIERKLLDYRQRAIKILANSYYGYYGYARARWYCKECAESVTAWGREYITMTIKEIEEKYGFKVIYSDTDGFFATIPGADAETVKKKAMEFLKYINAKLPGALELEYEGFYKRGFFVTKKKYAVIDEEGKITTRGLEIVRRDWSEIAKETQARVLEALLKDGDVEKAVRIVKEVTEKLSKYEVPPEKLVIHEQITRDLKDYKATGPHVAVAKRLAARGVKIRPGTVISYIVLKGSGRIGDRAIPFDEFDPTKHKYDAEYYIENQVLPAVERILRAFGYRKEDLRYQKTRQVGLSAWLKPKGT

SEQ ID NO: 2122 - protein, 774 aa, synthetic construct
MILDTDLITEDGKPVFRIFKKENGEFKIEYDRTFEPYFYALLKDDSAIEEVKKITAERHGTVVTVKRVEKVQKKFLGRPVEVWKLYFTHSQDKPAIRDKIREHPAVIDIYEYDIPFAKRYLIDKGLVPMEGDEELKMLAFDIETLYHEGEEFAEGPILMISYADEEGARVITWKNVDLPYVDVVSTEREMIKRFLRVVKEKDPDVLITYNGDNFDFAYLKKRCEKLGINFALGRDGSEPKIQRMGDRFAVEVKGRIHFDLYPVIRRTINLPTYTLEAVYEAVFGQPKEKVYAEEITTAWETGENLERVARYSMEDAKVTYELGKEFLPMEAQLSRLIGQSLWDVSRSSTGNLVEWFLLRKAYERNELAPNKPDEKELARRRQSYEGGYVKEPERGLWENIVYLDFRSLYPSIIITHNVSPDTLNREGCKEYDVAPQVGHRFCKDFPGFIPSLLGDLLEERQKIKKKMKATIDPIERKLLDYRQRAIKILANSYYGYYGYARARWYCKECAESVTAWGREYITMTIKEIEEKYGFKVIYSDTDGFFATIPGADAETVKKKAMEFLKYINAKLPGALELEYEGFYKRGFFVTKKKYAVIDEEGKITTRGLEIVRRDWSEIAKETQARVLEALLKDGDVEKAVRIVKEVTEKLSKYEVPPEKLVIHEQITRDLKDYKATGPHVAVAKRLAARGVKIRPGTVISYIVLKGSGRIGDRAIPFDEFDPTKHKYDAEYYIENQVLPAVERILRAFGYRKEDLRYQKTRQVGLSAWLKPKGT

SEQ ID NO: 2123 - protein, 774 aa, synthetic construct
MILDTDLITEDGKPVFRIFKKENGEFKIEYDRTFEPYFYALLKDDSAIEEVKKITAERHGTVVTVKRVEKVQKKFLGRPVEVWKLYFTHSQDKPAIADKIREHPAVIDIYEYDIPFAKRYLIDKGLVPMEGDEELKMLAFDIETLYHEGEEFAEGPILMISYADEEGARVITWKNVDLPYVDVVSTEREMIKRFLRVVKEKDPDVLITYNGDNFDFAYLKKRCEKLGINFALGRDGSEPKIQRMGDRFAVEVKGRIHFDLYPVIRRTINLPTYTLEAVYEAVFGQPKEKVYAEEITTAWETGENLERVARYSMEDAKVTYELGKEFLPMEAQLSRLIGQSLWDVSRSSTGNLVEWFLLRKAYERNELAPNKPDEKELARRRQSYEGGYVKEPERGLWENIVYLDFRSLYPSIIITHNVSPDTLNREGCKEYDVAPQVGHRFCKDFPGFIPSLLGDLLEERQKIKKKMKATIDPIERKLLDYRQRAIKILANSYYGYYGYARARWYCKECAESVTAWGREYITMTIKEIEEKYGFKVIYSDTDGFFATIPGADAETVKKKAMEFLKYINAKLPGALELEYEGFYKRGFFVTKKKYAVIDEEGKITTRGLEIVRRDWSEIAKETQARVLEALLKDGDVEKAVRIVKEVTEKLSKYEVPPEKLVIHEQITRDLKDYKATGPHVAVAKRLAARGVKIRPGTVISYIVLKGSGRIGDRAIPFDEFDPTKHKYDAEYYIENQVLPAVERILRAFGYRKEDLRYQKTRQVGLSAWLKPKGT

SEQ ID NO: 2124 - protein, 774 aa, synthetic construct
MILDTDLITEDGKPVFRIFKKENGEFKIEYDRTFEPYFYALLKDDSAIEEVKKITAERHGTVVTVKRVEKVQKKFLGRPVEVWKLYFTHSQDQPAIRDKIREHPAVIDIYEYDIPFAKRYLIDKGLVPMEGDEELKMLAFDIETLYHEGEEFAEGPILMISYADEEGARVITWKNVDLPYVDVVSTEREMIKRFLRVVKEKDPDVLITYNGDNFDFAYLKKRCEKLGINFALGRDGSEPKIQRMGDRFAVEVKGRIHFDLYPVIRRTINLPTYTLEAVYEAVFGQPKEKVYAEEITTAWETGENLERVARYSMEDAKVTYELGKEFLPMEAQLSRLIGQSLWDVSRSSTGNLVEWFLLRKAYERNELAPNKPDEKELARRRQSYEGGYVKEPERGLWENIVYLDFRSLYPSIIITHNVSPDTLNREGCKEYDVAPQVGHRFCKDFPGFIPSLLGDLLEERQKIKKKMKATIDPIERKLLDYRQRAIKILANSYYGYYGYARARWYCKECAESVTAWGREYITMTIKEIEEKYGFKVIYSDTDGFFATIPGADAETVKKKAMEFLKYINAKLPGALELEYEGFYKRGFFVTKKKYAVIDEEGKITTRGLEIVRRDWSEIAKETQARVLEALLKDGDVEKAVRIVKEVTEKLSKYEVPPEKLVIHEQITRDLKDYKATGPHVAVAKRLAARGVKIRPGTVISYIVLKGSGRIGDRAIPFDEFDPTKHKYDAEYYIENQVLPAVERILRAFGYRKEDLRYQKTRQVGLSAWLKPKGT

SEQ ID NO: 2125 - protein, 774 aa, synthetic construct
MILDTDLITEDGKPVFRIFKKENGEFKIEYDRTFEPYFYALLKDDSAIEEVKKITAERHGTVVTVKRVEKVQKKFLGRPVEVWKLYFTHSQDQPAIADKIREHPAVIDIYEYDIPFAKRYLIDKGLVPMEGDEELKMLAFDIETLYHEGEEFAEGPILMISYADEEGARVITWKNVDLPYVDVVSTEREMIKRFLRVVKEKDPDVLITYNGDNFDFAYLKKRCEKLGINFALGRDGSEPKIQRMGDRFAVEVKGRIHFDLYPVIRRTINLPTYTLEAVYEAVFGQPKEKVYAEEITTAWETGENLERVARYSMEDAKVTYELGKEFLPMEAQLSRLIGQSLWDVSRSSTGNLVEWFLLRKAYERNELAPNKPDEKELARRRQSYEGGYVKEPERGLWENIVYLDFRSLYPSIIITHNVSPDTLNREGCKEYDVAPQVGHRFCKDFPGFIPSLLGDLLEERQKIKKKMKATIDPIERKLLDYRQRAIKILANSYYGYYGYARARWYCKECAESVTAWGREYITMTIKEIEEKYGFKVIYSDTDGFFATIPGADAETVKKKAMEFLKYINAKLPGALELEYEGFYKRGFFVTKKKYAVIDEEGKITTRGLEIVRRDWSEIAKETQARVLEALLKDGDVEKAVRIVKEVTEKLSKYEVPPEKLVIHEQITRDLKDYKATGPHVAVAKRLAARGVKIRPGTVISYIVLKGSGRIGDRAIPFDEFDPTKHKYDAEYYIENQVLPAVERILRAFGYRKEDLRYQKTRQVGLSAWLKPKGT

SEQ ID NO: 2126 - protein, 774 aa, synthetic construct
MILDTDLITEDGKPVFRIFKKENGEFKIEYDRTFEPYFYALLKDDSAIEEVKKITAERHGTVVTVKRVEKVQKKFLGRPVEVWKLYFTHSQDRPAIFDKIREHPAVIDIYEYDIPFAKRYLIDKGLVPMEGDEELKMLAFDIETLYHEGEEFAEGPILMISYADEEGARVITWKNVDLPYVDVVSTEREMIKRFLRVVKEKDPDVLITYNGDNFDFAYLKKRCEKLGINFALGRDGSEPKIQRMGDRFAVEVKGRIHFDLYPVIRRTINLPTYTLEAVYEAVFGQPKEKVYAEEITTAWETGENLERVARYSMEDAKVTYELGKEFLPMEAQLSRLIGQSLWDVSRSSTGNLVEWFLLRKAYERNELAPNKPDEKELARRRQSYEGGYVKEPERGLWENIVYLDFRSLYPSIIITHNVSPDTLNREGCKEYDVAPQVGHRFCKDFPGFIPSLLGDLLEERQKIKKKMKATIDPIERKLLDYRQRAIKILANSYYGYYGYARARWYCKECAESVTAWGREYITMTIKEIEEKYGFKVIYSDTDGFFATIPGADAETVKKKAMEFLKYINAKLPGALELEYEGFYKRGFFVTKKKYAVIDEEGKITTRGLEIVRRDWSEIAKETQARVLEALLKDGDVEKAVRIVKEVTEKLSKYEVPPEKLVIHEQITRDLKDYKATGPHVAVAKRLAARGVKIRPGTVISYIVLKGSGRIGDRAIPFDEFDPTKHKYDAEYYIENQVLPAVERILRAFGYRKEDLRYQKTRQVGLSAWLKPKGT

SEQ ID NO: 2127 - protein, 774 aa, synthetic construct
MILDTDLITEDGKPVFRIFKKENGEFKIEYDRTFEPYFYALLKDDSAIEEVKKITAERHGTVVTVKRVEKVQKKFLGRPVEVWKLYFTHWQDVPAIRDKIREHPAVIDIYEYDIPFAKRYLIDKGLVPMEGDEELKMLAFDIETLYHEGEEFAEGPILMISYADEEGARVITWKNVDLPYVDVVSTEREMIKRFLRVVKEKDPDVLITYNGDNFDFAYLKKRCEKLGINFALGRDGSEPKIQRMGDRFAVEVKGRIHFDLYPVIRRTINLPTYTLEAVYEAVFGQPKEKVYAEEITTAWETGENLERVARYSMEDAKVTYELGKEFLPMEAQLSRLIGQSLWDVSRSSTGNLVEWFLLRKAYERNELAPNKPDEKELARRRQSYEGGYVKEPERGLWENIVYLDFRSLYPSIIITHNVSPDTLNREGCKEYDVAPQVGHRFCKDFPGFIPSLLGDLLEERQKIKKKMKATIDPIERKLLDYRQRAIKILANSYYGYYGYARARWYCKECAESVTAWGREYITMTIKEIEEKYGFKVIYSDTDGFFATIPGADAETVKKKAMEFLKYINAKLPGALELEYEGFYKRGFFVTKKKYAVIDEEGKITTRGLEIVRRDWSEIAKETQARVLEALLKDGDVEKAVRIVKEVTEKLSKYEVPPEKLVIHEQITRDLKDYKATGPHVAVAKRLAARGVKIRPGTVISYIVLKGSGRIGDRAIPFDEFDPTKHKYDAEYYIENQVLPAVERILRAFGYRKEDLRYQKTRQVGLSAWLKPKGT

SEQ ID NO: 2128 - protein, 774 aa, synthetic construct
MILDTDLITEDGKPVFRIFKKENGEFKIEYDRTFEPYFYALLKDDSAIEEVKKITAERHGTVVTVKRVEKVQKKFLGRPVEVWKLYFTHWQDVPAIADKIREHPAVIDIYEYDIPFAKRYLIDKGLVPMEGDEELKMLAFDIETLYHEGEEFAEGPILMISYADEEGARVITWKNVDLPYVDVVSTEREMIKRFLRVVKEKDPDVLITYNGDNFDFAYLKKRCEKLGINFALGRDGSEPKIQRMGDRFAVEVKGRIHFDLYPVIRRTINLPTYTLEAVYEAVFGQPKEKVYAEEITTAWETGENLERVARYSMEDAKVTYELGKEFLPMEAQLSRLIGQSLWDVSRSSTGNLVEWFLLRKAYERNELAPNKPDEKELARRRQSYEGGYVKEPERGLWENIVYLDFRSLYPSIIITHNVSPDTLNREGCKEYDVAPQVGHRFCKDFPGFIPSLLGDLLEERQKIKKKMKATIDPIERKLLDYRQRAIKILANSYYGYYGYARARWYCKECAESVTAWGREYITMTIKEIEEKYGFKVIYSDTDGFFATIPGADAETVKKKAMEFLKYINAKLPGALELEYEGFYKRGFFVTKKKYAVIDEEGKITTRGLEIVRRDWSEIAKETQARVLEALLKDGDVEKAVRIVKEVTEKLSKYEVPPEKLVIHEQITRDLKDYKATGPHVAVAKRLAARGVKIRPGTVISYIVLKGSGRIGDRAIPFDEFDPTKHKYDAEYYIENQVLPAVERILRAFGYRKEDLRYQKTRQVGLSAWLKPKGT

SEQ ID NO: 2129 - protein, 774 aa, synthetic construct
MILDTDLITEDGKPVFRIFKKENGEFKIEYDRTFEPYFYALLKDDSAIEEVKKITAERHGTVVTVKRVEKVQKKFLGRPVEVWKLYFTHWQDVPAIFDKIREHPAVIDIYEYDIPFAKRYLIDKGLVPMEGDEELKMLAFDIETLYHEGEEFAEGPILMISYADEEGARVITWKNVDLPYVDVVSTEREMIKRFLRVVKEKDPDVLITYNGDNFDFAYLKKRCEKLGINFALGRDGSEPKIQRMGDRFAVEVKGRIHFDLYPVIRRTINLPTYTLEAVYEAVFGQPKEKVYAEEITTAWETGENLERVARYSMEDAKVTYELGKEFLPMEAQLSRLIGQSLWDVSRSSTGNLVEWFLLRKAYERNELAPNKPDEKELARRRQSYEGGYVKEPERGLWENIVYLDFRSLYPSIIITHNVSPDTLNREGCKEYDVAPQVGHRFCKDFPGFIPSLLGDLLEERQKIKKKMKATIDPIERKLLDYRQRAIKILANSYYGYYGYARARWYCKECAESVTAWGREYITMTIKEIEEKYGFKVIYSDTDGFFATIPGADAETVKKKAMEFLKYINAKLPGALELEYEGFYKRGFFVTKKKYAVIDEEGKITTRGLEIVRRDWSEIAKETQARVLEALLKDGDVEKAVRIVKEVTEKLSKYEVPPEKLVIHEQITRDLKDYKATGPHVAVAKRLAARGVKIRPGTVISYIVLKGSGRIGDRAIPFDEFDPTKHKYDAEYYIENQVLPAVERILRAFGYRKEDLRYQKTRQVGLSAWLKPKGT

SEQ ID NO: 2130 - protein, 774 aa, synthetic construct
MILDTDLITEDGKPVFRIFKKENGEFKIEYDRTFEPYFYALLKDDSAIEEVKKITAERHGTVVTVKRVEKVQKKFLGRPVEVWKLYFTHWQDVPAIHDKIREHPAVIDIYEYDIPFAKRYLIDKGLVPMEGDEELKMLAFDIETLYHEGEEFAEGPILMISYADEEGARVITWKNVDLPYVDVVSTEREMIKRFLRVVKEKDPDVLITYNGDNFDFAYLKKRCEKLGINFALGRDGSEPKIQRMGDRFAVEVKGRIHFDLYPVIRRTINLPTYTLEAVYEAVFGQPKEKVYAEEITTAWETGENLERVARYSMEDAKVTYELGKEFLPMEAQLSRLIGQSLWDVSRSSTGNLVEWFLLRKAYERNELAPNKPDEKELARRRQSYEGGYVKEPERGLWENIVYLDFRSLYPSIIITHNVSPDTLNREGCKEYDVAPQVGHRFCKDFPGFIPSLLGDLLEERQKIKKKMKATIDPIERKLLDYRQRAIKILANSYYGYYGYARARWYCKECAESVTAWGREYITMTIKEIEEKYGFKVIYSDTDGFFATIPGADAETVKKKAMEFLKYINAKLPGALELEYEGFYKRGFFVTKKKYAVIDEEGKITTRGLEIVRRDWSEIAKETQARVLEALLKDGDVEKAVRIVKEVTEKLSKYEVPPEKLVIHEQITRDLKDYKATGPHVAVAKRLAARGVKIRPGTVISYIVLKGSGRIGDRAIPFDEFDPTKHKYDAEYYIENQVLPAVERILRAFGYRKEDLRYQKTRQVGLSAWLKPKGT

SEQ ID NO: 2131 - protein, 774 aa, synthetic construct
MILDTDLITEDGKPVFRIFKKENGEFKIEYDRTFEPYFYALLKDDSAIEEVKKITAERHGTVVTVKRVEKVQKKFLGRPVEVWKLYFTHWQDVPAIWDKIREHPAVIDIYEYDIPFAKRYLIDKGLVPMEGDEELKMLAFDIETLYHEGEEFAEGPILMISYADEEGARVITWKNVDLPYVDVVSTEREMIKRFLRVVKEKDPDVLITYNGDNFDFAYLKKRCEKLGINFALGRDGSEPKIQRMGDRFAVEVKGRIHFDLYPVIRRTINLPTYTLEAVYEAVFGQPKEKVYAEEITTAWETGENLERVARYSMEDAKVTYELGKEFLPMEAQLSRLIGQSLWDVSRSSTGNLVEWFLLRKAYERNELAPNKPDEKELARRRQSYEGGYVKEPERGLWENIVYLDFRSLYPSIIITHNVSPDTLNREGCKEYDVAPQVGHRFCKDFPGFIPSLLGDLLEERQKIKKKMKATIDPIERKLLDYRQRAIKILANSYYGYYGYARARWYCKECAESVTAWGREYITMTIKEIEEKYGFKVIYSDTDGFFATIPGADAETVKKKAMEFLKYINAKLPGALELEYEGFYKRGFFVTKKKYAVIDEEGKITTRGLEIVRRDWSEIAKETQARVLEALLKDGDVEKAVRIVKEVTEKLSKYEVPPEKLVIHEQITRDLKDYKATGPHVAVAKRLAARGVKIRPGTVISYIVLKGSGRIGDRAIPFDEFDPTKHKYDAEYYIENQVLPAVERILRAFGYRKEDLRYQKTRQVGLSAWLKPKGT

SEQ ID NO: 2132 - protein, 774 aa, synthetic construct
MILDTDLITEDGKPVFRIFKKENGEFKIEYDRTFEPYFYALLKDDSAIEEVKKITAERHGTVVTVKRVEKVQKKFLGRPVEVWKLYFTHWQDIPAIRDKIREHPAVIDIYEYDIPFAKRYLIDKGLVPMEGDEELKMLAFDIETLYHEGEEFAEGPILMISYADEEGARVITWKNVDLPYVDVVSTEREMIKRFLRVVKEKDPDVLITYNGDNFDFAYLKKRCEKLGINFALGRDGSEPKIQRMGDRFAVEVKGRIHFDLYPVIRRTINLPTYTLEAVYEAVFGQPKEKVYAEEITTAWETGENLERVARYSMEDAKVTYELGKEFLPMEAQLSRLIGQSLWDVSRSSTGNLVEWFLLRKAYERNELAPNKPDEKELARRRQSYEGGYVKEPERGLWENIVYLDFRSLYPSIIITHNVSPDTLNREGCKEYDVAPQVGHRFCKDFPGFIPSLLGDLLEERQKIKKKMKATIDPIERKLLDYRQRAIKILANSYYGYYGYARARWYCKECAESVTAWGREYITMTIKEIEEKYGFKVIYSDTDGFFATIPGADAETVKKKAMEFLKYINAKLPGALELEYEGFYKRGFFVTKKKYAVIDEEGKITTRGLEIVRRDWSEIAKETQARVLEALLKDGDVEKAVRIVKEVTEKLSKYEVPPEKLVIHEQITRDLKDYKATGPHVAVAKRLAARGVKIRPGTVISYIVLKGSGRIGDRAIPFDEFDPTKHKYDAEYYIENQVLPAVERILRAFGYRKEDLRYQKTRQVGLSAWLKPKGT

SEQ ID NO: 2133 - protein, 774 aa, synthetic construct
MILDTDLITEDGKPVFRIFKKENGEFKIEYDRTFEPYFYALLKDDSAIEEVKKITAERHGTVVTVKRVEKVQKKFLGRPVEVWKLYFTHWQDIPAIADKIREHPAVIDIYEYDIPFAKRYLIDKGLVPMEGDEELKMLAFDIETLYHEGEEFAEGPILMISYADEEGARVITWKNVDLPYVDVVSTEREMIKRFLRVVKEKDPDVLITYNGDNFDFAYLKKRCEKLGINFALGRDGSEPKIQRMGDRFAVEVKGRIHFDLYPVIRRTINLPTYTLEAVYEAVFGQPKEKVYAEEITTAWETGENLERVARYSMEDAKVTYELGKEFLPMEAQLSRLIGQSLWDVSRSSTGNLVEWFLLRKAYERNELAPNKPDEKELARRRQSYEGGYVKEPERGLWENIVYLDFRSLYPSIIITHNVSPDTLNREGCKEYDVAPQVGHRFCKDFPGFIPSLLGDLLEERQKIKKKMKATIDPIERKLLDYRQRAIKILANSYYGYYGYARARWYCKECAESVTAWGREYITMTIKEIEEKYGFKVIYSDTDGFFATIPGADAETVKKKAMEFLKYINAKLPGALELEYEGFYKRGFFVTKKKYAVIDEEGKITTRGLEIVRRDWSEIAKETQARVLEALLKDGDVEKAVRIVKEVTEKLSKYEVPPEKLVIHEQITRDLKDYKATGPHVAVAKRLAARGVKIRPGTVISYIVLKGSGRIGDRAIPFDEFDPTKHKYDAEYYIENQVLPAVERILRAFGYRKEDLRYQKTRQVGLSAWLKPKGT

SEQ ID NO: 2134 - protein, 774 aa, synthetic construct
MILDTDLITEDGKPVFRIFKKENGEFKIEYDRTFEPYFYALLKDDSAIEEVKKITAERHGTVVTVKRVEKVQKKFLGRPVEVWKLYFTHWQDIPAIFDKIREHPAVIDIYEYDIPFAKRYLIDKGLVPMEGDEELKMLAFDIETLYHEGEEFAEGPILMISYADEEGARVITWKNVDLPYVDVVSTEREMIKRFLRVVKEKDPDVLITYNGDNFDFAYLKKRCEKLGINFALGRDGSEPKIQRMGDRFAVEVKGRIHFDLYPVIRRTINLPTYTLEAVYEAVFGQPKEKVYAEEITTAWETGENLERVARYSMEDAKVTYELGKEFLPMEAQLSRLIGQSLWDVSRSSTGNLVEWFLLRKAYERNELAPNKPDEKELARRRQSYEGGYVKEPERGLWENIVYLDFRSLYPSIIITHNVSPDTLNREGCKEYDVAPQVGHRFCKDFPGFIPSLLGDLLEERQKIKKKMKATIDPIERKLLDYRQRAIKILANSYYGYYGYARARWYCKECAESVTAWGREYITMTIKEIEEKYGFKVIYSDTDGFFATIPGADAETVKKKAMEFLKYINAKLPGALELEYEGFYKRGFFVTKKKYAVIDEEGKITTRGLEIVRRDWSEIAKETQARVLEALLKDGDVEKAVRIVKEVTEKLSKYEVPPEKLVIHEQITRDLKDYKATGPHVAVAKRLAARGVKIRPGTVISYIVLKGSGRIGDRAIPFDEFDPTKHKYDAEYYIENQVLPAVERILRAFGYRKEDLRYQKTRQVGLSAWLKPKGT

SEQ ID NO: 2135 - protein, 774 aa, synthetic construct
MILDTDLITEDGKPVFRIFKKENGEFKIEYDRTFEPYFYALLKDDSAIEEVKKITAERHGTVVTVKRVEKVQKKFLGRPVEVWKLYFTHWQDIPAIHDKIREHPAVIDIYEYDIPFAKRYLIDKGLVPMEGDEELKMLAFDIETLYHEGEEFAEGPILMISYADEEGARVITWKNVDLPYVDVVSTEREMIKRFLRVVKEKDPDVLITYNGDNFDFAYLKKRCEKLGINFALGRDGSEPKIQRMGDRFAVEVKGRIHFDLYPVIRRTINLPTYTLEAVYEAVFGQPKEKVYAEEITTAWETGENLERVARYSMEDAKVTYELGKEFLPMEAQLSRLIGQSLWDVSRSSTGNLVEWFLLRKAYERNELAPNKPDEKELARRRQSYEGGYVKEPERGLWENIVYLDFRSLYPSIIITHNVSPDTLNREGCKEYDVAPQVGHRFCKDFPGFIPSLLGDLLEERQKIKKKMKATIDPIERKLLDYRQRAIKILANSYYGYYGYARARWYCKECAESVTAWGREYITMTIKEIEEKYGFKVIYSDTDGFFATIPGADAETVKKKAMEFLKYINAKLPGALELEYEGFYKRGFFVTKKKYAVIDEEGKITTRGLEIVRRDWSEIAKETQARVLEALLKDGDVEKAVRIVKEVTEKLSKYEVPPEKLVIHEQITRDLKDYKATGPHVAVAKRLAARGVKIRPGTVISYIVLKGSGRIGDRAIPFDEFDPTKHKYDAEYYIENQVLPAVERILRAFGYRKEDLRYQKTRQVGLSAWLKPKGT

SEQ ID NO: 2136 - protein, 774 aa, synthetic construct
MILDTDLITEDGKPVFRIFKKENGEFKIEYDRTFEPYFYALLKDDSAIEEVKKITAERHGTVVTVKRVEKVQKKFLGRPVEVWKLYFTHWQDIPAIWDKIREHPAVIDIYEYDIPFAKRYLIDKGLVPMEGDEELKMLAFDIETLYHEGEEFAEGPILMISYADEEGARVITWKNVDLPYVDVVSTEREMIKRFLRVVKEKDPDVLITYNGDNFDFAYLKKRCEKLGINFALGRDGSEPKIQRMGDRFAVEVKGRIHFDLYPVIRRTINLPTYTLEAVYEAVFGQPKEKVYAEEITTAWETGENLERVARYSMEDAKVTYELGKEFLPMEAQLSRLIGQSLWDVSRSSTGNLVEWFLLRKAYERNELAPNKPDEKELARRRQSYEGGYVKEPERGLWENIVYLDFRSLYPSIIITHNVSPDTLNREGCKEYDVAPQVGHRFCKDFPGFIPSLLGDLLEERQKIKKKMKATIDPIERKLLDYRQRAIKILANSYYGYYGYARARWYCKECAESVTAWGREYITMTIKEIEEKYGFKVIYSDTDGFFATIPGADAETVKKKAMEFLKYINAKLPGALELEYEGFYKRGFFVTKKKYAVIDEEGKITTRGLEIVRRDWSEIAKETQARVLEALLKDGDVEKAVRIVKEVTEKLSKYEVPPEKLVIHEQITRDLKDYKATGPHVAVAKRLAARGVKIRPGTVISYIVLKGSGRIGDRAIPFDEFDPTKHKYDAEYYIENQVLPAVERILRAFGYRKEDLRYQKTRQVGLSAWLKPKGT

SEQ ID NO: 2137 - protein, 774 aa, synthetic construct
MILDTDLITEDGKPVFRIFKKENGEFKIEYDRTFEPYFYALLKDDSAIEEVKKITAERHGTVVTVKRVEKVQKKFLGRPVEVWKLYFTHWQDKPAIWDKIREHPAVIDIYEYDIPFAKRYLIDKGLVPMEGDEELKMLAFDIETLYHEGEEFAEGPILMISYADEEGARVITWKNVDLPYVDVVSTEREMIKRFLRVVKEKDPDVLITYNGDNFDFAYLKKRCEKLGINFALGRDGSEPKIQRMGDRFAVEVKGRIHFDLYPVIRRTINLPTYTLEAVYEAVFGQPKEKVYAEEITTAWETGENLERVARYSMEDAKVTYELGKEFLPMEAQLSRLIGQSLWDVSRSSTGNLVEWFLLRKAYERNELAPNKPDEKELARRRQSYEGGYVKEPERGLWENIVYLDFRSLYPSIIITHNVSPDTLNREGCKEYDVAPQVGHRFCKDFPGFIPSLLGDLLEERQKIKKKMKATIDPIERKLLDYRQRAIKILANSYYGYYGYARARWYCKECAESVTAWGREYITMTIKEIEEKYGFKVIYSDTDGFFATIPGADAETVKKKAMEFLKYINAKLPGALELEYEGFYKRGFFVTKKKYAVIDEEGKITTRGLEIVRRDWSEIAKETQARVLEALLKDGDVEKAVRIVKEVTEKLSKYEVPPEKLVIHEQITRDLKDYKATGPHVAVAKRLAARGVKIRPGTVISYIVLKGSGRIGDRAIPFDEFDPTKHKYDAEYYIENQVLPAVERILRAFGYRKEDLRYQKTRQVGLSAWLKPKGT

SEQ ID NO: 2138 - protein, 774 aa, synthetic construct
MILDTDLITEDGKPVFRIFKKENGEFKIEYDRTFEPYFYALLKDDSAIEEVKKITAERHGTVVTVKRVEKVQKKFLGRPVEVWKLYFTHWQDQPAIRDKIREHPAVIDIYEYDIPFAKRYLIDKGLVPMEGDEELKMLAFDIETLYHEGEEFAEGPILMISYADEEGARVITWKNVDLPYVDVVSTEREMIKRFLRVVKEKDPDVLITYNGDNFDFAYLKKRCEKLGINFALGRDGSEPKIQRMGDRFAVEVKGRIHFDLYPVIRRTINLPTYTLEAVYEAVFGQPKEKVYAEEITTAWETGENLERVARYSMEDAKVTYELGKEFLPMEAQLSRLIGQSLWDVSRSSTGNLVEWFLLRKAYERNELAPNKPDEKELARRRQSYEGGYVKEPERGLWENIVYLDFRSLYPSIIITHNVSPDTLNREGCKEYDVAPQVGHRFCKDFPGFIPSLLGDLLEERQKIKKKMKATIDPIERKLLDYRQRAIKILANSYYGYYGYARARWYCKECAESVTAWGREYITMTIKEIEEKYGFKVIYSDTDGFFATIPGADAETVKKKAMEFLKYINAKLPGALELEYEGFYKRGFFVTKKKYAVIDEEGKITTRGLEIVRRDWSEIAKETQARVLEALLKDGDVEKAVRIVKEVTEKLSKYEVPPEKLVIHEQITRDLKDYKATGPHVAVAKRLAARGVKIRPGTVISYIVLKGSGRIGDRAIPFDEFDPTKHKYDAEYYIENQVLPAVERILRAFGYRKEDLRYQKTRQVGLSAWLKPKGT

SEQ ID NO: 2139 - protein, 774 aa, synthetic construct
MILDTDLITEDGKPVFRIFKKENGEFKIEYDRTFEPYFYALLKDDSAIEEVKKITAERHGTVVTVKRVEKVQKKFLGRPVEVWKLYFTHWQDQPAIADKIREHPAVIDIYEYDIPFAKRYLIDKGLVPMEGDEELKMLAFDIETLYHEGEEFAEGPILMISYADEEGARVITWKNVDLPYVDVVSTEREMIKRFLRVVKEKDPDVLITYNGDNFDFAYLKKRCEKLGINFALGRDGSEPKIQRMGDRFAVEVKGRIHFDLYPVIRRTINLPTYTLEAVYEAVFGQPKEKVYAEEITTAWETGENLERVARYSMEDAKVTYELGKEFLPMEAQLSRLIGQSLWDVSRSSTGNLVEWFLLRKAYERNELAPNKPDEKELARRRQSYEGGYVKEPERGLWENIVYLDFRSLYPSIIITHNVSPDTLNREGCKEYDVAPQVGHRFCKDFPGFIPSLLGDLLEERQKIKKKMKATIDPIERKLLDYRQRAIKILANSYYGYYGYARARWYCKECAESVTAWGREYITMTIKEIEEKYGFKVIYSDTDGFFATIPGADAETVKKKAMEFLKYINAKLPGALELEYEGFYKRGFFVTKKKYAVIDEEGKITTRGLEIVRRDWSEIAKETQARVLEALLKDGDVEKAVRIVKEVTEKLSKYEVPPEKLVIHEQITRDLKDYKATGPHVAVAKRLAARGVKIRPGTVISYIVLKGSGRIGDRAIPFDEFDPTKHKYDAEYYIENQVLPAVERILRAFGYRKEDLRYQKTRQVGLSAWLKPKGT

SEQ ID NO: 2140 - protein, 774 aa, synthetic construct
MILDTDLITEDGKPVFRIFKKENGEFKIEYDRTFEPYFYALLKDDSAIEEVKKITAERHGTVVTVKRVEKVQKKFLGRPVEVWKLYFTHWQDQPAIWDKIREHPAVIDIYEYDIPFAKRYLIDKGLVPMEGDEELKMLAFDIETLYHEGEEFAEGPILMISYADEEGARVITWKNVDLPYVDVVSTEREMIKRFLRVVKEKDPDVLITYNGDNFDFAYLKKRCEKLGINFALGRDGSEPKIQRMGDRFAVEVKGRIHFDLYPVIRRTINLPTYTLEAVYEAVFGQPKEKVYAEEITTAWETGENLERVARYSMEDAKVTYELGKEFLPMEAQLSRLIGQSLWDVSRSSTGNLVEWFLLRKAYERNELAPNKPDEKELARRRQSYEGGYVKEPERGLWENIVYLDFRSLYPSIIITHNVSPDTLNREGCKEYDVAPQVGHRFCKDFPGFIPSLLGDLLEERQKIKKKMKATIDPIERKLLDYRQRAIKILANSYYGYYGYARARWYCKECAESVTAWGREYITMTIKEIEEKYGFKVIYSDTDGFFATIPGADAETVKKKAMEFLKYINAKLPGALELEYEGFYKRGFFVTKKKYAVIDEEGKITTRGLEIVRRDWSEIAKETQARVLEALLKDGDVEKAVRIVKEVTEKLSKYEVPPEKLVIHEQITRDLKDYKATGPHVAVAKRLAARGVKIRPGTVISYIVLKGSGRIGDRAIPFDEFDPTKHKYDAEYYIENQVLPAVERILRAFGYRKEDLRYQKTRQVGLSAWLKPKGT

SEQ ID NO: 2141 - protein, 774 aa, synthetic construct
MILDTDLITEDGKPVFRIFKKENGEFKIEYDRTFEPYFYALLKDDSAIEEVKKITAERHGTVVTVKRVEKVQKKFLGRPVEVWKLYFTHWQDRPAIRDKIREHPAVIDIYEYDIPFAKRYLIDKGLVPMEGDEELKMLAFDIETLYHEGEEFAEGPILMISYADEEGARVITWKNVDLPYVDVVSTEREMIKRFLRVVKEKDPDVLITYNGDNFDFAYLKKRCEKLGINFALGRDGSEPKIQRMGDRFAVEVKGRIHFDLYPVIRRTINLPTYTLEAVYEAVFGQPKEKVYAEEITTAWETGENLERVARYSMEDAKVTYELGKEFLPMEAQLSRLIGQSLWDVSRSSTGNLVEWFLLRKAYERNELAPNKPDEKELARRRQSYEGGYVKEPERGLWENIVYLDFRSLYPSIIITHNVSPDTLNREGCKEYDVAPQVGHRFCKDFPGFIPSLLGDLLEERQKIKKKMKATIDPIERKLLDYRQRAIKILANSYYGYYGYARARWYCKECAESVTAWGREYITMTIKEIEEKYGFKVIYSDTDGFFATIPGADAETVKKKAMEFLKYINAKLPGALELEYEGFYKRGFFVTKKKYAVIDEEGKITTRGLEIVRRDWSEIAKETQARVLEALLKDGDVEKAVRIVKEVTEKLSKYEVPPEKLVIHEQITRDLKDYKATGPHVAVAKRLAARGVKIRPGTVISYIVLKGSGRIGDRAIPFDEFDPTKHKYDAEYYIENQVLPAVERILRAFGYRKEDLRYQKTRQVGLSAWLKPKGT

SEQ ID NO: 2142 - protein, 774 aa, synthetic construct
MILDTDLITEDGKPVFRIFKKENGEFKIEYDRTFEPYFYALLKDDSAIEEVKKITAERHGTVVTVKRVEKVQKKFLGRPVEVWKLYFTHWQDRPAIADKIREHPAVIDIYEYDIPFAKRYLIDKGLVPMEGDEELKMLAFDIETLYHEGEEFAEGPILMISYADEEGARVITWKNVDLPYVDVVSTEREMIKRFLRVVKEKDPDVLITYNGDNFDFAYLKKRCEKLGINFALGRDGSEPKIQRMGDRFAVEVKGRIHFDLYPVIRRTINLPTYTLEAVYEAVFGQPKEKVYAEEITTAWETGENLERVARYSMEDAKVTYELGKEFLPMEAQLSRLIGQSLWDVSRSSTGNLVEWFLLRKAYERNELAPNKPDEKELARRRQSYEGGYVKEPERGLWENIVYLDFRSLYPSIIITHNVSPDTLNREGCKEYDVAPQVGHRFCKDFPGFIPSLLGDLLEERQKIKKKMKATIDPIERKLLDYRQRAIKILANSYYGYYGYARARWYCKECAESVTAWGREYITMTIKEIEEKYGFKVIYSDTDGFFATIPGADAETVKKKAMEFLKYINAKLPGALELEYEGFYKRGFFVTKKKYAVIDEEGKITTRGLEIVRRDWSEIAKETQARVLEALLKDGDVEKAVRIVKEVTEKLSKYEVPPEKLVIHEQITRDLKDYKATGPHVAVAKRLAARGVKIRPGTVISYIVLKGSGRIGDRAIPFDEFDPTKHKYDAEYYIENQVLPAVERILRAFGYRKEDLRYQKTRQVGLSAWLKPKGT

SEQ ID NO: 2143 - protein, 774 aa, synthetic construct
MILDTDLITEDGKPVFRIFKKENGEFKIEYDRTFEPYFYALLKDDSAIEEVKKITAERHGTVVTVKRVEKVQKKFLGRPVEVWKLYFTHWQDRPAIFDKIREHPAVIDIYEYDIPFAKRYLIDKGLVPMEGDEELKMLAFDIETLYHEGEEFAEGPILMISYADEEGARVITWKNVDLPYVDVVSTEREMIKRFLRVVKEKDPDVLITYNGDNFDFAYLKKRCEKLGINFALGRDGSEPKIQRMGDRFAVEVKGRIHFDLYPVIRRTINLPTYTLEAVYEAVFGQPKEKVYAEEITTAWETGENLERVARYSMEDAKVTYELGKEFLPMEAQLSRLIGQSLWDVSRSSTGNLVEWFLLRKAYERNELAPNKPDEKELARRRQSYEGGYVKEPERGLWENIVYLDFRSLYPSIIITHNVSPDTLNREGCKEYDVAPQVGHRFCKDFPGFIPSLLGDLLEERQKIKKKMKATIDPIERKLLDYRQRAIKILANSYYGYYGYARARWYCKECAESVTAWGREYITMTIKEIEEKYGFKVIYSDTDGFFATIPGADAETVKKKAMEFLKYINAKLPGALELEYEGFYKRGFFVTKKKYAVIDEEGKITTRGLEIVRRDWSEIAKETQARVLEALLKDGDVEKAVRIVKEVTEKLSKYEVPPEKLVIHEQITRDLKDYKATGPHVAVAKRLAARGVKIRPGTVISYIVLKGSGRIGDRAIPFDEFDPTKHKYDAEYYIENQVLPAVERILRAFGYRKEDLRYQKTRQVGLSAWLKPKGT

SEQ ID NO: 2144 - protein, 774 aa, synthetic construct
MILDTDLITEDGKPVFRIFKKENGEFKIEYDRTFEPYFYALLKDDSAIEEVKKITAERHGTVVTVKRVEKVQKKFLGRPVEVWKLYFTHWQDRPAIWDKIREHPAVIDIYEYDIPFAKRYLIDKGLVPMEGDEELKMLAFDIETLYHEGEEFAEGPILMISYADEEGARVITWKNVDLPYVDVVSTEREMIKRFLRVVKEKDPDVLITYNGDNFDFAYLKKRCEKLGINFALGRDGSEPKIQRMGDRFAVEVKGRIHFDLYPVIRRTINLPTYTLEAVYEAVFGQPKEKVYAEEITTAWETGENLERVARYSMEDAKVTYELGKEFLPMEAQLSRLIGQSLWDVSRSSTGNLVEWFLLRKAYERNELAPNKPDEKELARRRQSYEGGYVKEPERGLWENIVYLDFRSLYPSIIITHNVSPDTLNREGCKEYDVAPQVGHRFCKDFPGFIPSLLGDLLEERQKIKKKMKATIDPIERKLLDYRQRAIKILANSYYGYYGYARARWYCKECAESVTAWGREYITMTIKEIEEKYGFKVIYSDTDGFFATIPGADAETVKKKAMEFLKYINAKLPGALELEYEGFYKRGFFVTKKKYAVIDEEGKITTRGLEIVRRDWSEIAKETQARVLEALLKDGDVEKAVRIVKEVTEKLSKYEVPPEKLVIHEQITRDLKDYKATGPHVAVAKRLAARGVKIRPGTVISYIVLKGSGRIGDRAIPFDEFDPTKHKYDAEYYIENQVLPAVERILRAFGYRKEDLRYQKTRQVGLSAWLKPKGT

SEQ ID NO: 2145 - protein, 774 aa, synthetic construct
MILDTDLITEDGKPVFRIFKKENGEFKIEYDRTFEPYFYALLKDDSAIEEVKKITAERHGTVVTVKRVEKVQKKFLGRPVEVWKLYFTHYQDVPAIRDKIREHPAVIDIYEYDIPFAKRYLIDKGLVPMEGDEELKMLAFDIETLYHEGEEFAEGPILMISYADEEGARVITWKNVDLPYVDVVSTEREMIKRFLRVVKEKDPDVLITYNGDNFDFAYLKKRCEKLGINFALGRDGSEPKIQRMGDRFAVEVKGRIHFDLYPVIRRTINLPTYTLEAVYEAVFGQPKEKVYAEEITTAWETGENLERVARYSMEDAKVTYELGKEFLPMEAQLSRLIGQSLWDVSRSSTGNLVEWFLLRKAYERNELAPNKPDEKELARRRQSYEGGYVKEPERGLWENIVYLDFRSLYPSIIITHNVSPDTLNREGCKEYDVAPQVGHRFCKDFPGFIPSLLGDLLEERQKIKKKMKATIDPIERKLLDYRQRAIKILANSYYGYYGYARARWYCKECAESVTAWGREYITMTIKEIEEKYGFKVIYSDTDGFFATIPGADAETVKKKAMEFLKYINAKLPGALELEYEGFYKRGFFVTKKKYAVIDEEGKITTRGLEIVRRDWSEIAKETQARVLEALLKDGDVEKAVRIVKEVTEKLSKYEVPPEKLVIHEQITRDLKDYKATGPHVAVAKRLAARGVKIRPGTVISYIVLKGSGRIGDRAIPFDEFDPTKHKYDAEYYIENQVLPAVERILRAFGYRKEDLRYQKTRQVGLSAWLKPKGT

SEQ ID NO: 2146 - protein, 774 aa, synthetic construct
MILDTDLITEDGKPVFRIFKKENGEFKIEYDRTFEPYFYALLKDDSAIEEVKKITAERHGTVVTVKRVEKVQKKFLGRPVEVWKLYFTHYQDVPAIADKIREHPAVIDIYEYDIPFAKRYLIDKGLVPMEGDEELKMLAFDIETLYHEGEEFAEGPILMISYADEEGARVITWKNVDLPYVDVVSTEREMIKRFLRVVKEKDPDVLITYNGDNFDFAYLKKRCEKLGINFALGRDGSEPKIQRMGDRFAVEVKGRIHFDLYPVIRRTINLPTYTLEAVYEAVFGQPKEKVYAEEITTAWETGENLERVARYSMEDAKVTYELGKEFLPMEAQLSRLIGQSLWDVSRSSTGNLVEWFLLRKAYERNELAPNKPDEKELARRRQSYEGGYVKEPERGLWENIVYLDFRSLYPSIIITHNVSPDTLNREGCKEYDVAPQVGHRFCKDFPGFIPSLLGDLLEERQKIKKKMKATIDPIERKLLDYRQRAIKILANSYYGYYGYARARWYCKECAESVTAWGREYITMTIKEIEEKYGFKVIYSDTDGFFATIPGADAETVKKKAMEFLKYINAKLPGALELEYEGFYKRGFFVTKKKYAVIDEEGKITTRGLEIVRRDWSEIAKETQARVLEALLKDGDVEKAVRIVKEVTEKLSKYEVPPEKLVIHEQITRDLKDYKATGPHVAVAKRLAARGVKIRPGTVISYIVLKGSGRIGDRAIPFDEFDPTKHKYDAEYYIENQVLPAVERILRAFGYRKEDLRYQKTRQVGLSAWLKPKGT

SEQ ID NO: 2147 - protein, 774 aa, synthetic construct
MILDTDLITEDGKPVFRIFKKENGEFKIEYDRTFEPYFYALLKDDSAIEEVKKITAERHGTVVTVKRVEKVQKKFLGRPVEVWKLYFTHYQDVPAIFDKIREHPAVIDIYEYDIPFAKRYLIDKGLVPMEGDEELKMLAFDIETLYHEGEEFAEGPILMISYADEEGARVITWKNVDLPYVDVVSTEREMIKRFLRVVKEKDPDVLITYNGDNFDFAYLKKRCEKLGINFALGRDGSEPKIQRMGDRFAVEVKGRIHFDLYPVIRRTINLPTYTLEAVYEAVFGQPKEKVYAEEITTAWETGENLERVARYSMEDAKVTYELGKEFLPMEAQLSRLIGQSLWDVSRSSTGNLVEWFLLRKAYERNELAPNKPDEKELARRRQSYEGGYVKEPERGLWENIVYLDFRSLYPSIIITHNVSPDTLNREGCKEYDVAPQVGHRFCKDFPGFIPSLLGDLLEERQKIKKKMKATIDPIERKLLDYRQRAIKILANSYYGYYGYARARWYCKECAESVTAWGREYITMTIKEIEEKYGFKVIYSDTDGFFATIPGADAETVKKKAMEFLKYINAKLPGALELEYEGFYKRGFFVTKKKYAVIDEEGKITTRGLEIVRRDWSEIAKETQARVLEALLKDGDVEKAVRIVKEVTEKLSKYEVPPEKLVIHEQITRDLKDYKATGPHVAVAKRLAARGVKIRPGTVISYIVLKGSGRIGDRAIPFDEFDPTKHKYDAEYYIENQVLPAVERILRAFGYRKEDLRYQKTRQVGLSAWLKPKGT

SEQ ID NO: 2148 - protein, 774 aa, synthetic construct
MILDTDLITEDGKPVFRIFKKENGEFKIEYDRTFEPYFYALLKDDSAIEEVKKITAERHGTVVTVKRVEKVQKKFLGRPVEVWKLYFTHYQDVPAIHDKIREHPAVIDIYEYDIPFAKRYLIDKGLVPMEGDEELKMLAFDIETLYHEGEEFAEGPILMISYADEEGARVITWKNVDLPYVDVVSTEREMIKRFLRVVKEKDPDVLITYNGDNFDFAYLKKRCEKLGINFALGRDGSEPKIQRMGDRFAVEVKGRIHFDLYPVIRRTINLPTYTLEAVYEAVFGQPKEKVYAEEITTAWETGENLERVARYSMEDAKVTYELGKEFLPMEAQLSRLIGQSLWDVSRSSTGNLVEWFLLRKAYERNELAPNKPDEKELARRRQSYEGGYVKEPERGLWENIVYLDFRSLYPSIIITHNVSPDTLNREGCKEYDVAPQVGHRFCKDFPGFIPSLLGDLLEERQKIKKKMKATIDPIERKLLDYRQRAIKILANSYYGYYGYARARWYCKECAESVTAWGREYITMTIKEIEEKYGFKVIYSDTDGFFATIPGADAETVKKKAMEFLKYINAKLPGALELEYEGFYKRGFFVTKKKYAVIDEEGKITTRGLEIVRRDWSEIAKETQARVLEALLKDGDVEKAVRIVKEVTEKLSKYEVPPEKLVIHEQITRDLKDYKATGPHVAVAKRLAARGVKIRPGTVISYIVLKGSGRIGDRAIPFDEFDPTKHKYDAEYYIENQVLPAVERILRAFGYRKEDLRYQKTRQVGLSAWLKPKGT

SEQ ID NO: 2149 - protein, 774 aa, synthetic construct
MILDTDLITEDGKPVFRIFKKENGEFKIEYDRTFEPYFYALLKDDSAIEEVKKITAERHGTVVTVKRVEKVQKKFLGRPVEVWKLYFTHYQDVPAIWDKIREHPAVIDIYEYDIPFAKRYLIDKGLVPMEGDEELKMLAFDIETLYHEGEEFAEGPILMISYADEEGARVITWKNVDLPYVDVVSTEREMIKRFLRVVKEKDPDVLITYNGDNFDFAYLKKRCEKLGINFALGRDGSEPKIQRMGDRFAVEVKGRIHFDLYPVIRRTINLPTYTLEAVYEAVFGQPKEKVYAEEITTAWETGENLERVARYSMEDAKVTYELGKEFLPMEAQLSRLIGQSLWDVSRSSTGNLVEWFLLRKAYERNELAPNKPDEKELARRRQSYEGGYVKEPERGLWENIVYLDFRSLYPSIIITHNVSPDTLNREGCKEYDVAPQVGHRFCKDFPGFIPSLLGDLLEERQKIKKKMKATIDPIERKLLDYRQRAIKILANSYYGYYGYARARWYCKECAESVTAWGREYITMTIKEIEEKYGFKVIYSDTDGFFATIPGADAETVKKKAMEFLKYINAKLPGALELEYEGFYKRGFFVTKKKYAVIDEEGKITTRGLEIVRRDWSEIAKETQARVLEALLKDGDVEKAVRIVKEVTEKLSKYEVPPEKLVIHEQITRDLKDYKATGPHVAVAKRLAARGVKIRPGTVISYIVLKGSGRIGDRAIPFDEFDPTKHKYDAEYYIENQVLPAVERILRAFGYRKEDLRYQKTRQVGLSAWLKPKGT

SEQ ID NO: 2150 - protein, 774 aa, synthetic construct
MILDTDLITEDGKPVFRIFKKENGEFKIEYDRTFEPYFYALLKDDSAIEEVKKITAERHGTVVTVKRVEKVQKKFLGRPVEVWKLYFTHYQDIPAIRDKIREHPAVIDIYEYDIPFAKRYLIDKGLVPMEGDEELKMLAFDIETLYHEGEEFAEGPILMISYADEEGARVITWKNVDLPYVDVVSTEREMIKRFLRVVKEKDPDVLITYNGDNFDFAYLKKRCEKLGINFALGRDGSEPKIQRMGDRFAVEVKGRIHFDLYPVIRRTINLPTYTLEAVYEAVFGQPKEKVYAEEITTAWETGENLERVARYSMEDAKVTYELGKEFLPMEAQLSRLIGQSLWDVSRSSTGNLVEWFLLRKAYERNELAPNKPDEKELARRRQSYEGGYVKEPERGLWENIVYLDFRSLYPSIIITHNVSPDTLNREGCKEYDVAPQVGHRFCKDFPGFIPSLLGDLLEERQKIKKKMKATIDPIERKLLDYRQRAIKILANSYYGYYGYARARWYCKECAESVTAWGREYITMTIKEIEEKYGFKVIYSDTDGFFATIPGADAETVKKKAMEFLKYINAKLPGALELEYEGFYKRGFFVTKKKYAVIDEEGKITTRGLEIVRRDWSEIAKETQARVLEALLKDGDVEKAVRIVKEVTEKLSKYEVPPEKLVIHEQITRDLKDYKATGPHVAVAKRLAARGVKIRPGTVISYIVLKGSGRIGDRAIPFDEFDPTKHKYDAEYYIENQVLPAVERILRAFGYRKEDLRYQKTRQVGLSAWLKPKGT

SEQ ID NO: 2151 - protein, 774 aa, synthetic construct
MILDTDLITEDGKPVFRIFKKENGEFKIEYDRTFEPYFYALLKDDSAIEEVKKITAERHGTVVTVKRVEKVQKKFLGRPVEVWKLYFTHYQDIPAIADKIREHPAVIDIYEYDIPFAKRYLIDKGLVPMEGDEELKMLAFDIETLYHEGEEFAEGPILMISYADEEGARVITWKNVDLPYVDVVSTEREMIKRFLRVVKEKDPDVLITYNGDNFDFAYLKKRCEKLGINFALGRDGSEPKIQRMGDRFAVEVKGRIHFDLYPVIRRTINLPTYTLEAVYEAVFGQPKEKVYAEEITTAWETGENLERVARYSMEDAKVTYELGKEFLPMEAQLSRLIGQSLWDVSRSSTGNLVEWFLLRKAYERNELAPNKPDEKELARRRQSYEGGYVKEPERGLWENIVYLDFRSLYPSIIITHNVSPDTLNREGCKEYDVAPQVGHRFCKDFPGFIPSLLGDLLEERQKIKKKMKATIDPIERKLLDYRQRAIKILANSYYGYYGYARARWYCKECAESVTAWGREYITMTIKEIEEKYGFKVIYSDTDGFFATIPGADAETVKKKAMEFLKYINAKLPGALELEYEGFYKRGFFVTKKKYAVIDEEGKITTRGLEIVRRDWSEIAKETQARVLEALLKDGDVEKAVRIVKEVTEKLSKYEVPPEKLVIHEQITRDLKDYKATGPHVAVAKRLAARGVKIRPGTVISYIVLKGSGRIGDRAIPFDEFDPTKHKYDAEYYIENQVLPAVERILRAFGYRKEDLRYQKTRQVGLSAWLKPKGT

SEQ ID NO: 2152 - protein, 774 aa, synthetic construct
MILDTDLITEDGKPVFRIFKKENGEFKIEYDRTFEPYFYALLKDDSAIEEVKKITAERHGTVVTVKRVEKVQKKFLGRPVEVWKLYFTHYQDIPAIFDKIREHPAVIDIYEYDIPFAKRYLIDKGLVPMEGDEELKMLAFDIETLYHEGEEFAEGPILMISYADEEGARVITWKNVDLPYVDVVSTEREMIKRFLRVVKEKDPDVLITYNGDNFDFAYLKKRCEKLGINFALGRDGSEPKIQRMGDRFAVEVKGRIHFDLYPVIRRTINLPTYTLEAVYEAVFGQPKEKVYAEEITTAWETGENLERVARYSMEDAKVTYELGKEFLPMEAQLSRLIGQSLWDVSRSSTGNLVEWFLLRKAYERNELAPNKPDEKELARRRQSYEGGYVKEPERGLWENIVYLDFRSLYPSIIITHNVSPDTLNREGCKEYDVAPQVGHRFCKDFPGFIPSLLGDLLEERQKIKKKMKATIDPIERKLLDYRQRAIKILANSYYGYYGYARARWYCKECAESVTAWGREYITMTIKEIEEKYGFKVIYSDTDGFFATIPGADAETVKKKAMEFLKYINAKLPGALELEYEGFYKRGFFVTKKKYAVIDEEGKITTRGLEIVRRDWSEIAKETQARVLEALLKDGDVEKAVRIVKEVTEKLSKYEVPPEKLVIHEQITRDLKDYKATGPHVAVAKRLAARGVKIRPGTVISYIVLKGSGRIGDRAIPFDEFDPTKHKYDAEYYIENQVLPAVERILRAFGYRKEDLRYQKTRQVGLSAWLKPKGT

SEQ ID NO: 2153 - protein, 774 aa, synthetic construct
MILDTDLITEDGKPVFRIFKKENGEFKIEYDRTFEPYFYALLKDDSAIEEVKKITAERHGTVVTVKRVEKVQKKFLGRPVEVWKLYFTHYQDIPAIHDKIREHPAVIDIYEYDIPFAKRYLIDKGLVPMEGDEELKMLAFDIETLYHEGEEFAEGPILMISYADEEGARVITWKNVDLPYVDVVSTEREMIKRFLRVVKEKDPDVLITYNGDNFDFAYLKKRCEKLGINFALGRDGSEPKIQRMGDRFAVEVKGRIHFDLYPVIRRTINLPTYTLEAVYEAVFGQPKEKVYAEEITTAWETGENLERVARYSMEDAKVTYELGKEFLPMEAQLSRLIGQSLWDVSRSSTGNLVEWFLLRKAYERNELAPNKPDEKELARRRQSYEGGYVKEPERGLWENIVYLDFRSLYPSIIITHNVSPDTLNREGCKEYDVAPQVGHRFCKDFPGFIPSLLGDLLEERQKIKKKMKATIDPIERKLLDYRQRAIKILANSYYGYYGYARARWYCKECAESVTAWGREYITMTIKEIEEKYGFKVIYSDTDGFFATIPGADAETVKKKAMEFLKYINAKLPGALELEYEGFYKRGFFVTKKKYAVIDEEGKITTRGLEIVRRDWSEIAKETQARVLEALLKDGDVEKAVRIVKEVTEKLSKYEVPPEKLVIHEQITRDLKDYKATGPHVAVAKRLAARGVKIRPGTVISYIVLKGSGRIGDRAIPFDEFDPTKHKYDAEYYIENQVLPAVERILRAFGYRKEDLRYQKTRQVGLSAWLKPKGT

SEQ ID NO: 2154 - protein, 774 aa, synthetic construct
MILDTDLITEDGKPVFRIFKKENGEFKIEYDRTFEPYFYALLKDDSAIEEVKKITAERHGTVVTVKRVEKVQKKFLGRPVEVWKLYFTHYQDIPAIWDKIREHPAVIDIYEYDIPFAKRYLIDKGLVPMEGDEELKMLAFDIETLYHEGEEFAEGPILMISYADEEGARVITWKNVDLPYVDVVSTEREMIKRFLRVVKEKDPDVLITYNGDNFDFAYLKKRCEKLGINFALGRDGSEPKIQRMGDRFAVEVKGRIHFDLYPVIRRTINLPTYTLEAVYEAVFGQPKEKVYAEEITTAWETGENLERVARYSMEDAKVTYELGKEFLPMEAQLSRLIGQSLWDVSRSSTGNLVEWFLLRKAYERNELAPNKPDEKELARRRQSYEGGYVKEPERGLWENIVYLDFRSLYPSIIITHNVSPDTLNREGCKEYDVAPQVGHRFCKDFPGFIPSLLGDLLEERQKIKKKMKATIDPIERKLLDYRQRAIKILANSYYGYYGYARARWYCKECAESVTAWGREYITMTIKEIEEKYGFKVIYSDTDGFFATIPGADAETVKKKAMEFLKYINAKLPGALELEYEGFYKRGFFVTKKKYAVIDEEGKITTRGLEIVRRDWSEIAKETQARVLEALLKDGDVEKAVRIVKEVTEKLSKYEVPPEKLVIHEQITRDLKDYKATGPHVAVAKRLAARGVKIRPGTVISYIVLKGSGRIGDRAIPFDEFDPTKHKYDAEYYIENQVLPAVERILRAFGYRKEDLRYQKTRQVGLSAWLKPKGT

SEQ ID NO: 2155 - protein, 774 aa, synthetic construct
MILDTDLITEDGKPVFRIFKKENGEFKIEYDRTFEPYFYALLKDDSAIEEVKKITAERHGTVVTVKRVEKVQKKFLGRPVEVWKLYFTHYQDKPAIADKIREHPAVIDIYEYDIPFAKRYLIDKGLVPMEGDEELKMLAFDIETLYHEGEEFAEGPILMISYADEEGARVITWKNVDLPYVDVVSTEREMIKRFLRVVKEKDPDVLITYNGDNFDFAYLKKRCEKLGINFALGRDGSEPKIQRMGDRFAVEVKGRIHFDLYPVIRRTINLPTYTLEAVYEAVFGQPKEKVYAEEITTAWETGENLERVARYSMEDAKVTYELGKEFLPMEAQLSRLIGQSLWDVSRSSTGNLVEWFLLRKAYERNELAPNKPDEKELARRRQSYEGGYVKEPERGLWENIVYLDFRSLYPSIIITHNVSPDTLNREGCKEYDVAPQVGHRFCKDFPGFIPSLLGDLLEERQKIKKKMKATIDPIERKLLDYRQRAIKILANSYYGYYGYARARWYCKECAESVTAWGREYITMTIKEIEEKYGFKVIYSDTDGFFATIPGADAETVKKKAMEFLKYINAKLPGALELEYEGFYKRGFFVTKKKYAVIDEEGKITTRGLEIVRRDWSEIAKETQARVLEALLKDGDVEKAVRIVKEVTEKLSKYEVPPEKLVIHEQITRDLKDYKATGPHVAVAKRLAARGVKIRPGTVISYIVLKGSGRIGDRAIPFDEFDPTKHKYDAEYYIENQVLPAVERILRAFGYRKEDLRYQKTRQVGLSAWLKPKGT

SEQ ID NO: 2156 - protein, 774 aa, synthetic construct
MILDTDLITEDGKPVFRIFKKENGEFKIEYDRTFEPYFYALLKDDSAIEEVKKITAERHGTVVTVKRVEKVQKKFLGRPVEVWKLYFTHYQDKPAIPDKIREHPAVIDIYEYDIPFAKRYLIDKGLVPMEGDEELKMLAFDIETLYHEGEEFAEGPILMISYADEEGARVITWKNVDLPYVDVVSTEREMIKRFLRVVKEKDPDVLITYNGDNFDFAYLKKRCEKLGINFALGRDGSEPKIQRMGDRFAVEVKGRIHFDLYPVIRRTINLPTYTLEAVYEAVFGQPKEKVYAEEITTAWETGENLERVARYSMEDAKVTYELGKEFLPMEAQLSRLIGQSLWDVSRSSTGNLVEWFLLRKAYERNELAPNKPDEKELARRRQSYEGGYVKEPERGLWENIVYLDFRSLYPSIIITHNVSPDTLNREGCKEYDVAPQVGHRFCKDFPGFIPSLLGDLLEERQKIKKKMKATIDPIERKLLDYRQRAIKILANSYYGYYGYARARWYCKECAESVTAWGREYITMTIKEIEEKYGFKVIYSDTDGFFATIPGADAETVKKKAMEFLKYINAKLPGALELEYEGFYKRGFFVTKKKYAVIDEEGKITTRGLEIVRRDWSEIAKETQARVLEALLKDGDVEKAVRIVKEVTEKLSKYEVPPEKLVIHEQITRDLKDYKATGPHVAVAKRLAARGVKIRPGTVISYIVLKGSGRIGDRAIPFDEFDPTKHKYDAEYYIENQVLPAVERILRAFGYRKEDLRYQKTRQVGLSAWLKPKGT

SEQ ID NO: 2157 - protein, 774 aa, synthetic construct
MILDTDLITEDGKPVFRIFKKENGEFKIEYDRTFEPYFYALLKDDSAIEEVKKITAERHGTVVTVKRVEKVQKKFLGRPVEVWKLYFTHYQDQPAIRDKIREHPAVIDIYEYDIPFAKRYLIDKGLVPMEGDEELKMLAFDIETLYHEGEEFAEGPILMISYADEEGARVITWKNVDLPYVDVVSTEREMIKRFLRVVKEKDPDVLITYNGDNFDFAYLKKRCEKLGINFALGRDGSEPKIQRMGDRFAVEVKGRIHFDLYPVIRRTINLPTYTLEAVYEAVFGQPKEKVYAEEITTAWETGENLERVARYSMEDAKVTYELGKEFLPMEAQLSRLIGQSLWDVSRSSTGNLVEWFLLRKAYERNELAPNKPDEKELARRRQSYEGGYVKEPERGLWENIVYLDFRSLYPSIIITHNVSPDTLNREGCKEYDVAPQVGHRFCKDFPGFIPSLLGDLLEERQKIKKKMKATIDPIERKLLDYRQRAIKILANSYYGYYGYARARWYCKECAESVTAWGREYITMTIKEIEEKYGFKVIYSDTDGFFATIPGADAETVKKKAMEFLKYINAKLPGALELEYEGFYKRGFFVTKKKYAVIDEEGKITTRGLEIVRRDWSEIAKETQARVLEALLKDGDVEKAVRIVKEVTEKLSKYEVPPEKLVIHEQITRDLKDYKATGPHVAVAKRLAARGVKIRPGTVISYIVLKGSGRIGDRAIPFDEFDPTKHKYDAEYYIENQVLPAVERILRAFGYRKEDLRYQKTRQVGLSAWLKPKGT

SEQ ID NO: 2158 - protein, 774 aa, synthetic construct
MILDTDLITEDGKPVFRIFKKENGEFKIEYDRTFEPYFYALLKDDSAIEEVKKITAERHGTVVTVKRVEKVQKKFLGRPVEVWKLYFTHYQDQPAIADKIREHPAVIDIYEYDIPFAKRYLIDKGLVPMEGDEELKMLAFDIETLYHEGEEFAEGPILMISYADEEGARVITWKNVDLPYVDVVSTEREMIKRFLRVVKEKDPDVLITYNGDNFDFAYLKKRCEKLGINFALGRDGSEPKIQRMGDRFAVEVKGRIHFDLYPVIRRTINLPTYTLEAVYEAVFGQPKEKVYAEEITTAWETGENLERVARYSMEDAKVTYELGKEFLPMEAQLSRLIGQSLWDVSRSSTGNLVEWFLLRKAYERNELAPNKPDEKELARRRQSYEGGYVKEPERGLWENIVYLDFRSLYPSIIITHNVSPDTLNREGCKEYDVAPQVGHRFCKDFPGFIPSLLGDLLEERQKIKKKMKATIDPIERKLLDYRQRAIKILANSYYGYYGYARARWYCKECAESVTAWGREYITMTIKEIEEKYGFKVIYSDTDGFFATIPGADAETVKKKAMEFLKYINAKLPGALELEYEGFYKRGFFVTKKKYAVIDEEGKITTRGLEIVRRDWSEIAKETQARVLEALLKDGDVEKAVRIVKEVTEKLSKYEVPPEKLVIHEQITRDLKDYKATGPHVAVAKRLAARGVKIRPGTVISYIVLKGSGRIGDRAIPFDEFDPTKHKYDAEYYIENQVLPAVERILRAFGYRKEDLRYQKTRQVGLSAWLKPKGT

SEQ ID NO: 2159 - protein, 774 aa, synthetic construct
MILDTDLITEDGKPVFRIFKKENGEFKIEYDRTFEPYFYALLKDDSAIEEVKKITAERHGTVVTVKRVEKVQKKFLGRPVEVWKLYFTHYQDRPAIADKIREHPAVIDIYEYDIPFAKRYLIDKGLVPMEGDEELKMLAFDIETLYHEGEEFAEGPILMISYADEEGARVITWKNVDLPYVDVVSTEREMIKRFLRVVKEKDPDVLITYNGDNFDFAYLKKRCEKLGINFALGRDGSEPKIQRMGDRFAVEVKGRIHFDLYPVIRRTINLPTYTLEAVYEAVFGQPKEKVYAEEITTAWETGENLERVARYSMEDAKVTYELGKEFLPMEAQLSRLIGQSLWDVSRSSTGNLVEWFLLRKAYERNELAPNKPDEKELARRRQSYEGGYVKEPERGLWENIVYLDFRSLYPSIIITHNVSPDTLNREGCKEYDVAPQVGHRFCKDFPGFIPSLLGDLLEERQKIKKKMKATIDPIERKLLDYRQRAIKILANSYYGYYGYARARWYCKECAESVTAWGREYITMTIKEIEEKYGFKVIYSDTDGFFATIPGADAETVKKKAMEFLKYINAKLPGALELEYEGFYKRGFFVTKKKYAVIDEEGKITTRGLEIVRRDWSEIAKETQARVLEALLKDGDVEKAVRIVKEVTEKLSKYEVPPEKLVIHEQITRDLKDYKATGPHVAVAKRLAARGVKIRPGTVISYIVLKGSGRIGDRAIPFDEFDPTKHKYDAEYYIENQVLPAVERILRAFGYRKEDLRYQKTRQVGLSAWLKPKGT

SEQ ID NO: 2160 - protein, 774 aa, synthetic construct
MILDTDLITEDGKPVFRIFKKENGEFKIEYDRTFEPYFYALLKDDSAIEEVKKITAERHGTVVTVKRVEKVQKKFLGRPVEVWKLYFTHPQDVPAIADKIREHPAVIDIYEYDIPFAKRYLIDKGLVPMEGDEELKMLAFDIETLYHEGEEFAEGPILMISYADEEGARVITWKNVDLPYVDVVSTEREMIKRFLRVVKEKDPDVLITYNGDNFDFAYLKKRCEKLGINFALGRDGSEPKIQRMGDRFAVEVKGRIHFDLYPVIRRTINLPTYTLEAVYEAVFGQPKEKVYAEEITTAWETGENLERVARYSMEDAKVTYELGKEFLPMEAQLSRLIGQSLWDVSRSSTGNLVEWFLLRKAYERNELAPNKPDEKELARRRQSYEGGYVKEPERGLWENIVYLDFRSLYPSIIITHNVSPDTLNREGCKEYDVAPQVGHRFCKDFPGFIPSLLGDLLEERQKIKKKMKATIDPIERKLLDYRQRAIKILANSYYGYYGYARARWYCKECAESVTAWGREYITMTIKEIEEKYGFKVIYSDTDGFFATIPGADAETVKKKAMEFLKYINAKLPGALELEYEGFYKRGFFVTKKKYAVIDEEGKITTRGLEIVRRDWSEIAKETQARVLEALLKDGDVEKAVRIVKEVTEKLSKYEVPPEKLVIHEQITRDLKDYKATGPHVAVAKRLAARGVKIRPGTVISYIVLKGSGRIGDRAIPFDEFDPTKHKYDAEYYIENQVLPAVERILRAFGYRKEDLRYQKTRQVGLSAWLKPKGT

SEQ ID NO: 2161 - protein, 774 aa, synthetic construct
MILDTDLITEDGKPVFRIFKKENGEFKIEYDRTFEPYFYALLKDDSAIEEVKKITAERHGTVVTVKRVEKVQKKFLGRPVEVWKLYFTHPQDVPAIFDKIREHPAVIDIYEYDIPFAKRYLIDKGLVPMEGDEELKMLAFDIETLYHEGEEFAEGPILMISYADEEGARVITWKNVDLPYVDVVSTEREMIKRFLRVVKEKDPDVLITYNGDNFDFAYLKKRCEKLGINFALGRDGSEPKIQRMGDRFAVEVKGRIHFDLYPVIRRTINLPTYTLEAVYEAVFGQPKEKVYAEEITTAWETGENLERVARYSMEDAKVTYELGKEFLPMEAQLSRLIGQSLWDVSRSSTGNLVEWFLLRKAYERNELAPNKPDEKELARRRQSYEGGYVKEPERGLWENIVYLDFRSLYPSIIITHNVSPDTLNREGCKEYDVAPQVGHRFCKDFPGFIPSLLGDLLEERQKIKKKMKATIDPIERKLLDYRQRAIKILANSYYGYYGYARARWYCKECAESVTAWGREYITMTIKEIEEKYGFKVIYSDTDGFFATIPGADAETVKKKAMEFLKYINAKLPGALELEYEGFYKRGFFVTKKKYAVIDEEGKITTRGLEIVRRDWSEIAKETQARVLEALLKDGDVEKAVRIVKEVTEKLSKYEVPPEKLVIHEQITRDLKDYKATGPHVAVAKRLAARGVKIRPGTVISYIVLKGSGRIGDRAIPFDEFDPTKHKYDAEYYIENQVLPAVERILRAFGYRKEDLRYQKTRQVGLSAWLKPKGT

SEQ ID NO: 2162 - protein, 774 aa, synthetic construct
MILDTDLITEDGKPVFRIFKKENGEFKIEYDRTFEPYFYALLKDDSAIEEVKKITAERHGTVVTVKRVEKVQKKFLGRPVEVWKLYFTHPQDVPAIWDKIREHPAVIDIYEYDIPFAKRYLIDKGLVPMEGDEELKMLAFDIETLYHEGEEFAEGPILMISYADEEGARVITWKNVDLPYVDVVSTEREMIKRFLRVVKEKDPDVLITYNGDNFDFAYLKKRCEKLGINFALGRDGSEPKIQRMGDRFAVEVKGRIHFDLYPVIRRTINLPTYTLEAVYEAVFGQPKEKVYAEEITTAWETGENLERVARYSMEDAKVTYELGKEFLPMEAQLSRLIGQSLWDVSRSSTGNLVEWFLLRKAYERNELAPNKPDEKELARRRQSYEGGYVKEPERGLWENIVYLDFRSLYPSIIITHNVSPDTLNREGCKEYDVAPQVGHRFCKDFPGFIPSLLGDLLEERQKIKKKMKATIDPIERKLLDYRQRAIKILANSYYGYYGYARARWYCKECAESVTAWGREYITMTIKEIEEKYGFKVIYSDTDGFFATIPGADAETVKKKAMEFLKYINAKLPGALELEYEGFYKRGFFVTKKKYAVIDEEGKITTRGLEIVRRDWSEIAKETQARVLEALLKDGDVEKAVRIVKEVTEKLSKYEVPPEKLVIHEQITRDLKDYKATGPHVAVAKRLAARGVKIRPGTVISYIVLKGSGRIGDRAIPFDEFDPTKHKYDAEYYIENQVLPAVERILRAFGYRKEDLRYQKTRQVGLSAWLKPKGT

SEQ ID NO: 2163 - protein, 774 aa, synthetic construct
MILDTDLITEDGKPVFRIFKKENGEFKIEYDRTFEPYFYALLKDDSAIEEVKKITAERHGTVVTVKRVEKVQKKFLGRPVEVWKLYFTHPQDEPAIADKIREHPAVIDIYEYDIPFAKRYLIDKGLVPMEGDEELKMLAFDIETLYHEGEEFAEGPILMISYADEEGARVITWKNVDLPYVDVVSTEREMIKRFLRVVKEKDPDVLITYNGDNFDFAYLKKRCEKLGINFALGRDGSEPKIQRMGDRFAVEVKGRIHFDLYPVIRRTINLPTYTLEAVYEAVFGQPKEKVYAEEITTAWETGENLERVARYSMEDAKVTYELGKEFLPMEAQLSRLIGQSLWDVSRSSTGNLVEWFLLRKAYERNELAPNKPDEKELARRRQSYEGGYVKEPERGLWENIVYLDFRSLYPSIIITHNVSPDTLNREGCKEYDVAPQVGHRFCKDFPGFIPSLLGDLLEERQKIKKKMKATIDPIERKLLDYRQRAIKILANSYYGYYGYARARWYCKECAESVTAWGREYITMTIKEIEEKYGFKVIYSDTDGFFATIPGADAETVKKKAMEFLKYINAKLPGALELEYEGFYKRGFFVTKKKYAVIDEEGKITTRGLEIVRRDWSEIAKETQARVLEALLKDGDVEKAVRIVKEVTEKLSKYEVPPEKLVIHEQITRDLKDYKATGPHVAVAKRLAARGVKIRPGTVISYIVLKGSGRIGDRAIPFDEFDPTKHKYDAEYYIENQVLPAVERILRAFGYRKEDLRYQKTRQVGLSAWLKPKGT

SEQ ID NO: 2164 - protein, 774 aa, synthetic construct
MILDTDLITEDGKPVFRIFKKENGEFKIEYDRTFEPYFYALLKDDSAIEEVKKITAERHGTVVTVKRVEKVQKKFLGRPVEVWKLYFTHPQDIPAIRDKIREHPAVIDIYEYDIPFAKRYLIDKGLVPMEGDEELKMLAFDIETLYHEGEEFAEGPILMISYADEEGARVITWKNVDLPYVDVVSTEREMIKRFLRVVKEKDPDVLITYNGDNFDFAYLKKRCEKLGINFALGRDGSEPKIQRMGDRFAVEVKGRIHFDLYPVIRRTINLPTYTLEAVYEAVFGQPKEKVYAEEITTAWETGENLERVARYSMEDAKVTYELGKEFLPMEAQLSRLIGQSLWDVSRSSTGNLVEWFLLRKAYERNELAPNKPDEKELARRRQSYEGGYVKEPERGLWENIVYLDFRSLYPSIIITHNVSPDTLNREGCKEYDVAPQVGHRFCKDFPGFIPSLLGDLLEERQKIKKKMKATIDPIERKLLDYRQRAIKILANSYYGYYGYARARWYCKECAESVTAWGREYITMTIKEIEEKYGFKVIYSDTDGFFATIPGADAETVKKKAMEFLKYINAKLPGALELEYEGFYKRGFFVTKKKYAVIDEEGKITTRGLEIVRRDWSEIAKETQARVLEALLKDGDVEKAVRIVKEVTEKLSKYEVPPEKLVIHEQITRDLKDYKATGPHVAVAKRLAARGVKIRPGTVISYIVLKGSGRIGDRAIPFDEFDPTKHKYDAEYYIENQVLPAVERILRAFGYRKEDLRYQKTRQVGLSAWLKPKGT

SEQ ID NO: 2165 - protein, 774 aa, synthetic construct
MILDTDLITEDGKPVFRIFKKENGEFKIEYDRTFEPYFYALLKDDSAIEEVKKITAERHGTVVTVKRVEKVQKKFLGRPVEVWKLYFTHPQDIPAIADKIREHPAVIDIYEYDIPFAKRYLIDKGLVPMEGDEELKMLAFDIETLYHEGEEFAEGPILMISYADEEGARVITWKNVDLPYVDVVSTEREMIKRFLRVVKEKDPDVLITYNGDNFDFAYLKKRCEKLGINFALGRDGSEPKIQRMGDRFAVEVKGRIHFDLYPVIRRTINLPTYTLEAVYEAVFGQPKEKVYAEEITTAWETGENLERVARYSMEDAKVTYELGKEFLPMEAQLSRLIGQSLWDVSRSSTGNLVEWFLLRKAYERNELAPNKPDEKELARRRQSYEGGYVKEPERGLWENIVYLDFRSLYPSIIITHNVSPDTLNREGCKEYDVAPQVGHRFCKDFPGFIPSLLGDLLEERQKIKKKMKATIDPIERKLLDYRQRAIKILANSYYGYYGYARARWYCKECAESVTAWGREYITMTIKEIEEKYGFKVIYSDTDGFFATIPGADAETVKKKAMEFLKYINAKLPGALELEYEGFYKRGFFVTKKKYAVIDEEGKITTRGLEIVRRDWSEIAKETQARVLEALLKDGDVEKAVRIVKEVTEKLSKYEVPPEKLVIHEQITRDLKDYKATGPHVAVAKRLAARGVKIRPGTVISYIVLKGSGRIGDRAIPFDEFDPTKHKYDAEYYIENQVLPAVERILRAFGYRKEDLRYQKTRQVGLSAWLKPKGT

SEQ ID NO: 2166 - protein, 774 aa, synthetic construct
MILDTDLITEDGKPVFRIFKKENGEFKIEYDRTFEPYFYALLKDDSAIEEVKKITAERHGTVVTVKRVEKVQKKFLGRPVEVWKLYFTHPQDIPAIFDKIREHPAVIDIYEYDIPFAKRYLIDKGLVPMEGDEELKMLAFDIETLYHEGEEFAEGPILMISYADEEGARVITWKNVDLPYVDVVSTEREMIKRFLRVVKEKDPDVLITYNGDNFDFAYLKKRCEKLGINFALGRDGSEPKIQRMGDRFAVEVKGRIHFDLYPVIRRTINLPTYTLEAVYEAVFGQPKEKVYAEEITTAWETGENLERVARYSMEDAKVTYELGKEFLPMEAQLSRLIGQSLWDVSRSSTGNLVEWFLLRKAYERNELAPNKPDEKELARRRQSYEGGYVKEPERGLWENIVYLDFRSLYPSIIITHNVSPDTLNREGCKEYDVAPQVGHRFCKDFPGFIPSLLGDLLEERQKIKKKMKATIDPIERKLLDYRQRAIKILANSYYGYYGYARARWYCKECAESVTAWGREYITMTIKEIEEKYGFKVIYSDTDGFFATIPGADAETVKKKAMEFLKYINAKLPGALELEYEGFYKRGFFVTKKKYAVIDEEGKITTRGLEIVRRDWSEIAKETQARVLEALLKDGDVEKAVRIVKEVTEKLSKYEVPPEKLVIHEQITRDLKDYKATGPHVAVAKRLAARGVKIRPGTVISYIVLKGSGRIGDRAIPFDEFDPTKHKYDAEYYIENQVLPAVERILRAFGYRKEDLRYQKTRQVGLSAWLKPKGT

SEQ ID NO: 2167 - protein, 774 aa, synthetic construct
MILDTDLITEDGKPVFRIFKKENGEFKIEYDRTFEPYFYALLKDDSAIEEVKKITAERHGTVVTVKRVEKVQKKFLGRPVEVWKLYFTHPQDIPAIHDKIREHPAVIDIYEYDIPFAKRYLIDKGLVPMEGDEELKMLAFDIETLYHEGEEFAEGPILMISYADEEGARVITWKNVDLPYVDVVSTEREMIKRFLRVVKEKDPDVLITYNGDNFDFAYLKKRCEKLGINFALGRDGSEPKIQRMGDRFAVEVKGRIHFDLYPVIRRTINLPTYTLEAVYEAVFGQPKEKVYAEEITTAWETGENLERVARYSMEDAKVTYELGKEFLPMEAQLSRLIGQSLWDVSRSSTGNLVEWFLLRKAYERNELAPNKPDEKELARRRQSYEGGYVKEPERGLWENIVYLDFRSLYPSIIITHNVSPDTLNREGCKEYDVAPQVGHRFCKDFPGFIPSLLGDLLEERQKIKKKMKATIDPIERKLLDYRQRAIKILANSYYGYYGYARARWYCKECAESVTAWGREYITMTIKEIEEKYGFKVIYSDTDGFFATIPGADAETVKKKAMEFLKYINAKLPGALELEYEGFYKRGFFVTKKKYAVIDEEGKITTRGLEIVRRDWSEIAKETQARVLEALLKDGDVEKAVRIVKEVTEKLSKYEVPPEKLVIHEQITRDLKDYKATGPHVAVAKRLAARGVKIRPGTVISYIVLKGSGRIGDRAIPFDEFDPTKHKYDAEYYIENQVLPAVERILRAFGYRKEDLRYQKTRQVGLSAWLKPKGT

SEQ ID NO: 2168 - protein, 774 aa, synthetic construct
MILDTDLITEDGKPVFRIFKKENGEFKIEYDRTFEPYFYALLKDDSAIEEVKKITAERHGTVVTVKRVEKVQKKFLGRPVEVWKLYFTHPQDIPAIWDKIREHPAVIDIYEYDIPFAKRYLIDKGLVPMEGDEELKMLAFDIETLYHEGEEFAEGPILMISYADEEGARVITWKNVDLPYVDVVSTEREMIKRFLRVVKEKDPDVLITYNGDNFDFAYLKKRCEKLGINFALGRDGSEPKIQRMGDRFAVEVKGRIHFDLYPVIRRTINLPTYTLEAVYEAVFGQPKEKVYAEEITTAWETGENLERVARYSMEDAKVTYELGKEFLPMEAQLSRLIGQSLWDVSRSSTGNLVEWFLLRKAYERNELAPNKPDEKELARRRQSYEGGYVKEPERGLWENIVYLDFRSLYPSIIITHNVSPDTLNREGCKEYDVAPQVGHRFCKDFPGFIPSLLGDLLEERQKIKKKMKATIDPIERKLLDYRQRAIKILANSYYGYYGYARARWYCKECAESVTAWGREYITMTIKEIEEKYGFKVIYSDTDGFFATIPGADAETVKKKAMEFLKYINAKLPGALELEYEGFYKRGFFVTKKKYAVIDEEGKITTRGLEIVRRDWSEIAKETQARVLEALLKDGDVEKAVRIVKEVTEKLSKYEVPPEKLVIHEQITRDLKDYKATGPHVAVAKRLAARGVKIRPGTVISYIVLKGSGRIGDRAIPFDEFDPTKHKYDAEYYIENQVLPAVERILRAFGYRKEDLRYQKTRQVGLSAWLKPKGT

SEQ ID NO: 2169 - protein, 774 aa, synthetic construct
MILDTDLITEDGKPVFRIFKKENGEFKIEYDRTFEPYFYALLKDDSAIEEVKKITAERHGTVVTVKRVEKVQKKFLGRPVEVWKLYFTHPQDKPAIRDKIREHPAVIDIYEYDIPFAKRYLIDKGLVPMEGDEELKMLAFDIETLYHEGEEFAEGPILMISYADEEGARVITWKNVDLPYVDVVSTEREMIKRFLRVVKEKDPDVLITYNGDNFDFAYLKKRCEKLGINFALGRDGSEPKIQRMGDRFAVEVKGRIHFDLYPVIRRTINLPTYTLEAVYEAVFGQPKEKVYAEEITTAWETGENLERVARYSMEDAKVTYELGKEFLPMEAQLSRLIGQSLWDVSRSSTGNLVEWFLLRKAYERNELAPNKPDEKELARRRQSYEGGYVKEPERGLWENIVYLDFRSLYPSIIITHNVSPDTLNREGCKEYDVAPQVGHRFCKDFPGFIPSLLGDLLEERQKIKKKMKATIDPIERKLLDYRQRAIKILANSYYGYYGYARARWYCKECAESVTAWGREYITMTIKEIEEKYGFKVIYSDTDGFFATIPGADAETVKKKAMEFLKYINAKLPGALELEYEGFYKRGFFVTKKKYAVIDEEGKITTRGLEIVRRDWSEIAKETQARVLEALLKDGDVEKAVRIVKEVTEKLSKYEVPPEKLVIHEQITRDLKDYKATGPHVAVAKRLAARGVKIRPGTVISYIVLKGSGRIGDRAIPFDEFDPTKHKYDAEYYIENQVLPAVERILRAFGYRKEDLRYQKTRQVGLSAWLKPKGT

SEQ ID NO: 2170 - protein, 774 aa, synthetic construct
MILDTDLITEDGKPVFRIFKKENGEFKIEYDRTFEPYFYALLKDDSAIEEVKKITAERHGTVVTVKRVEKVQKKFLGRPVEVWKLYFTHPQDKPAIADKIREHPAVIDIYEYDIPFAKRYLIDKGLVPMEGDEELKMLAFDIETLYHEGEEFAEGPILMISYADEEGARVITWKNVDLPYVDVVSTEREMIKRFLRVVKEKDPDVLITYNGDNFDFAYLKKRCEKLGINFALGRDGSEPKIQRMGDRFAVEVKGRIHFDLYPVIRRTINLPTYTLEAVYEAVFGQPKEKVYAEEITTAWETGENLERVARYSMEDAKVTYELGKEFLPMEAQLSRLIGQSLWDVSRSSTGNLVEWFLLRKAYERNELAPNKPDEKELARRRQSYEGGYVKEPERGLWENIVYLDFRSLYPSIIITHNVSPDTLNREGCKEYDVAPQVGHRFCKDFPGFIPSLLGDLLEERQKIKKKMKATIDPIERKLLDYRQRAIKILANSYYGYYGYARARWYCKECAESVTAWGREYITMTIKEIEEKYGFKVIYSDTDGFFATIPGADAETVKKKAMEFLKYINAKLPGALELEYEGFYKRGFFVTKKKYAVIDEEGKITTRGLEIVRRDWSEIAKETQARVLEALLKDGDVEKAVRIVKEVTEKLSKYEVPPEKLVIHEQITRDLKDYKATGPHVAVAKRLAARGVKIRPGTVISYIVLKGSGRIGDRAIPFDEFDPTKHKYDAEYYIENQVLPAVERILRAFGYRKEDLRYQKTRQVGLSAWLKPKGT

SEQ ID NO: 2171 - protein, 774 aa, synthetic construct
MILDTDLITEDGKPVFRIFKKENGEFKIEYDRTFEPYFYALLKDDSAIEEVKKITAERHGTVVTVKRVEKVQKKFLGRPVEVWKLYFTHPQDKPAIFDKIREHPAVIDIYEYDIPFAKRYLIDKGLVPMEGDEELKMLAFDIETLYHEGEEFAEGPILMISYADEEGARVITWKNVDLPYVDVVSTEREMIKRFLRVVKEKDPDVLITYNGDNFDFAYLKKRCEKLGINFALGRDGSEPKIQRMGDRFAVEVKGRIHFDLYPVIRRTINLPTYTLEAVYEAVFGQPKEKVYAEEITTAWETGENLERVARYSMEDAKVTYELGKEFLPMEAQLSRLIGQSLWDVSRSSTGNLVEWFLLRKAYERNELAPNKPDEKELARRRQSYEGGYVKEPERGLWENIVYLDFRSLYPSIIITHNVSPDTLNREGCKEYDVAPQVGHRFCKDFPGFIPSLLGDLLEERQKIKKKMKATIDPIERKLLDYRQRAIKILANSYYGYYGYARARWYCKECAESVTAWGREYITMTIKEIEEKYGFKVIYSDTDGFFATIPGADAETVKKKAMEFLKYINAKLPGALELEYEGFYKRGFFVTKKKYAVIDEEGKITTRGLEIVRRDWSEIAKETQARVLEALLKDGDVEKAVRIVKEVTEKLSKYEVPPEKLVIHEQITRDLKDYKATGPHVAVAKRLAARGVKIRPGTVISYIVLKGSGRIGDRAIPFDEFDPTKHKYDAEYYIENQVLPAVERILRAFGYRKEDLRYQKTRQVGLSAWLKPKGT

SEQ ID NO: 2172 - protein, 774 aa, synthetic construct
MILDTDLITEDGKPVFRIFKKENGEFKIEYDRTFEPYFYALLKDDSAIEEVKKITAERHGTVVTVKRVEKVQKKFLGRPVEVWKLYFTHPQDKPAIHDKIREHPAVIDIYEYDIPFAKRYLIDKGLVPMEGDEELKMLAFDIETLYHEGEEFAEGPILMISYADEEGARVITWKNVDLPYVDVVSTEREMIKRFLRVVKEKDPDVLITYNGDNFDFAYLKKRCEKLGINFALGRDGSEPKIQRMGDRFAVEVKGRIHFDLYPVIRRTINLPTYTLEAVYEAVFGQPKEKVYAEEITTAWETGENLERVARYSMEDAKVTYELGKEFLPMEAQLSRLIGQSLWDVSRSSTGNLVEWFLLRKAYERNELAPNKPDEKELARRRQSYEGGYVKEPERGLWENIVYLDFRSLYPSIIITHNVSPDTLNREGCKEYDVAPQVGHRFCKDFPGFIPSLLGDLLEERQKIKKKMKATIDPIERKLLDYRQRAIKILANSYYGYYGYARARWYCKECAESVTAWGREYITMTIKEIEEKYGFKVIYSDTDGFFATIPGADAETVKKKAMEFLKYINAKLPGALELEYEGFYKRGFFVTKKKYAVIDEEGKITTRGLEIVRRDWSEIAKETQARVLEALLKDGDVEKAVRIVKEVTEKLSKYEVPPEKLVIHEQITRDLKDYKATGPHVAVAKRLAARGVKIRPGTVISYIVLKGSGRIGDRAIPFDEFDPTKHKYDAEYYIENQVLPAVERILRAFGYRKEDLRYQKTRQVGLSAWLKPKGT

SEQ ID NO: 2173 - protein, 774 aa, synthetic construct
MILDTDLITEDGKPVFRIFKKENGEFKIEYDRTFEPYFYALLKDDSAIEEVKKITAERHGTVVTVKRVEKVQKKFLGRPVEVWKLYFTHPQDQPAIRDKIREHPAVIDIYEYDIPFAKRYLIDKGLVPMEGDEELKMLAFDIETLYHEGEEFAEGPILMISYADEEGARVITWKNVDLPYVDVVSTEREMIKRFLRVVKEKDPDVLITYNGDNFDFAYLKKRCEKLGINFALGRDGSEPKIQRMGDRFAVEVKGRIHFDLYPVIRRTINLPTYTLEAVYEAVFGQPKEKVYAEEITTAWETGENLERVARYSMEDAKVTYELGKEFLPMEAQLSRLIGQSLWDVSRSSTGNLVEWFLLRKAYERNELAPNKPDEKELARRRQSYEGGYVKEPERGLWENIVYLDFRSLYPSIIITHNVSPDTLNREGCKEYDVAPQVGHRFCKDFPGFIPSLLGDLLEERQKIKKKMKATIDPIERKLLDYRQRAIKILANSYYGYYGYARARWYCKECAESVTAWGREYITMTIKEIEEKYGFKVIYSDTDGFFATIPGADAETVKKKAMEFLKYINAKLPGALELEYEGFYKRGFFVTKKKYAVIDEEGKITTRGLEIVRRDWSEIAKETQARVLEALLKDGDVEKAVRIVKEVTEKLSKYEVPPEKLVIHEQITRDLKDYKATGPHVAVAKRLAARGVKIRPGTVISYIVLKGSGRIGDRAIPFDEFDPTKHKYDAEYYIENQVLPAVERILRAFGYRKEDLRYQKTRQVGLSAWLKPKGT

SEQ ID NO: 2174 - protein, 774 aa, synthetic construct
MILDTDLITEDGKPVFRIFKKENGEFKIEYDRTFEPYFYALLKDDSAIEEVKKITAERHGTVVTVKRVEKVQKKFLGRPVEVWKLYFTHPQDQPAIADKIREHPAVIDIYEYDIPFAKRYLIDKGLVPMEGDEELKMLAFDIETLYHEGEEFAEGPILMISYADEEGARVITWKNVDLPYVDVVSTEREMIKRFLRVVKEKDPDVLITYNGDNFDFAYLKKRCEKLGINFALGRDGSEPKIQRMGDRFAVEVKGRIHFDLYPVIRRTINLPTYTLEAVYEAVFGQPKEKVYAEEITTAWETGENLERVARYSMEDAKVTYELGKEFLPMEAQLSRLIGQSLWDVSRSSTGNLVEWFLLRKAYERNELAPNKPDEKELARRRQSYEGGYVKEPERGLWENIVYLDFRSLYPSIIITHNVSPDTLNREGCKEYDVAPQVGHRFCKDFPGFIPSLLGDLLEERQKIKKKMKATIDPIERKLLDYRQRAIKILANSYYGYYGYARARWYCKECAESVTAWGREYITMTIKEIEEKYGFKVIYSDTDGFFATIPGADAETVKKKAMEFLKYINAKLPGALELEYEGFYKRGFFVTKKKYAVIDEEGKITTRGLEIVRRDWSEIAKETQARVLEALLKDGDVEKAVRIVKEVTEKLSKYEVPPEKLVIHEQITRDLKDYKATGPHVAVAKRLAARGVKIRPGTVISYIVLKGSGRIGDRAIPFDEFDPTKHKYDAEYYIENQVLPAVERILRAFGYRKEDLRYQKTRQVGLSAWLKPKGT

SEQ ID NO: 2175 - protein, 774 aa, synthetic construct
MILDTDLITEDGKPVFRIFKKENGEFKIEYDRTFEPYFYALLKDDSAIEEVKKITAERHGTVVTVKRVEKVQKKFLGRPVEVWKLYFTHPQDQPAIFDKIREHPAVIDIYEYDIPFAKRYLIDKGLVPMEGDEELKMLAFDIETLYHEGEEFAEGPILMISYADEEGARVITWKNVDLPYVDVVSTEREMIKRFLRVVKEKDPDVLITYNGDNFDFAYLKKRCEKLGINFALGRDGSEPKIQRMGDRFAVEVKGRIHFDLYPVIRRTINLPTYTLEAVYEAVFGQPKEKVYAEEITTAWETGENLERVARYSMEDAKVTYELGKEFLPMEAQLSRLIGQSLWDVSRSSTGNLVEWFLLRKAYERNELAPNKPDEKELARRRQSYEGGYVKEPERGLWENIVYLDFRSLYPSIIITHNVSPDTLNREGCKEYDVAPQVGHRFCKDFPGFIPSLLGDLLEERQKIKKKMKATIDPIERKLLDYRQRAIKILANSYYGYYGYARARWYCKECAESVTAWGREYITMTIKEIEEKYGFKVIYSDTDGFFATIPGADAETVKKKAMEFLKYINAKLPGALELEYEGFYKRGFFVTKKKYAVIDEEGKITTRGLEIVRRDWSEIAKETQARVLEALLKDGDVEKAVRIVKEVTEKLSKYEVPPEKLVIHEQITRDLKDYKATGPHVAVAKRLAARGVKIRPGTVISYIVLKGSGRIGDRAIPFDEFDPTKHKYDAEYYIENQVLPAVERILRAFGYRKEDLRYQKTRQVGLSAWLKPKGT

SEQ ID NO: 2176 - protein, 774 aa, synthetic construct
MILDTDLITEDGKPVFRIFKKENGEFKIEYDRTFEPYFYALLKDDSAIEEVKKITAERHGTVVTVKRVEKVQKKFLGRPVEVWKLYFTHPQDQPAIHDKIREHPAVIDIYEYDIPFAKRYLIDKGLVPMEGDEELKMLAFDIETLYHEGEEFAEGPILMISYADEEGARVITWKNVDLPYVDVVSTEREMIKRFLRVVKEKDPDVLITYNGDNFDFAYLKKRCEKLGINFALGRDGSEPKIQRMGDRFAVEVKGRIHFDLYPVIRRTINLPTYTLEAVYEAVFGQPKEKVYAEEITTAWETGENLERVARYSMEDAKVTYELGKEFLPMEAQLSRLIGQSLWDVSRSSTGNLVEWFLLRKAYERNELAPNKPDEKELARRRQSYEGGYVKEPERGLWENIVYLDFRSLYPSIIITHNVSPDTLNREGCKEYDVAPQVGHRFCKDFPGFIPSLLGDLLEERQKIKKKMKATIDPIERKLLDYRQRAIKILANSYYGYYGYARARWYCKECAESVTAWGREYITMTIKEIEEKYGFKVIYSDTDGFFATIPGADAETVKKKAMEFLKYINAKLPGALELEYEGFYKRGFFVTKKKYAVIDEEGKITTRGLEIVRRDWSEIAKETQARVLEALLKDGDVEKAVRIVKEVTEKLSKYEVPPEKLVIHEQITRDLKDYKATGPHVAVAKRLAARGVKIRPGTVISYIVLKGSGRIGDRAIPFDEFDPTKHKYDAEYYIENQVLPAVERILRAFGYRKEDLRYQKTRQVGLSAWLKPKGT

SEQ ID NO: 2177 - protein, 774 aa, synthetic construct
MILDTDLITEDGKPVFRIFKKENGEFKIEYDRTFEPYFYALLKDDSAIEEVKKITAERHGTVVTVKRVEKVQKKFLGRPVEVWKLYFTHPQDQPAIWDKIREHPAVIDIYEYDIPFAKRYLIDKGLVPMEGDEELKMLAFDIETLYHEGEEFAEGPILMISYADEEGARVITWKNVDLPYVDVVSTEREMIKRFLRVVKEKDPDVLITYNGDNFDFAYLKKRCEKLGINFALGRDGSEPKIQRMGDRFAVEVKGRIHFDLYPVIRRTINLPTYTLEAVYEAVFGQPKEKVYAEEITTAWETGENLERVARYSMEDAKVTYELGKEFLPMEAQLSRLIGQSLWDVSRSSTGNLVEWFLLRKAYERNELAPNKPDEKELARRRQSYEGGYVKEPERGLWENIVYLDFRSLYPSIIITHNVSPDTLNREGCKEYDVAPQVGHRFCKDFPGFIPSLLGDLLEERQKIKKKMKATIDPIERKLLDYRQRAIKILANSYYGYYGYARARWYCKECAESVTAWGREYITMTIKEIEEKYGFKVIYSDTDGFFATIPGADAETVKKKAMEFLKYINAKLPGALELEYEGFYKRGFFVTKKKYAVIDEEGKITTRGLEIVRRDWSEIAKETQARVLEALLKDGDVEKAVRIVKEVTEKLSKYEVPPEKLVIHEQITRDLKDYKATGPHVAVAKRLAARGVKIRPGTVISYIVLKGSGRIGDRAIPFDEFDPTKHKYDAEYYIENQVLPAVERILRAFGYRKEDLRYQKTRQVGLSAWLKPKGT

SEQ ID NO: 2178 - protein, 774 aa, synthetic construct
MILDTDLITEDGKPVFRIFKKENGEFKIEYDRTFEPYFYALLKDDSAIEEVKKITAERHGTVVTVKRVEKVQKKFLGRPVEVWKLYFTHPQDRPAIRDKIREHPAVIDIYEYDIPFAKRYLIDKGLVPMEGDEELKMLAFDIETLYHEGEEFAEGPILMISYADEEGARVITWKNVDLPYVDVVSTEREMIKRFLRVVKEKDPDVLITYNGDNFDFAYLKKRCEKLGINFALGRDGSEPKIQRMGDRFAVEVKGRIHFDLYPVIRRTINLPTYTLEAVYEAVFGQPKEKVYAEEITTAWETGENLERVARYSMEDAKVTYELGKEFLPMEAQLSRLIGQSLWDVSRSSTGNLVEWFLLRKAYERNELAPNKPDEKELARRRQSYEGGYVKEPERGLWENIVYLDFRSLYPSIIITHNVSPDTLNREGCKEYDVAPQVGHRFCKDFPGFIPSLLGDLLEERQKIKKKMKATIDPIERKLLDYRQRAIKILANSYYGYYGYARARWYCKECAESVTAWGREYITMTIKEIEEKYGFKVIYSDTDGFFATIPGADAETVKKKAMEFLKYINAKLPGALELEYEGFYKRGFFVTKKKYAVIDEEGKITTRGLEIVRRDWSEIAKETQARVLEALLKDGDVEKAVRIVKEVTEKLSKYEVPPEKLVIHEQITRDLKDYKATGPHVAVAKRLAARGVKIRPGTVISYIVLKGSGRIGDRAIPFDEFDPTKHKYDAEYYIENQVLPAVERILRAFGYRKEDLRYQKTRQVGLSAWLKPKGT

SEQ ID NO: 2179 - protein, 774 aa, synthetic construct
MILDTDLITEDGKPVFRIFKKENGEFKIEYDRTFEPYFYALLKDDSAIEEVKKITAERHGTVVTVKRVEKVQKKFLGRPVEVWKLYFTHPQDRPAIADKIREHPAVIDIYEYDIPFAKRYLIDKGLVPMEGDEELKMLAFDIETLYHEGEEFAEGPILMISYADEEGARVITWKNVDLPYVDVVSTEREMIKRFLRVVKEKDPDVLITYNGDNFDFAYLKKRCEKLGINFALGRDGSEPKIQRMGDRFAVEVKGRIHFDLYPVIRRTINLPTYTLEAVYEAVFGQPKEKVYAEEITTAWETGENLERVARYSMEDAKVTYELGKEFLPMEAQLSRLIGQSLWDVSRSSTGNLVEWFLLRKAYERNELAPNKPDEKELARRRQSYEGGYVKEPERGLWENIVYLDFRSLYPSIIITHNVSPDTLNREGCKEYDVAPQVGHRFCKDFPGFIPSLLGDLLEERQKIKKKMKATIDPIERKLLDYRQRAIKILANSYYGYYGYARARWYCKECAESVTAWGREYITMTIKEIEEKYGFKVIYSDTDGFFATIPGADAETVKKKAMEFLKYINAKLPGALELEYEGFYKRGFFVTKKKYAVIDEEGKITTRGLEIVRRDWSEIAKETQARVLEALLKDGDVEKAVRIVKEVTEKLSKYEVPPEKLVIHEQITRDLKDYKATGPHVAVAKRLAARGVKIRPGTVISYIVLKGSGRIGDRAIPFDEFDPTKHKYDAEYYIENQVLPAVERILRAFGYRKEDLRYQKTRQVGLSAWLKPKGT

SEQ ID NO: 2180 - protein, 774 aa, synthetic construct
MILDTDLITEDGKPVFRIFKKENGEFKIEYDRTFEPYFYALLKDDSAIEEVKKITAERHGTVVTVKRVEKVQKKFLGRPVEVWKLYFTHPQDRPAIADKIREHPAVIDIYEYDIPFAKQYLIDKGLVPMEGDEELKMLAFDIETLYHEGEEFAEGPILMISYADEEGARVITWKNVDLPYVDVVSTEREMIKRFLRVVKEKDPDVLITYNGDNFDFAYLKKRCEKLGINFALGRDGSEPKIQRMGDRFAVEVKGRIHFDLYPVIRRTINLPTYTLEAVYEAVFGQPKEKVYAEEITTAWETGENLERVARYSMEDAKVTYELGKEFLPMEAQLSRLIGQSLWDVSRSSTGNLVEWFLLRKAYERNELAPNKPDEKELARRRQSYEGGYVKEPERGLWENIVYLDFRSLYPSIIITHNVSPDTLNREGCKEYDVAPQVGHRFCKDFPGFIPSLLGDLLEERQKIKKKMKATIDPIERKLLDYRQRAIKILANSYYGYYGYARARWYCKECAESVTAWGREYITMTIKEIEEKYGFKVIYSDTDGFFATIPGADAETVKKKAMEFLKYINAKLPGALELEYEGFYKRGFFVTKKKYAVIDEEGKITTRGLEIVRRDWSEIAKETQARVLEALLKDGDVEKAVRIVKEVTEKLSKYEVPPEKLVIHEQITRDLKDYKATGPHVAVAKRLAARGVKIRPGTVISYIVLKGSGRIGDRAIPFDEFDPTKHKYDAEYYIENQVLPAVERILRAFGYRKEDLRYQKTRQVGLSAWLKPKGT

SEQ ID NO: 2181 - protein, 774 aa, synthetic construct
MILDTDLITEDGKPVFRIFKKENGEFKIEYDRTFEPYFYALLKDDSAIEEVKKITAERHGTVVTVKRVEKVQKKFLGRPVEVWKLYFTHPQDRPAIFDKIREHPAVIDIYEYDIPFAKRYLIDKGLVPMEGDEELKMLAFDIETLYHEGEEFAEGPILMISYADEEGARVITWKNVDLPYVDVVSTEREMIKRFLRVVKEKDPDVLITYNGDNFDFAYLKKRCEKLGINFALGRDGSEPKIQRMGDRFAVEVKGRIHFDLYPVIRRTINLPTYTLEAVYEAVFGQPKEKVYAEEITTAWETGENLERVARYSMEDAKVTYELGKEFLPMEAQLSRLIGQSLWDVSRSSTGNLVEWFLLRKAYERNELAPNKPDEKELARRRQSYEGGYVKEPERGLWENIVYLDFRSLYPSIIITHNVSPDTLNREGCKEYDVAPQVGHRFCKDFPGFIPSLLGDLLEERQKIKKKMKATIDPIERKLLDYRQRAIKILANSYYGYYGYARARWYCKECAESVTAWGREYITMTIKEIEEKYGFKVIYSDTDGFFATIPGADAETVKKKAMEFLKYINAKLPGALELEYEGFYKRGFFVTKKKYAVIDEEGKITTRGLEIVRRDWSEIAKETQARVLEALLKDGDVEKAVRIVKEVTEKLSKYEVPPEKLVIHEQITRDLKDYKATGPHVAVAKRLAARGVKIRPGTVISYIVLKGSGRIGDRAIPFDEFDPTKHKYDAEYYIENQVLPAVERILRAFGYRKEDLRYQKTRQVGLSAWLKPKGT

SEQ ID NO: 2182 - protein, 774 aa, synthetic construct
MILDTDLITEDGKPVFRIFKKENGEFKIEYDRTFEPYFYALLKDDSAIEEVKKITAERHGTVVTVKRVEKVQKKFLGRPVEVWKLYFTHPQDRPAIHDKIREHPAVIDIYEYDIPFAKRYLIDKGLVPMEGDEELKMLAFDIETLYHEGEEFAEGPILMISYADEEGARVITWKNVDLPYVDVVSTEREMIKRFLRVVKEKDPDVLITYNGDNFDFAYLKKRCEKLGINFALGRDGSEPKIQRMGDRFAVEVKGRIHFDLYPVIRRTINLPTYTLEAVYEAVFGQPKEKVYAEEITTAWETGENLERVARYSMEDAKVTYELGKEFLPMEAQLSRLIGQSLWDVSRSSTGNLVEWFLLRKAYERNELAPNKPDEKELARRRQSYEGGYVKEPERGLWENIVYLDFRSLYPSIIITHNVSPDTLNREGCKEYDVAPQVGHRFCKDFPGFIPSLLGDLLEERQKIKKKMKATIDPIERKLLDYRQRAIKILANSYYGYYGYARARWYCKECAESVTAWGREYITMTIKEIEEKYGFKVIYSDTDGFFATIPGADAETVKKKAMEFLKYINAKLPGALELEYEGFYKRGFFVTKKKYAVIDEEGKITTRGLEIVRRDWSEIAKETQARVLEALLKDGDVEKAVRIVKEVTEKLSKYEVPPEKLVIHEQITRDLKDYKATGPHVAVAKRLAARGVKIRPGTVISYIVLKGSGRIGDRAIPFDEFDPTKHKYDAEYYIENQVLPAVERILRAFGYRKEDLRYQKTRQVGLSAWLKPKGT

SEQ ID NO: 2183 - protein, 774 aa, synthetic construct
MILDTDLITEDGKPVFRIFKKENGEFKIEYDRTFEPYFYALLKDDSAIEEVKKITAERHGTVVTVKRVEKVQKKFLGRPVEVWKLYFTHPQDRPAIPDKIREHPAVIDIYEYDIPFAKRYLIDKGLVPMEGDEELKMLAFDIETLYHEGEEFAEGPILMISYADEEGARVITWKNVDLPYVDVVSTEREMIKRFLRVVKEKDPDVLITYNGDNFDFAYLKKRCEKLGINFALGRDGSEPKIQRMGDRFAVEVKGRIHFDLYPVIRRTINLPTYTLEAVYEAVFGQPKEKVYAEEITTAWETGENLERVARYSMEDAKVTYELGKEFLPMEAQLSRLIGQSLWDVSRSSTGNLVEWFLLRKAYERNELAPNKPDEKELARRRQSYEGGYVKEPERGLWENIVYLDFRSLYPSIIITHNVSPDTLNREGCKEYDVAPQVGHRFCKDFPGFIPSLLGDLLEERQKIKKKMKATIDPIERKLLDYRQRAIKILANSYYGYYGYARARWYCKECAESVTAWGREYITMTIKEIEEKYGFKVIYSDTDGFFATIPGADAETVKKKAMEFLKYINAKLPGALELEYEGFYKRGFFVTKKKYAVIDEEGKITTRGLEIVRRDWSEIAKETQARVLEALLKDGDVEKAVRIVKEVTEKLSKYEVPPEKLVIHEQITRDLKDYKATGPHVAVAKRLAARGVKIRPGTVISYIVLKGSGRIGDRAIPFDEFDPTKHKYDAEYYIENQVLPAVERILRAFGYRKEDLRYQKTRQVGLSAWLKPKGT

SEQ ID NO: 2184 - protein, 774 aa, synthetic construct
MILDTDLITEDGKPVFRIFKKENGEFKIEYDRTFEPYFYALLKDDSAIEEVKKITAERHGTVVTVKRVEKVQKKFLGRPVEVWKLYFTHPQDRPAIWDKIREHPAVIDIYEYDIPFAKRYLIDKGLVPMEGDEELKMLAFDIETLYHEGEEFAEGPILMISYADEEGARVITWKNVDLPYVDVVSTEREMIKRFLRVVKEKDPDVLITYNGDNFDFAYLKKRCEKLGINFALGRDGSEPKIQRMGDRFAVEVKGRIHFDLYPVIRRTINLPTYTLEAVYEAVFGQPKEKVYAEEITTAWETGENLERVARYSMEDAKVTYELGKEFLPMEAQLSRLIGQSLWDVSRSSTGNLVEWFLLRKAYERNELAPNKPDEKELARRRQSYEGGYVKEPERGLWENIVYLDFRSLYPSIIITHNVSPDTLNREGCKEYDVAPQVGHRFCKDFPGFIPSLLGDLLEERQKIKKKMKATIDPIERKLLDYRQRAIKILANSYYGYYGYARARWYCKECAESVTAWGREYITMTIKEIEEKYGFKVIYSDTDGFFATIPGADAETVKKKAMEFLKYINAKLPGALELEYEGFYKRGFFVTKKKYAVIDEEGKITTRGLEIVRRDWSEIAKETQARVLEALLKDGDVEKAVRIVKEVTEKLSKYEVPPEKLVIHEQITRDLKDYKATGPHVAVAKRLAARGVKIRPGTVISYIVLKGSGRIGDRAIPFDEFDPTKHKYDAEYYIENQVLPAVERILRAFGYRKEDLRYQKTRQVGLSAWLKPKGT

SEQ ID NO: 2185 - protein, 774 aa, synthetic construct
MILDTDLITEDGKPVHRIFKKENGEFKIEYDRTFEHYFYALLKDDSAIEEVKKITAERHGTVVTVKRVEKVQKKFLGRPVEVWKLYFTHPQDIPAIRDKIREHPAVIDIYEYDIPFAKRYLIDKGLVPMEGDEELKMLAFDIETLYHEGEEFAEGPILMISYADEEGARVITWKNVDLPYVDVVSTEREMIKRFLRVVKEKDPDVLITYNGDNFDFAYLKKRCEKLGINFALGRDGSEPKIQRMGDRFAVEVKGRIHFDLYPVIRRTINLPTYTLEAVYEAVFGQPKEKVYAEEITTAWETGENLERVARYSMEDAKVTYELGKEFLPMEAQLSRLIGQSLWDVSRSSTGNLVEWFLLRKAYERNELAPNKPDEKELARRRQSYEGGYVKEPERGLWENIVYLDFRSLYPSIIITHNVSPDTLNREGCKEYDVAPQVGHRFCKDFPGFIPSLLGDLLEERQKIKKKMKATIDPIERKLLDYRQRAIKILANSYYGYYGYARARWYCKECAESVTAWGREYITMTIKEIEEKYGFKVIYSDTDGFFATIPGADAETVKKKAMEFLKYINAKLPGALELEYEGFYKRGFFVTKKKYAVIDEEGKITTRGLEIVRRDWSEIAKETQARVLEALLKDGDVEKAVRIVKEVTEKLSKYEVPPEKLVIHEQITRDLKDYKATGPHVAVAKRLAARGVKIRPGTVISYIVLKGSGRIGDRAIPFDEFDPTKHKYDAEYYIENQVLPAVERILRAFGYRKEDLRYQKTRQVGLSAWLKPKGT

SEQ ID NO: 2186 - protein, 774 aa, synthetic construct
MILDTDLITEDGKPVHRIFKKENGEFKIEYDRTFEHYFYALLKDDSAIEEVKKITAERHGTVVTVKRVEKVQKKFLGRPVEVWKLYFTHPQDIPAIHDKIREHPAVIDIYEYDIPFAKRYLIDKGLVPMEGDEELKMLAFDIETLYHEGEEFAEGPILMISYADEEGARVITWKNVDLPYVDVVSTEREMIKRFLRVVKEKDPDVLITYNGDNFDFAYLKKRCEKLGINFALGRDGSEPKIQRMGDRFAVEVKGRIHFDLYPVIRRTINLPTYTLEAVYEAVFGQPKEKVYAEEITTAWETGENLERVARYSMEDAKVTYELGKEFLPMEAQLSRLIGQSLWDVSRSSTGNLVEWFLLRKAYERNELAPNKPDEKELARRRQSYEGGYVKEPERGLWENIVYLDFRSLYPSIIITHNVSPDTLNREGCKEYDVAPQVGHRFCKDFPGFIPSLLGDLLEERQKIKKKMKATIDPIERKLLDYRQRAIKILANSYYGYYGYARARWYCKECAESVTAWGREYITMTIKEIEEKYGFKVIYSDTDGFFATIPGADAETVKKKAMEFLKYINAKLPGALELEYEGFYKRGFFVTKKKYAVIDEEGKITTRGLEIVRRDWSEIAKETQARVLEALLKDGDVEKAVRIVKEVTEKLSKYEVPPEKLVIHEQITRDLKDYKATGPHVAVAKRLAARGVKIRPGTVISYIVLKGSGRIGDRAIPFDEFDPTKHKYDAEYYIENQVLPAVERILRAFGYRKEDLRYQKTRQVGLSAWLKPKGT

SEQ ID NO: 2187 - protein, 774 aa, synthetic construct
MILDTDLITEDGKPVHRIFKKENGEFKIEYDRTFEHYFYALLKDDSAIEEVKKITAERHGTVVTVKRVEKVQKKFLGRPVEVWKLYFTHPQDRPAIRDKIREHPAVIDIYEYDIPFAKRYLIDKGLVPMEGDEELKMLAFDIETLYHEGEEFAEGPILMISYADEEGARVITWKNVDLPYVDVVSTEREMIKRFLRVVKEKDPDVLITYNGDNFDFAYLKKRCEKLGINFALGRDGSEPKIQRMGDRFAVEVKGRIHFDLYPVIRRTINLPTYTLEAVYEAVFGQPKEKVYAEEITTAWETGENLERVARYSMEDAKVTYELGKEFLPMEAQLSRLIGQSLWDVSRSSTGNLVEWFLLRKAYERNELAPNKPDEKELARRRQSYEGGYVKEPERGLWENIVYLDFRSLYPSIIITHNVSPDTLNREGCKEYDVAPQVGHRFCKDFPGFIPSLLGDLLEERQKIKKKMKATIDPIERKLLDYRQRAIKILANSYYGYYGYARARWYCKECAESVTAWGREYITMTIKEIEEKYGFKVIYSDTDGFFATIPGADAETVKKKAMEFLKYINAKLPGALELEYEGFYKRGFFVTKKKYAVIDEEGKITTRGLEIVRRDWSEIAKETQARVLEALLKDGDVEKAVRIVKEVTEKLSKYEVPPEKLVIHEQITRDLKDYKATGPHVAVAKRLAARGVKIRPGTVISYIVLKGSGRIGDRAIPFDEFDPTKHKYDAEYYIENQVLPAVERILRAFGYRKEDLRYQKTRQVGLSAWLKPKGT

SEQ ID NO: 2188 - protein, 774 aa, synthetic construct
MILDTDLITEDGKPVHRIFKKENGEFKIEYDRTFEPYFYALLKDDSAIEEVKKITAERHGTVVTVKRVEKVQKKFLGRPVEVWKLYFTHWQDIPAIRDKIREHPAVIDIYEYDIPFAKRYLIDKGLVPMEGDEELKMLAFDIETLYHEGEEFAEGPILMISYADEEGARVITWKNVDLPYVDVVSTEREMIKRFLRVVKEKDPDVLITYNGDNFDFAYLKKRCEKLGINFALGRDGSEPKIQRMGDRFAVEVKGRIHFDLYPVIRRTINLPTYTLEAVYEAVFGQPKEKVYAEEITTAWETGENLERVARYSMEDAKVTYELGKEFLPMEAQLSRLIGQSLWDVSRSSTGNLVEWFLLRKAYERNELAPNKPDEKELARRRQSYEGGYVKEPERGLWENIVYLDFRSLYPSIIITHNVSPDTLNREGCKEYDVAPQVGHRFCKDFPGFIPSLLGDLLEERQKIKKKMKATIDPIERKLLDYRQRAIKILANSYYGYYGYARARWYCKECAESVTAWGREYITMTIKEIEEKYGFKVIYSDTDGFFATIPGADAETVKKKAMEFLKYINAKLPGALELEYEGFYKRGFFVTKKKYAVIDEEGKITTRGLEIVRRDWSEIAKETQARVLEALLKDGDVEKAVRIVKEVTEKLSKYEVPPEKLVIHEQITRDLKDYKATGPHVAVAKRLAARGVKIRPGTVISYIVLKGSGRIGDRAIPFDEFDPTKHKYDAEYYIENQVLPAVERILRAFGYRKEDLRYQKTRQVGLSAWLKPKGT

SEQ ID NO: 2189 - protein, 774 aa, synthetic construct
MILDTDLITEDGKPVHRIFKKENGEFKIEYDRTFEPYFYALLKDDSAIEEVKKITAERHGTVVTVKRVEKVQKKFLGRPVEVWKLYFTHYQDIPAIRDKIREHPAVIDIYEYDIPFAKRYLIDKGLVPMEGDEELKMLAFDIETLYHEGEEFAEGPILMISYADEEGARVITWKNVDLPYVDVVSTEREMIKRFLRVVKEKDPDVLITYNGDNFDFAYLKKRCEKLGINFALGRDGSEPKIQRMGDRFAVEVKGRIHFDLYPVIRRTINLPTYTLEAVYEAVFGQPKEKVYAEEITTAWETGENLERVARYSMEDAKVTYELGKEFLPMEAQLSRLIGQSLWDVSRSSTGNLVEWFLLRKAYERNELAPNKPDEKELARRRQSYEGGYVKEPERGLWENIVYLDFRSLYPSIIITHNVSPDTLNREGCKEYDVAPQVGHRFCKDFPGFIPSLLGDLLEERQKIKKKMKATIDPIERKLLDYRQRAIKILANSYYGYYGYARARWYCKECAESVTAWGREYITMTIKEIEEKYGFKVIYSDTDGFFATIPGADAETVKKKAMEFLKYINAKLPGALELEYEGFYKRGFFVTKKKYAVIDEEGKITTRGLEIVRRDWSEIAKETQARVLEALLKDGDVEKAVRIVKEVTEKLSKYEVPPEKLVIHEQITRDLKDYKATGPHVAVAKRLAARGVKIRPGTVISYIVLKGSGRIGDRAIPFDEFDPTKHKYDAEYYIENQVLPAVERILRAFGYRKEDLRYQKTRQVGLSAWLKPKGT

SEQ ID NO: 2190 - protein, 774 aa, synthetic construct
MILDTDLITEDGKPVLRIFKKENGEFKIEYDRTFEPYFYALLKDDSAIEEVKKITAERHGTVVTVKRVEKVQKKFLGRPVEVWKLYFTHPQDVPAIRDKIREHPAVIDIYEYDIPFAKRYLIDKGLVPMEGDEELKMLAFDIETLYHEGEEFAEGPILMISYADEEGARVITWKNVDLPYVDVVSTEREMIKRFLRVVKEKDPDVLITYNGDNFDFAYLKKRCEKLGINFALGRDGSEPKIQRMGDRFAVEVKGRIHFDLYPVIRRTINLPTYTLEAVYEAVFGQPKEKVYAEEITTAWETGENLERVARYSMEDAKVTYELGKEFLPMEAQLSRLIGQSLWDVSRSSTGNLVEWFLLRKAYERNELAPNKPDEKELARRRQSYEGGYVKEPERGLWENIVYLDFRSLYPSIIITHNVSPDTLNREGCKEYDVAPQVGHRFCKDFPGFIPSLLGDLLEERQKIKKKMKATIDPIERKLLDYRQRAIKILANSYYGYYGYARARWYCKECAESVTAWGREYITMTIKEIEEKYGFKVIYSDTDGFFATIPGADAETVKKKAMEFLKYINAKLPGALELEYEGFYKRGFFVTKKKYAVIDEEGKITTRGLEIVRRDWSEIAKETQARVLEALLKDGDVEKAVRIVKEVTEKLSKYEVPPEKLVIHEQITRDLKDYKATGPHVAVAKRLAARGVKIRPGTVISYIVLKGSGRIGDRAIPFDEFDPTKHKYDAEYYIENQVLPAVERILRAFGYRKEDLRYQKTRQVGLSAWLKPKGT

SEQ ID NO: 2191 - protein, 774 aa, synthetic construct
MILDTDLITEDGKPVLRIFKKENGEFKIEYDRTFEAYFYALLKDDSAIEEVKKITAERHGTVVTVKRVEKVQKKFLGRPVEVWKLYFTHPQDVPAIRDKIREHPAVIDIYEYDIPFAKRYLIDKGLVPMEGDEELKMLAFDIETLYHEGEEFAEGPILMISYADEEGARVITWKNVDLPYVDVVSTEREMIKRFLRVVKEKDPDVLITYNGDNFDFAYLKKRCEKLGINFALGRDGSEPKIQRMGDRFAVEVKGRIHFDLYPVIRRTINLPTYTLEAVYEAVFGQPKEKVYAEEITTAWETGENLERVARYSMEDAKVTYELGKEFLPMEAQLSRLIGQSLWDVSRSSTGNLVEWFLLRKAYERNELAPNKPDEKELARRRQSYEGGYVKEPERGLWENIVYLDFRSLYPSIIITHNVSPDTLNREGCKEYDVAPQVGHRFCKDFPGFIPSLLGDLLEERQKIKKKMKATIDPIERKLLDYRQRAIKILANSYYGYYGYARARWYCKECAESVTAWGREYITMTIKEIEEKYGFKVIYSDTDGFFATIPGADAETVKKKAMEFLKYINAKLPGALELEYEGFYKRGFFVTKKKYAVIDEEGKITTRGLEIVRRDWSEIAKETQARVLEALLKDGDVEKAVRIVKEVTEKLSKYEVPPEKLVIHEQITRDLKDYKATGPHVAVAKRLAARGVKIRPGTVISYIVLKGSGRIGDRAIPFDEFDPTKHKYDAEYYIENQVLPAVERILRAFGYRKEDLRYQKTRQVGLSAWLKPKGT

SEQ ID NO: 2192 - protein, 774 aa, synthetic construct
MILDTDLITEDGKPVLRIFKKENGEFKIEYDRTFEAYFYALLKDDSAIEEVKKITAERHGTVVTVKRVEKVQKKFLGRPVEVWKLYFTHFQDVPAIRDKIREHPAVIDIYEYDIPFAKRYLIDKGLVPMEGDEELKMLAFDIETLYHEGEEFAEGPILMISYADEEGARVITWKNVDLPYVDVVSTEREMIKRFLRVVKEKDPDVLITYNGDNFDFAYLKKRCEKLGINFALGRDGSEPKIQRMGDRFAVEVKGRIHFDLYPVIRRTINLPTYTLEAVYEAVFGQPKEKVYAEEITTAWETGENLERVARYSMEDAKVTYELGKEFLPMEAQLSRLIGQSLWDVSRSSTGNLVEWFLLRKAYERNELAPNKPDEKELARRRQSYEGGYVKEPERGLWENIVYLDFRSLYPSIIITHNVSPDTLNREGCKEYDVAPQVGHRFCKDFPGFIPSLLGDLLEERQKIKKKMKATIDPIERKLLDYRQRAIKILANSYYGYYGYARARWYCKECAESVTAWGREYITMTIKEIEEKYGFKVIYSDTDGFFATIPGADAETVKKKAMEFLKYINAKLPGALELEYEGFYKRGFFVTKKKYAVIDEEGKITTRGLEIVRRDWSEIAKETQARVLEALLKDGDVEKAVRIVKEVTEKLSKYEVPPEKLVIHEQITRDLKDYKATGPHVAVAKRLAARGVKIRPGTVISYIVLKGSGRIGDRAIPFDEFDPTKHKYDAEYYIENQVLPAVERILRAFGYRKEDLRYQKTRQVGLSAWLKPKGT

SEQ ID NO: 2193 - protein, 774 aa, synthetic construct
MILDTDLITEDGKPVLRIFKKENGEFKIEYDRTFEAYFYALLKDDSAIEEVKKITAERHGTVVTVKRVEKVQKKFLGRPVEVWKLYFTHFQDIPAIRDKIREHPAVIDIYEYDIPFAKRYLIDKGLVPMEGDEELKMLAFDIETLYHEGEEFAEGPILMISYADEEGARVITWKNVDLPYVDVVSTEREMIKRFLRVVKEKDPDVLITYNGDNFDFAYLKKRCEKLGINFALGRDGSEPKIQRMGDRFAVEVKGRIHFDLYPVIRRTINLPTYTLEAVYEAVFGQPKEKVYAEEITTAWETGENLERVARYSMEDAKVTYELGKEFLPMEAQLSRLIGQSLWDVSRSSTGNLVEWFLLRKAYERNELAPNKPDEKELARRRQSYEGGYVKEPERGLWENIVYLDFRSLYPSIIITHNVSPDTLNREGCKEYDVAPQVGHRFCKDFPGFIPSLLGDLLEERQKIKKKMKATIDPIERKLLDYRQRAIKILANSYYGYYGYARARWYCKECAESVTAWGREYITMTIKEIEEKYGFKVIYSDTDGFFATIPGADAETVKKKAMEFLKYINAKLPGALELEYEGFYKRGFFVTKKKYAVIDEEGKITTRGLEIVRRDWSEIAKETQARVLEALLKDGDVEKAVRIVKEVTEKLSKYEVPPEKLVIHEQITRDLKDYKATGPHVAVAKRLAARGVKIRPGTVISYIVLKGSGRIGDRAIPFDEFDPTKHKYDAEYYIENQVLPAVERILRAFGYRKEDLRYQKTRQVGLSAWLKPKGT

SEQ ID NO: 2194 - protein, 774 aa, synthetic construct
MILDTDLITEDGKPVLRIFKKENGEFKIEYDRTFEAYFYALLKDDSAIEEVKKITAERHGTVVTVKRVEKVQKKFLGRPVEVWKLYFTHFQDIPAIADKIREHPAVIDIYEYDIPFAKRYLIDKGLVPMEGDEELKMLAFDIETLYHEGEEFAEGPILMISYADEEGARVITWKNVDLPYVDVVSTEREMIKRFLRVVKEKDPDVLITYNGDNFDFAYLKKRCEKLGINFALGRDGSEPKIQRMGDRFAVEVKGRIHFDLYPVIRRTINLPTYTLEAVYEAVFGQPKEKVYAEEITTAWETGENLERVARYSMEDAKVTYELGKEFLPMEAQLSRLIGQSLWDVSRSSTGNLVEWFLLRKAYERNELAPNKPDEKELARRRQSYEGGYVKEPERGLWENIVYLDFRSLYPSIIITHNVSPDTLNREGCKEYDVAPQVGHRFCKDFPGFIPSLLGDLLEERQKIKKKMKATIDPIERKLLDYRQRAIKILANSYYGYYGYARARWYCKECAESVTAWGREYITMTIKEIEEKYGFKVIYSDTDGFFATIPGADAETVKKKAMEFLKYINAKLPGALELEYEGFYKRGFFVTKKKYAVIDEEGKITTRGLEIVRRDWSEIAKETQARVLEALLKDGDVEKAVRIVKEVTEKLSKYEVPPEKLVIHEQITRDLKDYKATGPHVAVAKRLAARGVKIRPGTVISYIVLKGSGRIGDRAIPFDEFDPTKHKYDAEYYIENQVLPAVERILRAFGYRKEDLRYQKTRQVGLSAWLKPKGT

SEQ ID NO: 2195 - protein, 774 aa, synthetic construct
MILDTDLITEDGKPVLRIFKKENGEFKIEYDRTFEAYFYALLKDDSAIEEVKKITAERHGTVVTVKRVEKVQKKFLGRPVEVWKLYFTHFQDIPAIHDKIREHPAVIDIYEYDIPFAKRYLIDKGLVPMEGDEELKMLAFDIETLYHEGEEFAEGPILMISYADEEGARVITWKNVDLPYVDVVSTEREMIKRFLRVVKEKDPDVLITYNGDNFDFAYLKKRCEKLGINFALGRDGSEPKIQRMGDRFAVEVKGRIHFDLYPVIRRTINLPTYTLEAVYEAVFGQPKEKVYAEEITTAWETGENLERVARYSMEDAKVTYELGKEFLPMEAQLSRLIGQSLWDVSRSSTGNLVEWFLLRKAYERNELAPNKPDEKELARRRQSYEGGYVKEPERGLWENIVYLDFRSLYPSIIITHNVSPDTLNREGCKEYDVAPQVGHRFCKDFPGFIPSLLGDLLEERQKIKKKMKATIDPIERKLLDYRQRAIKILANSYYGYYGYARARWYCKECAESVTAWGREYITMTIKEIEEKYGFKVIYSDTDGFFATIPGADAETVKKKAMEFLKYINAKLPGALELEYEGFYKRGFFVTKKKYAVIDEEGKITTRGLEIVRRDWSEIAKETQARVLEALLKDGDVEKAVRIVKEVTEKLSKYEVPPEKLVIHEQITRDLKDYKATGPHVAVAKRLAARGVKIRPGTVISYIVLKGSGRIGDRAIPFDEFDPTKHKYDAEYYIENQVLPAVERILRAFGYRKEDLRYQKTRQVGLSAWLKPKGT

SEQ ID NO: 2196 - protein, 774 aa, synthetic construct
MILDTDLITEDGKPVLRIFKKENGEFKIEYDRTFEAYFYALLKDDSAIEEVKKITAERHGTVVTVKRVEKVQKKFLGRPVEVWKLYFTHFQDQPAIADKIREHPAVIDIYEYDIPFAKRYLIDKGLVPMEGDEELKMLAFDIETLYHEGEEFAEGPILMISYADEEGARVITWKNVDLPYVDVVSTEREMIKRFLRVVKEKDPDVLITYNGDNFDFAYLKKRCEKLGINFALGRDGSEPKIQRMGDRFAVEVKGRIHFDLYPVIRRTINLPTYTLEAVYEAVFGQPKEKVYAEEITTAWETGENLERVARYSMEDAKVTYELGKEFLPMEAQLSRLIGQSLWDVSRSSTGNLVEWFLLRKAYERNELAPNKPDEKELARRRQSYEGGYVKEPERGLWENIVYLDFRSLYPSIIITHNVSPDTLNREGCKEYDVAPQVGHRFCKDFPGFIPSLLGDLLEERQKIKKKMKATIDPIERKLLDYRQRAIKILANSYYGYYGYARARWYCKECAESVTAWGREYITMTIKEIEEKYGFKVIYSDTDGFFATIPGADAETVKKKAMEFLKYINAKLPGALELEYEGFYKRGFFVTKKKYAVIDEEGKITTRGLEIVRRDWSEIAKETQARVLEALLKDGDVEKAVRIVKEVTEKLSKYEVPPEKLVIHEQITRDLKDYKATGPHVAVAKRLAARGVKIRPGTVISYIVLKGSGRIGDRAIPFDEFDPTKHKYDAEYYIENQVLPAVERILRAFGYRKEDLRYQKTRQVGLSAWLKPKGT

SEQ ID NO: 2197 - protein, 774 aa, synthetic construct
MILDTDLITEDGKPVLRIFKKENGEFKIEYDRTFEAYFYALLKDDSAIEEVKKITAERHGTVVTVKRVEKVQKKFLGRPVEVWKLYFTHWQDVPAIRDKIREHPAVIDIYEYDIPFAKRYLIDKGLVPMEGDEELKMLAFDIETLYHEGEEFAEGPILMISYADEEGARVITWKNVDLPYVDVVSTEREMIKRFLRVVKEKDPDVLITYNGDNFDFAYLKKRCEKLGINFALGRDGSEPKIQRMGDRFAVEVKGRIHFDLYPVIRRTINLPTYTLEAVYEAVFGQPKEKVYAEEITTAWETGENLERVARYSMEDAKVTYELGKEFLPMEAQLSRLIGQSLWDVSRSSTGNLVEWFLLRKAYERNELAPNKPDEKELARRRQSYEGGYVKEPERGLWENIVYLDFRSLYPSIIITHNVSPDTLNREGCKEYDVAPQVGHRFCKDFPGFIPSLLGDLLEERQKIKKKMKATIDPIERKLLDYRQRAIKILANSYYGYYGYARARWYCKECAESVTAWGREYITMTIKEIEEKYGFKVIYSDTDGFFATIPGADAETVKKKAMEFLKYINAKLPGALELEYEGFYKRGFFVTKKKYAVIDEEGKITTRGLEIVRRDWSEIAKETQARVLEALLKDGDVEKAVRIVKEVTEKLSKYEVPPEKLVIHEQITRDLKDYKATGPHVAVAKRLAARGVKIRPGTVISYIVLKGSGRIGDRAIPFDEFDPTKHKYDAEYYIENQVLPAVERILRAFGYRKEDLRYQKTRQVGLSAWLKPKGT

SEQ ID NO: 2198 - protein, 774 aa, synthetic construct
MILDTDLITEDGKPVLRIFKKENGEFKIEYDRTFEAYFYALLKDDSAIEEVKKITAERHGTVVTVKRVEKVQKKFLGRPVEVWKLYFTHWQDVPAIADKIREHPAVIDIYEYDIPFAKRYLIDKGLVPMEGDEELKMLAFDIETLYHEGEEFAEGPILMISYADEEGARVITWKNVDLPYVDVVSTEREMIKRFLRVVKEKDPDVLITYNGDNFDFAYLKKRCEKLGINFALGRDGSEPKIQRMGDRFAVEVKGRIHFDLYPVIRRTINLPTYTLEAVYEAVFGQPKEKVYAEEITTAWETGENLERVARYSMEDAKVTYELGKEFLPMEAQLSRLIGQSLWDVSRSSTGNLVEWFLLRKAYERNELAPNKPDEKELARRRQSYEGGYVKEPERGLWENIVYLDFRSLYPSIIITHNVSPDTLNREGCKEYDVAPQVGHRFCKDFPGFIPSLLGDLLEERQKIKKKMKATIDPIERKLLDYRQRAIKILANSYYGYYGYARARWYCKECAESVTAWGREYITMTIKEIEEKYGFKVIYSDTDGFFATIPGADAETVKKKAMEFLKYINAKLPGALELEYEGFYKRGFFVTKKKYAVIDEEGKITTRGLEIVRRDWSEIAKETQARVLEALLKDGDVEKAVRIVKEVTEKLSKYEVPPEKLVIHEQITRDLKDYKATGPHVAVAKRLAARGVKIRPGTVISYIVLKGSGRIGDRAIPFDEFDPTKHKYDAEYYIENQVLPAVERILRAFGYRKEDLRYQKTRQVGLSAWLKPKGT

SEQ ID NO: 2199 - protein, 774 aa, synthetic construct
MILDTDLITEDGKPVLRIFKKENGEFKIEYDRTFEAYFYALLKDDSAIEEVKKITAERHGTVVTVKRVEKVQKKFLGRPVEVWKLYFTHWQDIPAIRDKIREHPAVIDIYEYDIPFAKRYLIDKGLVPMEGDEELKMLAFDIETLYHEGEEFAEGPILMISYADEEGARVITWKNVDLPYVDVVSTEREMIKRFLRVVKEKDPDVLITYNGDNFDFAYLKKRCEKLGINFALGRDGSEPKIQRMGDRFAVEVKGRIHFDLYPVIRRTINLPTYTLEAVYEAVFGQPKEKVYAEEITTAWETGENLERVARYSMEDAKVTYELGKEFLPMEAQLSRLIGQSLWDVSRSSTGNLVEWFLLRKAYERNELAPNKPDEKELARRRQSYEGGYVKEPERGLWENIVYLDFRSLYPSIIITHNVSPDTLNREGCKEYDVAPQVGHRFCKDFPGFIPSLLGDLLEERQKIKKKMKATIDPIERKLLDYRQRAIKILANSYYGYYGYARARWYCKECAESVTAWGREYITMTIKEIEEKYGFKVIYSDTDGFFATIPGADAETVKKKAMEFLKYINAKLPGALELEYEGFYKRGFFVTKKKYAVIDEEGKITTRGLEIVRRDWSEIAKETQARVLEALLKDGDVEKAVRIVKEVTEKLSKYEVPPEKLVIHEQITRDLKDYKATGPHVAVAKRLAARGVKIRPGTVISYIVLKGSGRIGDRAIPFDEFDPTKHKYDAEYYIENQVLPAVERILRAFGYRKEDLRYQKTRQVGLSAWLKPKGT

SEQ ID NO: 2200 - protein, 774 aa, synthetic construct
MILDTDLITEDGKPVLRIFKKENGEFKIEYDRTFEAYFYALLKDDSAIEEVKKITAERHGTVVTVKRVEKVQKKFLGRPVEVWKLYFTHWQDIPAIHDKIREHPAVIDIYEYDIPFAKRYLIDKGLVPMEGDEELKMLAFDIETLYHEGEEFAEGPILMISYADEEGARVITWKNVDLPYVDVVSTEREMIKRFLRVVKEKDPDVLITYNGDNFDFAYLKKRCEKLGINFALGRDGSEPKIQRMGDRFAVEVKGRIHFDLYPVIRRTINLPTYTLEAVYEAVFGQPKEKVYAEEITTAWETGENLERVARYSMEDAKVTYELGKEFLPMEAQLSRLIGQSLWDVSRSSTGNLVEWFLLRKAYERNELAPNKPDEKELARRRQSYEGGYVKEPERGLWENIVYLDFRSLYPSIIITHNVSPDTLNREGCKEYDVAPQVGHRFCKDFPGFIPSLLGDLLEERQKIKKKMKATIDPIERKLLDYRQRAIKILANSYYGYYGYARARWYCKECAESVTAWGREYITMTIKEIEEKYGFKVIYSDTDGFFATIPGADAETVKKKAMEFLKYINAKLPGALELEYEGFYKRGFFVTKKKYAVIDEEGKITTRGLEIVRRDWSEIAKETQARVLEALLKDGDVEKAVRIVKEVTEKLSKYEVPPEKLVIHEQITRDLKDYKATGPHVAVAKRLAARGVKIRPGTVISYIVLKGSGRIGDRAIPFDEFDPTKHKYDAEYYIENQVLPAVERILRAFGYRKEDLRYQKTRQVGLSAWLKPKGT

SEQ ID NO: 2201 - protein, 774 aa, synthetic construct
MILDTDLITEDGKPVLRIFKKENGEFKIEYDRTFEAYFYALLKDDSAIEEVKKITAERHGTVVTVKRVEKVQKKFLGRPVEVWKLYFTHYQDIPAIRDKIREHPAVIDIYEYDIPFAKRYLIDKGLVPMEGDEELKMLAFDIETLYHEGEEFAEGPILMISYADEEGARVITWKNVDLPYVDVVSTEREMIKRFLRVVKEKDPDVLITYNGDNFDFAYLKKRCEKLGINFALGRDGSEPKIQRMGDRFAVEVKGRIHFDLYPVIRRTINLPTYTLEAVYEAVFGQPKEKVYAEEITTAWETGENLERVARYSMEDAKVTYELGKEFLPMEAQLSRLIGQSLWDVSRSSTGNLVEWFLLRKAYERNELAPNKPDEKELARRRQSYEGGYVKEPERGLWENIVYLDFRSLYPSIIITHNVSPDTLNREGCKEYDVAPQVGHRFCKDFPGFIPSLLGDLLEERQKIKKKMKATIDPIERKLLDYRQRAIKILANSYYGYYGYARARWYCKECAESVTAWGREYITMTIKEIEEKYGFKVIYSDTDGFFATIPGADAETVKKKAMEFLKYINAKLPGALELEYEGFYKRGFFVTKKKYAVIDEEGKITTRGLEIVRRDWSEIAKETQARVLEALLKDGDVEKAVRIVKEVTEKLSKYEVPPEKLVIHEQITRDLKDYKATGPHVAVAKRLAARGVKIRPGTVISYIVLKGSGRIGDRAIPFDEFDPTKHKYDAEYYIENQVLPAVERILRAFGYRKEDLRYQKTRQVGLSAWLKPKGT

SEQ ID NO: 2202 - protein, 774 aa, synthetic construct
MILDTDLITEDGKPVLRIFKKENGEFKIEYDRTFEAYFYALLKDDSAIEEVKKITAERHGTVVTVKRVEKVQKKFLGRPVEVWKLYFTHPQDVPAIADKIREHPAVIDIYEYDIPFAKRYLIDKGLVPMEGDEELKMLAFDIETLYHEGEEFAEGPILMISYADEEGARVITWKNVDLPYVDVVSTEREMIKRFLRVVKEKDPDVLITYNGDNFDFAYLKKRCEKLGINFALGRDGSEPKIQRMGDRFAVEVKGRIHFDLYPVIRRTINLPTYTLEAVYEAVFGQPKEKVYAEEITTAWETGENLERVARYSMEDAKVTYELGKEFLPMEAQLSRLIGQSLWDVSRSSTGNLVEWFLLRKAYERNELAPNKPDEKELARRRQSYEGGYVKEPERGLWENIVYLDFRSLYPSIIITHNVSPDTLNREGCKEYDVAPQVGHRFCKDFPGFIPSLLGDLLEERQKIKKKMKATIDPIERKLLDYRQRAIKILANSYYGYYGYARARWYCKECAESVTAWGREYITMTIKEIEEKYGFKVIYSDTDGFFATIPGADAETVKKKAMEFLKYINAKLPGALELEYEGFYKRGFFVTKKKYAVIDEEGKITTRGLEIVRRDWSEIAKETQARVLEALLKDGDVEKAVRIVKEVTEKLSKYEVPPEKLVIHEQITRDLKDYKATGPHVAVAKRLAARGVKIRPGTVISYIVLKGSGRIGDRAIPFDEFDPTKHKYDAEYYIENQVLPAVERILRAFGYRKEDLRYQKTRQVGLSAWLKPKGT

SEQ ID NO: 2203 - protein, 774 aa, synthetic construct
MILDTDLITEDGKPVLRIFKKENGEFKIEYDRTFEAYFYALLKDDSAIEEVKKITAERHGTVVTVKRVEKVQKKFLGRPVEVWKLYFTHPQDVPAIFDKIREHPAVIDIYEYDIPFAKRYLIDKGLVPMEGDEELKMLAFDIETLYHEGEEFAEGPILMISYADEEGARVITWKNVDLPYVDVVSTEREMIKRFLRVVKEKDPDVLITYNGDNFDFAYLKKRCEKLGINFALGRDGSEPKIQRMGDRFAVEVKGRIHFDLYPVIRRTINLPTYTLEAVYEAVFGQPKEKVYAEEITTAWETGENLERVARYSMEDAKVTYELGKEFLPMEAQLSRLIGQSLWDVSRSSTGNLVEWFLLRKAYERNELAPNKPDEKELARRRQSYEGGYVKEPERGLWENIVYLDFRSLYPSIIITHNVSPDTLNREGCKEYDVAPQVGHRFCKDFPGFIPSLLGDLLEERQKIKKKMKATIDPIERKLLDYRQRAIKILANSYYGYYGYARARWYCKECAESVTAWGREYITMTIKEIEEKYGFKVIYSDTDGFFATIPGADAETVKKKAMEFLKYINAKLPGALELEYEGFYKRGFFVTKKKYAVIDEEGKITTRGLEIVRRDWSEIAKETQARVLEALLKDGDVEKAVRIVKEVTEKLSKYEVPPEKLVIHEQITRDLKDYKATGPHVAVAKRLAARGVKIRPGTVISYIVLKGSGRIGDRAIPFDEFDPTKHKYDAEYYIENQVLPAVERILRAFGYRKEDLRYQKTRQVGLSAWLKPKGT

SEQ ID NO: 2204 - protein, 774 aa, synthetic construct
MILDTDLITEDGKPVLRIFKKENGEFKIEYDRTFEAYFYALLKDDSAIEEVKKITAERHGTVVTVKRVEKVQKKFLGRPVEVWKLYFTHPQDVPAIHDKIREHPAVIDIYEYDIPFAKRYLIDKGLVPMEGDEELKMLAFDIETLYHEGEEFAEGPILMISYADEEGARVITWKNVDLPYVDVVSTEREMIKRFLRVVKEKDPDVLITYNGDNFDFAYLKKRCEKLGINFALGRDGSEPKIQRMGDRFAVEVKGRIHFDLYPVIRRTINLPTYTLEAVYEAVFGQPKEKVYAEEITTAWETGENLERVARYSMEDAKVTYELGKEFLPMEAQLSRLIGQSLWDVSRSSTGNLVEWFLLRKAYERNELAPNKPDEKELARRRQSYEGGYVKEPERGLWENIVYLDFRSLYPSIIITHNVSPDTLNREGCKEYDVAPQVGHRFCKDFPGFIPSLLGDLLEERQKIKKKMKATIDPIERKLLDYRQRAIKILANSYYGYYGYARARWYCKECAESVTAWGREYITMTIKEIEEKYGFKVIYSDTDGFFATIPGADAETVKKKAMEFLKYINAKLPGALELEYEGFYKRGFFVTKKKYAVIDEEGKITTRGLEIVRRDWSEIAKETQARVLEALLKDGDVEKAVRIVKEVTEKLSKYEVPPEKLVIHEQITRDLKDYKATGPHVAVAKRLAARGVKIRPGTVISYIVLKGSGRIGDRAIPFDEFDPTKHKYDAEYYIENQVLPAVERILRAFGYRKEDLRYQKTRQVGLSAWLKPKGT

SEQ ID NO: 2205 - protein, 774 aa, synthetic construct
MILDTDLITEDGKPVLRIFKKENGEFKIEYDRTFEAYFYALLKDDSAIEEVKKITAERHGTVVTVKRVEKVQKKFLGRPVEVWKLYFTHPQDVPAIWDKIREHPAVIDIYEYDIPFAKRYLIDKGLVPMEGDEELKMLAFDIETLYHEGEEFAEGPILMISYADEEGARVITWKNVDLPYVDVVSTEREMIKRFLRVVKEKDPDVLITYNGDNFDFAYLKKRCEKLGINFALGRDGSEPKIQRMGDRFAVEVKGRIHFDLYPVIRRTINLPTYTLEAVYEAVFGQPKEKVYAEEITTAWETGENLERVARYSMEDAKVTYELGKEFLPMEAQLSRLIGQSLWDVSRSSTGNLVEWFLLRKAYERNELAPNKPDEKELARRRQSYEGGYVKEPERGLWENIVYLDFRSLYPSIIITHNVSPDTLNREGCKEYDVAPQVGHRFCKDFPGFIPSLLGDLLEERQKIKKKMKATIDPIERKLLDYRQRAIKILANSYYGYYGYARARWYCKECAESVTAWGREYITMTIKEIEEKYGFKVIYSDTDGFFATIPGADAETVKKKAMEFLKYINAKLPGALELEYEGFYKRGFFVTKKKYAVIDEEGKITTRGLEIVRRDWSEIAKETQARVLEALLKDGDVEKAVRIVKEVTEKLSKYEVPPEKLVIHEQITRDLKDYKATGPHVAVAKRLAARGVKIRPGTVISYIVLKGSGRIGDRAIPFDEFDPTKHKYDAEYYIENQVLPAVERILRAFGYRKEDLRYQKTRQVGLSAWLKPKGT

SEQ ID NO: 2206 - protein, 774 aa, synthetic construct
MILDTDLITEDGKPVLRIFKKENGEFKIEYDRTFEAYFYALLKDDSAIEEVKKITAERHGTVVTVKRVEKVQKKFLGRPVEVWKLYFTHPQDIPAIRDKIREHPAVIDIYEYDIPFAKRYLIDKGLVPMEGDEELKMLAFDIETLYHEGEEFAEGPILMISYADEEGARVITWKNVDLPYVDVVSTEREMIKRFLRVVKEKDPDVLITYNGDNFDFAYLKKRCEKLGINFALGRDGSEPKIQRMGDRFAVEVKGRIHFDLYPVIRRTINLPTYTLEAVYEAVFGQPKEKVYAEEITTAWETGENLERVARYSMEDAKVTYELGKEFLPMEAQLSRLIGQSLWDVSRSSTGNLVEWFLLRKAYERNELAPNKPDEKELARRRQSYEGGYVKEPERGLWENIVYLDFRSLYPSIIITHNVSPDTLNREGCKEYDVAPQVGHRFCKDFPGFIPSLLGDLLEERQKIKKKMKATIDPIERKLLDYRQRAIKILANSYYGYYGYARARWYCKECAESVTAWGREYITMTIKEIEEKYGFKVIYSDTDGFFATIPGADAETVKKKAMEFLKYINAKLPGALELEYEGFYKRGFFVTKKKYAVIDEEGKITTRGLEIVRRDWSEIAKETQARVLEALLKDGDVEKAVRIVKEVTEKLSKYEVPPEKLVIHEQITRDLKDYKATGPHVAVAKRLAARGVKIRPGTVISYIVLKGSGRIGDRAIPFDEFDPTKHKYDAEYYIENQVLPAVERILRAFGYRKEDLRYQKTRQVGLSAWLKPKGT

SEQ ID NO: 2207 - protein, 774 aa, synthetic construct
MILDTDLITEDGKPVLRIFKKENGEFKIEYDRTFEAYFYALLKDDSAIEEVKKITAERHGTVVTVKRVEKVQKKFLGRPVEVWKLYFTHPQDIPAIADKIREHPAVIDIYEYDIPFAKRYLIDKGLVPMEGDEELKMLAFDIETLYHEGEEFAEGPILMISYADEEGARVITWKNVDLPYVDVVSTEREMIKRFLRVVKEKDPDVLITYNGDNFDFAYLKKRCEKLGINFALGRDGSEPKIQRMGDRFAVEVKGRIHFDLYPVIRRTINLPTYTLEAVYEAVFGQPKEKVYAEEITTAWETGENLERVARYSMEDAKVTYELGKEFLPMEAQLSRLIGQSLWDVSRSSTGNLVEWFLLRKAYERNELAPNKPDEKELARRRQSYEGGYVKEPERGLWENIVYLDFRSLYPSIIITHNVSPDTLNREGCKEYDVAPQVGHRFCKDFPGFIPSLLGDLLEERQKIKKKMKATIDPIERKLLDYRQRAIKILANSYYGYYGYARARWYCKECAESVTAWGREYITMTIKEIEEKYGFKVIYSDTDGFFATIPGADAETVKKKAMEFLKYINAKLPGALELEYEGFYKRGFFVTKKKYAVIDEEGKITTRGLEIVRRDWSEIAKETQARVLEALLKDGDVEKAVRIVKEVTEKLSKYEVPPEKLVIHEQITRDLKDYKATGPHVAVAKRLAARGVKIRPGTVISYIVLKGSGRIGDRAIPFDEFDPTKHKYDAEYYIENQVLPAVERILRAFGYRKEDLRYQKTRQVGLSAWLKPKGT

SEQ ID NO: 2208 - protein, 774 aa, synthetic construct
MILDTDLITEDGKPVLRIFKKENGEFKIEYDRTFEAYFYALLKDDSAIEEVKKITAERHGTVVTVKRVEKVQKKFLGRPVEVWKLYFTHPQDIPAIFDKIREHPAVIDIYEYDIPFAKRYLIDKGLVPMEGDEELKMLAFDIETLYHEGEEFAEGPILMISYADEEGARVITWKNVDLPYVDVVSTEREMIKRFLRVVKEKDPDVLITYNGDNFDFAYLKKRCEKLGINFALGRDGSEPKIQRMGDRFAVEVKGRIHFDLYPVIRRTINLPTYTLEAVYEAVFGQPKEKVYAEEITTAWETGENLERVARYSMEDAKVTYELGKEFLPMEAQLSRLIGQSLWDVSRSSTGNLVEWFLLRKAYERNELAPNKPDEKELARRRQSYEGGYVKEPERGLWENIVYLDFRSLYPSIIITHNVSPDTLNREGCKEYDVAPQVGHRFCKDFPGFIPSLLGDLLEERQKIKKKMKATIDPIERKLLDYRQRAIKILANSYYGYYGYARARWYCKECAESVTAWGREYITMTIKEIEEKYGFKVIYSDTDGFFATIPGADAETVKKKAMEFLKYINAKLPGALELEYEGFYKRGFFVTKKKYAVIDEEGKITTRGLEIVRRDWSEIAKETQARVLEALLKDGDVEKAVRIVKEVTEKLSKYEVPPEKLVIHEQITRDLKDYKATGPHVAVAKRLAARGVKIRPGTVISYIVLKGSGRIGDRAIPFDEFDPTKHKYDAEYYIENQVLPAVERILRAFGYRKEDLRYQKTRQVGLSAWLKPKGT

SEQ ID NO: 2209 - protein, 774 aa, synthetic construct
MILDTDLITEDGKPVLRIFKKENGEFKIEYDRTFEAYFYALLKDDSAIEEVKKITAERHGTVVTVKRVEKVQKKFLGRPVEVWKLYFTHPQDIPAIHDKIREHPAVIDIYEYDIPFAKRYLIDKGLVPMEGDEELKMLAFDIETLYHEGEEFAEGPILMISYADEEGARVITWKNVDLPYVDVVSTEREMIKRFLRVVKEKDPDVLITYNGDNFDFAYLKKRCEKLGINFALGRDGSEPKIQRMGDRFAVEVKGRIHFDLYPVIRRTINLPTYTLEAVYEAVFGQPKEKVYAEEITTAWETGENLERVARYSMEDAKVTYELGKEFLPMEAQLSRLIGQSLWDVSRSSTGNLVEWFLLRKAYERNELAPNKPDEKELARRRQSYEGGYVKEPERGLWENIVYLDFRSLYPSIIITHNVSPDTLNREGCKEYDVAPQVGHRFCKDFPGFIPSLLGDLLEERQKIKKKMKATIDPIERKLLDYRQRAIKILANSYYGYYGYARARWYCKECAESVTAWGREYITMTIKEIEEKYGFKVIYSDTDGFFATIPGADAETVKKKAMEFLKYINAKLPGALELEYEGFYKRGFFVTKKKYAVIDEEGKITTRGLEIVRRDWSEIAKETQARVLEALLKDGDVEKAVRIVKEVTEKLSKYEVPPEKLVIHEQITRDLKDYKATGPHVAVAKRLAARGVKIRPGTVISYIVLKGSGRIGDRAIPFDEFDPTKHKYDAEYYIENQVLPAVERILRAFGYRKEDLRYQKTRQVGLSAWLKPKGT

SEQ ID NO: 2210 - protein, 774 aa, synthetic construct
MILDTDLITEDGKPVLRIFKKENGEFKIEYDRTFEAYFYALLKDDSAIEEVKKITAERHGTVVTVKRVEKVQKKFLGRPVEVWKLYFTHPQDQPAIRDKIREHPAVIDIYEYDIPFAKRYLIDKGLVPMEGDEELKMLAFDIETLYHEGEEFAEGPILMISYADEEGARVITWKNVDLPYVDVVSTEREMIKRFLRVVKEKDPDVLITYNGDNFDFAYLKKRCEKLGINFALGRDGSEPKIQRMGDRFAVEVKGRIHFDLYPVIRRTINLPTYTLEAVYEAVFGQPKEKVYAEEITTAWETGENLERVARYSMEDAKVTYELGKEFLPMEAQLSRLIGQSLWDVSRSSTGNLVEWFLLRKAYERNELAPNKPDEKELARRRQSYEGGYVKEPERGLWENIVYLDFRSLYPSIIITHNVSPDTLNREGCKEYDVAPQVGHRFCKDFPGFIPSLLGDLLEERQKIKKKMKATIDPIERKLLDYRQRAIKILANSYYGYYGYARARWYCKECAESVTAWGREYITMTIKEIEEKYGFKVIYSDTDGFFATIPGADAETVKKKAMEFLKYINAKLPGALELEYEGFYKRGFFVTKKKYAVIDEEGKITTRGLEIVRRDWSEIAKETQARVLEALLKDGDVEKAVRIVKEVTEKLSKYEVPPEKLVIHEQITRDLKDYKATGPHVAVAKRLAARGVKIRPGTVISYIVLKGSGRIGDRAIPFDEFDPTKHKYDAEYYIENQVLPAVERILRAFGYRKEDLRYQKTRQVGLSAWLKPKGT

SEQ ID NO: 2211 - protein, 774 aa, synthetic construct
MILDTDLITEDGKPVLRIFKKENGEFKIEYDRTFEAYFYALLKDDSAIEEVKKITAERHGTVVTVKRVEKVQKKFLGRPVEVWKLYFTHPQDQPAIADKIREHPAVIDIYEYDIPFAKRYLIDKGLVPMEGDEELKMLAFDIETLYHEGEEFAEGPILMISYADEEGARVITWKNVDLPYVDVVSTEREMIKRFLRVVKEKDPDVLITYNGDNFDFAYLKKRCEKLGINFALGRDGSEPKIQRMGDRFAVEVKGRIHFDLYPVIRRTINLPTYTLEAVYEAVFGQPKEKVYAEEITTAWETGENLERVARYSMEDAKVTYELGKEFLPMEAQLSRLIGQSLWDVSRSSTGNLVEWFLLRKAYERNELAPNKPDEKELARRRQSYEGGYVKEPERGLWENIVYLDFRSLYPSIIITHNVSPDTLNREGCKEYDVAPQVGHRFCKDFPGFIPSLLGDLLEERQKIKKKMKATIDPIERKLLDYRQRAIKILANSYYGYYGYARARWYCKECAESVTAWGREYITMTIKEIEEKYGFKVIYSDTDGFFATIPGADAETVKKKAMEFLKYINAKLPGALELEYEGFYKRGFFVTKKKYAVIDEEGKITTRGLEIVRRDWSEIAKETQARVLEALLKDGDVEKAVRIVKEVTEKLSKYEVPPEKLVIHEQITRDLKDYKATGPHVAVAKRLAARGVKIRPGTVISYIVLKGSGRIGDRAIPFDEFDPTKHKYDAEYYIENQVLPAVERILRAFGYRKEDLRYQKTRQVGLSAWLKPKGT

SEQ ID NO: 2212 - protein, 774 aa, synthetic construct
MILDTDLITEDGKPVLRIFKKENGEFKIEYDRTFEAYFYALLKDDSAIEEVKKITAERHGTVVTVKRVEKVQKKFLGRPVEVWKLYFTHPQDRPAIADKIREHPAVIDIYEYDIPFAKRYLIDKGLVPMEGDEELKMLAFDIETLYHEGEEFAEGPILMISYADEEGARVITWKNVDLPYVDVVSTEREMIKRFLRVVKEKDPDVLITYNGDNFDFAYLKKRCEKLGINFALGRDGSEPKIQRMGDRFAVEVKGRIHFDLYPVIRRTINLPTYTLEAVYEAVFGQPKEKVYAEEITTAWETGENLERVARYSMEDAKVTYELGKEFLPMEAQLSRLIGQSLWDVSRSSTGNLVEWFLLRKAYERNELAPNKPDEKELARRRQSYEGGYVKEPERGLWENIVYLDFRSLYPSIIITHNVSPDTLNREGCKEYDVAPQVGHRFCKDFPGFIPSLLGDLLEERQKIKKKMKATIDPIERKLLDYRQRAIKILANSYYGYYGYARARWYCKECAESVTAWGREYITMTIKEIEEKYGFKVIYSDTDGFFATIPGADAETVKKKAMEFLKYINAKLPGALELEYEGFYKRGFFVTKKKYAVIDEEGKITTRGLEIVRRDWSEIAKETQARVLEALLKDGDVEKAVRIVKEVTEKLSKYEVPPEKLVIHEQITRDLKDYKATGPHVAVAKRLAARGVKIRPGTVISYIVLKGSGRIGDRAIPFDEFDPTKHKYDAEYYIENQVLPAVERILRAFGYRKEDLRYQKTRQVGLSAWLKPKGT

SEQ ID NO: 2213 - protein, 774 aa, synthetic construct
MILDTDLITEDGKPVLRIFKKENGEFKIEYDRTFEHYFYALLKDDSAIEEVKKITAERHGTVVTVKRVEKVQKKFLGRPVEVWKLYFTHPQDVPAIRDKIREHPAVIDIYEYDIPFAKRYLIDKGLVPMEGDEELKMLAFDIETLYHEGEEFAEGPILMISYADEEGARVITWKNVDLPYVDVVSTEREMIKRFLRVVKEKDPDVLITYNGDNFDFAYLKKRCEKLGINFALGRDGSEPKIQRMGDRFAVEVKGRIHFDLYPVIRRTINLPTYTLEAVYEAVFGQPKEKVYAEEITTAWETGENLERVARYSMEDAKVTYELGKEFLPMEAQLSRLIGQSLWDVSRSSTGNLVEWFLLRKAYERNELAPNKPDEKELARRRQSYEGGYVKEPERGLWENIVYLDFRSLYPSIIITHNVSPDTLNREGCKEYDVAPQVGHRFCKDFPGFIPSLLGDLLEERQKIKKKMKATIDPIERKLLDYRQRAIKILANSYYGYYGYARARWYCKECAESVTAWGREYITMTIKEIEEKYGFKVIYSDTDGFFATIPGADAETVKKKAMEFLKYINAKLPGALELEYEGFYKRGFFVTKKKYAVIDEEGKITTRGLEIVRRDWSEIAKETQARVLEALLKDGDVEKAVRIVKEVTEKLSKYEVPPEKLVIHEQITRDLKDYKATGPHVAVAKRLAARGVKIRPGTVISYIVLKGSGRIGDRAIPFDEFDPTKHKYDAEYYIENQVLPAVERILRAFGYRKEDLRYQKTRQVGLSAWLKPKGT

SEQ ID NO: 2214 - protein, 774 aa, synthetic construct
MILDTDLITEDGKPVLRIFKKENGEFKIEYDRTFEHYFYALLKDDSAIEEVKKITAERHGTVVTVKRVEKVQKKFLGRPVEVWKLYFTHIQDIPAIRDKIREHPAVIDIYEYDIPFAKRYLIDKGLVPMEGDEELKMLAFDIETLYHEGEEFAEGPILMISYADEEGARVITWKNVDLPYVDVVSTEREMIKRFLRVVKEKDPDVLITYNGDNFDFAYLKKRCEKLGINFALGRDGSEPKIQRMGDRFAVEVKGRIHFDLYPVIRRTINLPTYTLEAVYEAVFGQPKEKVYAEEITTAWETGENLERVARYSMEDAKVTYELGKEFLPMEAQLSRLIGQSLWDVSRSSTGNLVEWFLLRKAYERNELAPNKPDEKELARRRQSYEGGYVKEPERGLWENIVYLDFRSLYPSIIITHNVSPDTLNREGCKEYDVAPQVGHRFCKDFPGFIPSLLGDLLEERQKIKKKMKATIDPIERKLLDYRQRAIKILANSYYGYYGYARARWYCKECAESVTAWGREYITMTIKEIEEKYGFKVIYSDTDGFFATIPGADAETVKKKAMEFLKYINAKLPGALELEYEGFYKRGFFVTKKKYAVIDEEGKITTRGLEIVRRDWSEIAKETQARVLEALLKDGDVEKAVRIVKEVTEKLSKYEVPPEKLVIHEQITRDLKDYKATGPHVAVAKRLAARGVKIRPGTVISYIVLKGSGRIGDRAIPFDEFDPTKHKYDAEYYIENQVLPAVERILRAFGYRKEDLRYQKTRQVGLSAWLKPKGT

SEQ ID NO: 2215 - protein, 774 aa, synthetic construct
MILDTDLITEDGKPVLRIFKKENGEFKIEYDRTFEHYFYALLKDDSAIEEVKKITAERHGTVVTVKRVEKVQKKFLGRPVEVWKLYFTHWQDVPAIRDKIREHPAVIDIYEYDIPFAKRYLIDKGLVPMEGDEELKMLAFDIETLYHEGEEFAEGPILMISYADEEGARVITWKNVDLPYVDVVSTEREMIKRFLRVVKEKDPDVLITYNGDNFDFAYLKKRCEKLGINFALGRDGSEPKIQRMGDRFAVEVKGRIHFDLYPVIRRTINLPTYTLEAVYEAVFGQPKEKVYAEEITTAWETGENLERVARYSMEDAKVTYELGKEFLPMEAQLSRLIGQSLWDVSRSSTGNLVEWFLLRKAYERNELAPNKPDEKELARRRQSYEGGYVKEPERGLWENIVYLDFRSLYPSIIITHNVSPDTLNREGCKEYDVAPQVGHRFCKDFPGFIPSLLGDLLEERQKIKKKMKATIDPIERKLLDYRQRAIKILANSYYGYYGYARARWYCKECAESVTAWGREYITMTIKEIEEKYGFKVIYSDTDGFFATIPGADAETVKKKAMEFLKYINAKLPGALELEYEGFYKRGFFVTKKKYAVIDEEGKITTRGLEIVRRDWSEIAKETQARVLEALLKDGDVEKAVRIVKEVTEKLSKYEVPPEKLVIHEQITRDLKDYKATGPHVAVAKRLAARGVKIRPGTVISYIVLKGSGRIGDRAIPFDEFDPTKHKYDAEYYIENQVLPAVERILRAFGYRKEDLRYQKTRQVGLSAWLKPKGT

SEQ ID NO: 2216 - protein, 774 aa, synthetic construct
MILDTDLITEDGKPVLRIFKKENGEFKIEYDRTFEHYFYALLKDDSAIEEVKKITAERHGTVVTVKRVEKVQKKFLGRPVEVWKLYFTHYQDIPAIRDKIREHPAVIDIYEYDIPFAKRYLIDKGLVPMEGDEELKMLAFDIETLYHEGEEFAEGPILMISYADEEGARVITWKNVDLPYVDVVSTEREMIKRFLRVVKEKDPDVLITYNGDNFDFAYLKKRCEKLGINFALGRDGSEPKIQRMGDRFAVEVKGRIHFDLYPVIRRTINLPTYTLEAVYEAVFGQPKEKVYAEEITTAWETGENLERVARYSMEDAKVTYELGKEFLPMEAQLSRLIGQSLWDVSRSSTGNLVEWFLLRKAYERNELAPNKPDEKELARRRQSYEGGYVKEPERGLWENIVYLDFRSLYPSIIITHNVSPDTLNREGCKEYDVAPQVGHRFCKDFPGFIPSLLGDLLEERQKIKKKMKATIDPIERKLLDYRQRAIKILANSYYGYYGYARARWYCKECAESVTAWGREYITMTIKEIEEKYGFKVIYSDTDGFFATIPGADAETVKKKAMEFLKYINAKLPGALELEYEGFYKRGFFVTKKKYAVIDEEGKITTRGLEIVRRDWSEIAKETQARVLEALLKDGDVEKAVRIVKEVTEKLSKYEVPPEKLVIHEQITRDLKDYKATGPHVAVAKRLAARGVKIRPGTVISYIVLKGSGRIGDRAIPFDEFDPTKHKYDAEYYIENQVLPAVERILRAFGYRKEDLRYQKTRQVGLSAWLKPKGT

SEQ ID NO: 2217 - protein, 774 aa, synthetic construct
MILDTDLITEDGKPVLRIFKKENGEFKIEYDRTFEHYFYALLKDDSAIEEVKKITAERHGTVVTVKRVEKVQKKFLGRPVEVWKLYFTHPQDVPAIHDKIREHPAVIDIYEYDIPFAKRYLIDKGLVPMEGDEELKMLAFDIETLYHEGEEFAEGPILMISYADEEGARVITWKNVDLPYVDVVSTEREMIKRFLRVVKEKDPDVLITYNGDNFDFAYLKKRCEKLGINFALGRDGSEPKIQRMGDRFAVEVKGRIHFDLYPVIRRTINLPTYTLEAVYEAVFGQPKEKVYAEEITTAWETGENLERVARYSMEDAKVTYELGKEFLPMEAQLSRLIGQSLWDVSRSSTGNLVEWFLLRKAYERNELAPNKPDEKELARRRQSYEGGYVKEPERGLWENIVYLDFRSLYPSIIITHNVSPDTLNREGCKEYDVAPQVGHRFCKDFPGFIPSLLGDLLEERQKIKKKMKATIDPIERKLLDYRQRAIKILANSYYGYYGYARARWYCKECAESVTAWGREYITMTIKEIEEKYGFKVIYSDTDGFFATIPGADAETVKKKAMEFLKYINAKLPGALELEYEGFYKRGFFVTKKKYAVIDEEGKITTRGLEIVRRDWSEIAKETQARVLEALLKDGDVEKAVRIVKEVTEKLSKYEVPPEKLVIHEQITRDLKDYKATGPHVAVAKRLAARGVKIRPGTVISYIVLKGSGRIGDRAIPFDEFDPTKHKYDAEYYIENQVLPAVERILRAFGYRKEDLRYQKTRQVGLSAWLKPKGT

SEQ ID NO: 2218 - protein, 774 aa, synthetic construct
MILDTDLITEDGKPVLRIFKKENGEFKIEYDRTFEHYFYALLKDDSAIEEVKKITAERHGTVVTVKRVEKVQKKFLGRPVEVWKLYFTHPQDIPAIRDKIREHPAVIDIYEYDIPFAKRYLIDKGLVPMEGDEELKMLAFDIETLYHEGEEFAEGPILMISYADEEGARVITWKNVDLPYVDVVSTEREMIKRFLRVVKEKDPDVLITYNGDNFDFAYLKKRCEKLGINFALGRDGSEPKIQRMGDRFAVEVKGRIHFDLYPVIRRTINLPTYTLEAVYEAVFGQPKEKVYAEEITTAWETGENLERVARYSMEDAKVTYELGKEFLPMEAQLSRLIGQSLWDVSRSSTGNLVEWFLLRKAYERNELAPNKPDEKELARRRQSYEGGYVKEPERGLWENIVYLDFRSLYPSIIITHNVSPDTLNREGCKEYDVAPQVGHRFCKDFPGFIPSLLGDLLEERQKIKKKMKATIDPIERKLLDYRQRAIKILANSYYGYYGYARARWYCKECAESVTAWGREYITMTIKEIEEKYGFKVIYSDTDGFFATIPGADAETVKKKAMEFLKYINAKLPGALELEYEGFYKRGFFVTKKKYAVIDEEGKITTRGLEIVRRDWSEIAKETQARVLEALLKDGDVEKAVRIVKEVTEKLSKYEVPPEKLVIHEQITRDLKDYKATGPHVAVAKRLAARGVKIRPGTVISYIVLKGSGRIGDRAIPFDEFDPTKHKYDAEYYIENQVLPAVERILRAFGYRKEDLRYQKTRQVGLSAWLKPKGT

SEQ ID NO: 2219 - protein, 774 aa, synthetic construct
MILDTDLITEDGKPVLRIFKKENGEFKIEYDRTFEHYFYALLKDDSAIEEVKKITAERHGTVVTVKRVEKVQKKFLGRPVEVWKLYFTHPQDIPAIADKIREHPAVIDIYEYDIPFAKRYLIDKGLVPMEGDEELKMLAFDIETLYHEGEEFAEGPILMISYADEEGARVITWKNVDLPYVDVVSTEREMIKRFLRVVKEKDPDVLITYNGDNFDFAYLKKRCEKLGINFALGRDGSEPKIQRMGDRFAVEVKGRIHFDLYPVIRRTINLPTYTLEAVYEAVFGQPKEKVYAEEITTAWETGENLERVARYSMEDAKVTYELGKEFLPMEAQLSRLIGQSLWDVSRSSTGNLVEWFLLRKAYERNELAPNKPDEKELARRRQSYEGGYVKEPERGLWENIVYLDFRSLYPSIIITHNVSPDTLNREGCKEYDVAPQVGHRFCKDFPGFIPSLLGDLLEERQKIKKKMKATIDPIERKLLDYRQRAIKILANSYYGYYGYARARWYCKECAESVTAWGREYITMTIKEIEEKYGFKVIYSDTDGFFATIPGADAETVKKKAMEFLKYINAKLPGALELEYEGFYKRGFFVTKKKYAVIDEEGKITTRGLEIVRRDWSEIAKETQARVLEALLKDGDVEKAVRIVKEVTEKLSKYEVPPEKLVIHEQITRDLKDYKATGPHVAVAKRLAARGVKIRPGTVISYIVLKGSGRIGDRAIPFDEFDPTKHKYDAEYYIENQVLPAVERILRAFGYRKEDLRYQKTRQVGLSAWLKPKGT

SEQ ID NO: 2220 - protein, 774 aa, synthetic construct
MILDTDLITEDGKPVLRIFKKENGEFKIEYDRTFEHYFYALLKDDSAIEEVKKITAERHGTVVTVKRVEKVQKKFLGRPVEVWKLYFTHPQDIPAIHDKIREHPAVIDIYEYDIPFAKRYLIDKGLVPMEGDEELKMLAFDIETLYHEGEEFAEGPILMISYADEEGARVITWKNVDLPYVDVVSTEREMIKRFLRVVKEKDPDVLITYNGDNFDFAYLKKRCEKLGINFALGRDGSEPKIQRMGDRFAVEVKGRIHFDLYPVIRRTINLPTYTLEAVYEAVFGQPKEKVYAEEITTAWETGENLERVARYSMEDAKVTYELGKEFLPMEAQLSRLIGQSLWDVSRSSTGNLVEWFLLRKAYERNELAPNKPDEKELARRRQSYEGGYVKEPERGLWENIVYLDFRSLYPSIIITHNVSPDTLNREGCKEYDVAPQVGHRFCKDFPGFIPSLLGDLLEERQKIKKKMKATIDPIERKLLDYRQRAIKILANSYYGYYGYARARWYCKECAESVTAWGREYITMTIKEIEEKYGFKVIYSDTDGFFATIPGADAETVKKKAMEFLKYINAKLPGALELEYEGFYKRGFFVTKKKYAVIDEEGKITTRGLEIVRRDWSEIAKETQARVLEALLKDGDVEKAVRIVKEVTEKLSKYEVPPEKLVIHEQITRDLKDYKATGPHVAVAKRLAARGVKIRPGTVISYIVLKGSGRIGDRAIPFDEFDPTKHKYDAEYYIENQVLPAVERILRAFGYRKEDLRYQKTRQVGLSAWLKPKGT

SEQ ID NO: 2221 - protein, 774 aa, synthetic construct
MILDTDLITEDGKPVLRIFKKENGEFKIEYDRTFERYFYALLKDDSAIEEVKKITAERHGTVVTVKRVEKVQKKFLGRPVEVWKLYFTHPQDVPAIRDKIREHPAVIDIYEYDIPFAKRYLIDKGLVPMEGDEELKMLAFDIETLYHEGEEFAEGPILMISYADEEGARVITWKNVDLPYVDVVSTEREMIKRFLRVVKEKDPDVLITYNGDNFDFAYLKKRCEKLGINFALGRDGSEPKIQRMGDRFAVEVKGRIHFDLYPVIRRTINLPTYTLEAVYEAVFGQPKEKVYAEEITTAWETGENLERVARYSMEDAKVTYELGKEFLPMEAQLSRLIGQSLWDVSRSSTGNLVEWFLLRKAYERNELAPNKPDEKELARRRQSYEGGYVKEPERGLWENIVYLDFRSLYPSIIITHNVSPDTLNREGCKEYDVAPQVGHRFCKDFPGFIPSLLGDLLEERQKIKKKMKATIDPIERKLLDYRQRAIKILANSYYGYYGYARARWYCKECAESVTAWGREYITMTIKEIEEKYGFKVIYSDTDGFFATIPGADAETVKKKAMEFLKYINAKLPGALELEYEGFYKRGFFVTKKKYAVIDEEGKITTRGLEIVRRDWSEIAKETQARVLEALLKDGDVEKAVRIVKEVTEKLSKYEVPPEKLVIHEQITRDLKDYKATGPHVAVAKRLAARGVKIRPGTVISYIVLKGSGRIGDRAIPFDEFDPTKHKYDAEYYIENQVLPAVERILRAFGYRKEDLRYQKTRQVGLSAWLKPKGT

SEQ ID NO: 2222 - protein, 774 aa, synthetic construct
MILDTDLITEDGKPVLRIFKKENGEFKIEYDRTFESYFYALLKDDSAIEEVKKITAERHGTVVTVKRVEKVQKKFLGRPVEVWKLYFTHPQDVPAIRDKIREHPAVIDIYEYDIPFAKRYLIDKGLVPMEGDEELKMLAFDIETLYHEGEEFAEGPILMISYADEEGARVITWKNVDLPYVDVVSTEREMIKRFLRVVKEKDPDVLITYNGDNFDFAYLKKRCEKLGINFALGRDGSEPKIQRMGDRFAVEVKGRIHFDLYPVIRRTINLPTYTLEAVYEAVFGQPKEKVYAEEITTAWETGENLERVARYSMEDAKVTYELGKEFLPMEAQLSRLIGQSLWDVSRSSTGNLVEWFLLRKAYERNELAPNKPDEKELARRRQSYEGGYVKEPERGLWENIVYLDFRSLYPSIIITHNVSPDTLNREGCKEYDVAPQVGHRFCKDFPGFIPSLLGDLLEERQKIKKKMKATIDPIERKLLDYRQRAIKILANSYYGYYGYARARWYCKECAESVTAWGREYITMTIKEIEEKYGFKVIYSDTDGFFATIPGADAETVKKKAMEFLKYINAKLPGALELEYEGFYKRGFFVTKKKYAVIDEEGKITTRGLEIVRRDWSEIAKETQARVLEALLKDGDVEKAVRIVKEVTEKLSKYEVPPEKLVIHEQITRDLKDYKATGPHVAVAKRLAARGVKIRPGTVISYIVLKGSGRIGDRAIPFDEFDPTKHKYDAEYYIENQVLPAVERILRAFGYRKEDLRYQKTRQVGLSAWLKPKGT

SEQ ID NO: 2223 - protein, 774 aa, synthetic construct
MILDTDLITEDGKPVLRIFKKENGEFKIEYDRTFESYFYALLKDDSAIEEVKKITAERHGTVVTVKRVEKVQKKFLGRPVEVWKLYFTHFQDVPAIADKIREHPAVIDIYEYDIPFAKRYLIDKGLVPMEGDEELKMLAFDIETLYHEGEEFAEGPILMISYADEEGARVITWKNVDLPYVDVVSTEREMIKRFLRVVKEKDPDVLITYNGDNFDFAYLKKRCEKLGINFALGRDGSEPKIQRMGDRFAVEVKGRIHFDLYPVIRRTINLPTYTLEAVYEAVFGQPKEKVYAEEITTAWETGENLERVARYSMEDAKVTYELGKEFLPMEAQLSRLIGQSLWDVSRSSTGNLVEWFLLRKAYERNELAPNKPDEKELARRRQSYEGGYVKEPERGLWENIVYLDFRSLYPSIIITHNVSPDTLNREGCKEYDVAPQVGHRFCKDFPGFIPSLLGDLLEERQKIKKKMKATIDPIERKLLDYRQRAIKILANSYYGYYGYARARWYCKECAESVTAWGREYITMTIKEIEEKYGFKVIYSDTDGFFATIPGADAETVKKKAMEFLKYINAKLPGALELEYEGFYKRGFFVTKKKYAVIDEEGKITTRGLEIVRRDWSEIAKETQARVLEALLKDGDVEKAVRIVKEVTEKLSKYEVPPEKLVIHEQITRDLKDYKATGPHVAVAKRLAARGVKIRPGTVISYIVLKGSGRIGDRAIPFDEFDPTKHKYDAEYYIENQVLPAVERILRAFGYRKEDLRYQKTRQVGLSAWLKPKGT

SEQ ID NO: 2224 - protein, 774 aa, synthetic construct
MILDTDLITEDGKPVLRIFKKENGEFKIEYDRTFESYFYALLKDDSAIEEVKKITAERHGTVVTVKRVEKVQKKFLGRPVEVWKLYFTHWQDIPAIADKIREHPAVIDIYEYDIPFAKRYLIDKGLVPMEGDEELKMLAFDIETLYHEGEEFAEGPILMISYADEEGARVITWKNVDLPYVDVVSTEREMIKRFLRVVKEKDPDVLITYNGDNFDFAYLKKRCEKLGINFALGRDGSEPKIQRMGDRFAVEVKGRIHFDLYPVIRRTINLPTYTLEAVYEAVFGQPKEKVYAEEITTAWETGENLERVARYSMEDAKVTYELGKEFLPMEAQLSRLIGQSLWDVSRSSTGNLVEWFLLRKAYERNELAPNKPDEKELARRRQSYEGGYVKEPERGLWENIVYLDFRSLYPSIIITHNVSPDTLNREGCKEYDVAPQVGHRFCKDFPGFIPSLLGDLLEERQKIKKKMKATIDPIERKLLDYRQRAIKILANSYYGYYGYARARWYCKECAESVTAWGREYITMTIKEIEEKYGFKVIYSDTDGFFATIPGADAETVKKKAMEFLKYINAKLPGALELEYEGFYKRGFFVTKKKYAVIDEEGKITTRGLEIVRRDWSEIAKETQARVLEALLKDGDVEKAVRIVKEVTEKLSKYEVPPEKLVIHEQITRDLKDYKATGPHVAVAKRLAARGVKIRPGTVISYIVLKGSGRIGDRAIPFDEFDPTKHKYDAEYYIENQVLPAVERILRAFGYRKEDLRYQKTRQVGLSAWLKPKGT

SEQ ID NO: 2225 - protein, 774 aa, synthetic construct
MILDTDLITEDGKPVLRIFKKENGEFKIEYDRTFESYFYALLKDDSAIEEVKKITAERHGTVVTVKRVEKVQKKFLGRPVEVWKLYFTHYQDIPAIADKIREHPAVIDIYEYDIPFAKRYLIDKGLVPMEGDEELKMLAFDIETLYHEGEEFAEGPILMISYADEEGARVITWKNVDLPYVDVVSTEREMIKRFLRVVKEKDPDVLITYNGDNFDFAYLKKRCEKLGINFALGRDGSEPKIQRMGDRFAVEVKGRIHFDLYPVIRRTINLPTYTLEAVYEAVFGQPKEKVYAEEITTAWETGENLERVARYSMEDAKVTYELGKEFLPMEAQLSRLIGQSLWDVSRSSTGNLVEWFLLRKAYERNELAPNKPDEKELARRRQSYEGGYVKEPERGLWENIVYLDFRSLYPSIIITHNVSPDTLNREGCKEYDVAPQVGHRFCKDFPGFIPSLLGDLLEERQKIKKKMKATIDPIERKLLDYRQRAIKILANSYYGYYGYARARWYCKECAESVTAWGREYITMTIKEIEEKYGFKVIYSDTDGFFATIPGADAETVKKKAMEFLKYINAKLPGALELEYEGFYKRGFFVTKKKYAVIDEEGKITTRGLEIVRRDWSEIAKETQARVLEALLKDGDVEKAVRIVKEVTEKLSKYEVPPEKLVIHEQITRDLKDYKATGPHVAVAKRLAARGVKIRPGTVISYIVLKGSGRIGDRAIPFDEFDPTKHKYDAEYYIENQVLPAVERILRAFGYRKEDLRYQKTRQVGLSAWLKPKGT

SEQ ID NO: 2226 - protein, 774 aa, synthetic construct
MILDTDLITEDGKPVLRIFKKENGEFKIEYDRTFESYFYALLKDDSAIEEVKKITAERHGTVVTVKRVEKVQKKFLGRPVEVWKLYFTHPQDIPAIRDKIREHPAVIDIYEYDIPFAKRYLIDKGLVPMEGDEELKMLAFDIETLYHEGEEFAEGPILMISYADEEGARVITWKNVDLPYVDVVSTEREMIKRFLRVVKEKDPDVLITYNGDNFDFAYLKKRCEKLGINFALGRDGSEPKIQRMGDRFAVEVKGRIHFDLYPVIRRTINLPTYTLEAVYEAVFGQPKEKVYAEEITTAWETGENLERVARYSMEDAKVTYELGKEFLPMEAQLSRLIGQSLWDVSRSSTGNLVEWFLLRKAYERNELAPNKPDEKELARRRQSYEGGYVKEPERGLWENIVYLDFRSLYPSIIITHNVSPDTLNREGCKEYDVAPQVGHRFCKDFPGFIPSLLGDLLEERQKIKKKMKATIDPIERKLLDYRQRAIKILANSYYGYYGYARARWYCKECAESVTAWGREYITMTIKEIEEKYGFKVIYSDTDGFFATIPGADAETVKKKAMEFLKYINAKLPGALELEYEGFYKRGFFVTKKKYAVIDEEGKITTRGLEIVRRDWSEIAKETQARVLEALLKDGDVEKAVRIVKEVTEKLSKYEVPPEKLVIHEQITRDLKDYKATGPHVAVAKRLAARGVKIRPGTVISYIVLKGSGRIGDRAIPFDEFDPTKHKYDAEYYIENQVLPAVERILRAFGYRKEDLRYQKTRQVGLSAWLKPKGT

SEQ ID NO: 2227 - protein, 774 aa, synthetic construct
MILDTDLITEDGKPVLRIFKKENGEFKIEYDRTFESYFYALLKDDSAIEEVKKITAERHGTVVTVKRVEKVQKKFLGRPVEVWKLYFTHPQDIPAIADKIREHPAVIDIYEYDIPFAKRYLIDKGLVPMEGDEELKMLAFDIETLYHEGEEFAEGPILMISYADEEGARVITWKNVDLPYVDVVSTEREMIKRFLRVVKEKDPDVLITYNGDNFDFAYLKKRCEKLGINFALGRDGSEPKIQRMGDRFAVEVKGRIHFDLYPVIRRTINLPTYTLEAVYEAVFGQPKEKVYAEEITTAWETGENLERVARYSMEDAKVTYELGKEFLPMEAQLSRLIGQSLWDVSRSSTGNLVEWFLLRKAYERNELAPNKPDEKELARRRQSYEGGYVKEPERGLWENIVYLDFRSLYPSIIITHNVSPDTLNREGCKEYDVAPQVGHRFCKDFPGFIPSLLGDLLEERQKIKKKMKATIDPIERKLLDYRQRAIKILANSYYGYYGYARARWYCKECAESVTAWGREYITMTIKEIEEKYGFKVIYSDTDGFFATIPGADAETVKKKAMEFLKYINAKLPGALELEYEGFYKRGFFVTKKKYAVIDEEGKITTRGLEIVRRDWSEIAKETQARVLEALLKDGDVEKAVRIVKEVTEKLSKYEVPPEKLVIHEQITRDLKDYKATGPHVAVAKRLAARGVKIRPGTVISYIVLKGSGRIGDRAIPFDEFDPTKHKYDAEYYIENQVLPAVERILRAFGYRKEDLRYQKTRQVGLSAWLKPKGT

SEQ ID NO: 2228 - protein, 774 aa, synthetic construct
MILDTDLITEDGKPVLRIFKKENGEFKIEYDRTFESYFYALLKDDSAIEEVKKITAERHGTVVTVKRVEKVQKKFLGRPVEVWKLYFTHPQDIPAIFDKIREHPAVIDIYEYDIPFAKRYLIDKGLVPMEGDEELKMLAFDIETLYHEGEEFAEGPILMISYADEEGARVITWKNVDLPYVDVVSTEREMIKRFLRVVKEKDPDVLITYNGDNFDFAYLKKRCEKLGINFALGRDGSEPKIQRMGDRFAVEVKGRIHFDLYPVIRRTINLPTYTLEAVYEAVFGQPKEKVYAEEITTAWETGENLERVARYSMEDAKVTYELGKEFLPMEAQLSRLIGQSLWDVSRSSTGNLVEWFLLRKAYERNELAPNKPDEKELARRRQSYEGGYVKEPERGLWENIVYLDFRSLYPSIIITHNVSPDTLNREGCKEYDVAPQVGHRFCKDFPGFIPSLLGDLLEERQKIKKKMKATIDPIERKLLDYRQRAIKILANSYYGYYGYARARWYCKECAESVTAWGREYITMTIKEIEEKYGFKVIYSDTDGFFATIPGADAETVKKKAMEFLKYINAKLPGALELEYEGFYKRGFFVTKKKYAVIDEEGKITTRGLEIVRRDWSEIAKETQARVLEALLKDGDVEKAVRIVKEVTEKLSKYEVPPEKLVIHEQITRDLKDYKATGPHVAVAKRLAARGVKIRPGTVISYIVLKGSGRIGDRAIPFDEFDPTKHKYDAEYYIENQVLPAVERILRAFGYRKEDLRYQKTRQVGLSAWLKPKGT

SEQ ID NO: 2229 - protein, 774 aa, synthetic construct
MILDTDLITEDGKPVLRIFKKENGEFKIEYDRTFEWYFYALLKDDSAIEEVKKITAERHGTVVTVKRVEKVQKKFLGRPVEVWKLYFTHPQDVPAIRDKIREHPAVIDIYEYDIPFAKRYLIDKGLVPMEGDEELKMLAFDIETLYHEGEEFAEGPILMISYADEEGARVITWKNVDLPYVDVVSTEREMIKRFLRVVKEKDPDVLITYNGDNFDFAYLKKRCEKLGINFALGRDGSEPKIQRMGDRFAVEVKGRIHFDLYPVIRRTINLPTYTLEAVYEAVFGQPKEKVYAEEITTAWETGENLERVARYSMEDAKVTYELGKEFLPMEAQLSRLIGQSLWDVSRSSTGNLVEWFLLRKAYERNELAPNKPDEKELARRRQSYEGGYVKEPERGLWENIVYLDFRSLYPSIIITHNVSPDTLNREGCKEYDVAPQVGHRFCKDFPGFIPSLLGDLLEERQKIKKKMKATIDPIERKLLDYRQRAIKILANSYYGYYGYARARWYCKECAESVTAWGREYITMTIKEIEEKYGFKVIYSDTDGFFATIPGADAETVKKKAMEFLKYINAKLPGALELEYEGFYKRGFFVTKKKYAVIDEEGKITTRGLEIVRRDWSEIAKETQARVLEALLKDGDVEKAVRIVKEVTEKLSKYEVPPEKLVIHEQITRDLKDYKATGPHVAVAKRLAARGVKIRPGTVISYIVLKGSGRIGDRAIPFDEFDPTKHKYDAEYYIENQVLPAVERILRAFGYRKEDLRYQKTRQVGLSAWLKPKGT

SEQ ID NO: 2230 - protein, 774 aa, synthetic construct
MILDTDLITEDGKPVLRIFKKENGEFKIEYDRTFEWYFYALLKDDSAIEEVKKITAERHGTVVTVKRVEKVQKKFLGRPVEVWKLYFTHFQDVPAIRDKIREHPAVIDIYEYDIPFAKRYLIDKGLVPMEGDEELKMLAFDIETLYHEGEEFAEGPILMISYADEEGARVITWKNVDLPYVDVVSTEREMIKRFLRVVKEKDPDVLITYNGDNFDFAYLKKRCEKLGINFALGRDGSEPKIQRMGDRFAVEVKGRIHFDLYPVIRRTINLPTYTLEAVYEAVFGQPKEKVYAEEITTAWETGENLERVARYSMEDAKVTYELGKEFLPMEAQLSRLIGQSLWDVSRSSTGNLVEWFLLRKAYERNELAPNKPDEKELARRRQSYEGGYVKEPERGLWENIVYLDFRSLYPSIIITHNVSPDTLNREGCKEYDVAPQVGHRFCKDFPGFIPSLLGDLLEERQKIKKKMKATIDPIERKLLDYRQRAIKILANSYYGYYGYARARWYCKECAESVTAWGREYITMTIKEIEEKYGFKVIYSDTDGFFATIPGADAETVKKKAMEFLKYINAKLPGALELEYEGFYKRGFFVTKKKYAVIDEEGKITTRGLEIVRRDWSEIAKETQARVLEALLKDGDVEKAVRIVKEVTEKLSKYEVPPEKLVIHEQITRDLKDYKATGPHVAVAKRLAARGVKIRPGTVISYIVLKGSGRIGDRAIPFDEFDPTKHKYDAEYYIENQVLPAVERILRAFGYRKEDLRYQKTRQVGLSAWLKPKGT

SEQ ID NO: 2231 - protein, 774 aa, synthetic construct
MILDTDLITEDGKPVLRIFKKENGEFKIEYDRTFEWYFYALLKDDSAIEEVKKITAERHGTVVTVKRVEKVQKKFLGRPVEVWKLYFTHFQDVPAIADKIREHPAVIDIYEYDIPFAKRYLIDKGLVPMEGDEELKMLAFDIETLYHEGEEFAEGPILMISYADEEGARVITWKNVDLPYVDVVSTEREMIKRFLRVVKEKDPDVLITYNGDNFDFAYLKKRCEKLGINFALGRDGSEPKIQRMGDRFAVEVKGRIHFDLYPVIRRTINLPTYTLEAVYEAVFGQPKEKVYAEEITTAWETGENLERVARYSMEDAKVTYELGKEFLPMEAQLSRLIGQSLWDVSRSSTGNLVEWFLLRKAYERNELAPNKPDEKELARRRQSYEGGYVKEPERGLWENIVYLDFRSLYPSIIITHNVSPDTLNREGCKEYDVAPQVGHRFCKDFPGFIPSLLGDLLEERQKIKKKMKATIDPIERKLLDYRQRAIKILANSYYGYYGYARARWYCKECAESVTAWGREYITMTIKEIEEKYGFKVIYSDTDGFFATIPGADAETVKKKAMEFLKYINAKLPGALELEYEGFYKRGFFVTKKKYAVIDEEGKITTRGLEIVRRDWSEIAKETQARVLEALLKDGDVEKAVRIVKEVTEKLSKYEVPPEKLVIHEQITRDLKDYKATGPHVAVAKRLAARGVKIRPGTVISYIVLKGSGRIGDRAIPFDEFDPTKHKYDAEYYIENQVLPAVERILRAFGYRKEDLRYQKTRQVGLSAWLKPKGT

SEQ ID NO: 2232 - protein, 774 aa, synthetic construct
MILDTDLITEDGKPVLRIFKKENGEFKIEYDRTFEWYFYALLKDDSAIEEVKKITAERHGTVVTVKRVEKVQKKFLGRPVEVWKLYFTHFQDIPAIRDKIREHPAVIDIYEYDIPFAKRYLIDKGLVPMEGDEELKMLAFDIETLYHEGEEFAEGPILMISYADEEGARVITWKNVDLPYVDVVSTEREMIKRFLRVVKEKDPDVLITYNGDNFDFAYLKKRCEKLGINFALGRDGSEPKIQRMGDRFAVEVKGRIHFDLYPVIRRTINLPTYTLEAVYEAVFGQPKEKVYAEEITTAWETGENLERVARYSMEDAKVTYELGKEFLPMEAQLSRLIGQSLWDVSRSSTGNLVEWFLLRKAYERNELAPNKPDEKELARRRQSYEGGYVKEPERGLWENIVYLDFRSLYPSIIITHNVSPDTLNREGCKEYDVAPQVGHRFCKDFPGFIPSLLGDLLEERQKIKKKMKATIDPIERKLLDYRQRAIKILANSYYGYYGYARARWYCKECAESVTAWGREYITMTIKEIEEKYGFKVIYSDTDGFFATIPGADAETVKKKAMEFLKYINAKLPGALELEYEGFYKRGFFVTKKKYAVIDEEGKITTRGLEIVRRDWSEIAKETQARVLEALLKDGDVEKAVRIVKEVTEKLSKYEVPPEKLVIHEQITRDLKDYKATGPHVAVAKRLAARGVKIRPGTVISYIVLKGSGRIGDRAIPFDEFDPTKHKYDAEYYIENQVLPAVERILRAFGYRKEDLRYQKTRQVGLSAWLKPKGT

SEQ ID NO: 2233 - protein, 774 aa, synthetic construct
MILDTDLITEDGKPVLRIFKKENGEFKIEYDRTFEWYFYALLKDDSAIEEVKKITAERHGTVVTVKRVEKVQKKFLGRPVEVWKLYFTHFQDIPAIADKIREHPAVIDIYEYDIPFAKRYLIDKGLVPMEGDEELKMLAFDIETLYHEGEEFAEGPILMISYADEEGARVITWKNVDLPYVDVVSTEREMIKRFLRVVKEKDPDVLITYNGDNFDFAYLKKRCEKLGINFALGRDGSEPKIQRMGDRFAVEVKGRIHFDLYPVIRRTINLPTYTLEAVYEAVFGQPKEKVYAEEITTAWETGENLERVARYSMEDAKVTYELGKEFLPMEAQLSRLIGQSLWDVSRSSTGNLVEWFLLRKAYERNELAPNKPDEKELARRRQSYEGGYVKEPERGLWENIVYLDFRSLYPSIIITHNVSPDTLNREGCKEYDVAPQVGHRFCKDFPGFIPSLLGDLLEERQKIKKKMKATIDPIERKLLDYRQRAIKILANSYYGYYGYARARWYCKECAESVTAWGREYITMTIKEIEEKYGFKVIYSDTDGFFATIPGADAETVKKKAMEFLKYINAKLPGALELEYEGFYKRGFFVTKKKYAVIDEEGKITTRGLEIVRRDWSEIAKETQARVLEALLKDGDVEKAVRIVKEVTEKLSKYEVPPEKLVIHEQITRDLKDYKATGPHVAVAKRLAARGVKIRPGTVISYIVLKGSGRIGDRAIPFDEFDPTKHKYDAEYYIENQVLPAVERILRAFGYRKEDLRYQKTRQVGLSAWLKPKGT

SEQ ID NO: 2234 - protein, 774 aa, synthetic construct
MILDTDLITEDGKPVLRIFKKENGEFKIEYDRTFEWYFYALLKDDSAIEEVKKITAERHGTVVTVKRVEKVQKKFLGRPVEVWKLYFTHFQDIPAIHDKIREHPAVIDIYEYDIPFAKRYLIDKGLVPMEGDEELKMLAFDIETLYHEGEEFAEGPILMISYADEEGARVITWKNVDLPYVDVVSTEREMIKRFLRVVKEKDPDVLITYNGDNFDFAYLKKRCEKLGINFALGRDGSEPKIQRMGDRFAVEVKGRIHFDLYPVIRRTINLPTYTLEAVYEAVFGQPKEKVYAEEITTAWETGENLERVARYSMEDAKVTYELGKEFLPMEAQLSRLIGQSLWDVSRSSTGNLVEWFLLRKAYERNELAPNKPDEKELARRRQSYEGGYVKEPERGLWENIVYLDFRSLYPSIIITHNVSPDTLNREGCKEYDVAPQVGHRFCKDFPGFIPSLLGDLLEERQKIKKKMKATIDPIERKLLDYRQRAIKILANSYYGYYGYARARWYCKECAESVTAWGREYITMTIKEIEEKYGFKVIYSDTDGFFATIPGADAETVKKKAMEFLKYINAKLPGALELEYEGFYKRGFFVTKKKYAVIDEEGKITTRGLEIVRRDWSEIAKETQARVLEALLKDGDVEKAVRIVKEVTEKLSKYEVPPEKLVIHEQITRDLKDYKATGPHVAVAKRLAARGVKIRPGTVISYIVLKGSGRIGDRAIPFDEFDPTKHKYDAEYYIENQVLPAVERILRAFGYRKEDLRYQKTRQVGLSAWLKPKGT

SEQ ID NO: 2235 - protein, 774 aa, synthetic construct
MILDTDLITEDGKPVLRIFKKENGEFKIEYDRTFEWYFYALLKDDSAIEEVKKITAERHGTVVTVKRVEKVQKKFLGRPVEVWKLYFTHIQDIPAIRDKIREHPAVIDIYEYDIPFAKRYLIDKGLVPMEGDEELKMLAFDIETLYHEGEEFAEGPILMISYADEEGARVITWKNVDLPYVDVVSTEREMIKRFLRVVKEKDPDVLITYNGDNFDFAYLKKRCEKLGINFALGRDGSEPKIQRMGDRFAVEVKGRIHFDLYPVIRRTINLPTYTLEAVYEAVFGQPKEKVYAEEITTAWETGENLERVARYSMEDAKVTYELGKEFLPMEAQLSRLIGQSLWDVSRSSTGNLVEWFLLRKAYERNELAPNKPDEKELARRRQSYEGGYVKEPERGLWENIVYLDFRSLYPSIIITHNVSPDTLNREGCKEYDVAPQVGHRFCKDFPGFIPSLLGDLLEERQKIKKKMKATIDPIERKLLDYRQRAIKILANSYYGYYGYARARWYCKECAESVTAWGREYITMTIKEIEEKYGFKVIYSDTDGFFATIPGADAETVKKKAMEFLKYINAKLPGALELEYEGFYKRGFFVTKKKYAVIDEEGKITTRGLEIVRRDWSEIAKETQARVLEALLKDGDVEKAVRIVKEVTEKLSKYEVPPEKLVIHEQITRDLKDYKATGPHVAVAKRLAARGVKIRPGTVISYIVLKGSGRIGDRAIPFDEFDPTKHKYDAEYYIENQVLPAVERILRAFGYRKEDLRYQKTRQVGLSAWLKPKGT

SEQ ID NO: 2236 - protein, 774 aa, synthetic construct
MILDTDLITEDGKPVLRIFKKENGEFKIEYDRTFEWYFYALLKDDSAIEEVKKITAERHGTVVTVKRVEKVQKKFLGRPVEVWKLYFTHIQDIPAIADKIREHPAVIDIYEYDIPFAKRYLIDKGLVPMEGDEELKMLAFDIETLYHEGEEFAEGPILMISYADEEGARVITWKNVDLPYVDVVSTEREMIKRFLRVVKEKDPDVLITYNGDNFDFAYLKKRCEKLGINFALGRDGSEPKIQRMGDRFAVEVKGRIHFDLYPVIRRTINLPTYTLEAVYEAVFGQPKEKVYAEEITTAWETGENLERVARYSMEDAKVTYELGKEFLPMEAQLSRLIGQSLWDVSRSSTGNLVEWFLLRKAYERNELAPNKPDEKELARRRQSYEGGYVKEPERGLWENIVYLDFRSLYPSIIITHNVSPDTLNREGCKEYDVAPQVGHRFCKDFPGFIPSLLGDLLEERQKIKKKMKATIDPIERKLLDYRQRAIKILANSYYGYYGYARARWYCKECAESVTAWGREYITMTIKEIEEKYGFKVIYSDTDGFFATIPGADAETVKKKAMEFLKYINAKLPGALELEYEGFYKRGFFVTKKKYAVIDEEGKITTRGLEIVRRDWSEIAKETQARVLEALLKDGDVEKAVRIVKEVTEKLSKYEVPPEKLVIHEQITRDLKDYKATGPHVAVAKRLAARGVKIRPGTVISYIVLKGSGRIGDRAIPFDEFDPTKHKYDAEYYIENQVLPAVERILRAFGYRKEDLRYQKTRQVGLSAWLKPKGT

SEQ ID NO: 2237 - protein, 774 aa, synthetic construct
MILDTDLITEDGKPVLRIFKKENGEFKIEYDRTFEWYFYALLKDDSAIEEVKKITAERHGTVVTVKRVEKVQKKFLGRPVEVWKLYFTHWQDVPAIRDKIREHPAVIDIYEYDIPFAKRYLIDKGLVPMEGDEELKMLAFDIETLYHEGEEFAEGPILMISYADEEGARVITWKNVDLPYVDVVSTEREMIKRFLRVVKEKDPDVLITYNGDNFDFAYLKKRCEKLGINFALGRDGSEPKIQRMGDRFAVEVKGRIHFDLYPVIRRTINLPTYTLEAVYEAVFGQPKEKVYAEEITTAWETGENLERVARYSMEDAKVTYELGKEFLPMEAQLSRLIGQSLWDVSRSSTGNLVEWFLLRKAYERNELAPNKPDEKELARRRQSYEGGYVKEPERGLWENIVYLDFRSLYPSIIITHNVSPDTLNREGCKEYDVAPQVGHRFCKDFPGFIPSLLGDLLEERQKIKKKMKATIDPIERKLLDYRQRAIKILANSYYGYYGYARARWYCKECAESVTAWGREYITMTIKEIEEKYGFKVIYSDTDGFFATIPGADAETVKKKAMEFLKYINAKLPGALELEYEGFYKRGFFVTKKKYAVIDEEGKITTRGLEIVRRDWSEIAKETQARVLEALLKDGDVEKAVRIVKEVTEKLSKYEVPPEKLVIHEQITRDLKDYKATGPHVAVAKRLAARGVKIRPGTVISYIVLKGSGRIGDRAIPFDEFDPTKHKYDAEYYIENQVLPAVERILRAFGYRKEDLRYQKTRQVGLSAWLKPKGT

SEQ ID NO: 2238 - protein, 774 aa, synthetic construct
MILDTDLITEDGKPVLRIFKKENGEFKIEYDRTFEWYFYALLKDDSAIEEVKKITAERHGTVVTVKRVEKVQKKFLGRPVEVWKLYFTHWQDVPAIHDKIREHPAVIDIYEYDIPFAKRYLIDKGLVPMEGDEELKMLAFDIETLYHEGEEFAEGPILMISYADEEGARVITWKNVDLPYVDVVSTEREMIKRFLRVVKEKDPDVLITYNGDNFDFAYLKKRCEKLGINFALGRDGSEPKIQRMGDRFAVEVKGRIHFDLYPVIRRTINLPTYTLEAVYEAVFGQPKEKVYAEEITTAWETGENLERVARYSMEDAKVTYELGKEFLPMEAQLSRLIGQSLWDVSRSSTGNLVEWFLLRKAYERNELAPNKPDEKELARRRQSYEGGYVKEPERGLWENIVYLDFRSLYPSIIITHNVSPDTLNREGCKEYDVAPQVGHRFCKDFPGFIPSLLGDLLEERQKIKKKMKATIDPIERKLLDYRQRAIKILANSYYGYYGYARARWYCKECAESVTAWGREYITMTIKEIEEKYGFKVIYSDTDGFFATIPGADAETVKKKAMEFLKYINAKLPGALELEYEGFYKRGFFVTKKKYAVIDEEGKITTRGLEIVRRDWSEIAKETQARVLEALLKDGDVEKAVRIVKEVTEKLSKYEVPPEKLVIHEQITRDLKDYKATGPHVAVAKRLAARGVKIRPGTVISYIVLKGSGRIGDRAIPFDEFDPTKHKYDAEYYIENQVLPAVERILRAFGYRKEDLRYQKTRQVGLSAWLKPKGT

SEQ ID NO: 2239 - protein, 774 aa, synthetic construct
MILDTDLITEDGKPVLRIFKKENGEFKIEYDRTFEWYFYALLKDDSAIEEVKKITAERHGTVVTVKRVEKVQKKFLGRPVEVWKLYFTHWQDIPAIRDKIREHPAVIDIYEYDIPFAKRYLIDKGLVPMEGDEELKMLAFDIETLYHEGEEFAEGPILMISYADEEGARVITWKNVDLPYVDVVSTEREMIKRFLRVVKEKDPDVLITYNGDNFDFAYLKKRCEKLGINFALGRDGSEPKIQRMGDRFAVEVKGRIHFDLYPVIRRTINLPTYTLEAVYEAVFGQPKEKVYAEEITTAWETGENLERVARYSMEDAKVTYELGKEFLPMEAQLSRLIGQSLWDVSRSSTGNLVEWFLLRKAYERNELAPNKPDEKELARRRQSYEGGYVKEPERGLWENIVYLDFRSLYPSIIITHNVSPDTLNREGCKEYDVAPQVGHRFCKDFPGFIPSLLGDLLEERQKIKKKMKATIDPIERKLLDYRQRAIKILANSYYGYYGYARARWYCKECAESVTAWGREYITMTIKEIEEKYGFKVIYSDTDGFFATIPGADAETVKKKAMEFLKYINAKLPGALELEYEGFYKRGFFVTKKKYAVIDEEGKITTRGLEIVRRDWSEIAKETQARVLEALLKDGDVEKAVRIVKEVTEKLSKYEVPPEKLVIHEQITRDLKDYKATGPHVAVAKRLAARGVKIRPGTVISYIVLKGSGRIGDRAIPFDEFDPTKHKYDAEYYIENQVLPAVERILRAFGYRKEDLRYQKTRQVGLSAWLKPKGT

SEQ ID NO: 2240 - protein, 774 aa, synthetic construct
MILDTDLITEDGKPVLRIFKKENGEFKIEYDRTFEWYFYALLKDDSAIEEVKKITAERHGTVVTVKRVEKVQKKFLGRPVEVWKLYFTHWQDIPAIHDKIREHPAVIDIYEYDIPFAKRYLIDKGLVPMEGDEELKMLAFDIETLYHEGEEFAEGPILMISYADEEGARVITWKNVDLPYVDVVSTEREMIKRFLRVVKEKDPDVLITYNGDNFDFAYLKKRCEKLGINFALGRDGSEPKIQRMGDRFAVEVKGRIHFDLYPVIRRTINLPTYTLEAVYEAVFGQPKEKVYAEEITTAWETGENLERVARYSMEDAKVTYELGKEFLPMEAQLSRLIGQSLWDVSRSSTGNLVEWFLLRKAYERNELAPNKPDEKELARRRQSYEGGYVKEPERGLWENIVYLDFRSLYPSIIITHNVSPDTLNREGCKEYDVAPQVGHRFCKDFPGFIPSLLGDLLEERQKIKKKMKATIDPIERKLLDYRQRAIKILANSYYGYYGYARARWYCKECAESVTAWGREYITMTIKEIEEKYGFKVIYSDTDGFFATIPGADAETVKKKAMEFLKYINAKLPGALELEYEGFYKRGFFVTKKKYAVIDEEGKITTRGLEIVRRDWSEIAKETQARVLEALLKDGDVEKAVRIVKEVTEKLSKYEVPPEKLVIHEQITRDLKDYKATGPHVAVAKRLAARGVKIRPGTVISYIVLKGSGRIGDRAIPFDEFDPTKHKYDAEYYIENQVLPAVERILRAFGYRKEDLRYQKTRQVGLSAWLKPKGT

SEQ ID NO: 2241 - protein, 774 aa, synthetic construct
MILDTDLITEDGKPVLRIFKKENGEFKIEYDRTFEWYFYALLKDDSAIEEVKKITAERHGTVVTVKRVEKVQKKFLGRPVEVWKLYFTHYQDVPAIRDKIREHPAVIDIYEYDIPFAKRYLIDKGLVPMEGDEELKMLAFDIETLYHEGEEFAEGPILMISYADEEGARVITWKNVDLPYVDVVSTEREMIKRFLRVVKEKDPDVLITYNGDNFDFAYLKKRCEKLGINFALGRDGSEPKIQRMGDRFAVEVKGRIHFDLYPVIRRTINLPTYTLEAVYEAVFGQPKEKVYAEEITTAWETGENLERVARYSMEDAKVTYELGKEFLPMEAQLSRLIGQSLWDVSRSSTGNLVEWFLLRKAYERNELAPNKPDEKELARRRQSYEGGYVKEPERGLWENIVYLDFRSLYPSIIITHNVSPDTLNREGCKEYDVAPQVGHRFCKDFPGFIPSLLGDLLEERQKIKKKMKATIDPIERKLLDYRQRAIKILANSYYGYYGYARARWYCKECAESVTAWGREYITMTIKEIEEKYGFKVIYSDTDGFFATIPGADAETVKKKAMEFLKYINAKLPGALELEYEGFYKRGFFVTKKKYAVIDEEGKITTRGLEIVRRDWSEIAKETQARVLEALLKDGDVEKAVRIVKEVTEKLSKYEVPPEKLVIHEQITRDLKDYKATGPHVAVAKRLAARGVKIRPGTVISYIVLKGSGRIGDRAIPFDEFDPTKHKYDAEYYIENQVLPAVERILRAFGYRKEDLRYQKTRQVGLSAWLKPKGT

SEQ ID NO: 2242 - protein, 774 aa, synthetic construct
MILDTDLITEDGKPVLRIFKKENGEFKIEYDRTFEWYFYALLKDDSAIEEVKKITAERHGTVVTVKRVEKVQKKFLGRPVEVWKLYFTHYQDVPAIADKIREHPAVIDIYEYDIPFAKRYLIDKGLVPMEGDEELKMLAFDIETLYHEGEEFAEGPILMISYADEEGARVITWKNVDLPYVDVVSTEREMIKRFLRVVKEKDPDVLITYNGDNFDFAYLKKRCEKLGINFALGRDGSEPKIQRMGDRFAVEVKGRIHFDLYPVIRRTINLPTYTLEAVYEAVFGQPKEKVYAEEITTAWETGENLERVARYSMEDAKVTYELGKEFLPMEAQLSRLIGQSLWDVSRSSTGNLVEWFLLRKAYERNELAPNKPDEKELARRRQSYEGGYVKEPERGLWENIVYLDFRSLYPSIIITHNVSPDTLNREGCKEYDVAPQVGHRFCKDFPGFIPSLLGDLLEERQKIKKKMKATIDPIERKLLDYRQRAIKILANSYYGYYGYARARWYCKECAESVTAWGREYITMTIKEIEEKYGFKVIYSDTDGFFATIPGADAETVKKKAMEFLKYINAKLPGALELEYEGFYKRGFFVTKKKYAVIDEEGKITTRGLEIVRRDWSEIAKETQARVLEALLKDGDVEKAVRIVKEVTEKLSKYEVPPEKLVIHEQITRDLKDYKATGPHVAVAKRLAARGVKIRPGTVISYIVLKGSGRIGDRAIPFDEFDPTKHKYDAEYYIENQVLPAVERILRAFGYRKEDLRYQKTRQVGLSAWLKPKGT

SEQ ID NO: 2243 - protein, 774 aa, synthetic construct
MILDTDLITEDGKPVLRIFKKENGEFKIEYDRTFEWYFYALLKDDSAIEEVKKITAERHGTVVTVKRVEKVQKKFLGRPVEVWKLYFTHYQDIPAIRDKIREHPAVIDIYEYDIPFAKRYLIDKGLVPMEGDEELKMLAFDIETLYHEGEEFAEGPILMISYADEEGARVITWKNVDLPYVDVVSTEREMIKRFLRVVKEKDPDVLITYNGDNFDFAYLKKRCEKLGINFALGRDGSEPKIQRMGDRFAVEVKGRIHFDLYPVIRRTINLPTYTLEAVYEAVFGQPKEKVYAEEITTAWETGENLERVARYSMEDAKVTYELGKEFLPMEAQLSRLIGQSLWDVSRSSTGNLVEWFLLRKAYERNELAPNKPDEKELARRRQSYEGGYVKEPERGLWENIVYLDFRSLYPSIIITHNVSPDTLNREGCKEYDVAPQVGHRFCKDFPGFIPSLLGDLLEERQKIKKKMKATIDPIERKLLDYRQRAIKILANSYYGYYGYARARWYCKECAESVTAWGREYITMTIKEIEEKYGFKVIYSDTDGFFATIPGADAETVKKKAMEFLKYINAKLPGALELEYEGFYKRGFFVTKKKYAVIDEEGKITTRGLEIVRRDWSEIAKETQARVLEALLKDGDVEKAVRIVKEVTEKLSKYEVPPEKLVIHEQITRDLKDYKATGPHVAVAKRLAARGVKIRPGTVISYIVLKGSGRIGDRAIPFDEFDPTKHKYDAEYYIENQVLPAVERILRAFGYRKEDLRYQKTRQVGLSAWLKPKGT

SEQ ID NO: 2244 - protein, 774 aa, synthetic construct
MILDTDLITEDGKPVLRIFKKENGEFKIEYDRTFEWYFYALLKDDSAIEEVKKITAERHGTVVTVKRVEKVQKKFLGRPVEVWKLYFTHYQDIPAIADKIREHPAVIDIYEYDIPFAKRYLIDKGLVPMEGDEELKMLAFDIETLYHEGEEFAEGPILMISYADEEGARVITWKNVDLPYVDVVSTEREMIKRFLRVVKEKDPDVLITYNGDNFDFAYLKKRCEKLGINFALGRDGSEPKIQRMGDRFAVEVKGRIHFDLYPVIRRTINLPTYTLEAVYEAVFGQPKEKVYAEEITTAWETGENLERVARYSMEDAKVTYELGKEFLPMEAQLSRLIGQSLWDVSRSSTGNLVEWFLLRKAYERNELAPNKPDEKELARRRQSYEGGYVKEPERGLWENIVYLDFRSLYPSIIITHNVSPDTLNREGCKEYDVAPQVGHRFCKDFPGFIPSLLGDLLEERQKIKKKMKATIDPIERKLLDYRQRAIKILANSYYGYYGYARARWYCKECAESVTAWGREYITMTIKEIEEKYGFKVIYSDTDGFFATIPGADAETVKKKAMEFLKYINAKLPGALELEYEGFYKRGFFVTKKKYAVIDEEGKITTRGLEIVRRDWSEIAKETQARVLEALLKDGDVEKAVRIVKEVTEKLSKYEVPPEKLVIHEQITRDLKDYKATGPHVAVAKRLAARGVKIRPGTVISYIVLKGSGRIGDRAIPFDEFDPTKHKYDAEYYIENQVLPAVERILRAFGYRKEDLRYQKTRQVGLSAWLKPKGT

SEQ ID NO: 2245 - protein, 774 aa, synthetic construct
MILDTDLITEDGKPVLRIFKKENGEFKIEYDRTFEWYFYALLKDDSAIEEVKKITAERHGTVVTVKRVEKVQKKFLGRPVEVWKLYFTHYQDIPAIFDKIREHPAVIDIYEYDIPFAKRYLIDKGLVPMEGDEELKMLAFDIETLYHEGEEFAEGPILMISYADEEGARVITWKNVDLPYVDVVSTEREMIKRFLRVVKEKDPDVLITYNGDNFDFAYLKKRCEKLGINFALGRDGSEPKIQRMGDRFAVEVKGRIHFDLYPVIRRTINLPTYTLEAVYEAVFGQPKEKVYAEEITTAWETGENLERVARYSMEDAKVTYELGKEFLPMEAQLSRLIGQSLWDVSRSSTGNLVEWFLLRKAYERNELAPNKPDEKELARRRQSYEGGYVKEPERGLWENIVYLDFRSLYPSIIITHNVSPDTLNREGCKEYDVAPQVGHRFCKDFPGFIPSLLGDLLEERQKIKKKMKATIDPIERKLLDYRQRAIKILANSYYGYYGYARARWYCKECAESVTAWGREYITMTIKEIEEKYGFKVIYSDTDGFFATIPGADAETVKKKAMEFLKYINAKLPGALELEYEGFYKRGFFVTKKKYAVIDEEGKITTRGLEIVRRDWSEIAKETQARVLEALLKDGDVEKAVRIVKEVTEKLSKYEVPPEKLVIHEQITRDLKDYKATGPHVAVAKRLAARGVKIRPGTVISYIVLKGSGRIGDRAIPFDEFDPTKHKYDAEYYIENQVLPAVERILRAFGYRKEDLRYQKTRQVGLSAWLKPKGT

SEQ ID NO: 2246 - protein, 774 aa, synthetic construct
MILDTDLITEDGKPVLRIFKKENGEFKIEYDRTFEWYFYALLKDDSAIEEVKKITAERHGTVVTVKRVEKVQKKFLGRPVEVWKLYFTHYQDIPAIHDKIREHPAVIDIYEYDIPFAKRYLIDKGLVPMEGDEELKMLAFDIETLYHEGEEFAEGPILMISYADEEGARVITWKNVDLPYVDVVSTEREMIKRFLRVVKEKDPDVLITYNGDNFDFAYLKKRCEKLGINFALGRDGSEPKIQRMGDRFAVEVKGRIHFDLYPVIRRTINLPTYTLEAVYEAVFGQPKEKVYAEEITTAWETGENLERVARYSMEDAKVTYELGKEFLPMEAQLSRLIGQSLWDVSRSSTGNLVEWFLLRKAYERNELAPNKPDEKELARRRQSYEGGYVKEPERGLWENIVYLDFRSLYPSIIITHNVSPDTLNREGCKEYDVAPQVGHRFCKDFPGFIPSLLGDLLEERQKIKKKMKATIDPIERKLLDYRQRAIKILANSYYGYYGYARARWYCKECAESVTAWGREYITMTIKEIEEKYGFKVIYSDTDGFFATIPGADAETVKKKAMEFLKYINAKLPGALELEYEGFYKRGFFVTKKKYAVIDEEGKITTRGLEIVRRDWSEIAKETQARVLEALLKDGDVEKAVRIVKEVTEKLSKYEVPPEKLVIHEQITRDLKDYKATGPHVAVAKRLAARGVKIRPGTVISYIVLKGSGRIGDRAIPFDEFDPTKHKYDAEYYIENQVLPAVERILRAFGYRKEDLRYQKTRQVGLSAWLKPKGT

SEQ ID NO: 2247 - protein, 774 aa, synthetic construct
MILDTDLITEDGKPVLRIFKKENGEFKIEYDRTFEWYFYALLKDDSAIEEVKKITAERHGTVVTVKRVEKVQKKFLGRPVEVWKLYFTHYQDIPAIWDKIREHPAVIDIYEYDIPFAKRYLIDKGLVPMEGDEELKMLAFDIETLYHEGEEFAEGPILMISYADEEGARVITWKNVDLPYVDVVSTEREMIKRFLRVVKEKDPDVLITYNGDNFDFAYLKKRCEKLGINFALGRDGSEPKIQRMGDRFAVEVKGRIHFDLYPVIRRTINLPTYTLEAVYEAVFGQPKEKVYAEEITTAWETGENLERVARYSMEDAKVTYELGKEFLPMEAQLSRLIGQSLWDVSRSSTGNLVEWFLLRKAYERNELAPNKPDEKELARRRQSYEGGYVKEPERGLWENIVYLDFRSLYPSIIITHNVSPDTLNREGCKEYDVAPQVGHRFCKDFPGFIPSLLGDLLEERQKIKKKMKATIDPIERKLLDYRQRAIKILANSYYGYYGYARARWYCKECAESVTAWGREYITMTIKEIEEKYGFKVIYSDTDGFFATIPGADAETVKKKAMEFLKYINAKLPGALELEYEGFYKRGFFVTKKKYAVIDEEGKITTRGLEIVRRDWSEIAKETQARVLEALLKDGDVEKAVRIVKEVTEKLSKYEVPPEKLVIHEQITRDLKDYKATGPHVAVAKRLAARGVKIRPGTVISYIVLKGSGRIGDRAIPFDEFDPTKHKYDAEYYIENQVLPAVERILRAFGYRKEDLRYQKTRQVGLSAWLKPKGT

SEQ ID NO: 2248 - protein, 774 aa, synthetic construct
MILDTDLITEDGKPVLRIFKKENGEFKIEYDRTFEWYFYALLKDDSAIEEVKKITAERHGTVVTVKRVEKVQKKFLGRPVEVWKLYFTHPQDVPAIADKIREHPAVIDIYEYDIPFAKRYLIDKGLVPMEGDEELKMLAFDIETLYHEGEEFAEGPILMISYADEEGARVITWKNVDLPYVDVVSTEREMIKRFLRVVKEKDPDVLITYNGDNFDFAYLKKRCEKLGINFALGRDGSEPKIQRMGDRFAVEVKGRIHFDLYPVIRRTINLPTYTLEAVYEAVFGQPKEKVYAEEITTAWETGENLERVARYSMEDAKVTYELGKEFLPMEAQLSRLIGQSLWDVSRSSTGNLVEWFLLRKAYERNELAPNKPDEKELARRRQSYEGGYVKEPERGLWENIVYLDFRSLYPSIIITHNVSPDTLNREGCKEYDVAPQVGHRFCKDFPGFIPSLLGDLLEERQKIKKKMKATIDPIERKLLDYRQRAIKILANSYYGYYGYARARWYCKECAESVTAWGREYITMTIKEIEEKYGFKVIYSDTDGFFATIPGADAETVKKKAMEFLKYINAKLPGALELEYEGFYKRGFFVTKKKYAVIDEEGKITTRGLEIVRRDWSEIAKETQARVLEALLKDGDVEKAVRIVKEVTEKLSKYEVPPEKLVIHEQITRDLKDYKATGPHVAVAKRLAARGVKIRPGTVISYIVLKGSGRIGDRAIPFDEFDPTKHKYDAEYYIENQVLPAVERILRAFGYRKEDLRYQKTRQVGLSAWLKPKGT

SEQ ID NO: 2249 - protein, 774 aa, synthetic construct
MILDTDLITEDGKPVLRIFKKENGEFKIEYDRTFEWYFYALLKDDSAIEEVKKITAERHGTVVTVKRVEKVQKKFLGRPVEVWKLYFTHPQDVPAIFDKIREHPAVIDIYEYDIPFAKRYLIDKGLVPMEGDEELKMLAFDIETLYHEGEEFAEGPILMISYADEEGARVITWKNVDLPYVDVVSTEREMIKRFLRVVKEKDPDVLITYNGDNFDFAYLKKRCEKLGINFALGRDGSEPKIQRMGDRFAVEVKGRIHFDLYPVIRRTINLPTYTLEAVYEAVFGQPKEKVYAEEITTAWETGENLERVARYSMEDAKVTYELGKEFLPMEAQLSRLIGQSLWDVSRSSTGNLVEWFLLRKAYERNELAPNKPDEKELARRRQSYEGGYVKEPERGLWENIVYLDFRSLYPSIIITHNVSPDTLNREGCKEYDVAPQVGHRFCKDFPGFIPSLLGDLLEERQKIKKKMKATIDPIERKLLDYRQRAIKILANSYYGYYGYARARWYCKECAESVTAWGREYITMTIKEIEEKYGFKVIYSDTDGFFATIPGADAETVKKKAMEFLKYINAKLPGALELEYEGFYKRGFFVTKKKYAVIDEEGKITTRGLEIVRRDWSEIAKETQARVLEALLKDGDVEKAVRIVKEVTEKLSKYEVPPEKLVIHEQITRDLKDYKATGPHVAVAKRLAARGVKIRPGTVISYIVLKGSGRIGDRAIPFDEFDPTKHKYDAEYYIENQVLPAVERILRAFGYRKEDLRYQKTRQVGLSAWLKPKGT

SEQ ID NO: 2250 - protein, 774 aa, synthetic construct
MILDTDLITEDGKPVLRIFKKENGEFKIEYDRTFEWYFYALLKDDSAIEEVKKITAERHGTVVTVKRVEKVQKKFLGRPVEVWKLYFTHPQDVPAIHDKIREHPAVIDIYEYDIPFAKRYLIDKGLVPMEGDEELKMLAFDIETLYHEGEEFAEGPILMISYADEEGARVITWKNVDLPYVDVVSTEREMIKRFLRVVKEKDPDVLITYNGDNFDFAYLKKRCEKLGINFALGRDGSEPKIQRMGDRFAVEVKGRIHFDLYPVIRRTINLPTYTLEAVYEAVFGQPKEKVYAEEITTAWETGENLERVARYSMEDAKVTYELGKEFLPMEAQLSRLIGQSLWDVSRSSTGNLVEWFLLRKAYERNELAPNKPDEKELARRRQSYEGGYVKEPERGLWENIVYLDFRSLYPSIIITHNVSPDTLNREGCKEYDVAPQVGHRFCKDFPGFIPSLLGDLLEERQKIKKKMKATIDPIERKLLDYRQRAIKILANSYYGYYGYARARWYCKECAESVTAWGREYITMTIKEIEEKYGFKVIYSDTDGFFATIPGADAETVKKKAMEFLKYINAKLPGALELEYEGFYKRGFFVTKKKYAVIDEEGKITTRGLEIVRRDWSEIAKETQARVLEALLKDGDVEKAVRIVKEVTEKLSKYEVPPEKLVIHEQITRDLKDYKATGPHVAVAKRLAARGVKIRPGTVISYIVLKGSGRIGDRAIPFDEFDPTKHKYDAEYYIENQVLPAVERILRAFGYRKEDLRYQKTRQVGLSAWLKPKGT

SEQ ID NO: 2251 - protein, 774 aa, synthetic construct
MILDTDLITEDGKPVLRIFKKENGEFKIEYDRTFEWYFYALLKDDSAIEEVKKITAERHGTVVTVKRVEKVQKKFLGRPVEVWKLYFTHPQDVPAIWDKIREHPAVIDIYEYDIPFAKRYLIDKGLVPMEGDEELKMLAFDIETLYHEGEEFAEGPILMISYADEEGARVITWKNVDLPYVDVVSTEREMIKRFLRVVKEKDPDVLITYNGDNFDFAYLKKRCEKLGINFALGRDGSEPKIQRMGDRFAVEVKGRIHFDLYPVIRRTINLPTYTLEAVYEAVFGQPKEKVYAEEITTAWETGENLERVARYSMEDAKVTYELGKEFLPMEAQLSRLIGQSLWDVSRSSTGNLVEWFLLRKAYERNELAPNKPDEKELARRRQSYEGGYVKEPERGLWENIVYLDFRSLYPSIIITHNVSPDTLNREGCKEYDVAPQVGHRFCKDFPGFIPSLLGDLLEERQKIKKKMKATIDPIERKLLDYRQRAIKILANSYYGYYGYARARWYCKECAESVTAWGREYITMTIKEIEEKYGFKVIYSDTDGFFATIPGADAETVKKKAMEFLKYINAKLPGALELEYEGFYKRGFFVTKKKYAVIDEEGKITTRGLEIVRRDWSEIAKETQARVLEALLKDGDVEKAVRIVKEVTEKLSKYEVPPEKLVIHEQITRDLKDYKATGPHVAVAKRLAARGVKIRPGTVISYIVLKGSGRIGDRAIPFDEFDPTKHKYDAEYYIENQVLPAVERILRAFGYRKEDLRYQKTRQVGLSAWLKPKGT

SEQ ID NO: 2252 - protein, 774 aa, synthetic construct
MILDTDLITEDGKPVLRIFKKENGEFKIEYDRTFEWYFYALLKDDSAIEEVKKITAERHGTVVTVKRVEKVQKKFLGRPVEVWKLYFTHPQDIPAIRDKIREHPAVIDIYEYDIPFAKRYLIDKGLVPMEGDEELKMLAFDIETLYHEGEEFAEGPILMISYADEEGARVITWKNVDLPYVDVVSTEREMIKRFLRVVKEKDPDVLITYNGDNFDFAYLKKRCEKLGINFALGRDGSEPKIQRMGDRFAVEVKGRIHFDLYPVIRRTINLPTYTLEAVYEAVFGQPKEKVYAEEITTAWETGENLERVARYSMEDAKVTYELGKEFLPMEAQLSRLIGQSLWDVSRSSTGNLVEWFLLRKAYERNELAPNKPDEKELARRRQSYEGGYVKEPERGLWENIVYLDFRSLYPSIIITHNVSPDTLNREGCKEYDVAPQVGHRFCKDFPGFIPSLLGDLLEERQKIKKKMKATIDPIERKLLDYRQRAIKILANSYYGYYGYARARWYCKECAESVTAWGREYITMTIKEIEEKYGFKVIYSDTDGFFATIPGADAETVKKKAMEFLKYINAKLPGALELEYEGFYKRGFFVTKKKYAVIDEEGKITTRGLEIVRRDWSEIAKETQARVLEALLKDGDVEKAVRIVKEVTEKLSKYEVPPEKLVIHEQITRDLKDYKATGPHVAVAKRLAARGVKIRPGTVISYIVLKGSGRIGDRAIPFDEFDPTKHKYDAEYYIENQVLPAVERILRAFGYRKEDLRYQKTRQVGLSAWLKPKGT

SEQ ID NO: 2253 - protein, 774 aa, synthetic construct
MILDTDLITEDGKPVLRIFKKENGEFKIEYDRTFEWYFYALLKDDSAIEEVKKITAERHGTVVTVKRVEKVQKKFLGRPVEVWKLYFTHPQDIPAIADKIREHPAVIDIYEYDIPFAKRYLIDKGLVPMEGDEELKMLAFDIETLYHEGEEFAEGPILMISYADEEGARVITWKNVDLPYVDVVSTEREMIKRFLRVVKEKDPDVLITYNGDNFDFAYLKKRCEKLGINFALGRDGSEPKIQRMGDRFAVEVKGRIHFDLYPVIRRTINLPTYTLEAVYEAVFGQPKEKVYAEEITTAWETGENLERVARYSMEDAKVTYELGKEFLPMEAQLSRLIGQSLWDVSRSSTGNLVEWFLLRKAYERNELAPNKPDEKELARRRQSYEGGYVKEPERGLWENIVYLDFRSLYPSIIITHNVSPDTLNREGCKEYDVAPQVGHRFCKDFPGFIPSLLGDLLEERQKIKKKMKATIDPIERKLLDYRQRAIKILANSYYGYYGYARARWYCKECAESVTAWGREYITMTIKEIEEKYGFKVIYSDTDGFFATIPGADAETVKKKAMEFLKYINAKLPGALELEYEGFYKRGFFVTKKKYAVIDEEGKITTRGLEIVRRDWSEIAKETQARVLEALLKDGDVEKAVRIVKEVTEKLSKYEVPPEKLVIHEQITRDLKDYKATGPHVAVAKRLAARGVKIRPGTVISYIVLKGSGRIGDRAIPFDEFDPTKHKYDAEYYIENQVLPAVERILRAFGYRKEDLRYQKTRQVGLSAWLKPKGT

SEQ ID NO: 2254 - protein, 774 aa, synthetic construct
MILDTDLITEDGKPVLRIFKKENGEFKIEYDRTFEWYFYALLKDDSAIEEVKKITAERHGTVVTVKRVEKVQKKFLGRPVEVWKLYFTHPQDIPAIFDKIREHPAVIDIYEYDIPFAKRYLIDKGLVPMEGDEELKMLAFDIETLYHEGEEFAEGPILMISYADEEGARVITWKNVDLPYVDVVSTEREMIKRFLRVVKEKDPDVLITYNGDNFDFAYLKKRCEKLGINFALGRDGSEPKIQRMGDRFAVEVKGRIHFDLYPVIRRTINLPTYTLEAVYEAVFGQPKEKVYAEEITTAWETGENLERVARYSMEDAKVTYELGKEFLPMEAQLSRLIGQSLWDVSRSSTGNLVEWFLLRKAYERNELAPNKPDEKELARRRQSYEGGYVKEPERGLWENIVYLDFRSLYPSIIITHNVSPDTLNREGCKEYDVAPQVGHRFCKDFPGFIPSLLGDLLEERQKIKKKMKATIDPIERKLLDYRQRAIKILANSYYGYYGYARARWYCKECAESVTAWGREYITMTIKEIEEKYGFKVIYSDTDGFFATIPGADAETVKKKAMEFLKYINAKLPGALELEYEGFYKRGFFVTKKKYAVIDEEGKITTRGLEIVRRDWSEIAKETQARVLEALLKDGDVEKAVRIVKEVTEKLSKYEVPPEKLVIHEQITRDLKDYKATGPHVAVAKRLAARGVKIRPGTVISYIVLKGSGRIGDRAIPFDEFDPTKHKYDAEYYIENQVLPAVERILRAFGYRKEDLRYQKTRQVGLSAWLKPKGT

SEQ ID NO: 2255 - protein, 774 aa, synthetic construct
MILDTDLITEDGKPVLRIFKKENGEFKIEYDRTFEWYFYALLKDDSAIEEVKKITAERHGTVVTVKRVEKVQKKFLGRPVEVWKLYFTHPQDIPAIHDKIREHPAVIDIYEYDIPFAKRYLIDKGLVPMEGDEELKMLAFDIETLYHEGEEFAEGPILMISYADEEGARVITWKNVDLPYVDVVSTEREMIKRFLRVVKEKDPDVLITYNGDNFDFAYLKKRCEKLGINFALGRDGSEPKIQRMGDRFAVEVKGRIHFDLYPVIRRTINLPTYTLEAVYEAVFGQPKEKVYAEEITTAWETGENLERVARYSMEDAKVTYELGKEFLPMEAQLSRLIGQSLWDVSRSSTGNLVEWFLLRKAYERNELAPNKPDEKELARRRQSYEGGYVKEPERGLWENIVYLDFRSLYPSIIITHNVSPDTLNREGCKEYDVAPQVGHRFCKDFPGFIPSLLGDLLEERQKIKKKMKATIDPIERKLLDYRQRAIKILANSYYGYYGYARARWYCKECAESVTAWGREYITMTIKEIEEKYGFKVIYSDTDGFFATIPGADAETVKKKAMEFLKYINAKLPGALELEYEGFYKRGFFVTKKKYAVIDEEGKITTRGLEIVRRDWSEIAKETQARVLEALLKDGDVEKAVRIVKEVTEKLSKYEVPPEKLVIHEQITRDLKDYKATGPHVAVAKRLAARGVKIRPGTVISYIVLKGSGRIGDRAIPFDEFDPTKHKYDAEYYIENQVLPAVERILRAFGYRKEDLRYQKTRQVGLSAWLKPKGT

SEQ ID NO: 2256 - protein, 774 aa, synthetic construct
MILDTDLITEDGKPVLRIFKKENGEFKIEYDRTFEWYFYALLKDDSAIEEVKKITAERHGTVVTVKRVEKVQKKFLGRPVEVWKLYFTHPQDIPAIWDKIREHPAVIDIYEYDIPFAKRYLIDKGLVPMEGDEELKMLAFDIETLYHEGEEFAEGPILMISYADEEGARVITWKNVDLPYVDVVSTEREMIKRFLRVVKEKDPDVLITYNGDNFDFAYLKKRCEKLGINFALGRDGSEPKIQRMGDRFAVEVKGRIHFDLYPVIRRTINLPTYTLEAVYEAVFGQPKEKVYAEEITTAWETGENLERVARYSMEDAKVTYELGKEFLPMEAQLSRLIGQSLWDVSRSSTGNLVEWFLLRKAYERNELAPNKPDEKELARRRQSYEGGYVKEPERGLWENIVYLDFRSLYPSIIITHNVSPDTLNREGCKEYDVAPQVGHRFCKDFPGFIPSLLGDLLEERQKIKKKMKATIDPIERKLLDYRQRAIKILANSYYGYYGYARARWYCKECAESVTAWGREYITMTIKEIEEKYGFKVIYSDTDGFFATIPGADAETVKKKAMEFLKYINAKLPGALELEYEGFYKRGFFVTKKKYAVIDEEGKITTRGLEIVRRDWSEIAKETQARVLEALLKDGDVEKAVRIVKEVTEKLSKYEVPPEKLVIHEQITRDLKDYKATGPHVAVAKRLAARGVKIRPGTVISYIVLKGSGRIGDRAIPFDEFDPTKHKYDAEYYIENQVLPAVERILRAFGYRKEDLRYQKTRQVGLSAWLKPKGT

SEQ ID NO: 2257 - protein, 774 aa, synthetic construct
MILDTDLITEDGKPVLRIFKKENGEFKIEYDRTFEWYFYALLKDDSAIEEVKKITAERHGTVVTVKRVEKVQKKFLGRPVEVWKLYFTHPQDQPAIRDKIREHPAVIDIYEYDIPFAKRYLIDKGLVPMEGDEELKMLAFDIETLYHEGEEFAEGPILMISYADEEGARVITWKNVDLPYVDVVSTEREMIKRFLRVVKEKDPDVLITYNGDNFDFAYLKKRCEKLGINFALGRDGSEPKIQRMGDRFAVEVKGRIHFDLYPVIRRTINLPTYTLEAVYEAVFGQPKEKVYAEEITTAWETGENLERVARYSMEDAKVTYELGKEFLPMEAQLSRLIGQSLWDVSRSSTGNLVEWFLLRKAYERNELAPNKPDEKELARRRQSYEGGYVKEPERGLWENIVYLDFRSLYPSIIITHNVSPDTLNREGCKEYDVAPQVGHRFCKDFPGFIPSLLGDLLEERQKIKKKMKATIDPIERKLLDYRQRAIKILANSYYGYYGYARARWYCKECAESVTAWGREYITMTIKEIEEKYGFKVIYSDTDGFFATIPGADAETVKKKAMEFLKYINAKLPGALELEYEGFYKRGFFVTKKKYAVIDEEGKITTRGLEIVRRDWSEIAKETQARVLEALLKDGDVEKAVRIVKEVTEKLSKYEVPPEKLVIHEQITRDLKDYKATGPHVAVAKRLAARGVKIRPGTVISYIVLKGSGRIGDRAIPFDEFDPTKHKYDAEYYIENQVLPAVERILRAFGYRKEDLRYQKTRQVGLSAWLKPKGT

SEQ ID NO: 2258 - protein, 774 aa, synthetic construct
MILDTDLITEDGKPVLRIFKKENGEFKIEYDRTFEWYFYALLKDDSAIEEVKKITAERHGTVVTVKRVEKVQKKFLGRPVEVWKLYFTHPQDQPAIADKIREHPAVIDIYEYDIPFAKRYLIDKGLVPMEGDEELKMLAFDIETLYHEGEEFAEGPILMISYADEEGARVITWKNVDLPYVDVVSTEREMIKRFLRVVKEKDPDVLITYNGDNFDFAYLKKRCEKLGINFALGRDGSEPKIQRMGDRFAVEVKGRIHFDLYPVIRRTINLPTYTLEAVYEAVFGQPKEKVYAEEITTAWETGENLERVARYSMEDAKVTYELGKEFLPMEAQLSRLIGQSLWDVSRSSTGNLVEWFLLRKAYERNELAPNKPDEKELARRRQSYEGGYVKEPERGLWENIVYLDFRSLYPSIIITHNVSPDTLNREGCKEYDVAPQVGHRFCKDFPGFIPSLLGDLLEERQKIKKKMKATIDPIERKLLDYRQRAIKILANSYYGYYGYARARWYCKECAESVTAWGREYITMTIKEIEEKYGFKVIYSDTDGFFATIPGADAETVKKKAMEFLKYINAKLPGALELEYEGFYKRGFFVTKKKYAVIDEEGKITTRGLEIVRRDWSEIAKETQARVLEALLKDGDVEKAVRIVKEVTEKLSKYEVPPEKLVIHEQITRDLKDYKATGPHVAVAKRLAARGVKIRPGTVISYIVLKGSGRIGDRAIPFDEFDPTKHKYDAEYYIENQVLPAVERILRAFGYRKEDLRYQKTRQVGLSAWLKPKGT

SEQ ID NO: 2259 - protein, 774 aa, synthetic construct
MILDTDLITEDGKPVLRIFKKENGEFKIEYDRTFEWYFYALLKDDSAIEEVKKITAERHGTVVTVKRVEKVQKKFLGRPVEVWKLYFTHPQDRPAIRDKIREHPAVIDIYEYDIPFAKRYLIDKGLVPMEGDEELKMLAFDIETLYHEGEEFAEGPILMISYADEEGARVITWKNVDLPYVDVVSTEREMIKRFLRVVKEKDPDVLITYNGDNFDFAYLKKRCEKLGINFALGRDGSEPKIQRMGDRFAVEVKGRIHFDLYPVIRRTINLPTYTLEAVYEAVFGQPKEKVYAEEITTAWETGENLERVARYSMEDAKVTYELGKEFLPMEAQLSRLIGQSLWDVSRSSTGNLVEWFLLRKAYERNELAPNKPDEKELARRRQSYEGGYVKEPERGLWENIVYLDFRSLYPSIIITHNVSPDTLNREGCKEYDVAPQVGHRFCKDFPGFIPSLLGDLLEERQKIKKKMKATIDPIERKLLDYRQRAIKILANSYYGYYGYARARWYCKECAESVTAWGREYITMTIKEIEEKYGFKVIYSDTDGFFATIPGADAETVKKKAMEFLKYINAKLPGALELEYEGFYKRGFFVTKKKYAVIDEEGKITTRGLEIVRRDWSEIAKETQARVLEALLKDGDVEKAVRIVKEVTEKLSKYEVPPEKLVIHEQITRDLKDYKATGPHVAVAKRLAARGVKIRPGTVISYIVLKGSGRIGDRAIPFDEFDPTKHKYDAEYYIENQVLPAVERILRAFGYRKEDLRYQKTRQVGLSAWLKPKGT

SEQ ID NO: 2260 - protein, 774 aa, synthetic construct
MILDTDLITEDGKPVLRIFKKENGEFKIEYDRTFEPYFYALLKDDSAIEEVKKITAERHGTVVTVKRVEKVQKKFLGRPVEVWKLYFTHFQDVPAIRDKIREHPAVIDIYEYDIPFAKRYLIDKGLVPMEGDEELKMLAFDIETLYHEGEEFAEGPILMISYADEEGARVITWKNVDLPYVDVVSTEREMIKRFLRVVKEKDPDVLITYNGDNFDFAYLKKRCEKLGINFALGRDGSEPKIQRMGDRFAVEVKGRIHFDLYPVIRRTINLPTYTLEAVYEAVFGQPKEKVYAEEITTAWETGENLERVARYSMEDAKVTYELGKEFLPMEAQLSRLIGQSLWDVSRSSTGNLVEWFLLRKAYERNELAPNKPDEKELARRRQSYEGGYVKEPERGLWENIVYLDFRSLYPSIIITHNVSPDTLNREGCKEYDVAPQVGHRFCKDFPGFIPSLLGDLLEERQKIKKKMKATIDPIERKLLDYRQRAIKILANSYYGYYGYARARWYCKECAESVTAWGREYITMTIKEIEEKYGFKVIYSDTDGFFATIPGADAETVKKKAMEFLKYINAKLPGALELEYEGFYKRGFFVTKKKYAVIDEEGKITTRGLEIVRRDWSEIAKETQARVLEALLKDGDVEKAVRIVKEVTEKLSKYEVPPEKLVIHEQITRDLKDYKATGPHVAVAKRLAARGVKIRPGTVISYIVLKGSGRIGDRAIPFDEFDPTKHKYDAEYYIENQVLPAVERILRAFGYRKEDLRYQKTRQVGLSAWLKPKGT

SEQ ID NO: 2261 - protein, 774 aa, synthetic construct
MILDTDLITEDGKPVLRIFKKENGEFKIEYDRTFEPYFYALLKDDSAIEEVKKITAERHGTVVTVKRVEKVQKKFLGRPVEVWKLYFTHFQDVPAIADKIREHPAVIDIYEYDIPFAKRYLIDKGLVPMEGDEELKMLAFDIETLYHEGEEFAEGPILMISYADEEGARVITWKNVDLPYVDVVSTEREMIKRFLRVVKEKDPDVLITYNGDNFDFAYLKKRCEKLGINFALGRDGSEPKIQRMGDRFAVEVKGRIHFDLYPVIRRTINLPTYTLEAVYEAVFGQPKEKVYAEEITTAWETGENLERVARYSMEDAKVTYELGKEFLPMEAQLSRLIGQSLWDVSRSSTGNLVEWFLLRKAYERNELAPNKPDEKELARRRQSYEGGYVKEPERGLWENIVYLDFRSLYPSIIITHNVSPDTLNREGCKEYDVAPQVGHRFCKDFPGFIPSLLGDLLEERQKIKKKMKATIDPIERKLLDYRQRAIKILANSYYGYYGYARARWYCKECAESVTAWGREYITMTIKEIEEKYGFKVIYSDTDGFFATIPGADAETVKKKAMEFLKYINAKLPGALELEYEGFYKRGFFVTKKKYAVIDEEGKITTRGLEIVRRDWSEIAKETQARVLEALLKDGDVEKAVRIVKEVTEKLSKYEVPPEKLVIHEQITRDLKDYKATGPHVAVAKRLAARGVKIRPGTVISYIVLKGSGRIGDRAIPFDEFDPTKHKYDAEYYIENQVLPAVERILRAFGYRKEDLRYQKTRQVGLSAWLKPKGT

SEQ ID NO: 2262 - protein, 774 aa, synthetic construct
MILDTDLITEDGKPVLRIFKKENGEFKIEYDRTFEPYFYALLKDDSAIEEVKKITAERHGTVVTVKRVEKVQKKFLGRPVEVWKLYFTHFQDVPAIFDKIREHPAVIDIYEYDIPFAKRYLIDKGLVPMEGDEELKMLAFDIETLYHEGEEFAEGPILMISYADEEGARVITWKNVDLPYVDVVSTEREMIKRFLRVVKEKDPDVLITYNGDNFDFAYLKKRCEKLGINFALGRDGSEPKIQRMGDRFAVEVKGRIHFDLYPVIRRTINLPTYTLEAVYEAVFGQPKEKVYAEEITTAWETGENLERVARYSMEDAKVTYELGKEFLPMEAQLSRLIGQSLWDVSRSSTGNLVEWFLLRKAYERNELAPNKPDEKELARRRQSYEGGYVKEPERGLWENIVYLDFRSLYPSIIITHNVSPDTLNREGCKEYDVAPQVGHRFCKDFPGFIPSLLGDLLEERQKIKKKMKATIDPIERKLLDYRQRAIKILANSYYGYYGYARARWYCKECAESVTAWGREYITMTIKEIEEKYGFKVIYSDTDGFFATIPGADAETVKKKAMEFLKYINAKLPGALELEYEGFYKRGFFVTKKKYAVIDEEGKITTRGLEIVRRDWSEIAKETQARVLEALLKDGDVEKAVRIVKEVTEKLSKYEVPPEKLVIHEQITRDLKDYKATGPHVAVAKRLAARGVKIRPGTVISYIVLKGSGRIGDRAIPFDEFDPTKHKYDAEYYIENQVLPAVERILRAFGYRKEDLRYQKTRQVGLSAWLKPKGT

SEQ ID NO: 2263 - protein, 774 aa, synthetic construct
MILDTDLITEDGKPVLRIFKKENGEFKIEYDRTFEPYFYALLKDDSAIEEVKKITAERHGTVVTVKRVEKVQKKFLGRPVEVWKLYFTHFQDVPAIHDKIREHPAVIDIYEYDIPFAKRYLIDKGLVPMEGDEELKMLAFDIETLYHEGEEFAEGPILMISYADEEGARVITWKNVDLPYVDVVSTEREMIKRFLRVVKEKDPDVLITYNGDNFDFAYLKKRCEKLGINFALGRDGSEPKIQRMGDRFAVEVKGRIHFDLYPVIRRTINLPTYTLEAVYEAVFGQPKEKVYAEEITTAWETGENLERVARYSMEDAKVTYELGKEFLPMEAQLSRLIGQSLWDVSRSSTGNLVEWFLLRKAYERNELAPNKPDEKELARRRQSYEGGYVKEPERGLWENIVYLDFRSLYPSIIITHNVSPDTLNREGCKEYDVAPQVGHRFCKDFPGFIPSLLGDLLEERQKIKKKMKATIDPIERKLLDYRQRAIKILANSYYGYYGYARARWYCKECAESVTAWGREYITMTIKEIEEKYGFKVIYSDTDGFFATIPGADAETVKKKAMEFLKYINAKLPGALELEYEGFYKRGFFVTKKKYAVIDEEGKITTRGLEIVRRDWSEIAKETQARVLEALLKDGDVEKAVRIVKEVTEKLSKYEVPPEKLVIHEQITRDLKDYKATGPHVAVAKRLAARGVKIRPGTVISYIVLKGSGRIGDRAIPFDEFDPTKHKYDAEYYIENQVLPAVERILRAFGYRKEDLRYQKTRQVGLSAWLKPKGT

SEQ ID NO: 2264 - protein, 774 aa, synthetic construct
MILDTDLITEDGKPVLRIFKKENGEFKIEYDRTFEPYFYALLKDDSAIEEVKKITAERHGTVVTVKRVEKVQKKFLGRPVEVWKLYFTHFQDVPAIWDKIREHPAVIDIYEYDIPFAKRYLIDKGLVPMEGDEELKMLAFDIETLYHEGEEFAEGPILMISYADEEGARVITWKNVDLPYVDVVSTEREMIKRFLRVVKEKDPDVLITYNGDNFDFAYLKKRCEKLGINFALGRDGSEPKIQRMGDRFAVEVKGRIHFDLYPVIRRTINLPTYTLEAVYEAVFGQPKEKVYAEEITTAWETGENLERVARYSMEDAKVTYELGKEFLPMEAQLSRLIGQSLWDVSRSSTGNLVEWFLLRKAYERNELAPNKPDEKELARRRQSYEGGYVKEPERGLWENIVYLDFRSLYPSIIITHNVSPDTLNREGCKEYDVAPQVGHRFCKDFPGFIPSLLGDLLEERQKIKKKMKATIDPIERKLLDYRQRAIKILANSYYGYYGYARARWYCKECAESVTAWGREYITMTIKEIEEKYGFKVIYSDTDGFFATIPGADAETVKKKAMEFLKYINAKLPGALELEYEGFYKRGFFVTKKKYAVIDEEGKITTRGLEIVRRDWSEIAKETQARVLEALLKDGDVEKAVRIVKEVTEKLSKYEVPPEKLVIHEQITRDLKDYKATGPHVAVAKRLAARGVKIRPGTVISYIVLKGSGRIGDRAIPFDEFDPTKHKYDAEYYIENQVLPAVERILRAFGYRKEDLRYQKTRQVGLSAWLKPKGT

SEQ ID NO: 2265 - protein, 774 aa, synthetic construct
MILDTDLITEDGKPVLRIFKKENGEFKIEYDRTFEPYFYALLKDDSAIEEVKKITAERHGTVVTVKRVEKVQKKFLGRPVEVWKLYFTHFQDIPAIRDKIREHPAVIDIYEYDIPFAKRYLIDKGLVPMEGDEELKMLAFDIETLYHEGEEFAEGPILMISYADEEGARVITWKNVDLPYVDVVSTEREMIKRFLRVVKEKDPDVLITYNGDNFDFAYLKKRCEKLGINFALGRDGSEPKIQRMGDRFAVEVKGRIHFDLYPVIRRTINLPTYTLEAVYEAVFGQPKEKVYAEEITTAWETGENLERVARYSMEDAKVTYELGKEFLPMEAQLSRLIGQSLWDVSRSSTGNLVEWFLLRKAYERNELAPNKPDEKELARRRQSYEGGYVKEPERGLWENIVYLDFRSLYPSIIITHNVSPDTLNREGCKEYDVAPQVGHRFCKDFPGFIPSLLGDLLEERQKIKKKMKATIDPIERKLLDYRQRAIKILANSYYGYYGYARARWYCKECAESVTAWGREYITMTIKEIEEKYGFKVIYSDTDGFFATIPGADAETVKKKAMEFLKYINAKLPGALELEYEGFYKRGFFVTKKKYAVIDEEGKITTRGLEIVRRDWSEIAKETQARVLEALLKDGDVEKAVRIVKEVTEKLSKYEVPPEKLVIHEQITRDLKDYKATGPHVAVAKRLAARGVKIRPGTVISYIVLKGSGRIGDRAIPFDEFDPTKHKYDAEYYIENQVLPAVERILRAFGYRKEDLRYQKTRQVGLSAWLKPKGT

SEQ ID NO: 2266 - protein, 774 aa, synthetic construct
MILDTDLITEDGKPVLRIFKKENGEFKIEYDRTFEPYFYALLKDDSAIEEVKKITAERHGTVVTVKRVEKVQKKFLGRPVEVWKLYFTHFQDIPAIADKIREHPAVIDIYEYDIPFAKRYLIDKGLVPMEGDEELKMLAFDIETLYHEGEEFAEGPILMISYADEEGARVITWKNVDLPYVDVVSTEREMIKRFLRVVKEKDPDVLITYNGDNFDFAYLKKRCEKLGINFALGRDGSEPKIQRMGDRFAVEVKGRIHFDLYPVIRRTINLPTYTLEAVYEAVFGQPKEKVYAEEITTAWETGENLERVARYSMEDAKVTYELGKEFLPMEAQLSRLIGQSLWDVSRSSTGNLVEWFLLRKAYERNELAPNKPDEKELARRRQSYEGGYVKEPERGLWENIVYLDFRSLYPSIIITHNVSPDTLNREGCKEYDVAPQVGHRFCKDFPGFIPSLLGDLLEERQKIKKKMKATIDPIERKLLDYRQRAIKILANSYYGYYGYARARWYCKECAESVTAWGREYITMTIKEIEEKYGFKVIYSDTDGFFATIPGADAETVKKKAMEFLKYINAKLPGALELEYEGFYKRGFFVTKKKYAVIDEEGKITTRGLEIVRRDWSEIAKETQARVLEALLKDGDVEKAVRIVKEVTEKLSKYEVPPEKLVIHEQITRDLKDYKATGPHVAVAKRLAARGVKIRPGTVISYIVLKGSGRIGDRAIPFDEFDPTKHKYDAEYYIENQVLPAVERILRAFGYRKEDLRYQKTRQVGLSAWLKPKGT

SEQ ID NO: 2267 - protein, 774 aa, synthetic construct
MILDTDLITEDGKPVLRIFKKENGEFKIEYDRTFEPYFYALLKDDSAIEEVKKITAERHGTVVTVKRVEKVQKKFLGRPVEVWKLYFTHFQDIPAIFDKIREHPAVIDIYEYDIPFAKRYLIDKGLVPMEGDEELKMLAFDIETLYHEGEEFAEGPILMISYADEEGARVITWKNVDLPYVDVVSTEREMIKRFLRVVKEKDPDVLITYNGDNFDFAYLKKRCEKLGINFALGRDGSEPKIQRMGDRFAVEVKGRIHFDLYPVIRRTINLPTYTLEAVYEAVFGQPKEKVYAEEITTAWETGENLERVARYSMEDAKVTYELGKEFLPMEAQLSRLIGQSLWDVSRSSTGNLVEWFLLRKAYERNELAPNKPDEKELARRRQSYEGGYVKEPERGLWENIVYLDFRSLYPSIIITHNVSPDTLNREGCKEYDVAPQVGHRFCKDFPGFIPSLLGDLLEERQKIKKKMKATIDPIERKLLDYRQRAIKILANSYYGYYGYARARWYCKECAESVTAWGREYITMTIKEIEEKYGFKVIYSDTDGFFATIPGADAETVKKKAMEFLKYINAKLPGALELEYEGFYKRGFFVTKKKYAVIDEEGKITTRGLEIVRRDWSEIAKETQARVLEALLKDGDVEKAVRIVKEVTEKLSKYEVPPEKLVIHEQITRDLKDYKATGPHVAVAKRLAARGVKIRPGTVISYIVLKGSGRIGDRAIPFDEFDPTKHKYDAEYYIENQVLPAVERILRAFGYRKEDLRYQKTRQVGLSAWLKPKGT

SEQ ID NO: 2268 - protein, 774 aa, synthetic construct
MILDTDLITEDGKPVLRIFKKENGEFKIEYDRTFEPYFYALLKDDSAIEEVKKITAERHGTVVTVKRVEKVQKKFLGRPVEVWKLYFTHFQDIPAIHDKIREHPAVIDIYEYDIPFAKRYLIDKGLVPMEGDEELKMLAFDIETLYHEGEEFAEGPILMISYADEEGARVITWKNVDLPYVDVVSTEREMIKRFLRVVKEKDPDVLITYNGDNFDFAYLKKRCEKLGINFALGRDGSEPKIQRMGDRFAVEVKGRIHFDLYPVIRRTINLPTYTLEAVYEAVFGQPKEKVYAEEITTAWETGENLERVARYSMEDAKVTYELGKEFLPMEAQLSRLIGQSLWDVSRSSTGNLVEWFLLRKAYERNELAPNKPDEKELARRRQSYEGGYVKEPERGLWENIVYLDFRSLYPSIIITHNVSPDTLNREGCKEYDVAPQVGHRFCKDFPGFIPSLLGDLLEERQKIKKKMKATIDPIERKLLDYRQRAIKILANSYYGYYGYARARWYCKECAESVTAWGREYITMTIKEIEEKYGFKVIYSDTDGFFATIPGADAETVKKKAMEFLKYINAKLPGALELEYEGFYKRGFFVTKKKYAVIDEEGKITTRGLEIVRRDWSEIAKETQARVLEALLKDGDVEKAVRIVKEVTEKLSKYEVPPEKLVIHEQITRDLKDYKATGPHVAVAKRLAARGVKIRPGTVISYIVLKGSGRIGDRAIPFDEFDPTKHKYDAEYYIENQVLPAVERILRAFGYRKEDLRYQKTRQVGLSAWLKPKGT

SEQ ID NO: 2269 - protein, 774 aa, synthetic construct
MILDTDLITEDGKPVLRIFKKENGEFKIEYDRTFEPYFYALLKDDSAIEEVKKITAERHGTVVTVKRVEKVQKKFLGRPVEVWKLYFTHFQDIPAIWDKIREHPAVIDIYEYDIPFAKRYLIDKGLVPMEGDEELKMLAFDIETLYHEGEEFAEGPILMISYADEEGARVITWKNVDLPYVDVVSTEREMIKRFLRVVKEKDPDVLITYNGDNFDFAYLKKRCEKLGINFALGRDGSEPKIQRMGDRFAVEVKGRIHFDLYPVIRRTINLPTYTLEAVYEAVFGQPKEKVYAEEITTAWETGENLERVARYSMEDAKVTYELGKEFLPMEAQLSRLIGQSLWDVSRSSTGNLVEWFLLRKAYERNELAPNKPDEKELARRRQSYEGGYVKEPERGLWENIVYLDFRSLYPSIIITHNVSPDTLNREGCKEYDVAPQVGHRFCKDFPGFIPSLLGDLLEERQKIKKKMKATIDPIERKLLDYRQRAIKILANSYYGYYGYARARWYCKECAESVTAWGREYITMTIKEIEEKYGFKVIYSDTDGFFATIPGADAETVKKKAMEFLKYINAKLPGALELEYEGFYKRGFFVTKKKYAVIDEEGKITTRGLEIVRRDWSEIAKETQARVLEALLKDGDVEKAVRIVKEVTEKLSKYEVPPEKLVIHEQITRDLKDYKATGPHVAVAKRLAARGVKIRPGTVISYIVLKGSGRIGDRAIPFDEFDPTKHKYDAEYYIENQVLPAVERILRAFGYRKEDLRYQKTRQVGLSAWLKPKGT

SEQ ID NO: 2270 - protein, 774 aa, synthetic construct
MILDTDLITEDGKPVLRIFKKENGEFKIEYDRTFEPYFYALLKDDSAIEEVKKITAERHGTVVTVKRVEKVQKKFLGRPVEVWKLYFTHFQDQPAIRDKIREHPAVIDIYEYDIPFAKRYLIDKGLVPMEGDEELKMLAFDIETLYHEGEEFAEGPILMISYADEEGARVITWKNVDLPYVDVVSTEREMIKRFLRVVKEKDPDVLITYNGDNFDFAYLKKRCEKLGINFALGRDGSEPKIQRMGDRFAVEVKGRIHFDLYPVIRRTINLPTYTLEAVYEAVFGQPKEKVYAEEITTAWETGENLERVARYSMEDAKVTYELGKEFLPMEAQLSRLIGQSLWDVSRSSTGNLVEWFLLRKAYERNELAPNKPDEKELARRRQSYEGGYVKEPERGLWENIVYLDFRSLYPSIIITHNVSPDTLNREGCKEYDVAPQVGHRFCKDFPGFIPSLLGDLLEERQKIKKKMKATIDPIERKLLDYRQRAIKILANSYYGYYGYARARWYCKECAESVTAWGREYITMTIKEIEEKYGFKVIYSDTDGFFATIPGADAETVKKKAMEFLKYINAKLPGALELEYEGFYKRGFFVTKKKYAVIDEEGKITTRGLEIVRRDWSEIAKETQARVLEALLKDGDVEKAVRIVKEVTEKLSKYEVPPEKLVIHEQITRDLKDYKATGPHVAVAKRLAARGVKIRPGTVISYIVLKGSGRIGDRAIPFDEFDPTKHKYDAEYYIENQVLPAVERILRAFGYRKEDLRYQKTRQVGLSAWLKPKGT

SEQ ID NO: 2271 - protein, 774 aa, synthetic construct
MILDTDLITEDGKPVLRIFKKENGEFKIEYDRTFEPYFYALLKDDSAIEEVKKITAERHGTVVTVKRVEKVQKKFLGRPVEVWKLYFTHFQDRPAIFDKIREHPAVIDIYEYDIPFAKRYLIDKGLVPMEGDEELKMLAFDIETLYHEGEEFAEGPILMISYADEEGARVITWKNVDLPYVDVVSTEREMIKRFLRVVKEKDPDVLITYNGDNFDFAYLKKRCEKLGINFALGRDGSEPKIQRMGDRFAVEVKGRIHFDLYPVIRRTINLPTYTLEAVYEAVFGQPKEKVYAEEITTAWETGENLERVARYSMEDAKVTYELGKEFLPMEAQLSRLIGQSLWDVSRSSTGNLVEWFLLRKAYERNELAPNKPDEKELARRRQSYEGGYVKEPERGLWENIVYLDFRSLYPSIIITHNVSPDTLNREGCKEYDVAPQVGHRFCKDFPGFIPSLLGDLLEERQKIKKKMKATIDPIERKLLDYRQRAIKILANSYYGYYGYARARWYCKECAESVTAWGREYITMTIKEIEEKYGFKVIYSDTDGFFATIPGADAETVKKKAMEFLKYINAKLPGALELEYEGFYKRGFFVTKKKYAVIDEEGKITTRGLEIVRRDWSEIAKETQARVLEALLKDGDVEKAVRIVKEVTEKLSKYEVPPEKLVIHEQITRDLKDYKATGPHVAVAKRLAARGVKIRPGTVISYIVLKGSGRIGDRAIPFDEFDPTKHKYDAEYYIENQVLPAVERILRAFGYRKEDLRYQKTRQVGLSAWLKPKGT

SEQ ID NO: 2272 - protein, 774 aa, synthetic construct
MILDTDLITEDGKPVLRIFKKENGEFKIEYDRTFEPYFYALLKDDSAIEEVKKITAERHGTVVTVKRVEKVQKKFLGRPVEVWKLYFTHIQDVPAIRDKIREHPAVIDIYEYDIPFAKRYLIDKGLVPMEGDEELKMLAFDIETLYHEGEEFAEGPILMISYADEEGARVITWKNVDLPYVDVVSTEREMIKRFLRVVKEKDPDVLITYNGDNFDFAYLKKRCEKLGINFALGRDGSEPKIQRMGDRFAVEVKGRIHFDLYPVIRRTINLPTYTLEAVYEAVFGQPKEKVYAEEITTAWETGENLERVARYSMEDAKVTYELGKEFLPMEAQLSRLIGQSLWDVSRSSTGNLVEWFLLRKAYERNELAPNKPDEKELARRRQSYEGGYVKEPERGLWENIVYLDFRSLYPSIIITHNVSPDTLNREGCKEYDVAPQVGHRFCKDFPGFIPSLLGDLLEERQKIKKKMKATIDPIERKLLDYRQRAIKILANSYYGYYGYARARWYCKECAESVTAWGREYITMTIKEIEEKYGFKVIYSDTDGFFATIPGADAETVKKKAMEFLKYINAKLPGALELEYEGFYKRGFFVTKKKYAVIDEEGKITTRGLEIVRRDWSEIAKETQARVLEALLKDGDVEKAVRIVKEVTEKLSKYEVPPEKLVIHEQITRDLKDYKATGPHVAVAKRLAARGVKIRPGTVISYIVLKGSGRIGDRAIPFDEFDPTKHKYDAEYYIENQVLPAVERILRAFGYRKEDLRYQKTRQVGLSAWLKPKGT

SEQ ID NO: 2273 - protein, 774 aa, synthetic construct
MILDTDLITEDGKPVLRIFKKENGEFKIEYDRTFEPYFYALLKDDSAIEEVKKITAERHGTVVTVKRVEKVQKKFLGRPVEVWKLYFTHIQDVPAIADKIREHPAVIDIYEYDIPFAKRYLIDKGLVPMEGDEELKMLAFDIETLYHEGEEFAEGPILMISYADEEGARVITWKNVDLPYVDVVSTEREMIKRFLRVVKEKDPDVLITYNGDNFDFAYLKKRCEKLGINFALGRDGSEPKIQRMGDRFAVEVKGRIHFDLYPVIRRTINLPTYTLEAVYEAVFGQPKEKVYAEEITTAWETGENLERVARYSMEDAKVTYELGKEFLPMEAQLSRLIGQSLWDVSRSSTGNLVEWFLLRKAYERNELAPNKPDEKELARRRQSYEGGYVKEPERGLWENIVYLDFRSLYPSIIITHNVSPDTLNREGCKEYDVAPQVGHRFCKDFPGFIPSLLGDLLEERQKIKKKMKATIDPIERKLLDYRQRAIKILANSYYGYYGYARARWYCKECAESVTAWGREYITMTIKEIEEKYGFKVIYSDTDGFFATIPGADAETVKKKAMEFLKYINAKLPGALELEYEGFYKRGFFVTKKKYAVIDEEGKITTRGLEIVRRDWSEIAKETQARVLEALLKDGDVEKAVRIVKEVTEKLSKYEVPPEKLVIHEQITRDLKDYKATGPHVAVAKRLAARGVKIRPGTVISYIVLKGSGRIGDRAIPFDEFDPTKHKYDAEYYIENQVLPAVERILRAFGYRKEDLRYQKTRQVGLSAWLKPKGT

SEQ ID NO: 2274 - protein, 774 aa, synthetic construct
MILDTDLITEDGKPVLRIFKKENGEFKIEYDRTFEPYFYALLKDDSAIEEVKKITAERHGTVVTVKRVEKVQKKFLGRPVEVWKLYFTHIQDVPAIFDKIREHPAVIDIYEYDIPFAKRYLIDKGLVPMEGDEELKMLAFDIETLYHEGEEFAEGPILMISYADEEGARVITWKNVDLPYVDVVSTEREMIKRFLRVVKEKDPDVLITYNGDNFDFAYLKKRCEKLGINFALGRDGSEPKIQRMGDRFAVEVKGRIHFDLYPVIRRTINLPTYTLEAVYEAVFGQPKEKVYAEEITTAWETGENLERVARYSMEDAKVTYELGKEFLPMEAQLSRLIGQSLWDVSRSSTGNLVEWFLLRKAYERNELAPNKPDEKELARRRQSYEGGYVKEPERGLWENIVYLDFRSLYPSIIITHNVSPDTLNREGCKEYDVAPQVGHRFCKDFPGFIPSLLGDLLEERQKIKKKMKATIDPIERKLLDYRQRAIKILANSYYGYYGYARARWYCKECAESVTAWGREYITMTIKEIEEKYGFKVIYSDTDGFFATIPGADAETVKKKAMEFLKYINAKLPGALELEYEGFYKRGFFVTKKKYAVIDEEGKITTRGLEIVRRDWSEIAKETQARVLEALLKDGDVEKAVRIVKEVTEKLSKYEVPPEKLVIHEQITRDLKDYKATGPHVAVAKRLAARGVKIRPGTVISYIVLKGSGRIGDRAIPFDEFDPTKHKYDAEYYIENQVLPAVERILRAFGYRKEDLRYQKTRQVGLSAWLKPKGT

SEQ ID NO: 2275 - protein, 774 aa, synthetic construct
MILDTDLITEDGKPVLRIFKKENGEFKIEYDRTFEPYFYALLKDDSAIEEVKKITAERHGTVVTVKRVEKVQKKFLGRPVEVWKLYFTHIQDVPAIHDKIREHPAVIDIYEYDIPFAKRYLIDKGLVPMEGDEELKMLAFDIETLYHEGEEFAEGPILMISYADEEGARVITWKNVDLPYVDVVSTEREMIKRFLRVVKEKDPDVLITYNGDNFDFAYLKKRCEKLGINFALGRDGSEPKIQRMGDRFAVEVKGRIHFDLYPVIRRTINLPTYTLEAVYEAVFGQPKEKVYAEEITTAWETGENLERVARYSMEDAKVTYELGKEFLPMEAQLSRLIGQSLWDVSRSSTGNLVEWFLLRKAYERNELAPNKPDEKELARRRQSYEGGYVKEPERGLWENIVYLDFRSLYPSIIITHNVSPDTLNREGCKEYDVAPQVGHRFCKDFPGFIPSLLGDLLEERQKIKKKMKATIDPIERKLLDYRQRAIKILANSYYGYYGYARARWYCKECAESVTAWGREYITMTIKEIEEKYGFKVIYSDTDGFFATIPGADAETVKKKAMEFLKYINAKLPGALELEYEGFYKRGFFVTKKKYAVIDEEGKITTRGLEIVRRDWSEIAKETQARVLEALLKDGDVEKAVRIVKEVTEKLSKYEVPPEKLVIHEQITRDLKDYKATGPHVAVAKRLAARGVKIRPGTVISYIVLKGSGRIGDRAIPFDEFDPTKHKYDAEYYIENQVLPAVERILRAFGYRKEDLRYQKTRQVGLSAWLKPKGT

SEQ ID NO: 2276 - protein, 774 aa, synthetic construct
MILDTDLITEDGKPVLRIFKKENGEFKIEYDRTFEPYFYALLKDDSAIEEVKKITAERHGTVVTVKRVEKVQKKFLGRPVEVWKLYFTHIQDIPAIRDKIREHPAVIDIYEYDIPFAKRYLIDKGLVPMEGDEELKMLAFDIETLYHEGEEFAEGPILMISYADEEGARVITWKNVDLPYVDVVSTEREMIKRFLRVVKEKDPDVLITYNGDNFDFAYLKKRCEKLGINFALGRDGSEPKIQRMGDRFAVEVKGRIHFDLYPVIRRTINLPTYTLEAVYEAVFGQPKEKVYAEEITTAWETGENLERVARYSMEDAKVTYELGKEFLPMEAQLSRLIGQSLWDVSRSSTGNLVEWFLLRKAYERNELAPNKPDEKELARRRQSYEGGYVKEPERGLWENIVYLDFRSLYPSIIITHNVSPDTLNREGCKEYDVAPQVGHRFCKDFPGFIPSLLGDLLEERQKIKKKMKATIDPIERKLLDYRQRAIKILANSYYGYYGYARARWYCKECAESVTAWGREYITMTIKEIEEKYGFKVIYSDTDGFFATIPGADAETVKKKAMEFLKYINAKLPGALELEYEGFYKRGFFVTKKKYAVIDEEGKITTRGLEIVRRDWSEIAKETQARVLEALLKDGDVEKAVRIVKEVTEKLSKYEVPPEKLVIHEQITRDLKDYKATGPHVAVAKRLAARGVKIRPGTVISYIVLKGSGRIGDRAIPFDEFDPTKHKYDAEYYIENQVLPAVERILRAFGYRKEDLRYQKTRQVGLSAWLKPKGT

SEQ ID NO: 2277 - protein, 774 aa, synthetic construct
MILDTDLITEDGKPVLRIFKKENGEFKIEYDRTFEPYFYALLKDDSAIEEVKKITAERHGTVVTVKRVEKVQKKFLGRPVEVWKLYFTHIQDIPAIADKIREHPAVIDIYEYDIPFAKRYLIDKGLVPMEGDEELKMLAFDIETLYHEGEEFAEGPILMISYADEEGARVITWKNVDLPYVDVVSTEREMIKRFLRVVKEKDPDVLITYNGDNFDFAYLKKRCEKLGINFALGRDGSEPKIQRMGDRFAVEVKGRIHFDLYPVIRRTINLPTYTLEAVYEAVFGQPKEKVYAEEITTAWETGENLERVARYSMEDAKVTYELGKEFLPMEAQLSRLIGQSLWDVSRSSTGNLVEWFLLRKAYERNELAPNKPDEKELARRRQSYEGGYVKEPERGLWENIVYLDFRSLYPSIIITHNVSPDTLNREGCKEYDVAPQVGHRFCKDFPGFIPSLLGDLLEERQKIKKKMKATIDPIERKLLDYRQRAIKILANSYYGYYGYARARWYCKECAESVTAWGREYITMTIKEIEEKYGFKVIYSDTDGFFATIPGADAETVKKKAMEFLKYINAKLPGALELEYEGFYKRGFFVTKKKYAVIDEEGKITTRGLEIVRRDWSEIAKETQARVLEALLKDGDVEKAVRIVKEVTEKLSKYEVPPEKLVIHEQITRDLKDYKATGPHVAVAKRLAARGVKIRPGTVISYIVLKGSGRIGDRAIPFDEFDPTKHKYDAEYYIENQVLPAVERILRAFGYRKEDLRYQKTRQVGLSAWLKPKGT

SEQ ID NO: 2278 - protein, 774 aa, synthetic construct
MILDTDLITEDGKPVLRIFKKENGEFKIEYDRTFEPYFYALLKDDSAIEEVKKITAERHGTVVTVKRVEKVQKKFLGRPVEVWKLYFTHIQDIPAIFDKIREHPAVIDIYEYDIPFAKRYLIDKGLVPMEGDEELKMLAFDIETLYHEGEEFAEGPILMISYADEEGARVITWKNVDLPYVDVVSTEREMIKRFLRVVKEKDPDVLITYNGDNFDFAYLKKRCEKLGINFALGRDGSEPKIQRMGDRFAVEVKGRIHFDLYPVIRRTINLPTYTLEAVYEAVFGQPKEKVYAEEITTAWETGENLERVARYSMEDAKVTYELGKEFLPMEAQLSRLIGQSLWDVSRSSTGNLVEWFLLRKAYERNELAPNKPDEKELARRRQSYEGGYVKEPERGLWENIVYLDFRSLYPSIIITHNVSPDTLNREGCKEYDVAPQVGHRFCKDFPGFIPSLLGDLLEERQKIKKKMKATIDPIERKLLDYRQRAIKILANSYYGYYGYARARWYCKECAESVTAWGREYITMTIKEIEEKYGFKVIYSDTDGFFATIPGADAETVKKKAMEFLKYINAKLPGALELEYEGFYKRGFFVTKKKYAVIDEEGKITTRGLEIVRRDWSEIAKETQARVLEALLKDGDVEKAVRIVKEVTEKLSKYEVPPEKLVIHEQITRDLKDYKATGPHVAVAKRLAARGVKIRPGTVISYIVLKGSGRIGDRAIPFDEFDPTKHKYDAEYYIENQVLPAVERILRAFGYRKEDLRYQKTRQVGLSAWLKPKGT

SEQ ID NO: 2279 - protein, 774 aa, synthetic construct
MILDTDLITEDGKPVLRIFKKENGEFKIEYDRTFEPYFYALLKDDSAIEEVKKITAERHGTVVTVKRVEKVQKKFLGRPVEVWKLYFTHIQDIPAIHDKIREHPAVIDIYEYDIPFAKRYLIDKGLVPMEGDEELKMLAFDIETLYHEGEEFAEGPILMISYADEEGARVITWKNVDLPYVDVVSTEREMIKRFLRVVKEKDPDVLITYNGDNFDFAYLKKRCEKLGINFALGRDGSEPKIQRMGDRFAVEVKGRIHFDLYPVIRRTINLPTYTLEAVYEAVFGQPKEKVYAEEITTAWETGENLERVARYSMEDAKVTYELGKEFLPMEAQLSRLIGQSLWDVSRSSTGNLVEWFLLRKAYERNELAPNKPDEKELARRRQSYEGGYVKEPERGLWENIVYLDFRSLYPSIIITHNVSPDTLNREGCKEYDVAPQVGHRFCKDFPGFIPSLLGDLLEERQKIKKKMKATIDPIERKLLDYRQRAIKILANSYYGYYGYARARWYCKECAESVTAWGREYITMTIKEIEEKYGFKVIYSDTDGFFATIPGADAETVKKKAMEFLKYINAKLPGALELEYEGFYKRGFFVTKKKYAVIDEEGKITTRGLEIVRRDWSEIAKETQARVLEALLKDGDVEKAVRIVKEVTEKLSKYEVPPEKLVIHEQITRDLKDYKATGPHVAVAKRLAARGVKIRPGTVISYIVLKGSGRIGDRAIPFDEFDPTKHKYDAEYYIENQVLPAVERILRAFGYRKEDLRYQKTRQVGLSAWLKPKGT

SEQ ID NO: 2280 - protein, 774 aa, synthetic construct
MILDTDLITEDGKPVLRIFKKENGEFKIEYDRTFEPYFYALLKDDSAIEEVKKITAERHGTVVTVKRVEKVQKKFLGRPVEVWKLYFTHIQDIPAIWDKIREHPAVIDIYEYDIPFAKRYLIDKGLVPMEGDEELKMLAFDIETLYHEGEEFAEGPILMISYADEEGARVITWKNVDLPYVDVVSTEREMIKRFLRVVKEKDPDVLITYNGDNFDFAYLKKRCEKLGINFALGRDGSEPKIQRMGDRFAVEVKGRIHFDLYPVIRRTINLPTYTLEAVYEAVFGQPKEKVYAEEITTAWETGENLERVARYSMEDAKVTYELGKEFLPMEAQLSRLIGQSLWDVSRSSTGNLVEWFLLRKAYERNELAPNKPDEKELARRRQSYEGGYVKEPERGLWENIVYLDFRSLYPSIIITHNVSPDTLNREGCKEYDVAPQVGHRFCKDFPGFIPSLLGDLLEERQKIKKKMKATIDPIERKLLDYRQRAIKILANSYYGYYGYARARWYCKECAESVTAWGREYITMTIKEIEEKYGFKVIYSDTDGFFATIPGADAETVKKKAMEFLKYINAKLPGALELEYEGFYKRGFFVTKKKYAVIDEEGKITTRGLEIVRRDWSEIAKETQARVLEALLKDGDVEKAVRIVKEVTEKLSKYEVPPEKLVIHEQITRDLKDYKATGPHVAVAKRLAARGVKIRPGTVISYIVLKGSGRIGDRAIPFDEFDPTKHKYDAEYYIENQVLPAVERILRAFGYRKEDLRYQKTRQVGLSAWLKPKGT

SEQ ID NO: 2281 - protein, 774 aa, synthetic construct
MILDTDLITEDGKPVLRIFKKENGEFKIEYDRTFEPYFYALLKDDSAIEEVKKITAERHGTVVTVKRVEKVQKKFLGRPVEVWKLYFTHIQDQPAIRDKIREHPAVIDIYEYDIPFAKRYLIDKGLVPMEGDEELKMLAFDIETLYHEGEEFAEGPILMISYADEEGARVITWKNVDLPYVDVVSTEREMIKRFLRVVKEKDPDVLITYNGDNFDFAYLKKRCEKLGINFALGRDGSEPKIQRMGDRFAVEVKGRIHFDLYPVIRRTINLPTYTLEAVYEAVFGQPKEKVYAEEITTAWETGENLERVARYSMEDAKVTYELGKEFLPMEAQLSRLIGQSLWDVSRSSTGNLVEWFLLRKAYERNELAPNKPDEKELARRRQSYEGGYVKEPERGLWENIVYLDFRSLYPSIIITHNVSPDTLNREGCKEYDVAPQVGHRFCKDFPGFIPSLLGDLLEERQKIKKKMKATIDPIERKLLDYRQRAIKILANSYYGYYGYARARWYCKECAESVTAWGREYITMTIKEIEEKYGFKVIYSDTDGFFATIPGADAETVKKKAMEFLKYINAKLPGALELEYEGFYKRGFFVTKKKYAVIDEEGKITTRGLEIVRRDWSEIAKETQARVLEALLKDGDVEKAVRIVKEVTEKLSKYEVPPEKLVIHEQITRDLKDYKATGPHVAVAKRLAARGVKIRPGTVISYIVLKGSGRIGDRAIPFDEFDPTKHKYDAEYYIENQVLPAVERILRAFGYRKEDLRYQKTRQVGLSAWLKPKGT

SEQ ID NO: 2282 - protein, 774 aa, synthetic construct
MILDTDLITEDGKPVLRIFKKENGEFKIEYDRTFEPYFYALLKDDSAIEEVKKITAERHGTVVTVKRVEKVQKKFLGRPVEVWKLYFTHSQDIPAIRDKIREHPAVIDIYEYDIPFAKRYLIDKGLVPMEGDEELKMLAFDIETLYHEGEEFAEGPILMISYADEEGARVITWKNVDLPYVDVVSTEREMIKRFLRVVKEKDPDVLITYNGDNFDFAYLKKRCEKLGINFALGRDGSEPKIQRMGDRFAVEVKGRIHFDLYPVIRRTINLPTYTLEAVYEAVFGQPKEKVYAEEITTAWETGENLERVARYSMEDAKVTYELGKEFLPMEAQLSRLIGQSLWDVSRSSTGNLVEWFLLRKAYERNELAPNKPDEKELARRRQSYEGGYVKEPERGLWENIVYLDFRSLYPSIIITHNVSPDTLNREGCKEYDVAPQVGHRFCKDFPGFIPSLLGDLLEERQKIKKKMKATIDPIERKLLDYRQRAIKILANSYYGYYGYARARWYCKECAESVTAWGREYITMTIKEIEEKYGFKVIYSDTDGFFATIPGADAETVKKKAMEFLKYINAKLPGALELEYEGFYKRGFFVTKKKYAVIDEEGKITTRGLEIVRRDWSEIAKETQARVLEALLKDGDVEKAVRIVKEVTEKLSKYEVPPEKLVIHEQITRDLKDYKATGPHVAVAKRLAARGVKIRPGTVISYIVLKGSGRIGDRAIPFDEFDPTKHKYDAEYYIENQVLPAVERILRAFGYRKEDLRYQKTRQVGLSAWLKPKGT

SEQ ID NO: 2283 - protein, 774 aa, synthetic construct
MILDTDLITEDGKPVLRIFKKENGEFKIEYDRTFEPYFYALLKDDSAIEEVKKITAERHGTVVTVKRVEKVQKKFLGRPVEVWKLYFTHSQDIPAIADKIREHPAVIDIYEYDIPFAKRYLIDKGLVPMEGDEELKMLAFDIETLYHEGEEFAEGPILMISYADEEGARVITWKNVDLPYVDVVSTEREMIKRFLRVVKEKDPDVLITYNGDNFDFAYLKKRCEKLGINFALGRDGSEPKIQRMGDRFAVEVKGRIHFDLYPVIRRTINLPTYTLEAVYEAVFGQPKEKVYAEEITTAWETGENLERVARYSMEDAKVTYELGKEFLPMEAQLSRLIGQSLWDVSRSSTGNLVEWFLLRKAYERNELAPNKPDEKELARRRQSYEGGYVKEPERGLWENIVYLDFRSLYPSIIITHNVSPDTLNREGCKEYDVAPQVGHRFCKDFPGFIPSLLGDLLEERQKIKKKMKATIDPIERKLLDYRQRAIKILANSYYGYYGYARARWYCKECAESVTAWGREYITMTIKEIEEKYGFKVIYSDTDGFFATIPGADAETVKKKAMEFLKYINAKLPGALELEYEGFYKRGFFVTKKKYAVIDEEGKITTRGLEIVRRDWSEIAKETQARVLEALLKDGDVEKAVRIVKEVTEKLSKYEVPPEKLVIHEQITRDLKDYKATGPHVAVAKRLAARGVKIRPGTVISYIVLKGSGRIGDRAIPFDEFDPTKHKYDAEYYIENQVLPAVERILRAFGYRKEDLRYQKTRQVGLSAWLKPKGT

SEQ ID NO: 2284 - protein, 774 aa, synthetic construct
MILDTDLITEDGKPVLRIFKKENGEFKIEYDRTFEPYFYALLKDDSAIEEVKKITAERHGTVVTVKRVEKVQKKFLGRPVEVWKLYFTHSQDIPAIHDKIREHPAVIDIYEYDIPFAKRYLIDKGLVPMEGDEELKMLAFDIETLYHEGEEFAEGPILMISYADEEGARVITWKNVDLPYVDVVSTEREMIKRFLRVVKEKDPDVLITYNGDNFDFAYLKKRCEKLGINFALGRDGSEPKIQRMGDRFAVEVKGRIHFDLYPVIRRTINLPTYTLEAVYEAVFGQPKEKVYAEEITTAWETGENLERVARYSMEDAKVTYELGKEFLPMEAQLSRLIGQSLWDVSRSSTGNLVEWFLLRKAYERNELAPNKPDEKELARRRQSYEGGYVKEPERGLWENIVYLDFRSLYPSIIITHNVSPDTLNREGCKEYDVAPQVGHRFCKDFPGFIPSLLGDLLEERQKIKKKMKATIDPIERKLLDYRQRAIKILANSYYGYYGYARARWYCKECAESVTAWGREYITMTIKEIEEKYGFKVIYSDTDGFFATIPGADAETVKKKAMEFLKYINAKLPGALELEYEGFYKRGFFVTKKKYAVIDEEGKITTRGLEIVRRDWSEIAKETQARVLEALLKDGDVEKAVRIVKEVTEKLSKYEVPPEKLVIHEQITRDLKDYKATGPHVAVAKRLAARGVKIRPGTVISYIVLKGSGRIGDRAIPFDEFDPTKHKYDAEYYIENQVLPAVERILRAFGYRKEDLRYQKTRQVGLSAWLKPKGT

SEQ ID NO: 2285 - protein, 774 aa, synthetic construct
MILDTDLITEDGKPVLRIFKKENGEFKIEYDRTFEPYFYALLKDDSAIEEVKKITAERHGTVVTVKRVEKVQKKFLGRPVEVWKLYFTHWQDVPAIRDKIREHPAVIDIYEYDIPFAKRYLIDKGLVPMEGDEELKMLAFDIETLYHEGEEFAEGPILMISYADEEGARVITWKNVDLPYVDVVSTEREMIKRFLRVVKEKDPDVLITYNGDNFDFAYLKKRCEKLGINFALGRDGSEPKIQRMGDRFAVEVKGRIHFDLYPVIRRTINLPTYTLEAVYEAVFGQPKEKVYAEEITTAWETGENLERVARYSMEDAKVTYELGKEFLPMEAQLSRLIGQSLWDVSRSSTGNLVEWFLLRKAYERNELAPNKPDEKELARRRQSYEGGYVKEPERGLWENIVYLDFRSLYPSIIITHNVSPDTLNREGCKEYDVAPQVGHRFCKDFPGFIPSLLGDLLEERQKIKKKMKATIDPIERKLLDYRQRAIKILANSYYGYYGYARARWYCKECAESVTAWGREYITMTIKEIEEKYGFKVIYSDTDGFFATIPGADAETVKKKAMEFLKYINAKLPGALELEYEGFYKRGFFVTKKKYAVIDEEGKITTRGLEIVRRDWSEIAKETQARVLEALLKDGDVEKAVRIVKEVTEKLSKYEVPPEKLVIHEQITRDLKDYKATGPHVAVAKRLAARGVKIRPGTVISYIVLKGSGRIGDRAIPFDEFDPTKHKYDAEYYIENQVLPAVERILRAFGYRKEDLRYQKTRQVGLSAWLKPKGT

SEQ ID NO: 2286 - protein, 774 aa, synthetic construct
MILDTDLITEDGKPVLRIFKKENGEFKIEYDRTFEPYFYALLKDDSAIEEVKKITAERHGTVVTVKRVEKVQKKFLGRPVEVWKLYFTHWQDVPAIADKIREHPAVIDIYEYDIPFAKRYLIDKGLVPMEGDEELKMLAFDIETLYHEGEEFAEGPILMISYADEEGARVITWKNVDLPYVDVVSTEREMIKRFLRVVKEKDPDVLITYNGDNFDFAYLKKRCEKLGINFALGRDGSEPKIQRMGDRFAVEVKGRIHFDLYPVIRRTINLPTYTLEAVYEAVFGQPKEKVYAEEITTAWETGENLERVARYSMEDAKVTYELGKEFLPMEAQLSRLIGQSLWDVSRSSTGNLVEWFLLRKAYERNELAPNKPDEKELARRRQSYEGGYVKEPERGLWENIVYLDFRSLYPSIIITHNVSPDTLNREGCKEYDVAPQVGHRFCKDFPGFIPSLLGDLLEERQKIKKKMKATIDPIERKLLDYRQRAIKILANSYYGYYGYARARWYCKECAESVTAWGREYITMTIKEIEEKYGFKVIYSDTDGFFATIPGADAETVKKKAMEFLKYINAKLPGALELEYEGFYKRGFFVTKKKYAVIDEEGKITTRGLEIVRRDWSEIAKETQARVLEALLKDGDVEKAVRIVKEVTEKLSKYEVPPEKLVIHEQITRDLKDYKATGPHVAVAKRLAARGVKIRPGTVISYIVLKGSGRIGDRAIPFDEFDPTKHKYDAEYYIENQVLPAVERILRAFGYRKEDLRYQKTRQVGLSAWLKPKGT

SEQ ID NO: 2287 - protein, 774 aa, synthetic construct
MILDTDLITEDGKPVLRIFKKENGEFKIEYDRTFEPYFYALLKDDSAIEEVKKITAERHGTVVTVKRVEKVQKKFLGRPVEVWKLYFTHWQDVPAIFDKIREHPAVIDIYEYDIPFAKRYLIDKGLVPMEGDEELKMLAFDIETLYHEGEEFAEGPILMISYADEEGARVITWKNVDLPYVDVVSTEREMIKRFLRVVKEKDPDVLITYNGDNFDFAYLKKRCEKLGINFALGRDGSEPKIQRMGDRFAVEVKGRIHFDLYPVIRRTINLPTYTLEAVYEAVFGQPKEKVYAEEITTAWETGENLERVARYSMEDAKVTYELGKEFLPMEAQLSRLIGQSLWDVSRSSTGNLVEWFLLRKAYERNELAPNKPDEKELARRRQSYEGGYVKEPERGLWENIVYLDFRSLYPSIIITHNVSPDTLNREGCKEYDVAPQVGHRFCKDFPGFIPSLLGDLLEERQKIKKKMKATIDPIERKLLDYRQRAIKILANSYYGYYGYARARWYCKECAESVTAWGREYITMTIKEIEEKYGFKVIYSDTDGFFATIPGADAETVKKKAMEFLKYINAKLPGALELEYEGFYKRGFFVTKKKYAVIDEEGKITTRGLEIVRRDWSEIAKETQARVLEALLKDGDVEKAVRIVKEVTEKLSKYEVPPEKLVIHEQITRDLKDYKATGPHVAVAKRLAARGVKIRPGTVISYIVLKGSGRIGDRAIPFDEFDPTKHKYDAEYYIENQVLPAVERILRAFGYRKEDLRYQKTRQVGLSAWLKPKGT

SEQ ID NO: 2288 - protein, 774 aa, synthetic construct
MILDTDLITEDGKPVLRIFKKENGEFKIEYDRTFEPYFYALLKDDSAIEEVKKITAERHGTVVTVKRVEKVQKKFLGRPVEVWKLYFTHWQDVPAIHDKIREHPAVIDIYEYDIPFAKRYLIDKGLVPMEGDEELKMLAFDIETLYHEGEEFAEGPILMISYADEEGARVITWKNVDLPYVDVVSTEREMIKRFLRVVKEKDPDVLITYNGDNFDFAYLKKRCEKLGINFALGRDGSEPKIQRMGDRFAVEVKGRIHFDLYPVIRRTINLPTYTLEAVYEAVFGQPKEKVYAEEITTAWETGENLERVARYSMEDAKVTYELGKEFLPMEAQLSRLIGQSLWDVSRSSTGNLVEWFLLRKAYERNELAPNKPDEKELARRRQSYEGGYVKEPERGLWENIVYLDFRSLYPSIIITHNVSPDTLNREGCKEYDVAPQVGHRFCKDFPGFIPSLLGDLLEERQKIKKKMKATIDPIERKLLDYRQRAIKILANSYYGYYGYARARWYCKECAESVTAWGREYITMTIKEIEEKYGFKVIYSDTDGFFATIPGADAETVKKKAMEFLKYINAKLPGALELEYEGFYKRGFFVTKKKYAVIDEEGKITTRGLEIVRRDWSEIAKETQARVLEALLKDGDVEKAVRIVKEVTEKLSKYEVPPEKLVIHEQITRDLKDYKATGPHVAVAKRLAARGVKIRPGTVISYIVLKGSGRIGDRAIPFDEFDPTKHKYDAEYYIENQVLPAVERILRAFGYRKEDLRYQKTRQVGLSAWLKPKGT

SEQ ID NO: 2289 - protein, 774 aa, synthetic construct
MILDTDLITEDGKPVLRIFKKENGEFKIEYDRTFEPYFYALLKDDSAIEEVKKITAERHGTVVTVKRVEKVQKKFLGRPVEVWKLYFTHWQDVPAIWDKIREHPAVIDIYEYDIPFAKRYLIDKGLVPMEGDEELKMLAFDIETLYHEGEEFAEGPILMISYADEEGARVITWKNVDLPYVDVVSTEREMIKRFLRVVKEKDPDVLITYNGDNFDFAYLKKRCEKLGINFALGRDGSEPKIQRMGDRFAVEVKGRIHFDLYPVIRRTINLPTYTLEAVYEAVFGQPKEKVYAEEITTAWETGENLERVARYSMEDAKVTYELGKEFLPMEAQLSRLIGQSLWDVSRSSTGNLVEWFLLRKAYERNELAPNKPDEKELARRRQSYEGGYVKEPERGLWENIVYLDFRSLYPSIIITHNVSPDTLNREGCKEYDVAPQVGHRFCKDFPGFIPSLLGDLLEERQKIKKKMKATIDPIERKLLDYRQRAIKILANSYYGYYGYARARWYCKECAESVTAWGREYITMTIKEIEEKYGFKVIYSDTDGFFATIPGADAETVKKKAMEFLKYINAKLPGALELEYEGFYKRGFFVTKKKYAVIDEEGKITTRGLEIVRRDWSEIAKETQARVLEALLKDGDVEKAVRIVKEVTEKLSKYEVPPEKLVIHEQITRDLKDYKATGPHVAVAKRLAARGVKIRPGTVISYIVLKGSGRIGDRAIPFDEFDPTKHKYDAEYYIENQVLPAVERILRAFGYRKEDLRYQKTRQVGLSAWLKPKGT

SEQ ID NO: 2290 - protein, 774 aa, synthetic construct
MILDTDLITEDGKPVLRIFKKENGEFKIEYDRTFEPYFYALLKDDSAIEEVKKITAERHGTVVTVKRVEKVQKKFLGRPVEVWKLYFTHWQDIPAIRDKIREHPAVIDIYEYDIPFAKRYLIDKGLVPMEGDEELKMLAFDIETLYHEGEEFAEGPILMISYADEEGARVITWKNVDLPYVDVVSTEREMIKRFLRVVKEKDPDVLITYNGDNFDFAYLKKRCEKLGINFALGRDGSEPKIQRMGDRFAVEVKGRIHFDLYPVIRRTINLPTYTLEAVYEAVFGQPKEKVYAEEITTAWETGENLERVARYSMEDAKVTYELGKEFLPMEAQLSRLIGQSLWDVSRSSTGNLVEWFLLRKAYERNELAPNKPDEKELARRRQSYEGGYVKEPERGLWENIVYLDFRSLYPSIIITHNVSPDTLNREGCKEYDVAPQVGHRFCKDFPGFIPSLLGDLLEERQKIKKKMKATIDPIERKLLDYRQRAIKILANSYYGYYGYARARWYCKECAESVTAWGREYITMTIKEIEEKYGFKVIYSDTDGFFATIPGADAETVKKKAMEFLKYINAKLPGALELEYEGFYKRGFFVTKKKYAVIDEEGKITTRGLEIVRRDWSEIAKETQARVLEALLKDGDVEKAVRIVKEVTEKLSKYEVPPEKLVIHEQITRDLKDYKATGPHVAVAKRLAARGVKIRPGTVISYIVLKGSGRIGDRAIPFDEFDPTKHKYDAEYYIENQVLPAVERILRAFGYRKEDLRYQKTRQVGLSAWLKPKGT

SEQ ID NO: 2291 - protein, 774 aa, synthetic construct
MILDTDLITEDGKPVLRIFKKENGEFKIEYDRTFEPYFYALLKDDSAIEEVKKITAERHGTVVTVKRVEKVQKKFLGRPVEVWKLYFTHWQDIPAIADKIREHPAVIDIYEYDIPFAKRYLIDKGLVPMEGDEELKMLAFDIETLYHEGEEFAEGPILMISYADEEGARVITWKNVDLPYVDVVSTEREMIKRFLRVVKEKDPDVLITYNGDNFDFAYLKKRCEKLGINFALGRDGSEPKIQRMGDRFAVEVKGRIHFDLYPVIRRTINLPTYTLEAVYEAVFGQPKEKVYAEEITTAWETGENLERVARYSMEDAKVTYELGKEFLPMEAQLSRLIGQSLWDVSRSSTGNLVEWFLLRKAYERNELAPNKPDEKELARRRQSYEGGYVKEPERGLWENIVYLDFRSLYPSIIITHNVSPDTLNREGCKEYDVAPQVGHRFCKDFPGFIPSLLGDLLEERQKIKKKMKATIDPIERKLLDYRQRAIKILANSYYGYYGYARARWYCKECAESVTAWGREYITMTIKEIEEKYGFKVIYSDTDGFFATIPGADAETVKKKAMEFLKYINAKLPGALELEYEGFYKRGFFVTKKKYAVIDEEGKITTRGLEIVRRDWSEIAKETQARVLEALLKDGDVEKAVRIVKEVTEKLSKYEVPPEKLVIHEQITRDLKDYKATGPHVAVAKRLAARGVKIRPGTVISYIVLKGSGRIGDRAIPFDEFDPTKHKYDAEYYIENQVLPAVERILRAFGYRKEDLRYQKTRQVGLSAWLKPKGT

SEQ ID NO: 2292 - protein, 774 aa, synthetic construct
MILDTDLITEDGKPVLRIFKKENGEFKIEYDRTFEPYFYALLKDDSAIEEVKKITAERHGTVVTVKRVEKVQKKFLGRPVEVWKLYFTHWQDIPAIFDKIREHPAVIDIYEYDIPFAKRYLIDKGLVPMEGDEELKMLAFDIETLYHEGEEFAEGPILMISYADEEGARVITWKNVDLPYVDVVSTEREMIKRFLRVVKEKDPDVLITYNGDNFDFAYLKKRCEKLGINFALGRDGSEPKIQRMGDRFAVEVKGRIHFDLYPVIRRTINLPTYTLEAVYEAVFGQPKEKVYAEEITTAWETGENLERVARYSMEDAKVTYELGKEFLPMEAQLSRLIGQSLWDVSRSSTGNLVEWFLLRKAYERNELAPNKPDEKELARRRQSYEGGYVKEPERGLWENIVYLDFRSLYPSIIITHNVSPDTLNREGCKEYDVAPQVGHRFCKDFPGFIPSLLGDLLEERQKIKKKMKATIDPIERKLLDYRQRAIKILANSYYGYYGYARARWYCKECAESVTAWGREYITMTIKEIEEKYGFKVIYSDTDGFFATIPGADAETVKKKAMEFLKYINAKLPGALELEYEGFYKRGFFVTKKKYAVIDEEGKITTRGLEIVRRDWSEIAKETQARVLEALLKDGDVEKAVRIVKEVTEKLSKYEVPPEKLVIHEQITRDLKDYKATGPHVAVAKRLAARGVKIRPGTVISYIVLKGSGRIGDRAIPFDEFDPTKHKYDAEYYIENQVLPAVERILRAFGYRKEDLRYQKTRQVGLSAWLKPKGT

SEQ ID NO: 2293 - protein, 774 aa, synthetic construct
MILDTDLITEDGKPVLRIFKKENGEFKIEYDRTFEPYFYALLKDDSAIEEVKKITAERHGTVVTVKRVEKVQKKFLGRPVEVWKLYFTHWQDIPAIHDKIREHPAVIDIYEYDIPFAKRYLIDKGLVPMEGDEELKMLAFDIETLYHEGEEFAEGPILMISYADEEGARVITWKNVDLPYVDVVSTEREMIKRFLRVVKEKDPDVLITYNGDNFDFAYLKKRCEKLGINFALGRDGSEPKIQRMGDRFAVEVKGRIHFDLYPVIRRTINLPTYTLEAVYEAVFGQPKEKVYAEEITTAWETGENLERVARYSMEDAKVTYELGKEFLPMEAQLSRLIGQSLWDVSRSSTGNLVEWFLLRKAYERNELAPNKPDEKELARRRQSYEGGYVKEPERGLWENIVYLDFRSLYPSIIITHNVSPDTLNREGCKEYDVAPQVGHRFCKDFPGFIPSLLGDLLEERQKIKKKMKATIDPIERKLLDYRQRAIKILANSYYGYYGYARARWYCKECAESVTAWGREYITMTIKEIEEKYGFKVIYSDTDGFFATIPGADAETVKKKAMEFLKYINAKLPGALELEYEGFYKRGFFVTKKKYAVIDEEGKITTRGLEIVRRDWSEIAKETQARVLEALLKDGDVEKAVRIVKEVTEKLSKYEVPPEKLVIHEQITRDLKDYKATGPHVAVAKRLAARGVKIRPGTVISYIVLKGSGRIGDRAIPFDEFDPTKHKYDAEYYIENQVLPAVERILRAFGYRKEDLRYQKTRQVGLSAWLKPKGT

SEQ ID NO: 2294 - protein, 774 aa, synthetic construct
MILDTDLITEDGKPVLRIFKKENGEFKIEYDRTFEPYFYALLKDDSAIEEVKKITAERHGTVVTVKRVEKVQKKFLGRPVEVWKLYFTHWQDIPAIWDKIREHPAVIDIYEYDIPFAKRYLIDKGLVPMEGDEELKMLAFDIETLYHEGEEFAEGPILMISYADEEGARVITWKNVDLPYVDVVSTEREMIKRFLRVVKEKDPDVLITYNGDNFDFAYLKKRCEKLGINFALGRDGSEPKIQRMGDRFAVEVKGRIHFDLYPVIRRTINLPTYTLEAVYEAVFGQPKEKVYAEEITTAWETGENLERVARYSMEDAKVTYELGKEFLPMEAQLSRLIGQSLWDVSRSSTGNLVEWFLLRKAYERNELAPNKPDEKELARRRQSYEGGYVKEPERGLWENIVYLDFRSLYPSIIITHNVSPDTLNREGCKEYDVAPQVGHRFCKDFPGFIPSLLGDLLEERQKIKKKMKATIDPIERKLLDYRQRAIKILANSYYGYYGYARARWYCKECAESVTAWGREYITMTIKEIEEKYGFKVIYSDTDGFFATIPGADAETVKKKAMEFLKYINAKLPGALELEYEGFYKRGFFVTKKKYAVIDEEGKITTRGLEIVRRDWSEIAKETQARVLEALLKDGDVEKAVRIVKEVTEKLSKYEVPPEKLVIHEQITRDLKDYKATGPHVAVAKRLAARGVKIRPGTVISYIVLKGSGRIGDRAIPFDEFDPTKHKYDAEYYIENQVLPAVERILRAFGYRKEDLRYQKTRQVGLSAWLKPKGT

SEQ ID NO: 2295 - protein, 774 aa, synthetic construct
MILDTDLITEDGKPVLRIFKKENGEFKIEYDRTFEPYFYALLKDDSAIEEVKKITAERHGTVVTVKRVEKVQKKFLGRPVEVWKLYFTHWQDKPAIADKIREHPAVIDIYEYDIPFAKRYLIDKGLVPMEGDEELKMLAFDIETLYHEGEEFAEGPILMISYADEEGARVITWKNVDLPYVDVVSTEREMIKRFLRVVKEKDPDVLITYNGDNFDFAYLKKRCEKLGINFALGRDGSEPKIQRMGDRFAVEVKGRIHFDLYPVIRRTINLPTYTLEAVYEAVFGQPKEKVYAEEITTAWETGENLERVARYSMEDAKVTYELGKEFLPMEAQLSRLIGQSLWDVSRSSTGNLVEWFLLRKAYERNELAPNKPDEKELARRRQSYEGGYVKEPERGLWENIVYLDFRSLYPSIIITHNVSPDTLNREGCKEYDVAPQVGHRFCKDFPGFIPSLLGDLLEERQKIKKKMKATIDPIERKLLDYRQRAIKILANSYYGYYGYARARWYCKECAESVTAWGREYITMTIKEIEEKYGFKVIYSDTDGFFATIPGADAETVKKKAMEFLKYINAKLPGALELEYEGFYKRGFFVTKKKYAVIDEEGKITTRGLEIVRRDWSEIAKETQARVLEALLKDGDVEKAVRIVKEVTEKLSKYEVPPEKLVIHEQITRDLKDYKATGPHVAVAKRLAARGVKIRPGTVISYIVLKGSGRIGDRAIPFDEFDPTKHKYDAEYYIENQVLPAVERILRAFGYRKEDLRYQKTRQVGLSAWLKPKGT

SEQ ID NO: 2296 - protein, 774 aa, synthetic construct
MILDTDLITEDGKPVLRIFKKENGEFKIEYDRTFEPYFYALLKDDSAIEEVKKITAERHGTVVTVKRVEKVQKKFLGRPVEVWKLYFTHWQDQPAIRDKIREHPAVIDIYEYDIPFAKRYLIDKGLVPMEGDEELKMLAFDIETLYHEGEEFAEGPILMISYADEEGARVITWKNVDLPYVDVVSTEREMIKRFLRVVKEKDPDVLITYNGDNFDFAYLKKRCEKLGINFALGRDGSEPKIQRMGDRFAVEVKGRIHFDLYPVIRRTINLPTYTLEAVYEAVFGQPKEKVYAEEITTAWETGENLERVARYSMEDAKVTYELGKEFLPMEAQLSRLIGQSLWDVSRSSTGNLVEWFLLRKAYERNELAPNKPDEKELARRRQSYEGGYVKEPERGLWENIVYLDFRSLYPSIIITHNVSPDTLNREGCKEYDVAPQVGHRFCKDFPGFIPSLLGDLLEERQKIKKKMKATIDPIERKLLDYRQRAIKILANSYYGYYGYARARWYCKECAESVTAWGREYITMTIKEIEEKYGFKVIYSDTDGFFATIPGADAETVKKKAMEFLKYINAKLPGALELEYEGFYKRGFFVTKKKYAVIDEEGKITTRGLEIVRRDWSEIAKETQARVLEALLKDGDVEKAVRIVKEVTEKLSKYEVPPEKLVIHEQITRDLKDYKATGPHVAVAKRLAARGVKIRPGTVISYIVLKGSGRIGDRAIPFDEFDPTKHKYDAEYYIENQVLPAVERILRAFGYRKEDLRYQKTRQVGLSAWLKPKGT

SEQ ID NO: 2297 - protein, 774 aa, synthetic construct
MILDTDLITEDGKPVLRIFKKENGEFKIEYDRTFEPYFYALLKDDSAIEEVKKITAERHGTVVTVKRVEKVQKKFLGRPVEVWKLYFTHWQDQPAIADKIREHPAVIDIYEYDIPFAKRYLIDKGLVPMEGDEELKMLAFDIETLYHEGEEFAEGPILMISYADEEGARVITWKNVDLPYVDVVSTEREMIKRFLRVVKEKDPDVLITYNGDNFDFAYLKKRCEKLGINFALGRDGSEPKIQRMGDRFAVEVKGRIHFDLYPVIRRTINLPTYTLEAVYEAVFGQPKEKVYAEEITTAWETGENLERVARYSMEDAKVTYELGKEFLPMEAQLSRLIGQSLWDVSRSSTGNLVEWFLLRKAYERNELAPNKPDEKELARRRQSYEGGYVKEPERGLWENIVYLDFRSLYPSIIITHNVSPDTLNREGCKEYDVAPQVGHRFCKDFPGFIPSLLGDLLEERQKIKKKMKATIDPIERKLLDYRQRAIKILANSYYGYYGYARARWYCKECAESVTAWGREYITMTIKEIEEKYGFKVIYSDTDGFFATIPGADAETVKKKAMEFLKYINAKLPGALELEYEGFYKRGFFVTKKKYAVIDEEGKITTRGLEIVRRDWSEIAKETQARVLEALLKDGDVEKAVRIVKEVTEKLSKYEVPPEKLVIHEQITRDLKDYKATGPHVAVAKRLAARGVKIRPGTVISYIVLKGSGRIGDRAIPFDEFDPTKHKYDAEYYIENQVLPAVERILRAFGYRKEDLRYQKTRQVGLSAWLKPKGT

SEQ ID NO: 2298 - protein, 774 aa, synthetic construct
MILDTDLITEDGKPVLRIFKKENGEFKIEYDRTFEPYFYALLKDDSAIEEVKKITAERHGTVVTVKRVEKVQKKFLGRPVEVWKLYFTHWQDRPAIADKIREHPAVIDIYEYDIPFAKRYLIDKGLVPMEGDEELKMLAFDIETLYHEGEEFAEGPILMISYADEEGARVITWKNVDLPYVDVVSTEREMIKRFLRVVKEKDPDVLITYNGDNFDFAYLKKRCEKLGINFALGRDGSEPKIQRMGDRFAVEVKGRIHFDLYPVIRRTINLPTYTLEAVYEAVFGQPKEKVYAEEITTAWETGENLERVARYSMEDAKVTYELGKEFLPMEAQLSRLIGQSLWDVSRSSTGNLVEWFLLRKAYERNELAPNKPDEKELARRRQSYEGGYVKEPERGLWENIVYLDFRSLYPSIIITHNVSPDTLNREGCKEYDVAPQVGHRFCKDFPGFIPSLLGDLLEERQKIKKKMKATIDPIERKLLDYRQRAIKILANSYYGYYGYARARWYCKECAESVTAWGREYITMTIKEIEEKYGFKVIYSDTDGFFATIPGADAETVKKKAMEFLKYINAKLPGALELEYEGFYKRGFFVTKKKYAVIDEEGKITTRGLEIVRRDWSEIAKETQARVLEALLKDGDVEKAVRIVKEVTEKLSKYEVPPEKLVIHEQITRDLKDYKATGPHVAVAKRLAARGVKIRPGTVISYIVLKGSGRIGDRAIPFDEFDPTKHKYDAEYYIENQVLPAVERILRAFGYRKEDLRYQKTRQVGLSAWLKPKGT

SEQ ID NO: 2299 - protein, 774 aa, synthetic construct
MILDTDLITEDGKPVLRIFKKENGEFKIEYDRTFEPYFYALLKDDSAIEEVKKITAERHGTVVTVKRVEKVQKKFLGRPVEVWKLYFTHWQDRPAIHDKIREHPAVIDIYEYDIPFAKRYLIDKGLVPMEGDEELKMLAFDIETLYHEGEEFAEGPILMISYADEEGARVITWKNVDLPYVDVVSTEREMIKRFLRVVKEKDPDVLITYNGDNFDFAYLKKRCEKLGINFALGRDGSEPKIQRMGDRFAVEVKGRIHFDLYPVIRRTINLPTYTLEAVYEAVFGQPKEKVYAEEITTAWETGENLERVARYSMEDAKVTYELGKEFLPMEAQLSRLIGQSLWDVSRSSTGNLVEWFLLRKAYERNELAPNKPDEKELARRRQSYEGGYVKEPERGLWENIVYLDFRSLYPSIIITHNVSPDTLNREGCKEYDVAPQVGHRFCKDFPGFIPSLLGDLLEERQKIKKKMKATIDPIERKLLDYRQRAIKILANSYYGYYGYARARWYCKECAESVTAWGREYITMTIKEIEEKYGFKVIYSDTDGFFATIPGADAETVKKKAMEFLKYINAKLPGALELEYEGFYKRGFFVTKKKYAVIDEEGKITTRGLEIVRRDWSEIAKETQARVLEALLKDGDVEKAVRIVKEVTEKLSKYEVPPEKLVIHEQITRDLKDYKATGPHVAVAKRLAARGVKIRPGTVISYIVLKGSGRIGDRAIPFDEFDPTKHKYDAEYYIENQVLPAVERILRAFGYRKEDLRYQKTRQVGLSAWLKPKGT

SEQ ID NO: 2300 - protein, 774 aa, synthetic construct
MILDTDLITEDGKPVLRIFKKENGEFKIEYDRTFEPYFYALLKDDSAIEEVKKITAERHGTVVTVKRVEKVQKKFLGRPVEVWKLYFTHYQDVPAIRDKIREHPAVIDIYEYDIPFAKRYLIDKGLVPMEGDEELKMLAFDIETLYHEGEEFAEGPILMISYADEEGARVITWKNVDLPYVDVVSTEREMIKRFLRVVKEKDPDVLITYNGDNFDFAYLKKRCEKLGINFALGRDGSEPKIQRMGDRFAVEVKGRIHFDLYPVIRRTINLPTYTLEAVYEAVFGQPKEKVYAEEITTAWETGENLERVARYSMEDAKVTYELGKEFLPMEAQLSRLIGQSLWDVSRSSTGNLVEWFLLRKAYERNELAPNKPDEKELARRRQSYEGGYVKEPERGLWENIVYLDFRSLYPSIIITHNVSPDTLNREGCKEYDVAPQVGHRFCKDFPGFIPSLLGDLLEERQKIKKKMKATIDPIERKLLDYRQRAIKILANSYYGYYGYARARWYCKECAESVTAWGREYITMTIKEIEEKYGFKVIYSDTDGFFATIPGADAETVKKKAMEFLKYINAKLPGALELEYEGFYKRGFFVTKKKYAVIDEEGKITTRGLEIVRRDWSEIAKETQARVLEALLKDGDVEKAVRIVKEVTEKLSKYEVPPEKLVIHEQITRDLKDYKATGPHVAVAKRLAARGVKIRPGTVISYIVLKGSGRIGDRAIPFDEFDPTKHKYDAEYYIENQVLPAVERILRAFGYRKEDLRYQKTRQVGLSAWLKPKGT

SEQ ID NO: 2301 - protein, 774 aa, synthetic construct
MILDTDLITEDGKPVLRIFKKENGEFKIEYDRTFEPYFYALLKDDSAIEEVKKITAERHGTVVTVKRVEKVQKKFLGRPVEVWKLYFTHYQDVPAIADKIREHPAVIDIYEYDIPFAKRYLIDKGLVPMEGDEELKMLAFDIETLYHEGEEFAEGPILMISYADEEGARVITWKNVDLPYVDVVSTEREMIKRFLRVVKEKDPDVLITYNGDNFDFAYLKKRCEKLGINFALGRDGSEPKIQRMGDRFAVEVKGRIHFDLYPVIRRTINLPTYTLEAVYEAVFGQPKEKVYAEEITTAWETGENLERVARYSMEDAKVTYELGKEFLPMEAQLSRLIGQSLWDVSRSSTGNLVEWFLLRKAYERNELAPNKPDEKELARRRQSYEGGYVKEPERGLWENIVYLDFRSLYPSIIITHNVSPDTLNREGCKEYDVAPQVGHRFCKDFPGFIPSLLGDLLEERQKIKKKMKATIDPIERKLLDYRQRAIKILANSYYGYYGYARARWYCKECAESVTAWGREYITMTIKEIEEKYGFKVIYSDTDGFFATIPGADAETVKKKAMEFLKYINAKLPGALELEYEGFYKRGFFVTKKKYAVIDEEGKITTRGLEIVRRDWSEIAKETQARVLEALLKDGDVEKAVRIVKEVTEKLSKYEVPPEKLVIHEQITRDLKDYKATGPHVAVAKRLAARGVKIRPGTVISYIVLKGSGRIGDRAIPFDEFDPTKHKYDAEYYIENQVLPAVERILRAFGYRKEDLRYQKTRQVGLSAWLKPKGT

SEQ ID NO: 2302 - protein, 774 aa, synthetic construct
MILDTDLITEDGKPVLRIFKKENGEFKIEYDRTFEPYFYALLKDDSAIEEVKKITAERHGTVVTVKRVEKVQKKFLGRPVEVWKLYFTHYQDVPAIFDKIREHPAVIDIYEYDIPFAKRYLIDKGLVPMEGDEELKMLAFDIETLYHEGEEFAEGPILMISYADEEGARVITWKNVDLPYVDVVSTEREMIKRFLRVVKEKDPDVLITYNGDNFDFAYLKKRCEKLGINFALGRDGSEPKIQRMGDRFAVEVKGRIHFDLYPVIRRTINLPTYTLEAVYEAVFGQPKEKVYAEEITTAWETGENLERVARYSMEDAKVTYELGKEFLPMEAQLSRLIGQSLWDVSRSSTGNLVEWFLLRKAYERNELAPNKPDEKELARRRQSYEGGYVKEPERGLWENIVYLDFRSLYPSIIITHNVSPDTLNREGCKEYDVAPQVGHRFCKDFPGFIPSLLGDLLEERQKIKKKMKATIDPIERKLLDYRQRAIKILANSYYGYYGYARARWYCKECAESVTAWGREYITMTIKEIEEKYGFKVIYSDTDGFFATIPGADAETVKKKAMEFLKYINAKLPGALELEYEGFYKRGFFVTKKKYAVIDEEGKITTRGLEIVRRDWSEIAKETQARVLEALLKDGDVEKAVRIVKEVTEKLSKYEVPPEKLVIHEQITRDLKDYKATGPHVAVAKRLAARGVKIRPGTVISYIVLKGSGRIGDRAIPFDEFDPTKHKYDAEYYIENQVLPAVERILRAFGYRKEDLRYQKTRQVGLSAWLKPKGT

SEQ ID NO: 2303 - protein, 774 aa, synthetic construct
MILDTDLITEDGKPVLRIFKKENGEFKIEYDRTFEPYFYALLKDDSAIEEVKKITAERHGTVVTVKRVEKVQKKFLGRPVEVWKLYFTHYQDVPAIHDKIREHPAVIDIYEYDIPFAKRYLIDKGLVPMEGDEELKMLAFDIETLYHEGEEFAEGPILMISYADEEGARVITWKNVDLPYVDVVSTEREMIKRFLRVVKEKDPDVLITYNGDNFDFAYLKKRCEKLGINFALGRDGSEPKIQRMGDRFAVEVKGRIHFDLYPVIRRTINLPTYTLEAVYEAVFGQPKEKVYAEEITTAWETGENLERVARYSMEDAKVTYELGKEFLPMEAQLSRLIGQSLWDVSRSSTGNLVEWFLLRKAYERNELAPNKPDEKELARRRQSYEGGYVKEPERGLWENIVYLDFRSLYPSIIITHNVSPDTLNREGCKEYDVAPQVGHRFCKDFPGFIPSLLGDLLEERQKIKKKMKATIDPIERKLLDYRQRAIKILANSYYGYYGYARARWYCKECAESVTAWGREYITMTIKEIEEKYGFKVIYSDTDGFFATIPGADAETVKKKAMEFLKYINAKLPGALELEYEGFYKRGFFVTKKKYAVIDEEGKITTRGLEIVRRDWSEIAKETQARVLEALLKDGDVEKAVRIVKEVTEKLSKYEVPPEKLVIHEQITRDLKDYKATGPHVAVAKRLAARGVKIRPGTVISYIVLKGSGRIGDRAIPFDEFDPTKHKYDAEYYIENQVLPAVERILRAFGYRKEDLRYQKTRQVGLSAWLKPKGT

SEQ ID NO: 2304 - protein, 774 aa, synthetic construct
MILDTDLITEDGKPVLRIFKKENGEFKIEYDRTFEPYFYALLKDDSAIEEVKKITAERHGTVVTVKRVEKVQKKFLGRPVEVWKLYFTHYQDIPAIRDKIREHPAVIDIYEYDIPFAKRYLIDKGLVPMEGDEELKMLAFDIETLYHEGEEFAEGPILMISYADEEGARVITWKNVDLPYVDVVSTEREMIKRFLRVVKEKDPDVLITYNGDNFDFAYLKKRCEKLGINFALGRDGSEPKIQRMGDRFAVEVKGRIHFDLYPVIRRTINLPTYTLEAVYEAVFGQPKEKVYAEEITTAWETGENLERVARYSMEDAKVTYELGKEFLPMEAQLSRLIGQSLWDVSRSSTGNLVEWFLLRKAYERNELAPNKPDEKELARRRQSYEGGYVKEPERGLWENIVYLDFRSLYPSIIITHNVSPDTLNREGCKEYDVAPQVGHRFCKDFPGFIPSLLGDLLEERQKIKKKMKATIDPIERKLLDYRQRAIKILANSYYGYYGYARARWYCKECAESVTAWGREYITMTIKEIEEKYGFKVIYSDTDGFFATIPGADAETVKKKAMEFLKYINAKLPGALELEYEGFYKRGFFVTKKKYAVIDEEGKITTRGLEIVRRDWSEIAKETQARVLEALLKDGDVEKAVRIVKEVTEKLSKYEVPPEKLVIHEQITRDLKDYKATGPHVAVAKRLAARGVKIRPGTVISYIVLKGSGRIGDRAIPFDEFDPTKHKYDAEYYIENQVLPAVERILRAFGYRKEDLRYQKTRQVGLSAWLKPKGT

SEQ ID NO: 2305 - protein, 774 aa, synthetic construct
MILDTDLITEDGKPVLRIFKKENGEFKIEYDRTFEPYFYALLKDDSAIEEVKKITAERHGTVVTVKRVEKVQKKFLGRPVEVWKLYFTHYQDIPAIADKIREHPAVIDIYEYDIPFAKRYLIDKGLVPMEGDEELKMLAFDIETLYHEGEEFAEGPILMISYADEEGARVITWKNVDLPYVDVVSTEREMIKRFLRVVKEKDPDVLITYNGDNFDFAYLKKRCEKLGINFALGRDGSEPKIQRMGDRFAVEVKGRIHFDLYPVIRRTINLPTYTLEAVYEAVFGQPKEKVYAEEITTAWETGENLERVARYSMEDAKVTYELGKEFLPMEAQLSRLIGQSLWDVSRSSTGNLVEWFLLRKAYERNELAPNKPDEKELARRRQSYEGGYVKEPERGLWENIVYLDFRSLYPSIIITHNVSPDTLNREGCKEYDVAPQVGHRFCKDFPGFIPSLLGDLLEERQKIKKKMKATIDPIERKLLDYRQRAIKILANSYYGYYGYARARWYCKECAESVTAWGREYITMTIKEIEEKYGFKVIYSDTDGFFATIPGADAETVKKKAMEFLKYINAKLPGALELEYEGFYKRGFFVTKKKYAVIDEEGKITTRGLEIVRRDWSEIAKETQARVLEALLKDGDVEKAVRIVKEVTEKLSKYEVPPEKLVIHEQITRDLKDYKATGPHVAVAKRLAARGVKIRPGTVISYIVLKGSGRIGDRAIPFDEFDPTKHKYDAEYYIENQVLPAVERILRAFGYRKEDLRYQKTRQVGLSAWLKPKGT

SEQ ID NO: 2306 - protein, 774 aa, synthetic construct
MILDTDLITEDGKPVLRIFKKENGEFKIEYDRTFEPYFYALLKDDSAIEEVKKITAERHGTVVTVKRVEKVQKKFLGRPVEVWKLYFTHYQDIPAIFDKIREHPAVIDIYEYDIPFAKRYLIDKGLVPMEGDEELKMLAFDIETLYHEGEEFAEGPILMISYADEEGARVITWKNVDLPYVDVVSTEREMIKRFLRVVKEKDPDVLITYNGDNFDFAYLKKRCEKLGINFALGRDGSEPKIQRMGDRFAVEVKGRIHFDLYPVIRRTINLPTYTLEAVYEAVFGQPKEKVYAEEITTAWETGENLERVARYSMEDAKVTYELGKEFLPMEAQLSRLIGQSLWDVSRSSTGNLVEWFLLRKAYERNELAPNKPDEKELARRRQSYEGGYVKEPERGLWENIVYLDFRSLYPSIIITHNVSPDTLNREGCKEYDVAPQVGHRFCKDFPGFIPSLLGDLLEERQKIKKKMKATIDPIERKLLDYRQRAIKILANSYYGYYGYARARWYCKECAESVTAWGREYITMTIKEIEEKYGFKVIYSDTDGFFATIPGADAETVKKKAMEFLKYINAKLPGALELEYEGFYKRGFFVTKKKYAVIDEEGKITTRGLEIVRRDWSEIAKETQARVLEALLKDGDVEKAVRIVKEVTEKLSKYEVPPEKLVIHEQITRDLKDYKATGPHVAVAKRLAARGVKIRPGTVISYIVLKGSGRIGDRAIPFDEFDPTKHKYDAEYYIENQVLPAVERILRAFGYRKEDLRYQKTRQVGLSAWLKPKGT

SEQ ID NO: 2307 - protein, 774 aa, synthetic construct
MILDTDLITEDGKPVLRIFKKENGEFKIEYDRTFEPYFYALLKDDSAIEEVKKITAERHGTVVTVKRVEKVQKKFLGRPVEVWKLYFTHYQDIPAIHDKIREHPAVIDIYEYDIPFAKRYLIDKGLVPMEGDEELKMLAFDIETLYHEGEEFAEGPILMISYADEEGARVITWKNVDLPYVDVVSTEREMIKRFLRVVKEKDPDVLITYNGDNFDFAYLKKRCEKLGINFALGRDGSEPKIQRMGDRFAVEVKGRIHFDLYPVIRRTINLPTYTLEAVYEAVFGQPKEKVYAEEITTAWETGENLERVARYSMEDAKVTYELGKEFLPMEAQLSRLIGQSLWDVSRSSTGNLVEWFLLRKAYERNELAPNKPDEKELARRRQSYEGGYVKEPERGLWENIVYLDFRSLYPSIIITHNVSPDTLNREGCKEYDVAPQVGHRFCKDFPGFIPSLLGDLLEERQKIKKKMKATIDPIERKLLDYRQRAIKILANSYYGYYGYARARWYCKECAESVTAWGREYITMTIKEIEEKYGFKVIYSDTDGFFATIPGADAETVKKKAMEFLKYINAKLPGALELEYEGFYKRGFFVTKKKYAVIDEEGKITTRGLEIVRRDWSEIAKETQARVLEALLKDGDVEKAVRIVKEVTEKLSKYEVPPEKLVIHEQITRDLKDYKATGPHVAVAKRLAARGVKIRPGTVISYIVLKGSGRIGDRAIPFDEFDPTKHKYDAEYYIENQVLPAVERILRAFGYRKEDLRYQKTRQVGLSAWLKPKGT

SEQ ID NO: 2308 - protein, 774 aa, synthetic construct
MILDTDLITEDGKPVLRIFKKENGEFKIEYDRTFEPYFYALLKDDSAIEEVKKITAERHGTVVTVKRVEKVQKKFLGRPVEVWKLYFTHYQDIPAIWDKIREHPAVIDIYEYDIPFAKRYLIDKGLVPMEGDEELKMLAFDIETLYHEGEEFAEGPILMISYADEEGARVITWKNVDLPYVDVVSTEREMIKRFLRVVKEKDPDVLITYNGDNFDFAYLKKRCEKLGINFALGRDGSEPKIQRMGDRFAVEVKGRIHFDLYPVIRRTINLPTYTLEAVYEAVFGQPKEKVYAEEITTAWETGENLERVARYSMEDAKVTYELGKEFLPMEAQLSRLIGQSLWDVSRSSTGNLVEWFLLRKAYERNELAPNKPDEKELARRRQSYEGGYVKEPERGLWENIVYLDFRSLYPSIIITHNVSPDTLNREGCKEYDVAPQVGHRFCKDFPGFIPSLLGDLLEERQKIKKKMKATIDPIERKLLDYRQRAIKILANSYYGYYGYARARWYCKECAESVTAWGREYITMTIKEIEEKYGFKVIYSDTDGFFATIPGADAETVKKKAMEFLKYINAKLPGALELEYEGFYKRGFFVTKKKYAVIDEEGKITTRGLEIVRRDWSEIAKETQARVLEALLKDGDVEKAVRIVKEVTEKLSKYEVPPEKLVIHEQITRDLKDYKATGPHVAVAKRLAARGVKIRPGTVISYIVLKGSGRIGDRAIPFDEFDPTKHKYDAEYYIENQVLPAVERILRAFGYRKEDLRYQKTRQVGLSAWLKPKGT

SEQ ID NO: 2309 - protein, 774 aa, synthetic construct
MILDTDLITEDGKPVLRIFKKENGEFKIEYDRTFEPYFYALLKDDSAIEEVKKITAERHGTVVTVKRVEKVQKKFLGRPVEVWKLYFTHYQDKPAIRDKIREHPAVIDIYEYDIPFAKRYLIDKGLVPMEGDEELKMLAFDIETLYHEGEEFAEGPILMISYADEEGARVITWKNVDLPYVDVVSTEREMIKRFLRVVKEKDPDVLITYNGDNFDFAYLKKRCEKLGINFALGRDGSEPKIQRMGDRFAVEVKGRIHFDLYPVIRRTINLPTYTLEAVYEAVFGQPKEKVYAEEITTAWETGENLERVARYSMEDAKVTYELGKEFLPMEAQLSRLIGQSLWDVSRSSTGNLVEWFLLRKAYERNELAPNKPDEKELARRRQSYEGGYVKEPERGLWENIVYLDFRSLYPSIIITHNVSPDTLNREGCKEYDVAPQVGHRFCKDFPGFIPSLLGDLLEERQKIKKKMKATIDPIERKLLDYRQRAIKILANSYYGYYGYARARWYCKECAESVTAWGREYITMTIKEIEEKYGFKVIYSDTDGFFATIPGADAETVKKKAMEFLKYINAKLPGALELEYEGFYKRGFFVTKKKYAVIDEEGKITTRGLEIVRRDWSEIAKETQARVLEALLKDGDVEKAVRIVKEVTEKLSKYEVPPEKLVIHEQITRDLKDYKATGPHVAVAKRLAARGVKIRPGTVISYIVLKGSGRIGDRAIPFDEFDPTKHKYDAEYYIENQVLPAVERILRAFGYRKEDLRYQKTRQVGLSAWLKPKGT

SEQ ID NO: 2310 - protein, 774 aa, synthetic construct
MILDTDLITEDGKPVLRIFKKENGEFKIEYDRTFEPYFYALLKDDSAIEEVKKITAERHGTVVTVKRVEKVQKKFLGRPVEVWKLYFTHYQDQPAIRDKIREHPAVIDIYEYDIPFAKRYLIDKGLVPMEGDEELKMLAFDIETLYHEGEEFAEGPILMISYADEEGARVITWKNVDLPYVDVVSTEREMIKRFLRVVKEKDPDVLITYNGDNFDFAYLKKRCEKLGINFALGRDGSEPKIQRMGDRFAVEVKGRIHFDLYPVIRRTINLPTYTLEAVYEAVFGQPKEKVYAEEITTAWETGENLERVARYSMEDAKVTYELGKEFLPMEAQLSRLIGQSLWDVSRSSTGNLVEWFLLRKAYERNELAPNKPDEKELARRRQSYEGGYVKEPERGLWENIVYLDFRSLYPSIIITHNVSPDTLNREGCKEYDVAPQVGHRFCKDFPGFIPSLLGDLLEERQKIKKKMKATIDPIERKLLDYRQRAIKILANSYYGYYGYARARWYCKECAESVTAWGREYITMTIKEIEEKYGFKVIYSDTDGFFATIPGADAETVKKKAMEFLKYINAKLPGALELEYEGFYKRGFFVTKKKYAVIDEEGKITTRGLEIVRRDWSEIAKETQARVLEALLKDGDVEKAVRIVKEVTEKLSKYEVPPEKLVIHEQITRDLKDYKATGPHVAVAKRLAARGVKIRPGTVISYIVLKGSGRIGDRAIPFDEFDPTKHKYDAEYYIENQVLPAVERILRAFGYRKEDLRYQKTRQVGLSAWLKPKGT

SEQ ID NO: 2311 - protein, 774 aa, synthetic construct
MILDTDLITEDGKPVLRIFKKENGEFKIEYDRTFEPYFYALLKDDSAIEEVKKITAERHGTVVTVKRVEKVQKKFLGRPVEVWKLYFTHYQDQPAIFDKIREHPAVIDIYEYDIPFAKRYLIDKGLVPMEGDEELKMLAFDIETLYHEGEEFAEGPILMISYADEEGARVITWKNVDLPYVDVVSTEREMIKRFLRVVKEKDPDVLITYNGDNFDFAYLKKRCEKLGINFALGRDGSEPKIQRMGDRFAVEVKGRIHFDLYPVIRRTINLPTYTLEAVYEAVFGQPKEKVYAEEITTAWETGENLERVARYSMEDAKVTYELGKEFLPMEAQLSRLIGQSLWDVSRSSTGNLVEWFLLRKAYERNELAPNKPDEKELARRRQSYEGGYVKEPERGLWENIVYLDFRSLYPSIIITHNVSPDTLNREGCKEYDVAPQVGHRFCKDFPGFIPSLLGDLLEERQKIKKKMKATIDPIERKLLDYRQRAIKILANSYYGYYGYARARWYCKECAESVTAWGREYITMTIKEIEEKYGFKVIYSDTDGFFATIPGADAETVKKKAMEFLKYINAKLPGALELEYEGFYKRGFFVTKKKYAVIDEEGKITTRGLEIVRRDWSEIAKETQARVLEALLKDGDVEKAVRIVKEVTEKLSKYEVPPEKLVIHEQITRDLKDYKATGPHVAVAKRLAARGVKIRPGTVISYIVLKGSGRIGDRAIPFDEFDPTKHKYDAEYYIENQVLPAVERILRAFGYRKEDLRYQKTRQVGLSAWLKPKGT

SEQ ID NO: 2312 - protein, 774 aa, synthetic construct
MILDTDLITEDGKPVLRIFKKENGEFKIEYDRTFEPYFYALLKDDSAIEEVKKITAERHGTVVTVKRVEKVQKKFLGRPVEVWKLYFTHPQDVPAIADKIREHPAVIDIYEYDIPFAKRYLIDKGLVPMEGDEELKMLAFDIETLYHEGEEFAEGPILMISYADEEGARVITWKNVDLPYVDVVSTEREMIKRFLRVVKEKDPDVLITYNGDNFDFAYLKKRCEKLGINFALGRDGSEPKIQRMGDRFAVEVKGRIHFDLYPVIRRTINLPTYTLEAVYEAVFGQPKEKVYAEEITTAWETGENLERVARYSMEDAKVTYELGKEFLPMEAQLSRLIGQSLWDVSRSSTGNLVEWFLLRKAYERNELAPNKPDEKELARRRQSYEGGYVKEPERGLWENIVYLDFRSLYPSIIITHNVSPDTLNREGCKEYDVAPQVGHRFCKDFPGFIPSLLGDLLEERQKIKKKMKATIDPIERKLLDYRQRAIKILANSYYGYYGYARARWYCKECAESVTAWGREYITMTIKEIEEKYGFKVIYSDTDGFFATIPGADAETVKKKAMEFLKYINAKLPGALELEYEGFYKRGFFVTKKKYAVIDEEGKITTRGLEIVRRDWSEIAKETQARVLEALLKDGDVEKAVRIVKEVTEKLSKYEVPPEKLVIHEQITRDLKDYKATGPHVAVAKRLAARGVKIRPGTVISYIVLKGSGRIGDRAIPFDEFDPTKHKYDAEYYIENQVLPAVERILRAFGYRKEDLRYQKTRQVGLSAWLKPKGT

SEQ ID NO: 2313 - protein, 774 aa, synthetic construct
MILDTDLITEDGKPVLRIFKKENGEFKIEYDRTFEPYFYALLKDDSAIEEVKKITAERHGTVVTVKRVEKVQKKFLGRPVEVWKLYFTHPQDVPAIFDKIREHPAVIDIYEYDIPFAKRYLIDKGLVPMEGDEELKMLAFDIETLYHEGEEFAEGPILMISYADEEGARVITWKNVDLPYVDVVSTEREMIKRFLRVVKEKDPDVLITYNGDNFDFAYLKKRCEKLGINFALGRDGSEPKIQRMGDRFAVEVKGRIHFDLYPVIRRTINLPTYTLEAVYEAVFGQPKEKVYAEEITTAWETGENLERVARYSMEDAKVTYELGKEFLPMEAQLSRLIGQSLWDVSRSSTGNLVEWFLLRKAYERNELAPNKPDEKELARRRQSYEGGYVKEPERGLWENIVYLDFRSLYPSIIITHNVSPDTLNREGCKEYDVAPQVGHRFCKDFPGFIPSLLGDLLEERQKIKKKMKATIDPIERKLLDYRQRAIKILANSYYGYYGYARARWYCKECAESVTAWGREYITMTIKEIEEKYGFKVIYSDTDGFFATIPGADAETVKKKAMEFLKYINAKLPGALELEYEGFYKRGFFVTKKKYAVIDEEGKITTRGLEIVRRDWSEIAKETQARVLEALLKDGDVEKAVRIVKEVTEKLSKYEVPPEKLVIHEQITRDLKDYKATGPHVAVAKRLAARGVKIRPGTVISYIVLKGSGRIGDRAIPFDEFDPTKHKYDAEYYIENQVLPAVERILRAFGYRKEDLRYQKTRQVGLSAWLKPKGT

SEQ ID NO: 2314 - protein, 774 aa, synthetic construct
MILDTDLITEDGKPVLRIFKKENGEFKIEYDRTFEPYFYALLKDDSAIEEVKKITAERHGTVVTVKRVEKVQKKFLGRPVEVWKLYFTHPQDVPAIHDKIREHPAVIDIYEYDIPFAKRYLIDKGLVPMEGDEELKMLAFDIETLYHEGEEFAEGPILMISYADEEGARVITWKNVDLPYVDVVSTEREMIKRFLRVVKEKDPDVLITYNGDNFDFAYLKKRCEKLGINFALGRDGSEPKIQRMGDRFAVEVKGRIHFDLYPVIRRTINLPTYTLEAVYEAVFGQPKEKVYAEEITTAWETGENLERVARYSMEDAKVTYELGKEFLPMEAQLSRLIGQSLWDVSRSSTGNLVEWFLLRKAYERNELAPNKPDEKELARRRQSYEGGYVKEPERGLWENIVYLDFRSLYPSIIITHNVSPDTLNREGCKEYDVAPQVGHRFCKDFPGFIPSLLGDLLEERQKIKKKMKATIDPIERKLLDYRQRAIKILANSYYGYYGYARARWYCKECAESVTAWGREYITMTIKEIEEKYGFKVIYSDTDGFFATIPGADAETVKKKAMEFLKYINAKLPGALELEYEGFYKRGFFVTKKKYAVIDEEGKITTRGLEIVRRDWSEIAKETQARVLEALLKDGDVEKAVRIVKEVTEKLSKYEVPPEKLVIHEQITRDLKDYKATGPHVAVAKRLAARGVKIRPGTVISYIVLKGSGRIGDRAIPFDEFDPTKHKYDAEYYIENQVLPAVERILRAFGYRKEDLRYQKTRQVGLSAWLKPKGT

SEQ ID NO: 2315 - protein, 774 aa, synthetic construct
MILDTDLITEDGKPVLRIFKKENGEFKIEYDRTFEPYFYALLKDDSAIEEVKKITAERHGTVVTVKRVEKVQKKFLGRPVEVWKLYFTHPQDVPAIWDKIREHPAVIDIYEYDIPFAKRYLIDKGLVPMEGDEELKMLAFDIETLYHEGEEFAEGPILMISYADEEGARVITWKNVDLPYVDVVSTEREMIKRFLRVVKEKDPDVLITYNGDNFDFAYLKKRCEKLGINFALGRDGSEPKIQRMGDRFAVEVKGRIHFDLYPVIRRTINLPTYTLEAVYEAVFGQPKEKVYAEEITTAWETGENLERVARYSMEDAKVTYELGKEFLPMEAQLSRLIGQSLWDVSRSSTGNLVEWFLLRKAYERNELAPNKPDEKELARRRQSYEGGYVKEPERGLWENIVYLDFRSLYPSIIITHNVSPDTLNREGCKEYDVAPQVGHRFCKDFPGFIPSLLGDLLEERQKIKKKMKATIDPIERKLLDYRQRAIKILANSYYGYYGYARARWYCKECAESVTAWGREYITMTIKEIEEKYGFKVIYSDTDGFFATIPGADAETVKKKAMEFLKYINAKLPGALELEYEGFYKRGFFVTKKKYAVIDEEGKITTRGLEIVRRDWSEIAKETQARVLEALLKDGDVEKAVRIVKEVTEKLSKYEVPPEKLVIHEQITRDLKDYKATGPHVAVAKRLAARGVKIRPGTVISYIVLKGSGRIGDRAIPFDEFDPTKHKYDAEYYIENQVLPAVERILRAFGYRKEDLRYQKTRQVGLSAWLKPKGT

SEQ ID NO: 2316 - protein, 774 aa, synthetic construct
MILDTDLITEDGKPVLRIFKKENGEFKIEYDRTFEPYFYALLKDDSAIEEVKKITAERHGTVVTVKRVEKVQKKFLGRPVEVWKLYFTHPQDIPAIRDKIREHPAVIDIYEYDIPFAKRYLIDKGLVPMEGDEELKMLAFDIETLYHEGEEFAEGPILMISYADEEGARVITWKNVDLPYVDVVSTEREMIKRFLRVVKEKDPDVLITYNGDNFDFAYLKKRCEKLGINFALGRDGSEPKIQRMGDRFAVEVKGRIHFDLYPVIRRTINLPTYTLEAVYEAVFGQPKEKVYAEEITTAWETGENLERVARYSMEDAKVTYELGKEFLPMEAQLSRLIGQSLWDVSRSSTGNLVEWFLLRKAYERNELAPNKPDEKELARRRQSYEGGYVKEPERGLWENIVYLDFRSLYPSIIITHNVSPDTLNREGCKEYDVAPQVGHRFCKDFPGFIPSLLGDLLEERQKIKKKMKATIDPIERKLLDYRQRAIKILANSYYGYYGYARARWYCKECAESVTAWGREYITMTIKEIEEKYGFKVIYSDTDGFFATIPGADAETVKKKAMEFLKYINAKLPGALELEYEGFYKRGFFVTKKKYAVIDEEGKITTRGLEIVRRDWSEIAKETQARVLEALLKDGDVEKAVRIVKEVTEKLSKYEVPPEKLVIHEQITRDLKDYKATGPHVAVAKRLAARGVKIRPGTVISYIVLKGSGRIGDRAIPFDEFDPTKHKYDAEYYIENQVLPAVERILRAFGYRKEDLRYQKTRQVGLSAWLKPKGT

SEQ ID NO: 2317 - protein, 774 aa, synthetic construct
MILDTDLITEDGKPVLRIFKKENGEFKIEYDRTFEPYFYALLKDDSAIEEVKKITAERHGTVVTVKRVEKVQKKFLGRPVEVWKLYFTHPQDIPAIADKIREHPAVIDIYEYDIPFAKRYLIDKGLVPMEGDEELKMLAFDIETLYHEGEEFAEGPILMISYADEEGARVITWKNVDLPYVDVVSTEREMIKRFLRVVKEKDPDVLITYNGDNFDFAYLKKRCEKLGINFALGRDGSEPKIQRMGDRFAVEVKGRIHFDLYPVIRRTINLPTYTLEAVYEAVFGQPKEKVYAEEITTAWETGENLERVARYSMEDAKVTYELGKEFLPMEAQLSRLIGQSLWDVSRSSTGNLVEWFLLRKAYERNELAPNKPDEKELARRRQSYEGGYVKEPERGLWENIVYLDFRSLYPSIIITHNVSPDTLNREGCKEYDVAPQVGHRFCKDFPGFIPSLLGDLLEERQKIKKKMKATIDPIERKLLDYRQRAIKILANSYYGYYGYARARWYCKECAESVTAWGREYITMTIKEIEEKYGFKVIYSDTDGFFATIPGADAETVKKKAMEFLKYINAKLPGALELEYEGFYKRGFFVTKKKYAVIDEEGKITTRGLEIVRRDWSEIAKETQARVLEALLKDGDVEKAVRIVKEVTEKLSKYEVPPEKLVIHEQITRDLKDYKATGPHVAVAKRLAARGVKIRPGTVISYIVLKGSGRIGDRAIPFDEFDPTKHKYDAEYYIENQVLPAVERILRAFGYRKEDLRYQKTRQVGLSAWLKPKGT

SEQ ID NO: 2318 - protein, 774 aa, synthetic construct
MILDTDLITEDGKPVLRIFKKENGEFKIEYDRTFEPYFYALLKDDSAIEEVKKITAERHGTVVTVKRVEKVQKKFLGRPVEVWKLYFTHPQDIPAIFDKIREHPAVIDIYEYDIPFAKRYLIDKGLVPMEGDEELKMLAFDIETLYHEGEEFAEGPILMISYADEEGARVITWKNVDLPYVDVVSTEREMIKRFLRVVKEKDPDVLITYNGDNFDFAYLKKRCEKLGINFALGRDGSEPKIQRMGDRFAVEVKGRIHFDLYPVIRRTINLPTYTLEAVYEAVFGQPKEKVYAEEITTAWETGENLERVARYSMEDAKVTYELGKEFLPMEAQLSRLIGQSLWDVSRSSTGNLVEWFLLRKAYERNELAPNKPDEKELARRRQSYEGGYVKEPERGLWENIVYLDFRSLYPSIIITHNVSPDTLNREGCKEYDVAPQVGHRFCKDFPGFIPSLLGDLLEERQKIKKKMKATIDPIERKLLDYRQRAIKILANSYYGYYGYARARWYCKECAESVTAWGREYITMTIKEIEEKYGFKVIYSDTDGFFATIPGADAETVKKKAMEFLKYINAKLPGALELEYEGFYKRGFFVTKKKYAVIDEEGKITTRGLEIVRRDWSEIAKETQARVLEALLKDGDVEKAVRIVKEVTEKLSKYEVPPEKLVIHEQITRDLKDYKATGPHVAVAKRLAARGVKIRPGTVISYIVLKGSGRIGDRAIPFDEFDPTKHKYDAEYYIENQVLPAVERILRAFGYRKEDLRYQKTRQVGLSAWLKPKGT

SEQ ID NO: 2319 - protein, 774 aa, synthetic construct
MILDTDLITEDGKPVLRIFKKENGEFKIEYDRTFEPYFYALLKDDSAIEEVKKITAERHGTVVTVKRVEKVQKKFLGRPVEVWKLYFTHPQDIPAIHDKIREHPAVIDIYEYDIPFAKRYLIDKGLVPMEGDEELKMLAFDIETLYHEGEEFAEGPILMISYADEEGARVITWKNVDLPYVDVVSTEREMIKRFLRVVKEKDPDVLITYNGDNFDFAYLKKRCEKLGINFALGRDGSEPKIQRMGDRFAVEVKGRIHFDLYPVIRRTINLPTYTLEAVYEAVFGQPKEKVYAEEITTAWETGENLERVARYSMEDAKVTYELGKEFLPMEAQLSRLIGQSLWDVSRSSTGNLVEWFLLRKAYERNELAPNKPDEKELARRRQSYEGGYVKEPERGLWENIVYLDFRSLYPSIIITHNVSPDTLNREGCKEYDVAPQVGHRFCKDFPGFIPSLLGDLLEERQKIKKKMKATIDPIERKLLDYRQRAIKILANSYYGYYGYARARWYCKECAESVTAWGREYITMTIKEIEEKYGFKVIYSDTDGFFATIPGADAETVKKKAMEFLKYINAKLPGALELEYEGFYKRGFFVTKKKYAVIDEEGKITTRGLEIVRRDWSEIAKETQARVLEALLKDGDVEKAVRIVKEVTEKLSKYEVPPEKLVIHEQITRDLKDYKATGPHVAVAKRLAARGVKIRPGTVISYIVLKGSGRIGDRAIPFDEFDPTKHKYDAEYYIENQVLPAVERILRAFGYRKEDLRYQKTRQVGLSAWLKPKGT

SEQ ID NO: 2320 - protein, 774 aa, synthetic construct
MILDTDLITEDGKPVLRIFKKENGEFKIEYDRTFEPYFYALLKDDSAIEEVKKITAERHGTVVTVKRVEKVQKKFLGRPVEVWKLYFTHPQDIPAIWDKIREHPAVIDIYEYDIPFAKRYLIDKGLVPMEGDEELKMLAFDIETLYHEGEEFAEGPILMISYADEEGARVITWKNVDLPYVDVVSTEREMIKRFLRVVKEKDPDVLITYNGDNFDFAYLKKRCEKLGINFALGRDGSEPKIQRMGDRFAVEVKGRIHFDLYPVIRRTINLPTYTLEAVYEAVFGQPKEKVYAEEITTAWETGENLERVARYSMEDAKVTYELGKEFLPMEAQLSRLIGQSLWDVSRSSTGNLVEWFLLRKAYERNELAPNKPDEKELARRRQSYEGGYVKEPERGLWENIVYLDFRSLYPSIIITHNVSPDTLNREGCKEYDVAPQVGHRFCKDFPGFIPSLLGDLLEERQKIKKKMKATIDPIERKLLDYRQRAIKILANSYYGYYGYARARWYCKECAESVTAWGREYITMTIKEIEEKYGFKVIYSDTDGFFATIPGADAETVKKKAMEFLKYINAKLPGALELEYEGFYKRGFFVTKKKYAVIDEEGKITTRGLEIVRRDWSEIAKETQARVLEALLKDGDVEKAVRIVKEVTEKLSKYEVPPEKLVIHEQITRDLKDYKATGPHVAVAKRLAARGVKIRPGTVISYIVLKGSGRIGDRAIPFDEFDPTKHKYDAEYYIENQVLPAVERILRAFGYRKEDLRYQKTRQVGLSAWLKPKGT

SEQ ID NO: 2321 - protein, 774 aa, synthetic construct
MILDTDLITEDGKPVLRIFKKENGEFKIEYDRTFEPYFYALLKDDSAIEEVKKITAERHGTVVTVKRVEKVQKKFLGRPVEVWKLYFTHPQDKPAIRDKIREHPAVIDIYEYDIPFAKRYLIDKGLVPMEGDEELKMLAFDIETLYHEGEEFAEGPILMISYADEEGARVITWKNVDLPYVDVVSTEREMIKRFLRVVKEKDPDVLITYNGDNFDFAYLKKRCEKLGINFALGRDGSEPKIQRMGDRFAVEVKGRIHFDLYPVIRRTINLPTYTLEAVYEAVFGQPKEKVYAEEITTAWETGENLERVARYSMEDAKVTYELGKEFLPMEAQLSRLIGQSLWDVSRSSTGNLVEWFLLRKAYERNELAPNKPDEKELARRRQSYEGGYVKEPERGLWENIVYLDFRSLYPSIIITHNVSPDTLNREGCKEYDVAPQVGHRFCKDFPGFIPSLLGDLLEERQKIKKKMKATIDPIERKLLDYRQRAIKILANSYYGYYGYARARWYCKECAESVTAWGREYITMTIKEIEEKYGFKVIYSDTDGFFATIPGADAETVKKKAMEFLKYINAKLPGALELEYEGFYKRGFFVTKKKYAVIDEEGKITTRGLEIVRRDWSEIAKETQARVLEALLKDGDVEKAVRIVKEVTEKLSKYEVPPEKLVIHEQITRDLKDYKATGPHVAVAKRLAARGVKIRPGTVISYIVLKGSGRIGDRAIPFDEFDPTKHKYDAEYYIENQVLPAVERILRAFGYRKEDLRYQKTRQVGLSAWLKPKGT

SEQ ID NO: 2322 - protein, 774 aa, synthetic construct
MILDTDLITEDGKPVLRIFKKENGEFKIEYDRTFEPYFYALLKDDSAIEEVKKITAERHGTVVTVKRVEKVQKKFLGRPVEVWKLYFTHPQDQPAIRDKIREHPAVIDIYEYDIPFAKRYLIDKGLVPMEGDEELKMLAFDIETLYHEGEEFAEGPILMISYADEEGARVITWKNVDLPYVDVVSTEREMIKRFLRVVKEKDPDVLITYNGDNFDFAYLKKRCEKLGINFALGRDGSEPKIQRMGDRFAVEVKGRIHFDLYPVIRRTINLPTYTLEAVYEAVFGQPKEKVYAEEITTAWETGENLERVARYSMEDAKVTYELGKEFLPMEAQLSRLIGQSLWDVSRSSTGNLVEWFLLRKAYERNELAPNKPDEKELARRRQSYEGGYVKEPERGLWENIVYLDFRSLYPSIIITHNVSPDTLNREGCKEYDVAPQVGHRFCKDFPGFIPSLLGDLLEERQKIKKKMKATIDPIERKLLDYRQRAIKILANSYYGYYGYARARWYCKECAESVTAWGREYITMTIKEIEEKYGFKVIYSDTDGFFATIPGADAETVKKKAMEFLKYINAKLPGALELEYEGFYKRGFFVTKKKYAVIDEEGKITTRGLEIVRRDWSEIAKETQARVLEALLKDGDVEKAVRIVKEVTEKLSKYEVPPEKLVIHEQITRDLKDYKATGPHVAVAKRLAARGVKIRPGTVISYIVLKGSGRIGDRAIPFDEFDPTKHKYDAEYYIENQVLPAVERILRAFGYRKEDLRYQKTRQVGLSAWLKPKGT

SEQ ID NO: 2323 - protein, 774 aa, synthetic construct
MILDTDLITEDGKPVLRIFKKENGEFKIEYDRTFEPYFYALLKDDSAIEEVKKITAERHGTVVTVKRVEKVQKKFLGRPVEVWKLYFTHPQDQPAIADKIREHPAVIDIYEYDIPFAKRYLIDKGLVPMEGDEELKMLAFDIETLYHEGEEFAEGPILMISYADEEGARVITWKNVDLPYVDVVSTEREMIKRFLRVVKEKDPDVLITYNGDNFDFAYLKKRCEKLGINFALGRDGSEPKIQRMGDRFAVEVKGRIHFDLYPVIRRTINLPTYTLEAVYEAVFGQPKEKVYAEEITTAWETGENLERVARYSMEDAKVTYELGKEFLPMEAQLSRLIGQSLWDVSRSSTGNLVEWFLLRKAYERNELAPNKPDEKELARRRQSYEGGYVKEPERGLWENIVYLDFRSLYPSIIITHNVSPDTLNREGCKEYDVAPQVGHRFCKDFPGFIPSLLGDLLEERQKIKKKMKATIDPIERKLLDYRQRAIKILANSYYGYYGYARARWYCKECAESVTAWGREYITMTIKEIEEKYGFKVIYSDTDGFFATIPGADAETVKKKAMEFLKYINAKLPGALELEYEGFYKRGFFVTKKKYAVIDEEGKITTRGLEIVRRDWSEIAKETQARVLEALLKDGDVEKAVRIVKEVTEKLSKYEVPPEKLVIHEQITRDLKDYKATGPHVAVAKRLAARGVKIRPGTVISYIVLKGSGRIGDRAIPFDEFDPTKHKYDAEYYIENQVLPAVERILRAFGYRKEDLRYQKTRQVGLSAWLKPKGT

SEQ ID NO: 2324 - protein, 774 aa, synthetic construct
MILDTDLITEDGKPVLRIFKKENGEFKIEYDRTFEPYFYALLKDDSAIEEVKKITAERHGTVVTVKRVEKVQKKFLGRPVEVWKLYFTHPQDQPAIFDKIREHPAVIDIYEYDIPFAKRYLIDKGLVPMEGDEELKMLAFDIETLYHEGEEFAEGPILMISYADEEGARVITWKNVDLPYVDVVSTEREMIKRFLRVVKEKDPDVLITYNGDNFDFAYLKKRCEKLGINFALGRDGSEPKIQRMGDRFAVEVKGRIHFDLYPVIRRTINLPTYTLEAVYEAVFGQPKEKVYAEEITTAWETGENLERVARYSMEDAKVTYELGKEFLPMEAQLSRLIGQSLWDVSRSSTGNLVEWFLLRKAYERNELAPNKPDEKELARRRQSYEGGYVKEPERGLWENIVYLDFRSLYPSIIITHNVSPDTLNREGCKEYDVAPQVGHRFCKDFPGFIPSLLGDLLEERQKIKKKMKATIDPIERKLLDYRQRAIKILANSYYGYYGYARARWYCKECAESVTAWGREYITMTIKEIEEKYGFKVIYSDTDGFFATIPGADAETVKKKAMEFLKYINAKLPGALELEYEGFYKRGFFVTKKKYAVIDEEGKITTRGLEIVRRDWSEIAKETQARVLEALLKDGDVEKAVRIVKEVTEKLSKYEVPPEKLVIHEQITRDLKDYKATGPHVAVAKRLAARGVKIRPGTVISYIVLKGSGRIGDRAIPFDEFDPTKHKYDAEYYIENQVLPAVERILRAFGYRKEDLRYQKTRQVGLSAWLKPKGT

SEQ ID NO: 2325 - protein, 774 aa, synthetic construct
MILDTDLITEDGKPVLRIFKKENGEFKIEYDRTFEPYFYALLKDDSAIEEVKKITAERHGTVVTVKRVEKVQKKFLGRPVEVWKLYFTHPQDQPAIHDKIREHPAVIDIYEYDIPFAKRYLIDKGLVPMEGDEELKMLAFDIETLYHEGEEFAEGPILMISYADEEGARVITWKNVDLPYVDVVSTEREMIKRFLRVVKEKDPDVLITYNGDNFDFAYLKKRCEKLGINFALGRDGSEPKIQRMGDRFAVEVKGRIHFDLYPVIRRTINLPTYTLEAVYEAVFGQPKEKVYAEEITTAWETGENLERVARYSMEDAKVTYELGKEFLPMEAQLSRLIGQSLWDVSRSSTGNLVEWFLLRKAYERNELAPNKPDEKELARRRQSYEGGYVKEPERGLWENIVYLDFRSLYPSIIITHNVSPDTLNREGCKEYDVAPQVGHRFCKDFPGFIPSLLGDLLEERQKIKKKMKATIDPIERKLLDYRQRAIKILANSYYGYYGYARARWYCKECAESVTAWGREYITMTIKEIEEKYGFKVIYSDTDGFFATIPGADAETVKKKAMEFLKYINAKLPGALELEYEGFYKRGFFVTKKKYAVIDEEGKITTRGLEIVRRDWSEIAKETQARVLEALLKDGDVEKAVRIVKEVTEKLSKYEVPPEKLVIHEQITRDLKDYKATGPHVAVAKRLAARGVKIRPGTVISYIVLKGSGRIGDRAIPFDEFDPTKHKYDAEYYIENQVLPAVERILRAFGYRKEDLRYQKTRQVGLSAWLKPKGT

SEQ ID NO: 2326 - protein, 774 aa, synthetic construct
MILDTDLITEDGKPVLRIFKKENGEFKIEYDRTFEPYFYALLKDDSAIEEVKKITAERHGTVVTVKRVEKVQKKFLGRPVEVWKLYFTHPQDQPAIWDKIREHPAVIDIYEYDIPFAKRYLIDKGLVPMEGDEELKMLAFDIETLYHEGEEFAEGPILMISYADEEGARVITWKNVDLPYVDVVSTEREMIKRFLRVVKEKDPDVLITYNGDNFDFAYLKKRCEKLGINFALGRDGSEPKIQRMGDRFAVEVKGRIHFDLYPVIRRTINLPTYTLEAVYEAVFGQPKEKVYAEEITTAWETGENLERVARYSMEDAKVTYELGKEFLPMEAQLSRLIGQSLWDVSRSSTGNLVEWFLLRKAYERNELAPNKPDEKELARRRQSYEGGYVKEPERGLWENIVYLDFRSLYPSIIITHNVSPDTLNREGCKEYDVAPQVGHRFCKDFPGFIPSLLGDLLEERQKIKKKMKATIDPIERKLLDYRQRAIKILANSYYGYYGYARARWYCKECAESVTAWGREYITMTIKEIEEKYGFKVIYSDTDGFFATIPGADAETVKKKAMEFLKYINAKLPGALELEYEGFYKRGFFVTKKKYAVIDEEGKITTRGLEIVRRDWSEIAKETQARVLEALLKDGDVEKAVRIVKEVTEKLSKYEVPPEKLVIHEQITRDLKDYKATGPHVAVAKRLAARGVKIRPGTVISYIVLKGSGRIGDRAIPFDEFDPTKHKYDAEYYIENQVLPAVERILRAFGYRKEDLRYQKTRQVGLSAWLKPKGT

SEQ ID NO: 2327 - protein, 774 aa, synthetic construct
MILDTDLITEDGKPVLRIFKKENGEFKIEYDRTFEPYFYALLKDDSAIEEVKKITAERHGTVVTVKRVEKVQKKFLGRPVEVWKLYFTHPQDRPAIRDKIREHPAVIDIYEYDIPFAKRYLIDKGLVPMEGDEELKMLAFDIETLYHEGEEFAEGPILMISYADEEGARVITWKNVDLPYVDVVSTEREMIKRFLRVVKEKDPDVLITYNGDNFDFAYLKKRCEKLGINFALGRDGSEPKIQRMGDRFAVEVKGRIHFDLYPVIRRTINLPTYTLEAVYEAVFGQPKEKVYAEEITTAWETGENLERVARYSMEDAKVTYELGKEFLPMEAQLSRLIGQSLWDVSRSSTGNLVEWFLLRKAYERNELAPNKPDEKELARRRQSYEGGYVKEPERGLWENIVYLDFRSLYPSIIITHNVSPDTLNREGCKEYDVAPQVGHRFCKDFPGFIPSLLGDLLEERQKIKKKMKATIDPIERKLLDYRQRAIKILANSYYGYYGYARARWYCKECAESVTAWGREYITMTIKEIEEKYGFKVIYSDTDGFFATIPGADAETVKKKAMEFLKYINAKLPGALELEYEGFYKRGFFVTKKKYAVIDEEGKITTRGLEIVRRDWSEIAKETQARVLEALLKDGDVEKAVRIVKEVTEKLSKYEVPPEKLVIHEQITRDLKDYKATGPHVAVAKRLAARGVKIRPGTVISYIVLKGSGRIGDRAIPFDEFDPTKHKYDAEYYIENQVLPAVERILRAFGYRKEDLRYQKTRQVGLSAWLKPKGT

SEQ ID NO: 2328 - protein, 774 aa, synthetic construct
MILDTDLITEDGKPVLRIFKKENGEFKIEYDRTFEPYFYALLKDDSAIEEVKKITAERHGTVVTVKRVEKVQKKFLGRPVEVWKLYFTHPQDRPAIADKIREHPAVIDIYEYDIPFAKRYLIDKGLVPMEGDEELKMLAFDIETLYHEGEEFAEGPILMISYADEEGARVITWKNVDLPYVDVVSTEREMIKRFLRVVKEKDPDVLITYNGDNFDFAYLKKRCEKLGINFALGRDGSEPKIQRMGDRFAVEVKGRIHFDLYPVIRRTINLPTYTLEAVYEAVFGQPKEKVYAEEITTAWETGENLERVARYSMEDAKVTYELGKEFLPMEAQLSRLIGQSLWDVSRSSTGNLVEWFLLRKAYERNELAPNKPDEKELARRRQSYEGGYVKEPERGLWENIVYLDFRSLYPSIIITHNVSPDTLNREGCKEYDVAPQVGHRFCKDFPGFIPSLLGDLLEERQKIKKKMKATIDPIERKLLDYRQRAIKILANSYYGYYGYARARWYCKECAESVTAWGREYITMTIKEIEEKYGFKVIYSDTDGFFATIPGADAETVKKKAMEFLKYINAKLPGALELEYEGFYKRGFFVTKKKYAVIDEEGKITTRGLEIVRRDWSEIAKETQARVLEALLKDGDVEKAVRIVKEVTEKLSKYEVPPEKLVIHEQITRDLKDYKATGPHVAVAKRLAARGVKIRPGTVISYIVLKGSGRIGDRAIPFDEFDPTKHKYDAEYYIENQVLPAVERILRAFGYRKEDLRYQKTRQVGLSAWLKPKGT

SEQ ID NO: 2329 - protein, 774 aa, synthetic construct
MILDTDLITEDGKPVLRIFKKENGEFKIEYDRTFEPYFYALLKDDSAIEEVKKITAERHGTVVTVKRVEKVQKKFLGRPVEVWKLYFTHPQDRPAIFDKIREHPAVIDIYEYDIPFAKRYLIDKGLVPMEGDEELKMLAFDIETLYHEGEEFAEGPILMISYADEEGARVITWKNVDLPYVDVVSTEREMIKRFLRVVKEKDPDVLITYNGDNFDFAYLKKRCEKLGINFALGRDGSEPKIQRMGDRFAVEVKGRIHFDLYPVIRRTINLPTYTLEAVYEAVFGQPKEKVYAEEITTAWETGENLERVARYSMEDAKVTYELGKEFLPMEAQLSRLIGQSLWDVSRSSTGNLVEWFLLRKAYERNELAPNKPDEKELARRRQSYEGGYVKEPERGLWENIVYLDFRSLYPSIIITHNVSPDTLNREGCKEYDVAPQVGHRFCKDFPGFIPSLLGDLLEERQKIKKKMKATIDPIERKLLDYRQRAIKILANSYYGYYGYARARWYCKECAESVTAWGREYITMTIKEIEEKYGFKVIYSDTDGFFATIPGADAETVKKKAMEFLKYINAKLPGALELEYEGFYKRGFFVTKKKYAVIDEEGKITTRGLEIVRRDWSEIAKETQARVLEALLKDGDVEKAVRIVKEVTEKLSKYEVPPEKLVIHEQITRDLKDYKATGPHVAVAKRLAARGVKIRPGTVISYIVLKGSGRIGDRAIPFDEFDPTKHKYDAEYYIENQVLPAVERILRAFGYRKEDLRYQKTRQVGLSAWLKPKGT

SEQ ID NO: 2330 - protein, 774 aa, synthetic construct
MILDTDLITEDGKPVLRIFKKENGEFKIEYDRTFEPYFYALLKDDSAIEEVKKITAERHGTVVTVKRVEKVQKKFLGRPVEVWKLYFTHPQDRPAIHDKIREHPAVIDIYEYDIPFAKRYLIDKGLVPMEGDEELKMLAFDIETLYHEGEEFAEGPILMISYADEEGARVITWKNVDLPYVDVVSTEREMIKRFLRVVKEKDPDVLITYNGDNFDFAYLKKRCEKLGINFALGRDGSEPKIQRMGDRFAVEVKGRIHFDLYPVIRRTINLPTYTLEAVYEAVFGQPKEKVYAEEITTAWETGENLERVARYSMEDAKVTYELGKEFLPMEAQLSRLIGQSLWDVSRSSTGNLVEWFLLRKAYERNELAPNKPDEKELARRRQSYEGGYVKEPERGLWENIVYLDFRSLYPSIIITHNVSPDTLNREGCKEYDVAPQVGHRFCKDFPGFIPSLLGDLLEERQKIKKKMKATIDPIERKLLDYRQRAIKILANSYYGYYGYARARWYCKECAESVTAWGREYITMTIKEIEEKYGFKVIYSDTDGFFATIPGADAETVKKKAMEFLKYINAKLPGALELEYEGFYKRGFFVTKKKYAVIDEEGKITTRGLEIVRRDWSEIAKETQARVLEALLKDGDVEKAVRIVKEVTEKLSKYEVPPEKLVIHEQITRDLKDYKATGPHVAVAKRLAARGVKIRPGTVISYIVLKGSGRIGDRAIPFDEFDPTKHKYDAEYYIENQVLPAVERILRAFGYRKEDLRYQKTRQVGLSAWLKPKGT

SEQ ID NO: 2331 - protein, 774 aa, synthetic construct
MILDTDLITEDGKPVLRIFKKENGEFKIEYDRTFEPYFYALLKDDSAIEEVKKITAERHGTVVTVKRVEKVQKKFLGRPVEVWKLYFTHPQDRPAIWDKIREHPAVIDIYEYDIPFAKRYLIDKGLVPMEGDEELKMLAFDIETLYHEGEEFAEGPILMISYADEEGARVITWKNVDLPYVDVVSTEREMIKRFLRVVKEKDPDVLITYNGDNFDFAYLKKRCEKLGINFALGRDGSEPKIQRMGDRFAVEVKGRIHFDLYPVIRRTINLPTYTLEAVYEAVFGQPKEKVYAEEITTAWETGENLERVARYSMEDAKVTYELGKEFLPMEAQLSRLIGQSLWDVSRSSTGNLVEWFLLRKAYERNELAPNKPDEKELARRRQSYEGGYVKEPERGLWENIVYLDFRSLYPSIIITHNVSPDTLNREGCKEYDVAPQVGHRFCKDFPGFIPSLLGDLLEERQKIKKKMKATIDPIERKLLDYRQRAIKILANSYYGYYGYARARWYCKECAESVTAWGREYITMTIKEIEEKYGFKVIYSDTDGFFATIPGADAETVKKKAMEFLKYINAKLPGALELEYEGFYKRGFFVTKKKYAVIDEEGKITTRGLEIVRRDWSEIAKETQARVLEALLKDGDVEKAVRIVKEVTEKLSKYEVPPEKLVIHEQITRDLKDYKATGPHVAVAKRLAARGVKIRPGTVISYIVLKGSGRIGDRAIPFDEFDPTKHKYDAEYYIENQVLPAVERILRAFGYRKEDLRYQKTRQVGLSAWLKPKGT

SEQ ID NO: 2332 - protein, 774 aa, synthetic construct
MILDTDLITEDGKPVMRIFKKENGEFKIEYDRTFEPYFYALLKDDSAIEEVKKITAERHGTVVTVKRVEKVQKKFLGRPVEVWKLYFTHPQDVPAIRDKIREHPAVIDIYEYDIPFAKRYLIDKGLVPMEGDEELKMLAFDIETLYHEGEEFAEGPILMISYADEEGARVITWKNVDLPYVDVVSTEREMIKRFLRVVKEKDPDVLITYNGDNFDFAYLKKRCEKLGINFALGRDGSEPKIQRMGDRFAVEVKGRIHFDLYPVIRRTINLPTYTLEAVYEAVFGQPKEKVYAEEITTAWETGENLERVARYSMEDAKVTYELGKEFLPMEAQLSRLIGQSLWDVSRSSTGNLVEWFLLRKAYERNELAPNKPDEKELARRRQSYEGGYVKEPERGLWENIVYLDFRSLYPSIIITHNVSPDTLNREGCKEYDVAPQVGHRFCKDFPGFIPSLLGDLLEERQKIKKKMKATIDPIERKLLDYRQRAIKILANSYYGYYGYARARWYCKECAESVTAWGREYITMTIKEIEEKYGFKVIYSDTDGFFATIPGADAETVKKKAMEFLKYINAKLPGALELEYEGFYKRGFFVTKKKYAVIDEEGKITTRGLEIVRRDWSEIAKETQARVLEALLKDGDVEKAVRIVKEVTEKLSKYEVPPEKLVIHEQITRDLKDYKATGPHVAVAKRLAARGVKIRPGTVISYIVLKGSGRIGDRAIPFDEFDPTKHKYDAEYYIENQVLPAVERILRAFGYRKEDLRYQKTRQVGLSAWLKPKGT

SEQ ID NO: 2333 - protein, 774 aa, synthetic construct
MILDTDLITEDGKPVMRIFKKENGEFKIEYDRTFEAYFYALLKDDSAIEEVKKITAERHGTVVTVKRVEKVQKKFLGRPVEVWKLYFTHPQDVPAIRDKIREHPAVIDIYEYDIPFAKRYLIDKGLVPMEGDEELKMLAFDIETLYHEGEEFAEGPILMISYADEEGARVITWKNVDLPYVDVVSTEREMIKRFLRVVKEKDPDVLITYNGDNFDFAYLKKRCEKLGINFALGRDGSEPKIQRMGDRFAVEVKGRIHFDLYPVIRRTINLPTYTLEAVYEAVFGQPKEKVYAEEITTAWETGENLERVARYSMEDAKVTYELGKEFLPMEAQLSRLIGQSLWDVSRSSTGNLVEWFLLRKAYERNELAPNKPDEKELARRRQSYEGGYVKEPERGLWENIVYLDFRSLYPSIIITHNVSPDTLNREGCKEYDVAPQVGHRFCKDFPGFIPSLLGDLLEERQKIKKKMKATIDPIERKLLDYRQRAIKILANSYYGYYGYARARWYCKECAESVTAWGREYITMTIKEIEEKYGFKVIYSDTDGFFATIPGADAETVKKKAMEFLKYINAKLPGALELEYEGFYKRGFFVTKKKYAVIDEEGKITTRGLEIVRRDWSEIAKETQARVLEALLKDGDVEKAVRIVKEVTEKLSKYEVPPEKLVIHEQITRDLKDYKATGPHVAVAKRLAARGVKIRPGTVISYIVLKGSGRIGDRAIPFDEFDPTKHKYDAEYYIENQVLPAVERILRAFGYRKEDLRYQKTRQVGLSAWLKPKGT

SEQ ID NO: 2334 - protein, 774 aa, synthetic construct
MILDTDLITEDGKPVMRIFKKENGEFKIEYDRTFEAYFYALLKDDSAIEEVKKITAERHGTVVTVKRVEKVQKKFLGRPVEVWKLYFTHFQDVPAIRDKIREHPAVIDIYEYDIPFAKRYLIDKGLVPMEGDEELKMLAFDIETLYHEGEEFAEGPILMISYADEEGARVITWKNVDLPYVDVVSTEREMIKRFLRVVKEKDPDVLITYNGDNFDFAYLKKRCEKLGINFALGRDGSEPKIQRMGDRFAVEVKGRIHFDLYPVIRRTINLPTYTLEAVYEAVFGQPKEKVYAEEITTAWETGENLERVARYSMEDAKVTYELGKEFLPMEAQLSRLIGQSLWDVSRSSTGNLVEWFLLRKAYERNELAPNKPDEKELARRRQSYEGGYVKEPERGLWENIVYLDFRSLYPSIIITHNVSPDTLNREGCKEYDVAPQVGHRFCKDFPGFIPSLLGDLLEERQKIKKKMKATIDPIERKLLDYRQRAIKILANSYYGYYGYARARWYCKECAESVTAWGREYITMTIKEIEEKYGFKVIYSDTDGFFATIPGADAETVKKKAMEFLKYINAKLPGALELEYEGFYKRGFFVTKKKYAVIDEEGKITTRGLEIVRRDWSEIAKETQARVLEALLKDGDVEKAVRIVKEVTEKLSKYEVPPEKLVIHEQITRDLKDYKATGPHVAVAKRLAARGVKIRPGTVISYIVLKGSGRIGDRAIPFDEFDPTKHKYDAEYYIENQVLPAVERILRAFGYRKEDLRYQKTRQVGLSAWLKPKGT

SEQ ID NO: 2335 - protein, 774 aa, synthetic construct
MILDTDLITEDGKPVMRIFKKENGEFKIEYDRTFEAYFYALLKDDSAIEEVKKITAERHGTVVTVKRVEKVQKKFLGRPVEVWKLYFTHFQDIPAIRDKIREHPAVIDIYEYDIPFAKRYLIDKGLVPMEGDEELKMLAFDIETLYHEGEEFAEGPILMISYADEEGARVITWKNVDLPYVDVVSTEREMIKRFLRVVKEKDPDVLITYNGDNFDFAYLKKRCEKLGINFALGRDGSEPKIQRMGDRFAVEVKGRIHFDLYPVIRRTINLPTYTLEAVYEAVFGQPKEKVYAEEITTAWETGENLERVARYSMEDAKVTYELGKEFLPMEAQLSRLIGQSLWDVSRSSTGNLVEWFLLRKAYERNELAPNKPDEKELARRRQSYEGGYVKEPERGLWENIVYLDFRSLYPSIIITHNVSPDTLNREGCKEYDVAPQVGHRFCKDFPGFIPSLLGDLLEERQKIKKKMKATIDPIERKLLDYRQRAIKILANSYYGYYGYARARWYCKECAESVTAWGREYITMTIKEIEEKYGFKVIYSDTDGFFATIPGADAETVKKKAMEFLKYINAKLPGALELEYEGFYKRGFFVTKKKYAVIDEEGKITTRGLEIVRRDWSEIAKETQARVLEALLKDGDVEKAVRIVKEVTEKLSKYEVPPEKLVIHEQITRDLKDYKATGPHVAVAKRLAARGVKIRPGTVISYIVLKGSGRIGDRAIPFDEFDPTKHKYDAEYYIENQVLPAVERILRAFGYRKEDLRYQKTRQVGLSAWLKPKGT

SEQ ID NO: 2336 - protein, 774 aa, synthetic construct
MILDTDLITEDGKPVMRIFKKENGEFKIEYDRTFEAYFYALLKDDSAIEEVKKITAERHGTVVTVKRVEKVQKKFLGRPVEVWKLYFTHIQDIPAIWDKIREHPAVIDIYEYDIPFAKRYLIDKGLVPMEGDEELKMLAFDIETLYHEGEEFAEGPILMISYADEEGARVITWKNVDLPYVDVVSTEREMIKRFLRVVKEKDPDVLITYNGDNFDFAYLKKRCEKLGINFALGRDGSEPKIQRMGDRFAVEVKGRIHFDLYPVIRRTINLPTYTLEAVYEAVFGQPKEKVYAEEITTAWETGENLERVARYSMEDAKVTYELGKEFLPMEAQLSRLIGQSLWDVSRSSTGNLVEWFLLRKAYERNELAPNKPDEKELARRRQSYEGGYVKEPERGLWENIVYLDFRSLYPSIIITHNVSPDTLNREGCKEYDVAPQVGHRFCKDFPGFIPSLLGDLLEERQKIKKKMKATIDPIERKLLDYRQRAIKILANSYYGYYGYARARWYCKECAESVTAWGREYITMTIKEIEEKYGFKVIYSDTDGFFATIPGADAETVKKKAMEFLKYINAKLPGALELEYEGFYKRGFFVTKKKYAVIDEEGKITTRGLEIVRRDWSEIAKETQARVLEALLKDGDVEKAVRIVKEVTEKLSKYEVPPEKLVIHEQITRDLKDYKATGPHVAVAKRLAARGVKIRPGTVISYIVLKGSGRIGDRAIPFDEFDPTKHKYDAEYYIENQVLPAVERILRAFGYRKEDLRYQKTRQVGLSAWLKPKGT

SEQ ID NO: 2337 - protein, 774 aa, synthetic construct
MILDTDLITEDGKPVMRIFKKENGEFKIEYDRTFEAYFYALLKDDSAIEEVKKITAERHGTVVTVKRVEKVQKKFLGRPVEVWKLYFTHWQDIPAIRDKIREHPAVIDIYEYDIPFAKRYLIDKGLVPMEGDEELKMLAFDIETLYHEGEEFAEGPILMISYADEEGARVITWKNVDLPYVDVVSTEREMIKRFLRVVKEKDPDVLITYNGDNFDFAYLKKRCEKLGINFALGRDGSEPKIQRMGDRFAVEVKGRIHFDLYPVIRRTINLPTYTLEAVYEAVFGQPKEKVYAEEITTAWETGENLERVARYSMEDAKVTYELGKEFLPMEAQLSRLIGQSLWDVSRSSTGNLVEWFLLRKAYERNELAPNKPDEKELARRRQSYEGGYVKEPERGLWENIVYLDFRSLYPSIIITHNVSPDTLNREGCKEYDVAPQVGHRFCKDFPGFIPSLLGDLLEERQKIKKKMKATIDPIERKLLDYRQRAIKILANSYYGYYGYARARWYCKECAESVTAWGREYITMTIKEIEEKYGFKVIYSDTDGFFATIPGADAETVKKKAMEFLKYINAKLPGALELEYEGFYKRGFFVTKKKYAVIDEEGKITTRGLEIVRRDWSEIAKETQARVLEALLKDGDVEKAVRIVKEVTEKLSKYEVPPEKLVIHEQITRDLKDYKATGPHVAVAKRLAARGVKIRPGTVISYIVLKGSGRIGDRAIPFDEFDPTKHKYDAEYYIENQVLPAVERILRAFGYRKEDLRYQKTRQVGLSAWLKPKGT

SEQ ID NO: 2338 - protein, 774 aa, synthetic construct
MILDTDLITEDGKPVMRIFKKENGEFKIEYDRTFEAYFYALLKDDSAIEEVKKITAERHGTVVTVKRVEKVQKKFLGRPVEVWKLYFTHYQDVPAIRDKIREHPAVIDIYEYDIPFAKRYLIDKGLVPMEGDEELKMLAFDIETLYHEGEEFAEGPILMISYADEEGARVITWKNVDLPYVDVVSTEREMIKRFLRVVKEKDPDVLITYNGDNFDFAYLKKRCEKLGINFALGRDGSEPKIQRMGDRFAVEVKGRIHFDLYPVIRRTINLPTYTLEAVYEAVFGQPKEKVYAEEITTAWETGENLERVARYSMEDAKVTYELGKEFLPMEAQLSRLIGQSLWDVSRSSTGNLVEWFLLRKAYERNELAPNKPDEKELARRRQSYEGGYVKEPERGLWENIVYLDFRSLYPSIIITHNVSPDTLNREGCKEYDVAPQVGHRFCKDFPGFIPSLLGDLLEERQKIKKKMKATIDPIERKLLDYRQRAIKILANSYYGYYGYARARWYCKECAESVTAWGREYITMTIKEIEEKYGFKVIYSDTDGFFATIPGADAETVKKKAMEFLKYINAKLPGALELEYEGFYKRGFFVTKKKYAVIDEEGKITTRGLEIVRRDWSEIAKETQARVLEALLKDGDVEKAVRIVKEVTEKLSKYEVPPEKLVIHEQITRDLKDYKATGPHVAVAKRLAARGVKIRPGTVISYIVLKGSGRIGDRAIPFDEFDPTKHKYDAEYYIENQVLPAVERILRAFGYRKEDLRYQKTRQVGLSAWLKPKGT

SEQ ID NO: 2339 - protein, 774 aa, synthetic construct
MILDTDLITEDGKPVMRIFKKENGEFKIEYDRTFEAYFYALLKDDSAIEEVKKITAERHGTVVTVKRVEKVQKKFLGRPVEVWKLYFTHYQDIPAIRDKIREHPAVIDIYEYDIPFAKRYLIDKGLVPMEGDEELKMLAFDIETLYHEGEEFAEGPILMISYADEEGARVITWKNVDLPYVDVVSTEREMIKRFLRVVKEKDPDVLITYNGDNFDFAYLKKRCEKLGINFALGRDGSEPKIQRMGDRFAVEVKGRIHFDLYPVIRRTINLPTYTLEAVYEAVFGQPKEKVYAEEITTAWETGENLERVARYSMEDAKVTYELGKEFLPMEAQLSRLIGQSLWDVSRSSTGNLVEWFLLRKAYERNELAPNKPDEKELARRRQSYEGGYVKEPERGLWENIVYLDFRSLYPSIIITHNVSPDTLNREGCKEYDVAPQVGHRFCKDFPGFIPSLLGDLLEERQKIKKKMKATIDPIERKLLDYRQRAIKILANSYYGYYGYARARWYCKECAESVTAWGREYITMTIKEIEEKYGFKVIYSDTDGFFATIPGADAETVKKKAMEFLKYINAKLPGALELEYEGFYKRGFFVTKKKYAVIDEEGKITTRGLEIVRRDWSEIAKETQARVLEALLKDGDVEKAVRIVKEVTEKLSKYEVPPEKLVIHEQITRDLKDYKATGPHVAVAKRLAARGVKIRPGTVISYIVLKGSGRIGDRAIPFDEFDPTKHKYDAEYYIENQVLPAVERILRAFGYRKEDLRYQKTRQVGLSAWLKPKGT

SEQ ID NO: 2340 - protein, 774 aa, synthetic construct
MILDTDLITEDGKPVMRIFKKENGEFKIEYDRTFEAYFYALLKDDSAIEEVKKITAERHGTVVTVKRVEKVQKKFLGRPVEVWKLYFTHYQDIPAIADKIREHPAVIDIYEYDIPFAKRYLIDKGLVPMEGDEELKMLAFDIETLYHEGEEFAEGPILMISYADEEGARVITWKNVDLPYVDVVSTEREMIKRFLRVVKEKDPDVLITYNGDNFDFAYLKKRCEKLGINFALGRDGSEPKIQRMGDRFAVEVKGRIHFDLYPVIRRTINLPTYTLEAVYEAVFGQPKEKVYAEEITTAWETGENLERVARYSMEDAKVTYELGKEFLPMEAQLSRLIGQSLWDVSRSSTGNLVEWFLLRKAYERNELAPNKPDEKELARRRQSYEGGYVKEPERGLWENIVYLDFRSLYPSIIITHNVSPDTLNREGCKEYDVAPQVGHRFCKDFPGFIPSLLGDLLEERQKIKKKMKATIDPIERKLLDYRQRAIKILANSYYGYYGYARARWYCKECAESVTAWGREYITMTIKEIEEKYGFKVIYSDTDGFFATIPGADAETVKKKAMEFLKYINAKLPGALELEYEGFYKRGFFVTKKKYAVIDEEGKITTRGLEIVRRDWSEIAKETQARVLEALLKDGDVEKAVRIVKEVTEKLSKYEVPPEKLVIHEQITRDLKDYKATGPHVAVAKRLAARGVKIRPGTVISYIVLKGSGRIGDRAIPFDEFDPTKHKYDAEYYIENQVLPAVERILRAFGYRKEDLRYQKTRQVGLSAWLKPKGT

SEQ ID NO: 2341 - protein, 774 aa, synthetic construct
MILDTDLITEDGKPVMRIFKKENGEFKIEYDRTFEAYFYALLKDDSAIEEVKKITAERHGTVVTVKRVEKVQKKFLGRPVEVWKLYFTHPQDVPAIFDKIREHPAVIDIYEYDIPFAKRYLIDKGLVPMEGDEELKMLAFDIETLYHEGEEFAEGPILMISYADEEGARVITWKNVDLPYVDVVSTEREMIKRFLRVVKEKDPDVLITYNGDNFDFAYLKKRCEKLGINFALGRDGSEPKIQRMGDRFAVEVKGRIHFDLYPVIRRTINLPTYTLEAVYEAVFGQPKEKVYAEEITTAWETGENLERVARYSMEDAKVTYELGKEFLPMEAQLSRLIGQSLWDVSRSSTGNLVEWFLLRKAYERNELAPNKPDEKELARRRQSYEGGYVKEPERGLWENIVYLDFRSLYPSIIITHNVSPDTLNREGCKEYDVAPQVGHRFCKDFPGFIPSLLGDLLEERQKIKKKMKATIDPIERKLLDYRQRAIKILANSYYGYYGYARARWYCKECAESVTAWGREYITMTIKEIEEKYGFKVIYSDTDGFFATIPGADAETVKKKAMEFLKYINAKLPGALELEYEGFYKRGFFVTKKKYAVIDEEGKITTRGLEIVRRDWSEIAKETQARVLEALLKDGDVEKAVRIVKEVTEKLSKYEVPPEKLVIHEQITRDLKDYKATGPHVAVAKRLAARGVKIRPGTVISYIVLKGSGRIGDRAIPFDEFDPTKHKYDAEYYIENQVLPAVERILRAFGYRKEDLRYQKTRQVGLSAWLKPKGT

SEQ ID NO: 2342 - protein, 774 aa, synthetic construct
MILDTDLITEDGKPVMRIFKKENGEFKIEYDRTFEAYFYALLKDDSAIEEVKKITAERHGTVVTVKRVEKVQKKFLGRPVEVWKLYFTHPQDIPAIRDKIREHPAVIDIYEYDIPFAKRYLIDKGLVPMEGDEELKMLAFDIETLYHEGEEFAEGPILMISYADEEGARVITWKNVDLPYVDVVSTEREMIKRFLRVVKEKDPDVLITYNGDNFDFAYLKKRCEKLGINFALGRDGSEPKIQRMGDRFAVEVKGRIHFDLYPVIRRTINLPTYTLEAVYEAVFGQPKEKVYAEEITTAWETGENLERVARYSMEDAKVTYELGKEFLPMEAQLSRLIGQSLWDVSRSSTGNLVEWFLLRKAYERNELAPNKPDEKELARRRQSYEGGYVKEPERGLWENIVYLDFRSLYPSIIITHNVSPDTLNREGCKEYDVAPQVGHRFCKDFPGFIPSLLGDLLEERQKIKKKMKATIDPIERKLLDYRQRAIKILANSYYGYYGYARARWYCKECAESVTAWGREYITMTIKEIEEKYGFKVIYSDTDGFFATIPGADAETVKKKAMEFLKYINAKLPGALELEYEGFYKRGFFVTKKKYAVIDEEGKITTRGLEIVRRDWSEIAKETQARVLEALLKDGDVEKAVRIVKEVTEKLSKYEVPPEKLVIHEQITRDLKDYKATGPHVAVAKRLAARGVKIRPGTVISYIVLKGSGRIGDRAIPFDEFDPTKHKYDAEYYIENQVLPAVERILRAFGYRKEDLRYQKTRQVGLSAWLKPKGT

SEQ ID NO: 2343 - protein, 774 aa, synthetic construct
MILDTDLITEDGKPVMRIFKKENGEFKIEYDRTFEAYFYALLKDDSAIEEVKKITAERHGTVVTVKRVEKVQKKFLGRPVEVWKLYFTHPQDIPAIADKIREHPAVIDIYEYDIPFAKRYLIDKGLVPMEGDEELKMLAFDIETLYHEGEEFAEGPILMISYADEEGARVITWKNVDLPYVDVVSTEREMIKRFLRVVKEKDPDVLITYNGDNFDFAYLKKRCEKLGINFALGRDGSEPKIQRMGDRFAVEVKGRIHFDLYPVIRRTINLPTYTLEAVYEAVFGQPKEKVYAEEITTAWETGENLERVARYSMEDAKVTYELGKEFLPMEAQLSRLIGQSLWDVSRSSTGNLVEWFLLRKAYERNELAPNKPDEKELARRRQSYEGGYVKEPERGLWENIVYLDFRSLYPSIIITHNVSPDTLNREGCKEYDVAPQVGHRFCKDFPGFIPSLLGDLLEERQKIKKKMKATIDPIERKLLDYRQRAIKILANSYYGYYGYARARWYCKECAESVTAWGREYITMTIKEIEEKYGFKVIYSDTDGFFATIPGADAETVKKKAMEFLKYINAKLPGALELEYEGFYKRGFFVTKKKYAVIDEEGKITTRGLEIVRRDWSEIAKETQARVLEALLKDGDVEKAVRIVKEVTEKLSKYEVPPEKLVIHEQITRDLKDYKATGPHVAVAKRLAARGVKIRPGTVISYIVLKGSGRIGDRAIPFDEFDPTKHKYDAEYYIENQVLPAVERILRAFGYRKEDLRYQKTRQVGLSAWLKPKGT

SEQ ID NO: 2344 - protein, 774 aa, synthetic construct
MILDTDLITEDGKPVMRIFKKENGEFKIEYDRTFEAYFYALLKDDSAIEEVKKITAERHGTVVTVKRVEKVQKKFLGRPVEVWKLYFTHPQDIPAIHDKIREHPAVIDIYEYDIPFAKRYLIDKGLVPMEGDEELKMLAFDIETLYHEGEEFAEGPILMISYADEEGARVITWKNVDLPYVDVVSTEREMIKRFLRVVKEKDPDVLITYNGDNFDFAYLKKRCEKLGINFALGRDGSEPKIQRMGDRFAVEVKGRIHFDLYPVIRRTINLPTYTLEAVYEAVFGQPKEKVYAEEITTAWETGENLERVARYSMEDAKVTYELGKEFLPMEAQLSRLIGQSLWDVSRSSTGNLVEWFLLRKAYERNELAPNKPDEKELARRRQSYEGGYVKEPERGLWENIVYLDFRSLYPSIIITHNVSPDTLNREGCKEYDVAPQVGHRFCKDFPGFIPSLLGDLLEERQKIKKKMKATIDPIERKLLDYRQRAIKILANSYYGYYGYARARWYCKECAESVTAWGREYITMTIKEIEEKYGFKVIYSDTDGFFATIPGADAETVKKKAMEFLKYINAKLPGALELEYEGFYKRGFFVTKKKYAVIDEEGKITTRGLEIVRRDWSEIAKETQARVLEALLKDGDVEKAVRIVKEVTEKLSKYEVPPEKLVIHEQITRDLKDYKATGPHVAVAKRLAARGVKIRPGTVISYIVLKGSGRIGDRAIPFDEFDPTKHKYDAEYYIENQVLPAVERILRAFGYRKEDLRYQKTRQVGLSAWLKPKGT

SEQ ID NO: 2345 - protein, 774 aa, synthetic construct
MILDTDLITEDGKPVMRIFKKENGEFKIEYDRTFEAYFYALLKDDSAIEEVKKITAERHGTVVTVKRVEKVQKKFLGRPVEVWKLYFTHPQDIPAIWDKIREHPAVIDIYEYDIPFAKRYLIDKGLVPMEGDEELKMLAFDIETLYHEGEEFAEGPILMISYADEEGARVITWKNVDLPYVDVVSTEREMIKRFLRVVKEKDPDVLITYNGDNFDFAYLKKRCEKLGINFALGRDGSEPKIQRMGDRFAVEVKGRIHFDLYPVIRRTINLPTYTLEAVYEAVFGQPKEKVYAEEITTAWETGENLERVARYSMEDAKVTYELGKEFLPMEAQLSRLIGQSLWDVSRSSTGNLVEWFLLRKAYERNELAPNKPDEKELARRRQSYEGGYVKEPERGLWENIVYLDFRSLYPSIIITHNVSPDTLNREGCKEYDVAPQVGHRFCKDFPGFIPSLLGDLLEERQKIKKKMKATIDPIERKLLDYRQRAIKILANSYYGYYGYARARWYCKECAESVTAWGREYITMTIKEIEEKYGFKVIYSDTDGFFATIPGADAETVKKKAMEFLKYINAKLPGALELEYEGFYKRGFFVTKKKYAVIDEEGKITTRGLEIVRRDWSEIAKETQARVLEALLKDGDVEKAVRIVKEVTEKLSKYEVPPEKLVIHEQITRDLKDYKATGPHVAVAKRLAARGVKIRPGTVISYIVLKGSGRIGDRAIPFDEFDPTKHKYDAEYYIENQVLPAVERILRAFGYRKEDLRYQKTRQVGLSAWLKPKGT

SEQ ID NO: 2346 - protein, 774 aa, synthetic construct
MILDTDLITEDGKPVMRIFKKENGEFKIEYDRTFEAYFYALLKDDSAIEEVKKITAERHGTVVTVKRVEKVQKKFLGRPVEVWKLYFTHPQDQPAIRDKIREHPAVIDIYEYDIPFAKRYLIDKGLVPMEGDEELKMLAFDIETLYHEGEEFAEGPILMISYADEEGARVITWKNVDLPYVDVVSTEREMIKRFLRVVKEKDPDVLITYNGDNFDFAYLKKRCEKLGINFALGRDGSEPKIQRMGDRFAVEVKGRIHFDLYPVIRRTINLPTYTLEAVYEAVFGQPKEKVYAEEITTAWETGENLERVARYSMEDAKVTYELGKEFLPMEAQLSRLIGQSLWDVSRSSTGNLVEWFLLRKAYERNELAPNKPDEKELARRRQSYEGGYVKEPERGLWENIVYLDFRSLYPSIIITHNVSPDTLNREGCKEYDVAPQVGHRFCKDFPGFIPSLLGDLLEERQKIKKKMKATIDPIERKLLDYRQRAIKILANSYYGYYGYARARWYCKECAESVTAWGREYITMTIKEIEEKYGFKVIYSDTDGFFATIPGADAETVKKKAMEFLKYINAKLPGALELEYEGFYKRGFFVTKKKYAVIDEEGKITTRGLEIVRRDWSEIAKETQARVLEALLKDGDVEKAVRIVKEVTEKLSKYEVPPEKLVIHEQITRDLKDYKATGPHVAVAKRLAARGVKIRPGTVISYIVLKGSGRIGDRAIPFDEFDPTKHKYDAEYYIENQVLPAVERILRAFGYRKEDLRYQKTRQVGLSAWLKPKGT

SEQ ID NO: 2347 - protein, 774 aa, synthetic construct
MILDTDLITEDGKPVMRIFKKENGEFKIEYDRTFEAYFYALLKDDSAIEEVKKITAERHGTVVTVKRVEKVQKKFLGRPVEVWKLYFTHPQDRPAIADKIREHPAVIDIYEYDIPFAKRYLIDKGLVPMEGDEELKMLAFDIETLYHEGEEFAEGPILMISYADEEGARVITWKNVDLPYVDVVSTEREMIKRFLRVVKEKDPDVLITYNGDNFDFAYLKKRCEKLGINFALGRDGSEPKIQRMGDRFAVEVKGRIHFDLYPVIRRTINLPTYTLEAVYEAVFGQPKEKVYAEEITTAWETGENLERVARYSMEDAKVTYELGKEFLPMEAQLSRLIGQSLWDVSRSSTGNLVEWFLLRKAYERNELAPNKPDEKELARRRQSYEGGYVKEPERGLWENIVYLDFRSLYPSIIITHNVSPDTLNREGCKEYDVAPQVGHRFCKDFPGFIPSLLGDLLEERQKIKKKMKATIDPIERKLLDYRQRAIKILANSYYGYYGYARARWYCKECAESVTAWGREYITMTIKEIEEKYGFKVIYSDTDGFFATIPGADAETVKKKAMEFLKYINAKLPGALELEYEGFYKRGFFVTKKKYAVIDEEGKITTRGLEIVRRDWSEIAKETQARVLEALLKDGDVEKAVRIVKEVTEKLSKYEVPPEKLVIHEQITRDLKDYKATGPHVAVAKRLAARGVKIRPGTVISYIVLKGSGRIGDRAIPFDEFDPTKHKYDAEYYIENQVLPAVERILRAFGYRKEDLRYQKTRQVGLSAWLKPKGT

SEQ ID NO: 2348 - protein, 774 aa, synthetic construct
MILDTDLITEDGKPVMRIFKKENGEFKIEYDRTFEHYFYALLKDDSAIEEVKKITAERHGTVVTVKRVEKVQKKFLGRPVEVWKLYFTHPQDVPAIRDKIREHPAVIDIYEYDIPFAKRYLIDKGLVPMEGDEELKMLAFDIETLYHEGEEFAEGPILMISYADEEGARVITWKNVDLPYVDVVSTEREMIKRFLRVVKEKDPDVLITYNGDNFDFAYLKKRCEKLGINFALGRDGSEPKIQRMGDRFAVEVKGRIHFDLYPVIRRTINLPTYTLEAVYEAVFGQPKEKVYAEEITTAWETGENLERVARYSMEDAKVTYELGKEFLPMEAQLSRLIGQSLWDVSRSSTGNLVEWFLLRKAYERNELAPNKPDEKELARRRQSYEGGYVKEPERGLWENIVYLDFRSLYPSIIITHNVSPDTLNREGCKEYDVAPQVGHRFCKDFPGFIPSLLGDLLEERQKIKKKMKATIDPIERKLLDYRQRAIKILANSYYGYYGYARARWYCKECAESVTAWGREYITMTIKEIEEKYGFKVIYSDTDGFFATIPGADAETVKKKAMEFLKYINAKLPGALELEYEGFYKRGFFVTKKKYAVIDEEGKITTRGLEIVRRDWSEIAKETQARVLEALLKDGDVEKAVRIVKEVTEKLSKYEVPPEKLVIHEQITRDLKDYKATGPHVAVAKRLAARGVKIRPGTVISYIVLKGSGRIGDRAIPFDEFDPTKHKYDAEYYIENQVLPAVERILRAFGYRKEDLRYQKTRQVGLSAWLKPKGT

SEQ ID NO: 2349 - protein, 774 aa, synthetic construct
MILDTDLITEDGKPVMRIFKKENGEFKIEYDRTFEHYFYALLKDDSAIEEVKKITAERHGTVVTVKRVEKVQKKFLGRPVEVWKLYFTHPQDVPAIADKIREHPAVIDIYEYDIPFAKRYLIDKGLVPMEGDEELKMLAFDIETLYHEGEEFAEGPILMISYADEEGARVITWKNVDLPYVDVVSTEREMIKRFLRVVKEKDPDVLITYNGDNFDFAYLKKRCEKLGINFALGRDGSEPKIQRMGDRFAVEVKGRIHFDLYPVIRRTINLPTYTLEAVYEAVFGQPKEKVYAEEITTAWETGENLERVARYSMEDAKVTYELGKEFLPMEAQLSRLIGQSLWDVSRSSTGNLVEWFLLRKAYERNELAPNKPDEKELARRRQSYEGGYVKEPERGLWENIVYLDFRSLYPSIIITHNVSPDTLNREGCKEYDVAPQVGHRFCKDFPGFIPSLLGDLLEERQKIKKKMKATIDPIERKLLDYRQRAIKILANSYYGYYGYARARWYCKECAESVTAWGREYITMTIKEIEEKYGFKVIYSDTDGFFATIPGADAETVKKKAMEFLKYINAKLPGALELEYEGFYKRGFFVTKKKYAVIDEEGKITTRGLEIVRRDWSEIAKETQARVLEALLKDGDVEKAVRIVKEVTEKLSKYEVPPEKLVIHEQITRDLKDYKATGPHVAVAKRLAARGVKIRPGTVISYIVLKGSGRIGDRAIPFDEFDPTKHKYDAEYYIENQVLPAVERILRAFGYRKEDLRYQKTRQVGLSAWLKPKGT

SEQ ID NO: 2350 - protein, 774 aa, synthetic construct
MILDTDLITEDGKPVMRIFKKENGEFKIEYDRTFEHYFYALLKDDSAIEEVKKITAERHGTVVTVKRVEKVQKKFLGRPVEVWKLYFTHPQDIPAIRDKIREHPAVIDIYEYDIPFAKRYLIDKGLVPMEGDEELKMLAFDIETLYHEGEEFAEGPILMISYADEEGARVITWKNVDLPYVDVVSTEREMIKRFLRVVKEKDPDVLITYNGDNFDFAYLKKRCEKLGINFALGRDGSEPKIQRMGDRFAVEVKGRIHFDLYPVIRRTINLPTYTLEAVYEAVFGQPKEKVYAEEITTAWETGENLERVARYSMEDAKVTYELGKEFLPMEAQLSRLIGQSLWDVSRSSTGNLVEWFLLRKAYERNELAPNKPDEKELARRRQSYEGGYVKEPERGLWENIVYLDFRSLYPSIIITHNVSPDTLNREGCKEYDVAPQVGHRFCKDFPGFIPSLLGDLLEERQKIKKKMKATIDPIERKLLDYRQRAIKILANSYYGYYGYARARWYCKECAESVTAWGREYITMTIKEIEEKYGFKVIYSDTDGFFATIPGADAETVKKKAMEFLKYINAKLPGALELEYEGFYKRGFFVTKKKYAVIDEEGKITTRGLEIVRRDWSEIAKETQARVLEALLKDGDVEKAVRIVKEVTEKLSKYEVPPEKLVIHEQITRDLKDYKATGPHVAVAKRLAARGVKIRPGTVISYIVLKGSGRIGDRAIPFDEFDPTKHKYDAEYYIENQVLPAVERILRAFGYRKEDLRYQKTRQVGLSAWLKPKGT

SEQ ID NO: 2351 - protein, 774 aa, synthetic construct
MILDTDLITEDGKPVMRIFKKENGEFKIEYDRTFEHYFYALLKDDSAIEEVKKITAERHGTVVTVKRVEKVQKKFLGRPVEVWKLYFTHPQDRPAIRDKIREHPAVIDIYEYDIPFAKRYLIDKGLVPMEGDEELKMLAFDIETLYHEGEEFAEGPILMISYADEEGARVITWKNVDLPYVDVVSTEREMIKRFLRVVKEKDPDVLITYNGDNFDFAYLKKRCEKLGINFALGRDGSEPKIQRMGDRFAVEVKGRIHFDLYPVIRRTINLPTYTLEAVYEAVFGQPKEKVYAEEITTAWETGENLERVARYSMEDAKVTYELGKEFLPMEAQLSRLIGQSLWDVSRSSTGNLVEWFLLRKAYERNELAPNKPDEKELARRRQSYEGGYVKEPERGLWENIVYLDFRSLYPSIIITHNVSPDTLNREGCKEYDVAPQVGHRFCKDFPGFIPSLLGDLLEERQKIKKKMKATIDPIERKLLDYRQRAIKILANSYYGYYGYARARWYCKECAESVTAWGREYITMTIKEIEEKYGFKVIYSDTDGFFATIPGADAETVKKKAMEFLKYINAKLPGALELEYEGFYKRGFFVTKKKYAVIDEEGKITTRGLEIVRRDWSEIAKETQARVLEALLKDGDVEKAVRIVKEVTEKLSKYEVPPEKLVIHEQITRDLKDYKATGPHVAVAKRLAARGVKIRPGTVISYIVLKGSGRIGDRAIPFDEFDPTKHKYDAEYYIENQVLPAVERILRAFGYRKEDLRYQKTRQVGLSAWLKPKGT

SEQ ID NO: 2352 - protein, 774 aa, synthetic construct
MILDTDLITEDGKPVMRIFKKENGEFKIEYDRTFESYFYALLKDDSAIEEVKKITAERHGTVVTVKRVEKVQKKFLGRPVEVWKLYFTHPQDVPAIRDKIREHPAVIDIYEYDIPFAKRYLIDKGLVPMEGDEELKMLAFDIETLYHEGEEFAEGPILMISYADEEGARVITWKNVDLPYVDVVSTEREMIKRFLRVVKEKDPDVLITYNGDNFDFAYLKKRCEKLGINFALGRDGSEPKIQRMGDRFAVEVKGRIHFDLYPVIRRTINLPTYTLEAVYEAVFGQPKEKVYAEEITTAWETGENLERVARYSMEDAKVTYELGKEFLPMEAQLSRLIGQSLWDVSRSSTGNLVEWFLLRKAYERNELAPNKPDEKELARRRQSYEGGYVKEPERGLWENIVYLDFRSLYPSIIITHNVSPDTLNREGCKEYDVAPQVGHRFCKDFPGFIPSLLGDLLEERQKIKKKMKATIDPIERKLLDYRQRAIKILANSYYGYYGYARARWYCKECAESVTAWGREYITMTIKEIEEKYGFKVIYSDTDGFFATIPGADAETVKKKAMEFLKYINAKLPGALELEYEGFYKRGFFVTKKKYAVIDEEGKITTRGLEIVRRDWSEIAKETQARVLEALLKDGDVEKAVRIVKEVTEKLSKYEVPPEKLVIHEQITRDLKDYKATGPHVAVAKRLAARGVKIRPGTVISYIVLKGSGRIGDRAIPFDEFDPTKHKYDAEYYIENQVLPAVERILRAFGYRKEDLRYQKTRQVGLSAWLKPKGT

SEQ ID NO: 2353 - protein, 774 aa, synthetic construct
MILDTDLITEDGKPVMRIFKKENGEFKIEYDRTFESYFYALLKDDSAIEEVKKITAERHGTVVTVKRVEKVQKKFLGRPVEVWKLYFTHWQDVPAIRDKIREHPAVIDIYEYDIPFAKRYLIDKGLVPMEGDEELKMLAFDIETLYHEGEEFAEGPILMISYADEEGARVITWKNVDLPYVDVVSTEREMIKRFLRVVKEKDPDVLITYNGDNFDFAYLKKRCEKLGINFALGRDGSEPKIQRMGDRFAVEVKGRIHFDLYPVIRRTINLPTYTLEAVYEAVFGQPKEKVYAEEITTAWETGENLERVARYSMEDAKVTYELGKEFLPMEAQLSRLIGQSLWDVSRSSTGNLVEWFLLRKAYERNELAPNKPDEKELARRRQSYEGGYVKEPERGLWENIVYLDFRSLYPSIIITHNVSPDTLNREGCKEYDVAPQVGHRFCKDFPGFIPSLLGDLLEERQKIKKKMKATIDPIERKLLDYRQRAIKILANSYYGYYGYARARWYCKECAESVTAWGREYITMTIKEIEEKYGFKVIYSDTDGFFATIPGADAETVKKKAMEFLKYINAKLPGALELEYEGFYKRGFFVTKKKYAVIDEEGKITTRGLEIVRRDWSEIAKETQARVLEALLKDGDVEKAVRIVKEVTEKLSKYEVPPEKLVIHEQITRDLKDYKATGPHVAVAKRLAARGVKIRPGTVISYIVLKGSGRIGDRAIPFDEFDPTKHKYDAEYYIENQVLPAVERILRAFGYRKEDLRYQKTRQVGLSAWLKPKGT

SEQ ID NO: 2354 - protein, 774 aa, synthetic construct
MILDTDLITEDGKPVMRIFKKENGEFKIEYDRTFESYFYALLKDDSAIEEVKKITAERHGTVVTVKRVEKVQKKFLGRPVEVWKLYFTHPQDVPAIADKIREHPAVIDIYEYDIPFAKRYLIDKGLVPMEGDEELKMLAFDIETLYHEGEEFAEGPILMISYADEEGARVITWKNVDLPYVDVVSTEREMIKRFLRVVKEKDPDVLITYNGDNFDFAYLKKRCEKLGINFALGRDGSEPKIQRMGDRFAVEVKGRIHFDLYPVIRRTINLPTYTLEAVYEAVFGQPKEKVYAEEITTAWETGENLERVARYSMEDAKVTYELGKEFLPMEAQLSRLIGQSLWDVSRSSTGNLVEWFLLRKAYERNELAPNKPDEKELARRRQSYEGGYVKEPERGLWENIVYLDFRSLYPSIIITHNVSPDTLNREGCKEYDVAPQVGHRFCKDFPGFIPSLLGDLLEERQKIKKKMKATIDPIERKLLDYRQRAIKILANSYYGYYGYARARWYCKECAESVTAWGREYITMTIKEIEEKYGFKVIYSDTDGFFATIPGADAETVKKKAMEFLKYINAKLPGALELEYEGFYKRGFFVTKKKYAVIDEEGKITTRGLEIVRRDWSEIAKETQARVLEALLKDGDVEKAVRIVKEVTEKLSKYEVPPEKLVIHEQITRDLKDYKATGPHVAVAKRLAARGVKIRPGTVISYIVLKGSGRIGDRAIPFDEFDPTKHKYDAEYYIENQVLPAVERILRAFGYRKEDLRYQKTRQVGLSAWLKPKGT

SEQ ID NO: 2355 - protein, 774 aa, synthetic construct
MILDTDLITEDGKPVMRIFKKENGEFKIEYDRTFESYFYALLKDDSAIEEVKKITAERHGTVVTVKRVEKVQKKFLGRPVEVWKLYFTHPQDIPAIRDKIREHPAVIDIYEYDIPFAKRYLIDKGLVPMEGDEELKMLAFDIETLYHEGEEFAEGPILMISYADEEGARVITWKNVDLPYVDVVSTEREMIKRFLRVVKEKDPDVLITYNGDNFDFAYLKKRCEKLGINFALGRDGSEPKIQRMGDRFAVEVKGRIHFDLYPVIRRTINLPTYTLEAVYEAVFGQPKEKVYAEEITTAWETGENLERVARYSMEDAKVTYELGKEFLPMEAQLSRLIGQSLWDVSRSSTGNLVEWFLLRKAYERNELAPNKPDEKELARRRQSYEGGYVKEPERGLWENIVYLDFRSLYPSIIITHNVSPDTLNREGCKEYDVAPQVGHRFCKDFPGFIPSLLGDLLEERQKIKKKMKATIDPIERKLLDYRQRAIKILANSYYGYYGYARARWYCKECAESVTAWGREYITMTIKEIEEKYGFKVIYSDTDGFFATIPGADAETVKKKAMEFLKYINAKLPGALELEYEGFYKRGFFVTKKKYAVIDEEGKITTRGLEIVRRDWSEIAKETQARVLEALLKDGDVEKAVRIVKEVTEKLSKYEVPPEKLVIHEQITRDLKDYKATGPHVAVAKRLAARGVKIRPGTVISYIVLKGSGRIGDRAIPFDEFDPTKHKYDAEYYIENQVLPAVERILRAFGYRKEDLRYQKTRQVGLSAWLKPKGT

SEQ ID NO: 2356 - protein, 774 aa, synthetic construct
MILDTDLITEDGKPVMRIFKKENGEFKIEYDRTFESYFYALLKDDSAIEEVKKITAERHGTVVTVKRVEKVQKKFLGRPVEVWKLYFTHPQDIPAIHDKIREHPAVIDIYEYDIPFAKRYLIDKGLVPMEGDEELKMLAFDIETLYHEGEEFAEGPILMISYADEEGARVITWKNVDLPYVDVVSTEREMIKRFLRVVKEKDPDVLITYNGDNFDFAYLKKRCEKLGINFALGRDGSEPKIQRMGDRFAVEVKGRIHFDLYPVIRRTINLPTYTLEAVYEAVFGQPKEKVYAEEITTAWETGENLERVARYSMEDAKVTYELGKEFLPMEAQLSRLIGQSLWDVSRSSTGNLVEWFLLRKAYERNELAPNKPDEKELARRRQSYEGGYVKEPERGLWENIVYLDFRSLYPSIIITHNVSPDTLNREGCKEYDVAPQVGHRFCKDFPGFIPSLLGDLLEERQKIKKKMKATIDPIERKLLDYRQRAIKILANSYYGYYGYARARWYCKECAESVTAWGREYITMTIKEIEEKYGFKVIYSDTDGFFATIPGADAETVKKKAMEFLKYINAKLPGALELEYEGFYKRGFFVTKKKYAVIDEEGKITTRGLEIVRRDWSEIAKETQARVLEALLKDGDVEKAVRIVKEVTEKLSKYEVPPEKLVIHEQITRDLKDYKATGPHVAVAKRLAARGVKIRPGTVISYIVLKGSGRIGDRAIPFDEFDPTKHKYDAEYYIENQVLPAVERILRAFGYRKEDLRYQKTRQVGLSAWLKPKGT

SEQ ID NO: 2357 - protein, 774 aa, synthetic construct
MILDTDLITEDGKPVMRIFKKENGEFKIEYDRTFEWYFYALLKDDSAIEEVKKITAERHGTVVTVKRVEKVQKKFLGRPVEVWKLYFTHPQDVPAIRDKIREHPAVIDIYEYDIPFAKRYLIDKGLVPMEGDEELKMLAFDIETLYHEGEEFAEGPILMISYADEEGARVITWKNVDLPYVDVVSTEREMIKRFLRVVKEKDPDVLITYNGDNFDFAYLKKRCEKLGINFALGRDGSEPKIQRMGDRFAVEVKGRIHFDLYPVIRRTINLPTYTLEAVYEAVFGQPKEKVYAEEITTAWETGENLERVARYSMEDAKVTYELGKEFLPMEAQLSRLIGQSLWDVSRSSTGNLVEWFLLRKAYERNELAPNKPDEKELARRRQSYEGGYVKEPERGLWENIVYLDFRSLYPSIIITHNVSPDTLNREGCKEYDVAPQVGHRFCKDFPGFIPSLLGDLLEERQKIKKKMKATIDPIERKLLDYRQRAIKILANSYYGYYGYARARWYCKECAESVTAWGREYITMTIKEIEEKYGFKVIYSDTDGFFATIPGADAETVKKKAMEFLKYINAKLPGALELEYEGFYKRGFFVTKKKYAVIDEEGKITTRGLEIVRRDWSEIAKETQARVLEALLKDGDVEKAVRIVKEVTEKLSKYEVPPEKLVIHEQITRDLKDYKATGPHVAVAKRLAARGVKIRPGTVISYIVLKGSGRIGDRAIPFDEFDPTKHKYDAEYYIENQVLPAVERILRAFGYRKEDLRYQKTRQVGLSAWLKPKGT

SEQ ID NO: 2358 - protein, 774 aa, synthetic construct
MILDTDLITEDGKPVMRIFKKENGEFKIEYDRTFEWYFYALLKDDSAIEEVKKITAERHGTVVTVKRVEKVQKKFLGRPVEVWKLYFTHFQDVPAIRDKIREHPAVIDIYEYDIPFAKRYLIDKGLVPMEGDEELKMLAFDIETLYHEGEEFAEGPILMISYADEEGARVITWKNVDLPYVDVVSTEREMIKRFLRVVKEKDPDVLITYNGDNFDFAYLKKRCEKLGINFALGRDGSEPKIQRMGDRFAVEVKGRIHFDLYPVIRRTINLPTYTLEAVYEAVFGQPKEKVYAEEITTAWETGENLERVARYSMEDAKVTYELGKEFLPMEAQLSRLIGQSLWDVSRSSTGNLVEWFLLRKAYERNELAPNKPDEKELARRRQSYEGGYVKEPERGLWENIVYLDFRSLYPSIIITHNVSPDTLNREGCKEYDVAPQVGHRFCKDFPGFIPSLLGDLLEERQKIKKKMKATIDPIERKLLDYRQRAIKILANSYYGYYGYARARWYCKECAESVTAWGREYITMTIKEIEEKYGFKVIYSDTDGFFATIPGADAETVKKKAMEFLKYINAKLPGALELEYEGFYKRGFFVTKKKYAVIDEEGKITTRGLEIVRRDWSEIAKETQARVLEALLKDGDVEKAVRIVKEVTEKLSKYEVPPEKLVIHEQITRDLKDYKATGPHVAVAKRLAARGVKIRPGTVISYIVLKGSGRIGDRAIPFDEFDPTKHKYDAEYYIENQVLPAVERILRAFGYRKEDLRYQKTRQVGLSAWLKPKGT

SEQ ID NO: 2359 - protein, 774 aa, synthetic construct
MILDTDLITEDGKPVMRIFKKENGEFKIEYDRTFEWYFYALLKDDSAIEEVKKITAERHGTVVTVKRVEKVQKKFLGRPVEVWKLYFTHFQDVPAIADKIREHPAVIDIYEYDIPFAKRYLIDKGLVPMEGDEELKMLAFDIETLYHEGEEFAEGPILMISYADEEGARVITWKNVDLPYVDVVSTEREMIKRFLRVVKEKDPDVLITYNGDNFDFAYLKKRCEKLGINFALGRDGSEPKIQRMGDRFAVEVKGRIHFDLYPVIRRTINLPTYTLEAVYEAVFGQPKEKVYAEEITTAWETGENLERVARYSMEDAKVTYELGKEFLPMEAQLSRLIGQSLWDVSRSSTGNLVEWFLLRKAYERNELAPNKPDEKELARRRQSYEGGYVKEPERGLWENIVYLDFRSLYPSIIITHNVSPDTLNREGCKEYDVAPQVGHRFCKDFPGFIPSLLGDLLEERQKIKKKMKATIDPIERKLLDYRQRAIKILANSYYGYYGYARARWYCKECAESVTAWGREYITMTIKEIEEKYGFKVIYSDTDGFFATIPGADAETVKKKAMEFLKYINAKLPGALELEYEGFYKRGFFVTKKKYAVIDEEGKITTRGLEIVRRDWSEIAKETQARVLEALLKDGDVEKAVRIVKEVTEKLSKYEVPPEKLVIHEQITRDLKDYKATGPHVAVAKRLAARGVKIRPGTVISYIVLKGSGRIGDRAIPFDEFDPTKHKYDAEYYIENQVLPAVERILRAFGYRKEDLRYQKTRQVGLSAWLKPKGT

SEQ ID NO: 2360 - protein, 774 aa, synthetic construct
MILDTDLITEDGKPVMRIFKKENGEFKIEYDRTFEWYFYALLKDDSAIEEVKKITAERHGTVVTVKRVEKVQKKFLGRPVEVWKLYFTHFQDVPAIHDKIREHPAVIDIYEYDIPFAKRYLIDKGLVPMEGDEELKMLAFDIETLYHEGEEFAEGPILMISYADEEGARVITWKNVDLPYVDVVSTEREMIKRFLRVVKEKDPDVLITYNGDNFDFAYLKKRCEKLGINFALGRDGSEPKIQRMGDRFAVEVKGRIHFDLYPVIRRTINLPTYTLEAVYEAVFGQPKEKVYAEEITTAWETGENLERVARYSMEDAKVTYELGKEFLPMEAQLSRLIGQSLWDVSRSSTGNLVEWFLLRKAYERNELAPNKPDEKELARRRQSYEGGYVKEPERGLWENIVYLDFRSLYPSIIITHNVSPDTLNREGCKEYDVAPQVGHRFCKDFPGFIPSLLGDLLEERQKIKKKMKATIDPIERKLLDYRQRAIKILANSYYGYYGYARARWYCKECAESVTAWGREYITMTIKEIEEKYGFKVIYSDTDGFFATIPGADAETVKKKAMEFLKYINAKLPGALELEYEGFYKRGFFVTKKKYAVIDEEGKITTRGLEIVRRDWSEIAKETQARVLEALLKDGDVEKAVRIVKEVTEKLSKYEVPPEKLVIHEQITRDLKDYKATGPHVAVAKRLAARGVKIRPGTVISYIVLKGSGRIGDRAIPFDEFDPTKHKYDAEYYIENQVLPAVERILRAFGYRKEDLRYQKTRQVGLSAWLKPKGT

SEQ ID NO: 2361 - protein, 774 aa, synthetic construct
MILDTDLITEDGKPVMRIFKKENGEFKIEYDRTFEWYFYALLKDDSAIEEVKKITAERHGTVVTVKRVEKVQKKFLGRPVEVWKLYFTHFQDIPAIRDKIREHPAVIDIYEYDIPFAKRYLIDKGLVPMEGDEELKMLAFDIETLYHEGEEFAEGPILMISYADEEGARVITWKNVDLPYVDVVSTEREMIKRFLRVVKEKDPDVLITYNGDNFDFAYLKKRCEKLGINFALGRDGSEPKIQRMGDRFAVEVKGRIHFDLYPVIRRTINLPTYTLEAVYEAVFGQPKEKVYAEEITTAWETGENLERVARYSMEDAKVTYELGKEFLPMEAQLSRLIGQSLWDVSRSSTGNLVEWFLLRKAYERNELAPNKPDEKELARRRQSYEGGYVKEPERGLWENIVYLDFRSLYPSIIITHNVSPDTLNREGCKEYDVAPQVGHRFCKDFPGFIPSLLGDLLEERQKIKKKMKATIDPIERKLLDYRQRAIKILANSYYGYYGYARARWYCKECAESVTAWGREYITMTIKEIEEKYGFKVIYSDTDGFFATIPGADAETVKKKAMEFLKYINAKLPGALELEYEGFYKRGFFVTKKKYAVIDEEGKITTRGLEIVRRDWSEIAKETQARVLEALLKDGDVEKAVRIVKEVTEKLSKYEVPPEKLVIHEQITRDLKDYKATGPHVAVAKRLAARGVKIRPGTVISYIVLKGSGRIGDRAIPFDEFDPTKHKYDAEYYIENQVLPAVERILRAFGYRKEDLRYQKTRQVGLSAWLKPKGT

SEQ ID NO: 2362 - protein, 774 aa, synthetic construct
MILDTDLITEDGKPVMRIFKKENGEFKIEYDRTFEWYFYALLKDDSAIEEVKKITAERHGTVVTVKRVEKVQKKFLGRPVEVWKLYFTHFQDIPAIADKIREHPAVIDIYEYDIPFAKRYLIDKGLVPMEGDEELKMLAFDIETLYHEGEEFAEGPILMISYADEEGARVITWKNVDLPYVDVVSTEREMIKRFLRVVKEKDPDVLITYNGDNFDFAYLKKRCEKLGINFALGRDGSEPKIQRMGDRFAVEVKGRIHFDLYPVIRRTINLPTYTLEAVYEAVFGQPKEKVYAEEITTAWETGENLERVARYSMEDAKVTYELGKEFLPMEAQLSRLIGQSLWDVSRSSTGNLVEWFLLRKAYERNELAPNKPDEKELARRRQSYEGGYVKEPERGLWENIVYLDFRSLYPSIIITHNVSPDTLNREGCKEYDVAPQVGHRFCKDFPGFIPSLLGDLLEERQKIKKKMKATIDPIERKLLDYRQRAIKILANSYYGYYGYARARWYCKECAESVTAWGREYITMTIKEIEEKYGFKVIYSDTDGFFATIPGADAETVKKKAMEFLKYINAKLPGALELEYEGFYKRGFFVTKKKYAVIDEEGKITTRGLEIVRRDWSEIAKETQARVLEALLKDGDVEKAVRIVKEVTEKLSKYEVPPEKLVIHEQITRDLKDYKATGPHVAVAKRLAARGVKIRPGTVISYIVLKGSGRIGDRAIPFDEFDPTKHKYDAEYYIENQVLPAVERILRAFGYRKEDLRYQKTRQVGLSAWLKPKGT

SEQ ID NO: 2363 - protein, 774 aa, synthetic construct
MILDTDLITEDGKPVMRIFKKENGEFKIEYDRTFEWYFYALLKDDSAIEEVKKITAERHGTVVTVKRVEKVQKKFLGRPVEVWKLYFTHFQDIPAIFDKIREHPAVIDIYEYDIPFAKRYLIDKGLVPMEGDEELKMLAFDIETLYHEGEEFAEGPILMISYADEEGARVITWKNVDLPYVDVVSTEREMIKRFLRVVKEKDPDVLITYNGDNFDFAYLKKRCEKLGINFALGRDGSEPKIQRMGDRFAVEVKGRIHFDLYPVIRRTINLPTYTLEAVYEAVFGQPKEKVYAEEITTAWETGENLERVARYSMEDAKVTYELGKEFLPMEAQLSRLIGQSLWDVSRSSTGNLVEWFLLRKAYERNELAPNKPDEKELARRRQSYEGGYVKEPERGLWENIVYLDFRSLYPSIIITHNVSPDTLNREGCKEYDVAPQVGHRFCKDFPGFIPSLLGDLLEERQKIKKKMKATIDPIERKLLDYRQRAIKILANSYYGYYGYARARWYCKECAESVTAWGREYITMTIKEIEEKYGFKVIYSDTDGFFATIPGADAETVKKKAMEFLKYINAKLPGALELEYEGFYKRGFFVTKKKYAVIDEEGKITTRGLEIVRRDWSEIAKETQARVLEALLKDGDVEKAVRIVKEVTEKLSKYEVPPEKLVIHEQITRDLKDYKATGPHVAVAKRLAARGVKIRPGTVISYIVLKGSGRIGDRAIPFDEFDPTKHKYDAEYYIENQVLPAVERILRAFGYRKEDLRYQKTRQVGLSAWLKPKGT

SEQ ID NO: 2364 - protein, 774 aa, synthetic construct
MILDTDLITEDGKPVMRIFKKENGEFKIEYDRTFEWYFYALLKDDSAIEEVKKITAERHGTVVTVKRVEKVQKKFLGRPVEVWKLYFTHFQDIPAIHDKIREHPAVIDIYEYDIPFAKRYLIDKGLVPMEGDEELKMLAFDIETLYHEGEEFAEGPILMISYADEEGARVITWKNVDLPYVDVVSTEREMIKRFLRVVKEKDPDVLITYNGDNFDFAYLKKRCEKLGINFALGRDGSEPKIQRMGDRFAVEVKGRIHFDLYPVIRRTINLPTYTLEAVYEAVFGQPKEKVYAEEITTAWETGENLERVARYSMEDAKVTYELGKEFLPMEAQLSRLIGQSLWDVSRSSTGNLVEWFLLRKAYERNELAPNKPDEKELARRRQSYEGGYVKEPERGLWENIVYLDFRSLYPSIIITHNVSPDTLNREGCKEYDVAPQVGHRFCKDFPGFIPSLLGDLLEERQKIKKKMKATIDPIERKLLDYRQRAIKILANSYYGYYGYARARWYCKECAESVTAWGREYITMTIKEIEEKYGFKVIYSDTDGFFATIPGADAETVKKKAMEFLKYINAKLPGALELEYEGFYKRGFFVTKKKYAVIDEEGKITTRGLEIVRRDWSEIAKETQARVLEALLKDGDVEKAVRIVKEVTEKLSKYEVPPEKLVIHEQITRDLKDYKATGPHVAVAKRLAARGVKIRPGTVISYIVLKGSGRIGDRAIPFDEFDPTKHKYDAEYYIENQVLPAVERILRAFGYRKEDLRYQKTRQVGLSAWLKPKGT

SEQ ID NO: 2365 - protein, 774 aa, synthetic construct
MILDTDLITEDGKPVMRIFKKENGEFKIEYDRTFEWYFYALLKDDSAIEEVKKITAERHGTVVTVKRVEKVQKKFLGRPVEVWKLYFTHIQDIPAIRDKIREHPAVIDIYEYDIPFAKRYLIDKGLVPMEGDEELKMLAFDIETLYHEGEEFAEGPILMISYADEEGARVITWKNVDLPYVDVVSTEREMIKRFLRVVKEKDPDVLITYNGDNFDFAYLKKRCEKLGINFALGRDGSEPKIQRMGDRFAVEVKGRIHFDLYPVIRRTINLPTYTLEAVYEAVFGQPKEKVYAEEITTAWETGENLERVARYSMEDAKVTYELGKEFLPMEAQLSRLIGQSLWDVSRSSTGNLVEWFLLRKAYERNELAPNKPDEKELARRRQSYEGGYVKEPERGLWENIVYLDFRSLYPSIIITHNVSPDTLNREGCKEYDVAPQVGHRFCKDFPGFIPSLLGDLLEERQKIKKKMKATIDPIERKLLDYRQRAIKILANSYYGYYGYARARWYCKECAESVTAWGREYITMTIKEIEEKYGFKVIYSDTDGFFATIPGADAETVKKKAMEFLKYINAKLPGALELEYEGFYKRGFFVTKKKYAVIDEEGKITTRGLEIVRRDWSEIAKETQARVLEALLKDGDVEKAVRIVKEVTEKLSKYEVPPEKLVIHEQITRDLKDYKATGPHVAVAKRLAARGVKIRPGTVISYIVLKGSGRIGDRAIPFDEFDPTKHKYDAEYYIENQVLPAVERILRAFGYRKEDLRYQKTRQVGLSAWLKPKGT

SEQ ID NO: 2366 - protein, 774 aa, synthetic construct
MILDTDLITEDGKPVMRIFKKENGEFKIEYDRTFEWYFYALLKDDSAIEEVKKITAERHGTVVTVKRVEKVQKKFLGRPVEVWKLYFTHIQDIPAIHDKIREHPAVIDIYEYDIPFAKRYLIDKGLVPMEGDEELKMLAFDIETLYHEGEEFAEGPILMISYADEEGARVITWKNVDLPYVDVVSTEREMIKRFLRVVKEKDPDVLITYNGDNFDFAYLKKRCEKLGINFALGRDGSEPKIQRMGDRFAVEVKGRIHFDLYPVIRRTINLPTYTLEAVYEAVFGQPKEKVYAEEITTAWETGENLERVARYSMEDAKVTYELGKEFLPMEAQLSRLIGQSLWDVSRSSTGNLVEWFLLRKAYERNELAPNKPDEKELARRRQSYEGGYVKEPERGLWENIVYLDFRSLYPSIIITHNVSPDTLNREGCKEYDVAPQVGHRFCKDFPGFIPSLLGDLLEERQKIKKKMKATIDPIERKLLDYRQRAIKILANSYYGYYGYARARWYCKECAESVTAWGREYITMTIKEIEEKYGFKVIYSDTDGFFATIPGADAETVKKKAMEFLKYINAKLPGALELEYEGFYKRGFFVTKKKYAVIDEEGKITTRGLEIVRRDWSEIAKETQARVLEALLKDGDVEKAVRIVKEVTEKLSKYEVPPEKLVIHEQITRDLKDYKATGPHVAVAKRLAARGVKIRPGTVISYIVLKGSGRIGDRAIPFDEFDPTKHKYDAEYYIENQVLPAVERILRAFGYRKEDLRYQKTRQVGLSAWLKPKGT

SEQ ID NO: 2367 - protein, 774 aa, synthetic construct
MILDTDLITEDGKPVMRIFKKENGEFKIEYDRTFEWYFYALLKDDSAIEEVKKITAERHGTVVTVKRVEKVQKKFLGRPVEVWKLYFTHWQDVPAIRDKIREHPAVIDIYEYDIPFAKRYLIDKGLVPMEGDEELKMLAFDIETLYHEGEEFAEGPILMISYADEEGARVITWKNVDLPYVDVVSTEREMIKRFLRVVKEKDPDVLITYNGDNFDFAYLKKRCEKLGINFALGRDGSEPKIQRMGDRFAVEVKGRIHFDLYPVIRRTINLPTYTLEAVYEAVFGQPKEKVYAEEITTAWETGENLERVARYSMEDAKVTYELGKEFLPMEAQLSRLIGQSLWDVSRSSTGNLVEWFLLRKAYERNELAPNKPDEKELARRRQSYEGGYVKEPERGLWENIVYLDFRSLYPSIIITHNVSPDTLNREGCKEYDVAPQVGHRFCKDFPGFIPSLLGDLLEERQKIKKKMKATIDPIERKLLDYRQRAIKILANSYYGYYGYARARWYCKECAESVTAWGREYITMTIKEIEEKYGFKVIYSDTDGFFATIPGADAETVKKKAMEFLKYINAKLPGALELEYEGFYKRGFFVTKKKYAVIDEEGKITTRGLEIVRRDWSEIAKETQARVLEALLKDGDVEKAVRIVKEVTEKLSKYEVPPEKLVIHEQITRDLKDYKATGPHVAVAKRLAARGVKIRPGTVISYIVLKGSGRIGDRAIPFDEFDPTKHKYDAEYYIENQVLPAVERILRAFGYRKEDLRYQKTRQVGLSAWLKPKGT

SEQ ID NO: 2368 - protein, 774 aa, synthetic construct
MILDTDLITEDGKPVMRIFKKENGEFKIEYDRTFEWYFYALLKDDSAIEEVKKITAERHGTVVTVKRVEKVQKKFLGRPVEVWKLYFTHWQDVPAIADKIREHPAVIDIYEYDIPFAKRYLIDKGLVPMEGDEELKMLAFDIETLYHEGEEFAEGPILMISYADEEGARVITWKNVDLPYVDVVSTEREMIKRFLRVVKEKDPDVLITYNGDNFDFAYLKKRCEKLGINFALGRDGSEPKIQRMGDRFAVEVKGRIHFDLYPVIRRTINLPTYTLEAVYEAVFGQPKEKVYAEEITTAWETGENLERVARYSMEDAKVTYELGKEFLPMEAQLSRLIGQSLWDVSRSSTGNLVEWFLLRKAYERNELAPNKPDEKELARRRQSYEGGYVKEPERGLWENIVYLDFRSLYPSIIITHNVSPDTLNREGCKEYDVAPQVGHRFCKDFPGFIPSLLGDLLEERQKIKKKMKATIDPIERKLLDYRQRAIKILANSYYGYYGYARARWYCKECAESVTAWGREYITMTIKEIEEKYGFKVIYSDTDGFFATIPGADAETVKKKAMEFLKYINAKLPGALELEYEGFYKRGFFVTKKKYAVIDEEGKITTRGLEIVRRDWSEIAKETQARVLEALLKDGDVEKAVRIVKEVTEKLSKYEVPPEKLVIHEQITRDLKDYKATGPHVAVAKRLAARGVKIRPGTVISYIVLKGSGRIGDRAIPFDEFDPTKHKYDAEYYIENQVLPAVERILRAFGYRKEDLRYQKTRQVGLSAWLKPKGT

SEQ ID NO: 2369 - protein, 774 aa, synthetic construct
MILDTDLITEDGKPVMRIFKKENGEFKIEYDRTFEWYFYALLKDDSAIEEVKKITAERHGTVVTVKRVEKVQKKFLGRPVEVWKLYFTHWQDIPAIRDKIREHPAVIDIYEYDIPFAKRYLIDKGLVPMEGDEELKMLAFDIETLYHEGEEFAEGPILMISYADEEGARVITWKNVDLPYVDVVSTEREMIKRFLRVVKEKDPDVLITYNGDNFDFAYLKKRCEKLGINFALGRDGSEPKIQRMGDRFAVEVKGRIHFDLYPVIRRTINLPTYTLEAVYEAVFGQPKEKVYAEEITTAWETGENLERVARYSMEDAKVTYELGKEFLPMEAQLSRLIGQSLWDVSRSSTGNLVEWFLLRKAYERNELAPNKPDEKELARRRQSYEGGYVKEPERGLWENIVYLDFRSLYPSIIITHNVSPDTLNREGCKEYDVAPQVGHRFCKDFPGFIPSLLGDLLEERQKIKKKMKATIDPIERKLLDYRQRAIKILANSYYGYYGYARARWYCKECAESVTAWGREYITMTIKEIEEKYGFKVIYSDTDGFFATIPGADAETVKKKAMEFLKYINAKLPGALELEYEGFYKRGFFVTKKKYAVIDEEGKITTRGLEIVRRDWSEIAKETQARVLEALLKDGDVEKAVRIVKEVTEKLSKYEVPPEKLVIHEQITRDLKDYKATGPHVAVAKRLAARGVKIRPGTVISYIVLKGSGRIGDRAIPFDEFDPTKHKYDAEYYIENQVLPAVERILRAFGYRKEDLRYQKTRQVGLSAWLKPKGT

SEQ ID NO: 2370 - protein, 774 aa, synthetic construct
MILDTDLITEDGKPVMRIFKKENGEFKIEYDRTFEWYFYALLKDDSAIEEVKKITAERHGTVVTVKRVEKVQKKFLGRPVEVWKLYFTHWQDIPAIADKIREHPAVIDIYEYDIPFAKRYLIDKGLVPMEGDEELKMLAFDIETLYHEGEEFAEGPILMISYADEEGARVITWKNVDLPYVDVVSTEREMIKRFLRVVKEKDPDVLITYNGDNFDFAYLKKRCEKLGINFALGRDGSEPKIQRMGDRFAVEVKGRIHFDLYPVIRRTINLPTYTLEAVYEAVFGQPKEKVYAEEITTAWETGENLERVARYSMEDAKVTYELGKEFLPMEAQLSRLIGQSLWDVSRSSTGNLVEWFLLRKAYERNELAPNKPDEKELARRRQSYEGGYVKEPERGLWENIVYLDFRSLYPSIIITHNVSPDTLNREGCKEYDVAPQVGHRFCKDFPGFIPSLLGDLLEERQKIKKKMKATIDPIERKLLDYRQRAIKILANSYYGYYGYARARWYCKECAESVTAWGREYITMTIKEIEEKYGFKVIYSDTDGFFATIPGADAETVKKKAMEFLKYINAKLPGALELEYEGFYKRGFFVTKKKYAVIDEEGKITTRGLEIVRRDWSEIAKETQARVLEALLKDGDVEKAVRIVKEVTEKLSKYEVPPEKLVIHEQITRDLKDYKATGPHVAVAKRLAARGVKIRPGTVISYIVLKGSGRIGDRAIPFDEFDPTKHKYDAEYYIENQVLPAVERILRAFGYRKEDLRYQKTRQVGLSAWLKPKGT

SEQ ID NO: 2371 - protein, 774 aa, synthetic construct
MILDTDLITEDGKPVMRIFKKENGEFKIEYDRTFEWYFYALLKDDSAIEEVKKITAERHGTVVTVKRVEKVQKKFLGRPVEVWKLYFTHWQDIPAIFDKIREHPAVIDIYEYDIPFAKRYLIDKGLVPMEGDEELKMLAFDIETLYHEGEEFAEGPILMISYADEEGARVITWKNVDLPYVDVVSTEREMIKRFLRVVKEKDPDVLITYNGDNFDFAYLKKRCEKLGINFALGRDGSEPKIQRMGDRFAVEVKGRIHFDLYPVIRRTINLPTYTLEAVYEAVFGQPKEKVYAEEITTAWETGENLERVARYSMEDAKVTYELGKEFLPMEAQLSRLIGQSLWDVSRSSTGNLVEWFLLRKAYERNELAPNKPDEKELARRRQSYEGGYVKEPERGLWENIVYLDFRSLYPSIIITHNVSPDTLNREGCKEYDVAPQVGHRFCKDFPGFIPSLLGDLLEERQKIKKKMKATIDPIERKLLDYRQRAIKILANSYYGYYGYARARWYCKECAESVTAWGREYITMTIKEIEEKYGFKVIYSDTDGFFATIPGADAETVKKKAMEFLKYINAKLPGALELEYEGFYKRGFFVTKKKYAVIDEEGKITTRGLEIVRRDWSEIAKETQARVLEALLKDGDVEKAVRIVKEVTEKLSKYEVPPEKLVIHEQITRDLKDYKATGPHVAVAKRLAARGVKIRPGTVISYIVLKGSGRIGDRAIPFDEFDPTKHKYDAEYYIENQVLPAVERILRAFGYRKEDLRYQKTRQVGLSAWLKPKGT

SEQ ID NO: 2372 - protein, 774 aa, synthetic construct
MILDTDLITEDGKPVMRIFKKENGEFKIEYDRTFEWYFYALLKDDSAIEEVKKITAERHGTVVTVKRVEKVQKKFLGRPVEVWKLYFTHWQDIPAIHDKIREHPAVIDIYEYDIPFAKRYLIDKGLVPMEGDEELKMLAFDIETLYHEGEEFAEGPILMISYADEEGARVITWKNVDLPYVDVVSTEREMIKRFLRVVKEKDPDVLITYNGDNFDFAYLKKRCEKLGINFALGRDGSEPKIQRMGDRFAVEVKGRIHFDLYPVIRRTINLPTYTLEAVYEAVFGQPKEKVYAEEITTAWETGENLERVARYSMEDAKVTYELGKEFLPMEAQLSRLIGQSLWDVSRSSTGNLVEWFLLRKAYERNELAPNKPDEKELARRRQSYEGGYVKEPERGLWENIVYLDFRSLYPSIIITHNVSPDTLNREGCKEYDVAPQVGHRFCKDFPGFIPSLLGDLLEERQKIKKKMKATIDPIERKLLDYRQRAIKILANSYYGYYGYARARWYCKECAESVTAWGREYITMTIKEIEEKYGFKVIYSDTDGFFATIPGADAETVKKKAMEFLKYINAKLPGALELEYEGFYKRGFFVTKKKYAVIDEEGKITTRGLEIVRRDWSEIAKETQARVLEALLKDGDVEKAVRIVKEVTEKLSKYEVPPEKLVIHEQITRDLKDYKATGPHVAVAKRLAARGVKIRPGTVISYIVLKGSGRIGDRAIPFDEFDPTKHKYDAEYYIENQVLPAVERILRAFGYRKEDLRYQKTRQVGLSAWLKPKGT

SEQ ID NO: 2373 - protein, 774 aa, synthetic construct
MILDTDLITEDGKPVMRIFKKENGEFKIEYDRTFEWYFYALLKDDSAIEEVKKITAERHGTVVTVKRVEKVQKKFLGRPVEVWKLYFTHYQDVPAIRDKIREHPAVIDIYEYDIPFAKRYLIDKGLVPMEGDEELKMLAFDIETLYHEGEEFAEGPILMISYADEEGARVITWKNVDLPYVDVVSTEREMIKRFLRVVKEKDPDVLITYNGDNFDFAYLKKRCEKLGINFALGRDGSEPKIQRMGDRFAVEVKGRIHFDLYPVIRRTINLPTYTLEAVYEAVFGQPKEKVYAEEITTAWETGENLERVARYSMEDAKVTYELGKEFLPMEAQLSRLIGQSLWDVSRSSTGNLVEWFLLRKAYERNELAPNKPDEKELARRRQSYEGGYVKEPERGLWENIVYLDFRSLYPSIIITHNVSPDTLNREGCKEYDVAPQVGHRFCKDFPGFIPSLLGDLLEERQKIKKKMKATIDPIERKLLDYRQRAIKILANSYYGYYGYARARWYCKECAESVTAWGREYITMTIKEIEEKYGFKVIYSDTDGFFATIPGADAETVKKKAMEFLKYINAKLPGALELEYEGFYKRGFFVTKKKYAVIDEEGKITTRGLEIVRRDWSEIAKETQARVLEALLKDGDVEKAVRIVKEVTEKLSKYEVPPEKLVIHEQITRDLKDYKATGPHVAVAKRLAARGVKIRPGTVISYIVLKGSGRIGDRAIPFDEFDPTKHKYDAEYYIENQVLPAVERILRAFGYRKEDLRYQKTRQVGLSAWLKPKGT

SEQ ID NO: 2374 - protein, 774 aa, synthetic construct
MILDTDLITEDGKPVMRIFKKENGEFKIEYDRTFEWYFYALLKDDSAIEEVKKITAERHGTVVTVKRVEKVQKKFLGRPVEVWKLYFTHYQDVPAIADKIREHPAVIDIYEYDIPFAKRYLIDKGLVPMEGDEELKMLAFDIETLYHEGEEFAEGPILMISYADEEGARVITWKNVDLPYVDVVSTEREMIKRFLRVVKEKDPDVLITYNGDNFDFAYLKKRCEKLGINFALGRDGSEPKIQRMGDRFAVEVKGRIHFDLYPVIRRTINLPTYTLEAVYEAVFGQPKEKVYAEEITTAWETGENLERVARYSMEDAKVTYELGKEFLPMEAQLSRLIGQSLWDVSRSSTGNLVEWFLLRKAYERNELAPNKPDEKELARRRQSYEGGYVKEPERGLWENIVYLDFRSLYPSIIITHNVSPDTLNREGCKEYDVAPQVGHRFCKDFPGFIPSLLGDLLEERQKIKKKMKATIDPIERKLLDYRQRAIKILANSYYGYYGYARARWYCKECAESVTAWGREYITMTIKEIEEKYGFKVIYSDTDGFFATIPGADAETVKKKAMEFLKYINAKLPGALELEYEGFYKRGFFVTKKKYAVIDEEGKITTRGLEIVRRDWSEIAKETQARVLEALLKDGDVEKAVRIVKEVTEKLSKYEVPPEKLVIHEQITRDLKDYKATGPHVAVAKRLAARGVKIRPGTVISYIVLKGSGRIGDRAIPFDEFDPTKHKYDAEYYIENQVLPAVERILRAFGYRKEDLRYQKTRQVGLSAWLKPKGT

SEQ ID NO: 2375 - protein, 774 aa, synthetic construct
MILDTDLITEDGKPVMRIFKKENGEFKIEYDRTFEWYFYALLKDDSAIEEVKKITAERHGTVVTVKRVEKVQKKFLGRPVEVWKLYFTHYQDVPAIFDKIREHPAVIDIYEYDIPFAKRYLIDKGLVPMEGDEELKMLAFDIETLYHEGEEFAEGPILMISYADEEGARVITWKNVDLPYVDVVSTEREMIKRFLRVVKEKDPDVLITYNGDNFDFAYLKKRCEKLGINFALGRDGSEPKIQRMGDRFAVEVKGRIHFDLYPVIRRTINLPTYTLEAVYEAVFGQPKEKVYAEEITTAWETGENLERVARYSMEDAKVTYELGKEFLPMEAQLSRLIGQSLWDVSRSSTGNLVEWFLLRKAYERNELAPNKPDEKELARRRQSYEGGYVKEPERGLWENIVYLDFRSLYPSIIITHNVSPDTLNREGCKEYDVAPQVGHRFCKDFPGFIPSLLGDLLEERQKIKKKMKATIDPIERKLLDYRQRAIKILANSYYGYYGYARARWYCKECAESVTAWGREYITMTIKEIEEKYGFKVIYSDTDGFFATIPGADAETVKKKAMEFLKYINAKLPGALELEYEGFYKRGFFVTKKKYAVIDEEGKITTRGLEIVRRDWSEIAKETQARVLEALLKDGDVEKAVRIVKEVTEKLSKYEVPPEKLVIHEQITRDLKDYKATGPHVAVAKRLAARGVKIRPGTVISYIVLKGSGRIGDRAIPFDEFDPTKHKYDAEYYIENQVLPAVERILRAFGYRKEDLRYQKTRQVGLSAWLKPKGT

SEQ ID NO: 2376 - protein, 774 aa, synthetic construct
MILDTDLITEDGKPVMRIFKKENGEFKIEYDRTFEWYFYALLKDDSAIEEVKKITAERHGTVVTVKRVEKVQKKFLGRPVEVWKLYFTHYQDIPAIRDKIREHPAVIDIYEYDIPFAKRYLIDKGLVPMEGDEELKMLAFDIETLYHEGEEFAEGPILMISYADEEGARVITWKNVDLPYVDVVSTEREMIKRFLRVVKEKDPDVLITYNGDNFDFAYLKKRCEKLGINFALGRDGSEPKIQRMGDRFAVEVKGRIHFDLYPVIRRTINLPTYTLEAVYEAVFGQPKEKVYAEEITTAWETGENLERVARYSMEDAKVTYELGKEFLPMEAQLSRLIGQSLWDVSRSSTGNLVEWFLLRKAYERNELAPNKPDEKELARRRQSYEGGYVKEPERGLWENIVYLDFRSLYPSIIITHNVSPDTLNREGCKEYDVAPQVGHRFCKDFPGFIPSLLGDLLEERQKIKKKMKATIDPIERKLLDYRQRAIKILANSYYGYYGYARARWYCKECAESVTAWGREYITMTIKEIEEKYGFKVIYSDTDGFFATIPGADAETVKKKAMEFLKYINAKLPGALELEYEGFYKRGFFVTKKKYAVIDEEGKITTRGLEIVRRDWSEIAKETQARVLEALLKDGDVEKAVRIVKEVTEKLSKYEVPPEKLVIHEQITRDLKDYKATGPHVAVAKRLAARGVKIRPGTVISYIVLKGSGRIGDRAIPFDEFDPTKHKYDAEYYIENQVLPAVERILRAFGYRKEDLRYQKTRQVGLSAWLKPKGT

SEQ ID NO: 2377 - protein, 774 aa, synthetic construct
MILDTDLITEDGKPVMRIFKKENGEFKIEYDRTFEWYFYALLKDDSAIEEVKKITAERHGTVVTVKRVEKVQKKFLGRPVEVWKLYFTHYQDIPAIADKIREHPAVIDIYEYDIPFAKRYLIDKGLVPMEGDEELKMLAFDIETLYHEGEEFAEGPILMISYADEEGARVITWKNVDLPYVDVVSTEREMIKRFLRVVKEKDPDVLITYNGDNFDFAYLKKRCEKLGINFALGRDGSEPKIQRMGDRFAVEVKGRIHFDLYPVIRRTINLPTYTLEAVYEAVFGQPKEKVYAEEITTAWETGENLERVARYSMEDAKVTYELGKEFLPMEAQLSRLIGQSLWDVSRSSTGNLVEWFLLRKAYERNELAPNKPDEKELARRRQSYEGGYVKEPERGLWENIVYLDFRSLYPSIIITHNVSPDTLNREGCKEYDVAPQVGHRFCKDFPGFIPSLLGDLLEERQKIKKKMKATIDPIERKLLDYRQRAIKILANSYYGYYGYARARWYCKECAESVTAWGREYITMTIKEIEEKYGFKVIYSDTDGFFATIPGADAETVKKKAMEFLKYINAKLPGALELEYEGFYKRGFFVTKKKYAVIDEEGKITTRGLEIVRRDWSEIAKETQARVLEALLKDGDVEKAVRIVKEVTEKLSKYEVPPEKLVIHEQITRDLKDYKATGPHVAVAKRLAARGVKIRPGTVISYIVLKGSGRIGDRAIPFDEFDPTKHKYDAEYYIENQVLPAVERILRAFGYRKEDLRYQKTRQVGLSAWLKPKGT

SEQ ID NO: 2378 - protein, 774 aa, synthetic construct
MILDTDLITEDGKPVMRIFKKENGEFKIEYDRTFEWYFYALLKDDSAIEEVKKITAERHGTVVTVKRVEKVQKKFLGRPVEVWKLYFTHYQDIPAIHDKIREHPAVIDIYEYDIPFAKRYLIDKGLVPMEGDEELKMLAFDIETLYHEGEEFAEGPILMISYADEEGARVITWKNVDLPYVDVVSTEREMIKRFLRVVKEKDPDVLITYNGDNFDFAYLKKRCEKLGINFALGRDGSEPKIQRMGDRFAVEVKGRIHFDLYPVIRRTINLPTYTLEAVYEAVFGQPKEKVYAEEITTAWETGENLERVARYSMEDAKVTYELGKEFLPMEAQLSRLIGQSLWDVSRSSTGNLVEWFLLRKAYERNELAPNKPDEKELARRRQSYEGGYVKEPERGLWENIVYLDFRSLYPSIIITHNVSPDTLNREGCKEYDVAPQVGHRFCKDFPGFIPSLLGDLLEERQKIKKKMKATIDPIERKLLDYRQRAIKILANSYYGYYGYARARWYCKECAESVTAWGREYITMTIKEIEEKYGFKVIYSDTDGFFATIPGADAETVKKKAMEFLKYINAKLPGALELEYEGFYKRGFFVTKKKYAVIDEEGKITTRGLEIVRRDWSEIAKETQARVLEALLKDGDVEKAVRIVKEVTEKLSKYEVPPEKLVIHEQITRDLKDYKATGPHVAVAKRLAARGVKIRPGTVISYIVLKGSGRIGDRAIPFDEFDPTKHKYDAEYYIENQVLPAVERILRAFGYRKEDLRYQKTRQVGLSAWLKPKGT

SEQ ID NO: 2379 - protein, 774 aa, synthetic construct
MILDTDLITEDGKPVMRIFKKENGEFKIEYDRTFEWYFYALLKDDSAIEEVKKITAERHGTVVTVKRVEKVQKKFLGRPVEVWKLYFTHPQDVPAIADKIREHPAVIDIYEYDIPFAKRYLIDKGLVPMEGDEELKMLAFDIETLYHEGEEFAEGPILMISYADEEGARVITWKNVDLPYVDVVSTEREMIKRFLRVVKEKDPDVLITYNGDNFDFAYLKKRCEKLGINFALGRDGSEPKIQRMGDRFAVEVKGRIHFDLYPVIRRTINLPTYTLEAVYEAVFGQPKEKVYAEEITTAWETGENLERVARYSMEDAKVTYELGKEFLPMEAQLSRLIGQSLWDVSRSSTGNLVEWFLLRKAYERNELAPNKPDEKELARRRQSYEGGYVKEPERGLWENIVYLDFRSLYPSIIITHNVSPDTLNREGCKEYDVAPQVGHRFCKDFPGFIPSLLGDLLEERQKIKKKMKATIDPIERKLLDYRQRAIKILANSYYGYYGYARARWYCKECAESVTAWGREYITMTIKEIEEKYGFKVIYSDTDGFFATIPGADAETVKKKAMEFLKYINAKLPGALELEYEGFYKRGFFVTKKKYAVIDEEGKITTRGLEIVRRDWSEIAKETQARVLEALLKDGDVEKAVRIVKEVTEKLSKYEVPPEKLVIHEQITRDLKDYKATGPHVAVAKRLAARGVKIRPGTVISYIVLKGSGRIGDRAIPFDEFDPTKHKYDAEYYIENQVLPAVERILRAFGYRKEDLRYQKTRQVGLSAWLKPKGT

SEQ ID NO: 2380 - protein, 774 aa, synthetic construct
MILDTDLITEDGKPVMRIFKKENGEFKIEYDRTFEWYFYALLKDDSAIEEVKKITAERHGTVVTVKRVEKVQKKFLGRPVEVWKLYFTHPQDVPAIFDKIREHPAVIDIYEYDIPFAKRYLIDKGLVPMEGDEELKMLAFDIETLYHEGEEFAEGPILMISYADEEGARVITWKNVDLPYVDVVSTEREMIKRFLRVVKEKDPDVLITYNGDNFDFAYLKKRCEKLGINFALGRDGSEPKIQRMGDRFAVEVKGRIHFDLYPVIRRTINLPTYTLEAVYEAVFGQPKEKVYAEEITTAWETGENLERVARYSMEDAKVTYELGKEFLPMEAQLSRLIGQSLWDVSRSSTGNLVEWFLLRKAYERNELAPNKPDEKELARRRQSYEGGYVKEPERGLWENIVYLDFRSLYPSIIITHNVSPDTLNREGCKEYDVAPQVGHRFCKDFPGFIPSLLGDLLEERQKIKKKMKATIDPIERKLLDYRQRAIKILANSYYGYYGYARARWYCKECAESVTAWGREYITMTIKEIEEKYGFKVIYSDTDGFFATIPGADAETVKKKAMEFLKYINAKLPGALELEYEGFYKRGFFVTKKKYAVIDEEGKITTRGLEIVRRDWSEIAKETQARVLEALLKDGDVEKAVRIVKEVTEKLSKYEVPPEKLVIHEQITRDLKDYKATGPHVAVAKRLAARGVKIRPGTVISYIVLKGSGRIGDRAIPFDEFDPTKHKYDAEYYIENQVLPAVERILRAFGYRKEDLRYQKTRQVGLSAWLKPKGT

SEQ ID NO: 2381 - protein, 774 aa, synthetic construct
MILDTDLITEDGKPVMRIFKKENGEFKIEYDRTFEWYFYALLKDDSAIEEVKKITAERHGTVVTVKRVEKVQKKFLGRPVEVWKLYFTHPQDVPAIHDKIREHPAVIDIYEYDIPFAKRYLIDKGLVPMEGDEELKMLAFDIETLYHEGEEFAEGPILMISYADEEGARVITWKNVDLPYVDVVSTEREMIKRFLRVVKEKDPDVLITYNGDNFDFAYLKKRCEKLGINFALGRDGSEPKIQRMGDRFAVEVKGRIHFDLYPVIRRTINLPTYTLEAVYEAVFGQPKEKVYAEEITTAWETGENLERVARYSMEDAKVTYELGKEFLPMEAQLSRLIGQSLWDVSRSSTGNLVEWFLLRKAYERNELAPNKPDEKELARRRQSYEGGYVKEPERGLWENIVYLDFRSLYPSIIITHNVSPDTLNREGCKEYDVAPQVGHRFCKDFPGFIPSLLGDLLEERQKIKKKMKATIDPIERKLLDYRQRAIKILANSYYGYYGYARARWYCKECAESVTAWGREYITMTIKEIEEKYGFKVIYSDTDGFFATIPGADAETVKKKAMEFLKYINAKLPGALELEYEGFYKRGFFVTKKKYAVIDEEGKITTRGLEIVRRDWSEIAKETQARVLEALLKDGDVEKAVRIVKEVTEKLSKYEVPPEKLVIHEQITRDLKDYKATGPHVAVAKRLAARGVKIRPGTVISYIVLKGSGRIGDRAIPFDEFDPTKHKYDAEYYIENQVLPAVERILRAFGYRKEDLRYQKTRQVGLSAWLKPKGT

SEQ ID NO: 2382 - protein, 774 aa, synthetic construct
MILDTDLITEDGKPVMRIFKKENGEFKIEYDRTFEWYFYALLKDDSAIEEVKKITAERHGTVVTVKRVEKVQKKFLGRPVEVWKLYFTHPQDVPAIWDKIREHPAVIDIYEYDIPFAKRYLIDKGLVPMEGDEELKMLAFDIETLYHEGEEFAEGPILMISYADEEGARVITWKNVDLPYVDVVSTEREMIKRFLRVVKEKDPDVLITYNGDNFDFAYLKKRCEKLGINFALGRDGSEPKIQRMGDRFAVEVKGRIHFDLYPVIRRTINLPTYTLEAVYEAVFGQPKEKVYAEEITTAWETGENLERVARYSMEDAKVTYELGKEFLPMEAQLSRLIGQSLWDVSRSSTGNLVEWFLLRKAYERNELAPNKPDEKELARRRQSYEGGYVKEPERGLWENIVYLDFRSLYPSIIITHNVSPDTLNREGCKEYDVAPQVGHRFCKDFPGFIPSLLGDLLEERQKIKKKMKATIDPIERKLLDYRQRAIKILANSYYGYYGYARARWYCKECAESVTAWGREYITMTIKEIEEKYGFKVIYSDTDGFFATIPGADAETVKKKAMEFLKYINAKLPGALELEYEGFYKRGFFVTKKKYAVIDEEGKITTRGLEIVRRDWSEIAKETQARVLEALLKDGDVEKAVRIVKEVTEKLSKYEVPPEKLVIHEQITRDLKDYKATGPHVAVAKRLAARGVKIRPGTVISYIVLKGSGRIGDRAIPFDEFDPTKHKYDAEYYIENQVLPAVERILRAFGYRKEDLRYQKTRQVGLSAWLKPKGT

SEQ ID NO: 2383 - protein, 774 aa, synthetic construct
MILDTDLITEDGKPVMRIFKKENGEFKIEYDRTFEWYFYALLKDDSAIEEVKKITAERHGTVVTVKRVEKVQKKFLGRPVEVWKLYFTHPQDIPAIRDKIREHPAVIDIYEYDIPFAKRYLIDKGLVPMEGDEELKMLAFDIETLYHEGEEFAEGPILMISYADEEGARVITWKNVDLPYVDVVSTEREMIKRFLRVVKEKDPDVLITYNGDNFDFAYLKKRCEKLGINFALGRDGSEPKIQRMGDRFAVEVKGRIHFDLYPVIRRTINLPTYTLEAVYEAVFGQPKEKVYAEEITTAWETGENLERVARYSMEDAKVTYELGKEFLPMEAQLSRLIGQSLWDVSRSSTGNLVEWFLLRKAYERNELAPNKPDEKELARRRQSYEGGYVKEPERGLWENIVYLDFRSLYPSIIITHNVSPDTLNREGCKEYDVAPQVGHRFCKDFPGFIPSLLGDLLEERQKIKKKMKATIDPIERKLLDYRQRAIKILANSYYGYYGYARARWYCKECAESVTAWGREYITMTIKEIEEKYGFKVIYSDTDGFFATIPGADAETVKKKAMEFLKYINAKLPGALELEYEGFYKRGFFVTKKKYAVIDEEGKITTRGLEIVRRDWSEIAKETQARVLEALLKDGDVEKAVRIVKEVTEKLSKYEVPPEKLVIHEQITRDLKDYKATGPHVAVAKRLAARGVKIRPGTVISYIVLKGSGRIGDRAIPFDEFDPTKHKYDAEYYIENQVLPAVERILRAFGYRKEDLRYQKTRQVGLSAWLKPKGT

SEQ ID NO: 2384 - protein, 774 aa, synthetic construct
MILDTDLITEDGKPVMRIFKKENGEFKIEYDRTFEWYFYALLKDDSAIEEVKKITAERHGTVVTVKRVEKVQKKFLGRPVEVWKLYFTHPQDIPAIADKIREHPAVIDIYEYDIPFAKRYLIDKGLVPMEGDEELKMLAFDIETLYHEGEEFAEGPILMISYADEEGARVITWKNVDLPYVDVVSTEREMIKRFLRVVKEKDPDVLITYNGDNFDFAYLKKRCEKLGINFALGRDGSEPKIQRMGDRFAVEVKGRIHFDLYPVIRRTINLPTYTLEAVYEAVFGQPKEKVYAEEITTAWETGENLERVARYSMEDAKVTYELGKEFLPMEAQLSRLIGQSLWDVSRSSTGNLVEWFLLRKAYERNELAPNKPDEKELARRRQSYEGGYVKEPERGLWENIVYLDFRSLYPSIIITHNVSPDTLNREGCKEYDVAPQVGHRFCKDFPGFIPSLLGDLLEERQKIKKKMKATIDPIERKLLDYRQRAIKILANSYYGYYGYARARWYCKECAESVTAWGREYITMTIKEIEEKYGFKVIYSDTDGFFATIPGADAETVKKKAMEFLKYINAKLPGALELEYEGFYKRGFFVTKKKYAVIDEEGKITTRGLEIVRRDWSEIAKETQARVLEALLKDGDVEKAVRIVKEVTEKLSKYEVPPEKLVIHEQITRDLKDYKATGPHVAVAKRLAARGVKIRPGTVISYIVLKGSGRIGDRAIPFDEFDPTKHKYDAEYYIENQVLPAVERILRAFGYRKEDLRYQKTRQVGLSAWLKPKGT

SEQ ID NO: 2385 - protein, 774 aa, synthetic construct
MILDTDLITEDGKPVMRIFKKENGEFKIEYDRTFEWYFYALLKDDSAIEEVKKITAERHGTVVTVKRVEKVQKKFLGRPVEVWKLYFTHPQDIPAIFDKIREHPAVIDIYEYDIPFAKRYLIDKGLVPMEGDEELKMLAFDIETLYHEGEEFAEGPILMISYADEEGARVITWKNVDLPYVDVVSTEREMIKRFLRVVKEKDPDVLITYNGDNFDFAYLKKRCEKLGINFALGRDGSEPKIQRMGDRFAVEVKGRIHFDLYPVIRRTINLPTYTLEAVYEAVFGQPKEKVYAEEITTAWETGENLERVARYSMEDAKVTYELGKEFLPMEAQLSRLIGQSLWDVSRSSTGNLVEWFLLRKAYERNELAPNKPDEKELARRRQSYEGGYVKEPERGLWENIVYLDFRSLYPSIIITHNVSPDTLNREGCKEYDVAPQVGHRFCKDFPGFIPSLLGDLLEERQKIKKKMKATIDPIERKLLDYRQRAIKILANSYYGYYGYARARWYCKECAESVTAWGREYITMTIKEIEEKYGFKVIYSDTDGFFATIPGADAETVKKKAMEFLKYINAKLPGALELEYEGFYKRGFFVTKKKYAVIDEEGKITTRGLEIVRRDWSEIAKETQARVLEALLKDGDVEKAVRIVKEVTEKLSKYEVPPEKLVIHEQITRDLKDYKATGPHVAVAKRLAARGVKIRPGTVISYIVLKGSGRIGDRAIPFDEFDPTKHKYDAEYYIENQVLPAVERILRAFGYRKEDLRYQKTRQVGLSAWLKPKGT

SEQ ID NO: 2386 - protein, 774 aa, synthetic construct
MILDTDLITEDGKPVMRIFKKENGEFKIEYDRTFEWYFYALLKDDSAIEEVKKITAERHGTVVTVKRVEKVQKKFLGRPVEVWKLYFTHPQDIPAIHDKIREHPAVIDIYEYDIPFAKRYLIDKGLVPMEGDEELKMLAFDIETLYHEGEEFAEGPILMISYADEEGARVITWKNVDLPYVDVVSTEREMIKRFLRVVKEKDPDVLITYNGDNFDFAYLKKRCEKLGINFALGRDGSEPKIQRMGDRFAVEVKGRIHFDLYPVIRRTINLPTYTLEAVYEAVFGQPKEKVYAEEITTAWETGENLERVARYSMEDAKVTYELGKEFLPMEAQLSRLIGQSLWDVSRSSTGNLVEWFLLRKAYERNELAPNKPDEKELARRRQSYEGGYVKEPERGLWENIVYLDFRSLYPSIIITHNVSPDTLNREGCKEYDVAPQVGHRFCKDFPGFIPSLLGDLLEERQKIKKKMKATIDPIERKLLDYRQRAIKILANSYYGYYGYARARWYCKECAESVTAWGREYITMTIKEIEEKYGFKVIYSDTDGFFATIPGADAETVKKKAMEFLKYINAKLPGALELEYEGFYKRGFFVTKKKYAVIDEEGKITTRGLEIVRRDWSEIAKETQARVLEALLKDGDVEKAVRIVKEVTEKLSKYEVPPEKLVIHEQITRDLKDYKATGPHVAVAKRLAARGVKIRPGTVISYIVLKGSGRIGDRAIPFDEFDPTKHKYDAEYYIENQVLPAVERILRAFGYRKEDLRYQKTRQVGLSAWLKPKGT

SEQ ID NO: 2387 - protein, 774 aa, synthetic construct
MILDTDLITEDGKPVMRIFKKENGEFKIEYDRTFEWYFYALLKDDSAIEEVKKITAERHGTVVTVKRVEKVQKKFLGRPVEVWKLYFTHPQDIPAIWDKIREHPAVIDIYEYDIPFAKRYLIDKGLVPMEGDEELKMLAFDIETLYHEGEEFAEGPILMISYADEEGARVITWKNVDLPYVDVVSTEREMIKRFLRVVKEKDPDVLITYNGDNFDFAYLKKRCEKLGINFALGRDGSEPKIQRMGDRFAVEVKGRIHFDLYPVIRRTINLPTYTLEAVYEAVFGQPKEKVYAEEITTAWETGENLERVARYSMEDAKVTYELGKEFLPMEAQLSRLIGQSLWDVSRSSTGNLVEWFLLRKAYERNELAPNKPDEKELARRRQSYEGGYVKEPERGLWENIVYLDFRSLYPSIIITHNVSPDTLNREGCKEYDVAPQVGHRFCKDFPGFIPSLLGDLLEERQKIKKKMKATIDPIERKLLDYRQRAIKILANSYYGYYGYARARWYCKECAESVTAWGREYITMTIKEIEEKYGFKVIYSDTDGFFATIPGADAETVKKKAMEFLKYINAKLPGALELEYEGFYKRGFFVTKKKYAVIDEEGKITTRGLEIVRRDWSEIAKETQARVLEALLKDGDVEKAVRIVKEVTEKLSKYEVPPEKLVIHEQITRDLKDYKATGPHVAVAKRLAARGVKIRPGTVISYIVLKGSGRIGDRAIPFDEFDPTKHKYDAEYYIENQVLPAVERILRAFGYRKEDLRYQKTRQVGLSAWLKPKGT

SEQ ID NO: 2388 - protein, 774 aa, synthetic construct
MILDTDLITEDGKPVMRIFKKENGEFKIEYDRTFEWYFYALLKDDSAIEEVKKITAERHGTVVTVKRVEKVQKKFLGRPVEVWKLYFTHPQDKPAIRDKIREHPAVIDIYEYDIPFAKRYLIDKGLVPMEGDEELKMLAFDIETLYHEGEEFAEGPILMISYADEEGARVITWKNVDLPYVDVVSTEREMIKRFLRVVKEKDPDVLITYNGDNFDFAYLKKRCEKLGINFALGRDGSEPKIQRMGDRFAVEVKGRIHFDLYPVIRRTINLPTYTLEAVYEAVFGQPKEKVYAEEITTAWETGENLERVARYSMEDAKVTYELGKEFLPMEAQLSRLIGQSLWDVSRSSTGNLVEWFLLRKAYERNELAPNKPDEKELARRRQSYEGGYVKEPERGLWENIVYLDFRSLYPSIIITHNVSPDTLNREGCKEYDVAPQVGHRFCKDFPGFIPSLLGDLLEERQKIKKKMKATIDPIERKLLDYRQRAIKILANSYYGYYGYARARWYCKECAESVTAWGREYITMTIKEIEEKYGFKVIYSDTDGFFATIPGADAETVKKKAMEFLKYINAKLPGALELEYEGFYKRGFFVTKKKYAVIDEEGKITTRGLEIVRRDWSEIAKETQARVLEALLKDGDVEKAVRIVKEVTEKLSKYEVPPEKLVIHEQITRDLKDYKATGPHVAVAKRLAARGVKIRPGTVISYIVLKGSGRIGDRAIPFDEFDPTKHKYDAEYYIENQVLPAVERILRAFGYRKEDLRYQKTRQVGLSAWLKPKGT

SEQ ID NO: 2389 - protein, 774 aa, synthetic construct
MILDTDLITEDGKPVMRIFKKENGEFKIEYDRTFEWYFYALLKDDSAIEEVKKITAERHGTVVTVKRVEKVQKKFLGRPVEVWKLYFTHPQDQPAIRDKIREHPAVIDIYEYDIPFAKRYLIDKGLVPMEGDEELKMLAFDIETLYHEGEEFAEGPILMISYADEEGARVITWKNVDLPYVDVVSTEREMIKRFLRVVKEKDPDVLITYNGDNFDFAYLKKRCEKLGINFALGRDGSEPKIQRMGDRFAVEVKGRIHFDLYPVIRRTINLPTYTLEAVYEAVFGQPKEKVYAEEITTAWETGENLERVARYSMEDAKVTYELGKEFLPMEAQLSRLIGQSLWDVSRSSTGNLVEWFLLRKAYERNELAPNKPDEKELARRRQSYEGGYVKEPERGLWENIVYLDFRSLYPSIIITHNVSPDTLNREGCKEYDVAPQVGHRFCKDFPGFIPSLLGDLLEERQKIKKKMKATIDPIERKLLDYRQRAIKILANSYYGYYGYARARWYCKECAESVTAWGREYITMTIKEIEEKYGFKVIYSDTDGFFATIPGADAETVKKKAMEFLKYINAKLPGALELEYEGFYKRGFFVTKKKYAVIDEEGKITTRGLEIVRRDWSEIAKETQARVLEALLKDGDVEKAVRIVKEVTEKLSKYEVPPEKLVIHEQITRDLKDYKATGPHVAVAKRLAARGVKIRPGTVISYIVLKGSGRIGDRAIPFDEFDPTKHKYDAEYYIENQVLPAVERILRAFGYRKEDLRYQKTRQVGLSAWLKPKGT

SEQ ID NO: 2390 - protein, 774 aa, synthetic construct
MILDTDLITEDGKPVMRIFKKENGEFKIEYDRTFEWYFYALLKDDSAIEEVKKITAERHGTVVTVKRVEKVQKKFLGRPVEVWKLYFTHPQDQPAIADKIREHPAVIDIYEYDIPFAKRYLIDKGLVPMEGDEELKMLAFDIETLYHEGEEFAEGPILMISYADEEGARVITWKNVDLPYVDVVSTEREMIKRFLRVVKEKDPDVLITYNGDNFDFAYLKKRCEKLGINFALGRDGSEPKIQRMGDRFAVEVKGRIHFDLYPVIRRTINLPTYTLEAVYEAVFGQPKEKVYAEEITTAWETGENLERVARYSMEDAKVTYELGKEFLPMEAQLSRLIGQSLWDVSRSSTGNLVEWFLLRKAYERNELAPNKPDEKELARRRQSYEGGYVKEPERGLWENIVYLDFRSLYPSIIITHNVSPDTLNREGCKEYDVAPQVGHRFCKDFPGFIPSLLGDLLEERQKIKKKMKATIDPIERKLLDYRQRAIKILANSYYGYYGYARARWYCKECAESVTAWGREYITMTIKEIEEKYGFKVIYSDTDGFFATIPGADAETVKKKAMEFLKYINAKLPGALELEYEGFYKRGFFVTKKKYAVIDEEGKITTRGLEIVRRDWSEIAKETQARVLEALLKDGDVEKAVRIVKEVTEKLSKYEVPPEKLVIHEQITRDLKDYKATGPHVAVAKRLAARGVKIRPGTVISYIVLKGSGRIGDRAIPFDEFDPTKHKYDAEYYIENQVLPAVERILRAFGYRKEDLRYQKTRQVGLSAWLKPKGT

SEQ ID NO: 2391 - protein, 774 aa, synthetic construct
MILDTDLITEDGKPVMRIFKKENGEFKIEYDRTFEWYFYALLKDDSAIEEVKKITAERHGTVVTVKRVEKVQKKFLGRPVEVWKLYFTHPQDQPAIFDKIREHPAVIDIYEYDIPFAKRYLIDKGLVPMEGDEELKMLAFDIETLYHEGEEFAEGPILMISYADEEGARVITWKNVDLPYVDVVSTEREMIKRFLRVVKEKDPDVLITYNGDNFDFAYLKKRCEKLGINFALGRDGSEPKIQRMGDRFAVEVKGRIHFDLYPVIRRTINLPTYTLEAVYEAVFGQPKEKVYAEEITTAWETGENLERVARYSMEDAKVTYELGKEFLPMEAQLSRLIGQSLWDVSRSSTGNLVEWFLLRKAYERNELAPNKPDEKELARRRQSYEGGYVKEPERGLWENIVYLDFRSLYPSIIITHNVSPDTLNREGCKEYDVAPQVGHRFCKDFPGFIPSLLGDLLEERQKIKKKMKATIDPIERKLLDYRQRAIKILANSYYGYYGYARARWYCKECAESVTAWGREYITMTIKEIEEKYGFKVIYSDTDGFFATIPGADAETVKKKAMEFLKYINAKLPGALELEYEGFYKRGFFVTKKKYAVIDEEGKITTRGLEIVRRDWSEIAKETQARVLEALLKDGDVEKAVRIVKEVTEKLSKYEVPPEKLVIHEQITRDLKDYKATGPHVAVAKRLAARGVKIRPGTVISYIVLKGSGRIGDRAIPFDEFDPTKHKYDAEYYIENQVLPAVERILRAFGYRKEDLRYQKTRQVGLSAWLKPKGT

SEQ ID NO: 2392 - protein, 774 aa, synthetic construct
MILDTDLITEDGKPVMRIFKKENGEFKIEYDRTFEWYFYALLKDDSAIEEVKKITAERHGTVVTVKRVEKVQKKFLGRPVEVWKLYFTHPQDQPAIWDKIREHPAVIDIYEYDIPFAKRYLIDKGLVPMEGDEELKMLAFDIETLYHEGEEFAEGPILMISYADEEGARVITWKNVDLPYVDVVSTEREMIKRFLRVVKEKDPDVLITYNGDNFDFAYLKKRCEKLGINFALGRDGSEPKIQRMGDRFAVEVKGRIHFDLYPVIRRTINLPTYTLEAVYEAVFGQPKEKVYAEEITTAWETGENLERVARYSMEDAKVTYELGKEFLPMEAQLSRLIGQSLWDVSRSSTGNLVEWFLLRKAYERNELAPNKPDEKELARRRQSYEGGYVKEPERGLWENIVYLDFRSLYPSIIITHNVSPDTLNREGCKEYDVAPQVGHRFCKDFPGFIPSLLGDLLEERQKIKKKMKATIDPIERKLLDYRQRAIKILANSYYGYYGYARARWYCKECAESVTAWGREYITMTIKEIEEKYGFKVIYSDTDGFFATIPGADAETVKKKAMEFLKYINAKLPGALELEYEGFYKRGFFVTKKKYAVIDEEGKITTRGLEIVRRDWSEIAKETQARVLEALLKDGDVEKAVRIVKEVTEKLSKYEVPPEKLVIHEQITRDLKDYKATGPHVAVAKRLAARGVKIRPGTVISYIVLKGSGRIGDRAIPFDEFDPTKHKYDAEYYIENQVLPAVERILRAFGYRKEDLRYQKTRQVGLSAWLKPKGT

SEQ ID NO: 2393 - protein, 774 aa, synthetic construct
MILDTDLITEDGKPVMRIFKKENGEFKIEYDRTFEWYFYALLKDDSAIEEVKKITAERHGTVVTVKRVEKVQKKFLGRPVEVWKLYFTHPQDRPAIRDKIREHPAVIDIYEYDIPFAKRYLIDKGLVPMEGDEELKMLAFDIETLYHEGEEFAEGPILMISYADEEGARVITWKNVDLPYVDVVSTEREMIKRFLRVVKEKDPDVLITYNGDNFDFAYLKKRCEKLGINFALGRDGSEPKIQRMGDRFAVEVKGRIHFDLYPVIRRTINLPTYTLEAVYEAVFGQPKEKVYAEEITTAWETGENLERVARYSMEDAKVTYELGKEFLPMEAQLSRLIGQSLWDVSRSSTGNLVEWFLLRKAYERNELAPNKPDEKELARRRQSYEGGYVKEPERGLWENIVYLDFRSLYPSIIITHNVSPDTLNREGCKEYDVAPQVGHRFCKDFPGFIPSLLGDLLEERQKIKKKMKATIDPIERKLLDYRQRAIKILANSYYGYYGYARARWYCKECAESVTAWGREYITMTIKEIEEKYGFKVIYSDTDGFFATIPGADAETVKKKAMEFLKYINAKLPGALELEYEGFYKRGFFVTKKKYAVIDEEGKITTRGLEIVRRDWSEIAKETQARVLEALLKDGDVEKAVRIVKEVTEKLSKYEVPPEKLVIHEQITRDLKDYKATGPHVAVAKRLAARGVKIRPGTVISYIVLKGSGRIGDRAIPFDEFDPTKHKYDAEYYIENQVLPAVERILRAFGYRKEDLRYQKTRQVGLSAWLKPKGT

SEQ ID NO: 2394 - protein, 774 aa, synthetic construct
MILDTDLITEDGKPVMRIFKKENGEFKIEYDRTFEWYFYALLKDDSAIEEVKKITAERHGTVVTVKRVEKVQKKFLGRPVEVWKLYFTHPQDRPAIADKIREHPAVIDIYEYDIPFAKRYLIDKGLVPMEGDEELKMLAFDIETLYHEGEEFAEGPILMISYADEEGARVITWKNVDLPYVDVVSTEREMIKRFLRVVKEKDPDVLITYNGDNFDFAYLKKRCEKLGINFALGRDGSEPKIQRMGDRFAVEVKGRIHFDLYPVIRRTINLPTYTLEAVYEAVFGQPKEKVYAEEITTAWETGENLERVARYSMEDAKVTYELGKEFLPMEAQLSRLIGQSLWDVSRSSTGNLVEWFLLRKAYERNELAPNKPDEKELARRRQSYEGGYVKEPERGLWENIVYLDFRSLYPSIIITHNVSPDTLNREGCKEYDVAPQVGHRFCKDFPGFIPSLLGDLLEERQKIKKKMKATIDPIERKLLDYRQRAIKILANSYYGYYGYARARWYCKECAESVTAWGREYITMTIKEIEEKYGFKVIYSDTDGFFATIPGADAETVKKKAMEFLKYINAKLPGALELEYEGFYKRGFFVTKKKYAVIDEEGKITTRGLEIVRRDWSEIAKETQARVLEALLKDGDVEKAVRIVKEVTEKLSKYEVPPEKLVIHEQITRDLKDYKATGPHVAVAKRLAARGVKIRPGTVISYIVLKGSGRIGDRAIPFDEFDPTKHKYDAEYYIENQVLPAVERILRAFGYRKEDLRYQKTRQVGLSAWLKPKGT

SEQ ID NO: 2395 - protein, 774 aa, synthetic construct
MILDTDLITEDGKPVMRIFKKENGEFKIEYDRTFEWYFYALLKDDSAIEEVKKITAERHGTVVTVKRVEKVQKKFLGRPVEVWKLYFTHPQDRPAIADKIREHPAVIDIYEYDIPFAKQYLIDKGLVPMEGDEELKMLAFDIETLYHEGEEFAEGPILMISYADEEGARVITWKNVDLPYVDVVSTEREMIKRFLRVVKEKDPDVLITYNGDNFDFAYLKKRCEKLGINFALGRDGSEPKIQRMGDRFAVEVKGRIHFDLYPVIRRTINLPTYTLEAVYEAVFGQPKEKVYAEEITTAWETGENLERVARYSMEDAKVTYELGKEFLPMEAQLSRLIGQSLWDVSRSSTGNLVEWFLLRKAYERNELAPNKPDEKELARRRQSYEGGYVKEPERGLWENIVYLDFRSLYPSIIITHNVSPDTLNREGCKEYDVAPQVGHRFCKDFPGFIPSLLGDLLEERQKIKKKMKATIDPIERKLLDYRQRAIKILANSYYGYYGYARARWYCKECAESVTAWGREYITMTIKEIEEKYGFKVIYSDTDGFFATIPGADAETVKKKAMEFLKYINAKLPGALELEYEGFYKRGFFVTKKKYAVIDEEGKITTRGLEIVRRDWSEIAKETQARVLEALLKDGDVEKAVRIVKEVTEKLSKYEVPPEKLVIHEQITRDLKDYKATGPHVAVAKRLAARGVKIRPGTVISYIVLKGSGRIGDRAIPFDEFDPTKHKYDAEYYIENQVLPAVERILRAFGYRKEDLRYQKTRQVGLSAWLKPKGT

SEQ ID NO: 2396 - protein, 774 aa, synthetic construct
MILDTDLITEDGKPVMRIFKKENGEFKIEYDRTFEWYFYALLKDDSAIEEVKKITAERHGTVVTVKRVEKVQKKFLGRPVEVWKLYFTHPQDRPAIFDKIREHPAVIDIYEYDIPFAKRYLIDKGLVPMEGDEELKMLAFDIETLYHEGEEFAEGPILMISYADEEGARVITWKNVDLPYVDVVSTEREMIKRFLRVVKEKDPDVLITYNGDNFDFAYLKKRCEKLGINFALGRDGSEPKIQRMGDRFAVEVKGRIHFDLYPVIRRTINLPTYTLEAVYEAVFGQPKEKVYAEEITTAWETGENLERVARYSMEDAKVTYELGKEFLPMEAQLSRLIGQSLWDVSRSSTGNLVEWFLLRKAYERNELAPNKPDEKELARRRQSYEGGYVKEPERGLWENIVYLDFRSLYPSIIITHNVSPDTLNREGCKEYDVAPQVGHRFCKDFPGFIPSLLGDLLEERQKIKKKMKATIDPIERKLLDYRQRAIKILANSYYGYYGYARARWYCKECAESVTAWGREYITMTIKEIEEKYGFKVIYSDTDGFFATIPGADAETVKKKAMEFLKYINAKLPGALELEYEGFYKRGFFVTKKKYAVIDEEGKITTRGLEIVRRDWSEIAKETQARVLEALLKDGDVEKAVRIVKEVTEKLSKYEVPPEKLVIHEQITRDLKDYKATGPHVAVAKRLAARGVKIRPGTVISYIVLKGSGRIGDRAIPFDEFDPTKHKYDAEYYIENQVLPAVERILRAFGYRKEDLRYQKTRQVGLSAWLKPKGT

SEQ ID NO: 2397 - protein, 774 aa, synthetic construct
MILDTDLITEDGKPVMRIFKKENGEFKIEYDRTFEPYFYALLKDDSAIEEVKKITAERHGTVVTVKRVEKVQKKFLGRPVEVWKLYFTHFQDVPAIRDKIREHPAVIDIYEYDIPFAKRYLIDKGLVPMEGDEELKMLAFDIETLYHEGEEFAEGPILMISYADEEGARVITWKNVDLPYVDVVSTEREMIKRFLRVVKEKDPDVLITYNGDNFDFAYLKKRCEKLGINFALGRDGSEPKIQRMGDRFAVEVKGRIHFDLYPVIRRTINLPTYTLEAVYEAVFGQPKEKVYAEEITTAWETGENLERVARYSMEDAKVTYELGKEFLPMEAQLSRLIGQSLWDVSRSSTGNLVEWFLLRKAYERNELAPNKPDEKELARRRQSYEGGYVKEPERGLWENIVYLDFRSLYPSIIITHNVSPDTLNREGCKEYDVAPQVGHRFCKDFPGFIPSLLGDLLEERQKIKKKMKATIDPIERKLLDYRQRAIKILANSYYGYYGYARARWYCKECAESVTAWGREYITMTIKEIEEKYGFKVIYSDTDGFFATIPGADAETVKKKAMEFLKYINAKLPGALELEYEGFYKRGFFVTKKKYAVIDEEGKITTRGLEIVRRDWSEIAKETQARVLEALLKDGDVEKAVRIVKEVTEKLSKYEVPPEKLVIHEQITRDLKDYKATGPHVAVAKRLAARGVKIRPGTVISYIVLKGSGRIGDRAIPFDEFDPTKHKYDAEYYIENQVLPAVERILRAFGYRKEDLRYQKTRQVGLSAWLKPKGT

SEQ ID NO: 2398 - protein, 774 aa, synthetic construct
MILDTDLITEDGKPVMRIFKKENGEFKIEYDRTFEPYFYALLKDDSAIEEVKKITAERHGTVVTVKRVEKVQKKFLGRPVEVWKLYFTHFQDVPAIADKIREHPAVIDIYEYDIPFAKRYLIDKGLVPMEGDEELKMLAFDIETLYHEGEEFAEGPILMISYADEEGARVITWKNVDLPYVDVVSTEREMIKRFLRVVKEKDPDVLITYNGDNFDFAYLKKRCEKLGINFALGRDGSEPKIQRMGDRFAVEVKGRIHFDLYPVIRRTINLPTYTLEAVYEAVFGQPKEKVYAEEITTAWETGENLERVARYSMEDAKVTYELGKEFLPMEAQLSRLIGQSLWDVSRSSTGNLVEWFLLRKAYERNELAPNKPDEKELARRRQSYEGGYVKEPERGLWENIVYLDFRSLYPSIIITHNVSPDTLNREGCKEYDVAPQVGHRFCKDFPGFIPSLLGDLLEERQKIKKKMKATIDPIERKLLDYRQRAIKILANSYYGYYGYARARWYCKECAESVTAWGREYITMTIKEIEEKYGFKVIYSDTDGFFATIPGADAETVKKKAMEFLKYINAKLPGALELEYEGFYKRGFFVTKKKYAVIDEEGKITTRGLEIVRRDWSEIAKETQARVLEALLKDGDVEKAVRIVKEVTEKLSKYEVPPEKLVIHEQITRDLKDYKATGPHVAVAKRLAARGVKIRPGTVISYIVLKGSGRIGDRAIPFDEFDPTKHKYDAEYYIENQVLPAVERILRAFGYRKEDLRYQKTRQVGLSAWLKPKGT

SEQ ID NO: 2399 - protein, 774 aa, synthetic construct
MILDTDLITEDGKPVMRIFKKENGEFKIEYDRTFEPYFYALLKDDSAIEEVKKITAERHGTVVTVKRVEKVQKKFLGRPVEVWKLYFTHFQDVPAIFDKIREHPAVIDIYEYDIPFAKRYLIDKGLVPMEGDEELKMLAFDIETLYHEGEEFAEGPILMISYADEEGARVITWKNVDLPYVDVVSTEREMIKRFLRVVKEKDPDVLITYNGDNFDFAYLKKRCEKLGINFALGRDGSEPKIQRMGDRFAVEVKGRIHFDLYPVIRRTINLPTYTLEAVYEAVFGQPKEKVYAEEITTAWETGENLERVARYSMEDAKVTYELGKEFLPMEAQLSRLIGQSLWDVSRSSTGNLVEWFLLRKAYERNELAPNKPDEKELARRRQSYEGGYVKEPERGLWENIVYLDFRSLYPSIIITHNVSPDTLNREGCKEYDVAPQVGHRFCKDFPGFIPSLLGDLLEERQKIKKKMKATIDPIERKLLDYRQRAIKILANSYYGYYGYARARWYCKECAESVTAWGREYITMTIKEIEEKYGFKVIYSDTDGFFATIPGADAETVKKKAMEFLKYINAKLPGALELEYEGFYKRGFFVTKKKYAVIDEEGKITTRGLEIVRRDWSEIAKETQARVLEALLKDGDVEKAVRIVKEVTEKLSKYEVPPEKLVIHEQITRDLKDYKATGPHVAVAKRLAARGVKIRPGTVISYIVLKGSGRIGDRAIPFDEFDPTKHKYDAEYYIENQVLPAVERILRAFGYRKEDLRYQKTRQVGLSAWLKPKGT

SEQ ID NO: 2400 - protein, 774 aa, synthetic construct
MILDTDLITEDGKPVMRIFKKENGEFKIEYDRTFEPYFYALLKDDSAIEEVKKITAERHGTVVTVKRVEKVQKKFLGRPVEVWKLYFTHFQDVPAIHDKIREHPAVIDIYEYDIPFAKRYLIDKGLVPMEGDEELKMLAFDIETLYHEGEEFAEGPILMISYADEEGARVITWKNVDLPYVDVVSTEREMIKRFLRVVKEKDPDVLITYNGDNFDFAYLKKRCEKLGINFALGRDGSEPKIQRMGDRFAVEVKGRIHFDLYPVIRRTINLPTYTLEAVYEAVFGQPKEKVYAEEITTAWETGENLERVARYSMEDAKVTYELGKEFLPMEAQLSRLIGQSLWDVSRSSTGNLVEWFLLRKAYERNELAPNKPDEKELARRRQSYEGGYVKEPERGLWENIVYLDFRSLYPSIIITHNVSPDTLNREGCKEYDVAPQVGHRFCKDFPGFIPSLLGDLLEERQKIKKKMKATIDPIERKLLDYRQRAIKILANSYYGYYGYARARWYCKECAESVTAWGREYITMTIKEIEEKYGFKVIYSDTDGFFATIPGADAETVKKKAMEFLKYINAKLPGALELEYEGFYKRGFFVTKKKYAVIDEEGKITTRGLEIVRRDWSEIAKETQARVLEALLKDGDVEKAVRIVKEVTEKLSKYEVPPEKLVIHEQITRDLKDYKATGPHVAVAKRLAARGVKIRPGTVISYIVLKGSGRIGDRAIPFDEFDPTKHKYDAEYYIENQVLPAVERILRAFGYRKEDLRYQKTRQVGLSAWLKPKGT

SEQ ID NO: 2401 - protein, 774 aa, synthetic construct
MILDTDLITEDGKPVMRIFKKENGEFKIEYDRTFEPYFYALLKDDSAIEEVKKITAERHGTVVTVKRVEKVQKKFLGRPVEVWKLYFTHFQDVPAIWDKIREHPAVIDIYEYDIPFAKRYLIDKGLVPMEGDEELKMLAFDIETLYHEGEEFAEGPILMISYADEEGARVITWKNVDLPYVDVVSTEREMIKRFLRVVKEKDPDVLITYNGDNFDFAYLKKRCEKLGINFALGRDGSEPKIQRMGDRFAVEVKGRIHFDLYPVIRRTINLPTYTLEAVYEAVFGQPKEKVYAEEITTAWETGENLERVARYSMEDAKVTYELGKEFLPMEAQLSRLIGQSLWDVSRSSTGNLVEWFLLRKAYERNELAPNKPDEKELARRRQSYEGGYVKEPERGLWENIVYLDFRSLYPSIIITHNVSPDTLNREGCKEYDVAPQVGHRFCKDFPGFIPSLLGDLLEERQKIKKKMKATIDPIERKLLDYRQRAIKILANSYYGYYGYARARWYCKECAESVTAWGREYITMTIKEIEEKYGFKVIYSDTDGFFATIPGADAETVKKKAMEFLKYINAKLPGALELEYEGFYKRGFFVTKKKYAVIDEEGKITTRGLEIVRRDWSEIAKETQARVLEALLKDGDVEKAVRIVKEVTEKLSKYEVPPEKLVIHEQITRDLKDYKATGPHVAVAKRLAARGVKIRPGTVISYIVLKGSGRIGDRAIPFDEFDPTKHKYDAEYYIENQVLPAVERILRAFGYRKEDLRYQKTRQVGLSAWLKPKGT

SEQ ID NO: 2402 - protein, 774 aa, synthetic construct
MILDTDLITEDGKPVMRIFKKENGEFKIEYDRTFEPYFYALLKDDSAIEEVKKITAERHGTVVTVKRVEKVQKKFLGRPVEVWKLYFTHFQDIPAIRDKIREHPAVIDIYEYDIPFAKRYLIDKGLVPMEGDEELKMLAFDIETLYHEGEEFAEGPILMISYADEEGARVITWKNVDLPYVDVVSTEREMIKRFLRVVKEKDPDVLITYNGDNFDFAYLKKRCEKLGINFALGRDGSEPKIQRMGDRFAVEVKGRIHFDLYPVIRRTINLPTYTLEAVYEAVFGQPKEKVYAEEITTAWETGENLERVARYSMEDAKVTYELGKEFLPMEAQLSRLIGQSLWDVSRSSTGNLVEWFLLRKAYERNELAPNKPDEKELARRRQSYEGGYVKEPERGLWENIVYLDFRSLYPSIIITHNVSPDTLNREGCKEYDVAPQVGHRFCKDFPGFIPSLLGDLLEERQKIKKKMKATIDPIERKLLDYRQRAIKILANSYYGYYGYARARWYCKECAESVTAWGREYITMTIKEIEEKYGFKVIYSDTDGFFATIPGADAETVKKKAMEFLKYINAKLPGALELEYEGFYKRGFFVTKKKYAVIDEEGKITTRGLEIVRRDWSEIAKETQARVLEALLKDGDVEKAVRIVKEVTEKLSKYEVPPEKLVIHEQITRDLKDYKATGPHVAVAKRLAARGVKIRPGTVISYIVLKGSGRIGDRAIPFDEFDPTKHKYDAEYYIENQVLPAVERILRAFGYRKEDLRYQKTRQVGLSAWLKPKGT

SEQ ID NO: 2403 - protein, 774 aa, synthetic construct
MILDTDLITEDGKPVMRIFKKENGEFKIEYDRTFEPYFYALLKDDSAIEEVKKITAERHGTVVTVKRVEKVQKKFLGRPVEVWKLYFTHFQDIPAIADKIREHPAVIDIYEYDIPFAKRYLIDKGLVPMEGDEELKMLAFDIETLYHEGEEFAEGPILMISYADEEGARVITWKNVDLPYVDVVSTEREMIKRFLRVVKEKDPDVLITYNGDNFDFAYLKKRCEKLGINFALGRDGSEPKIQRMGDRFAVEVKGRIHFDLYPVIRRTINLPTYTLEAVYEAVFGQPKEKVYAEEITTAWETGENLERVARYSMEDAKVTYELGKEFLPMEAQLSRLIGQSLWDVSRSSTGNLVEWFLLRKAYERNELAPNKPDEKELARRRQSYEGGYVKEPERGLWENIVYLDFRSLYPSIIITHNVSPDTLNREGCKEYDVAPQVGHRFCKDFPGFIPSLLGDLLEERQKIKKKMKATIDPIERKLLDYRQRAIKILANSYYGYYGYARARWYCKECAESVTAWGREYITMTIKEIEEKYGFKVIYSDTDGFFATIPGADAETVKKKAMEFLKYINAKLPGALELEYEGFYKRGFFVTKKKYAVIDEEGKITTRGLEIVRRDWSEIAKETQARVLEALLKDGDVEKAVRIVKEVTEKLSKYEVPPEKLVIHEQITRDLKDYKATGPHVAVAKRLAARGVKIRPGTVISYIVLKGSGRIGDRAIPFDEFDPTKHKYDAEYYIENQVLPAVERILRAFGYRKEDLRYQKTRQVGLSAWLKPKGT

SEQ ID NO: 2404 - protein, 774 aa, synthetic construct
MILDTDLITEDGKPVMRIFKKENGEFKIEYDRTFEPYFYALLKDDSAIEEVKKITAERHGTVVTVKRVEKVQKKFLGRPVEVWKLYFTHFQDIPAIFDKIREHPAVIDIYEYDIPFAKRYLIDKGLVPMEGDEELKMLAFDIETLYHEGEEFAEGPILMISYADEEGARVITWKNVDLPYVDVVSTEREMIKRFLRVVKEKDPDVLITYNGDNFDFAYLKKRCEKLGINFALGRDGSEPKIQRMGDRFAVEVKGRIHFDLYPVIRRTINLPTYTLEAVYEAVFGQPKEKVYAEEITTAWETGENLERVARYSMEDAKVTYELGKEFLPMEAQLSRLIGQSLWDVSRSSTGNLVEWFLLRKAYERNELAPNKPDEKELARRRQSYEGGYVKEPERGLWENIVYLDFRSLYPSIIITHNVSPDTLNREGCKEYDVAPQVGHRFCKDFPGFIPSLLGDLLEERQKIKKKMKATIDPIERKLLDYRQRAIKILANSYYGYYGYARARWYCKECAESVTAWGREYITMTIKEIEEKYGFKVIYSDTDGFFATIPGADAETVKKKAMEFLKYINAKLPGALELEYEGFYKRGFFVTKKKYAVIDEEGKITTRGLEIVRRDWSEIAKETQARVLEALLKDGDVEKAVRIVKEVTEKLSKYEVPPEKLVIHEQITRDLKDYKATGPHVAVAKRLAARGVKIRPGTVISYIVLKGSGRIGDRAIPFDEFDPTKHKYDAEYYIENQVLPAVERILRAFGYRKEDLRYQKTRQVGLSAWLKPKGT

SEQ ID NO: 2405 - protein, 774 aa, synthetic construct
MILDTDLITEDGKPVMRIFKKENGEFKIEYDRTFEPYFYALLKDDSAIEEVKKITAERHGTVVTVKRVEKVQKKFLGRPVEVWKLYFTHFQDIPAIHDKIREHPAVIDIYEYDIPFAKRYLIDKGLVPMEGDEELKMLAFDIETLYHEGEEFAEGPILMISYADEEGARVITWKNVDLPYVDVVSTEREMIKRFLRVVKEKDPDVLITYNGDNFDFAYLKKRCEKLGINFALGRDGSEPKIQRMGDRFAVEVKGRIHFDLYPVIRRTINLPTYTLEAVYEAVFGQPKEKVYAEEITTAWETGENLERVARYSMEDAKVTYELGKEFLPMEAQLSRLIGQSLWDVSRSSTGNLVEWFLLRKAYERNELAPNKPDEKELARRRQSYEGGYVKEPERGLWENIVYLDFRSLYPSIIITHNVSPDTLNREGCKEYDVAPQVGHRFCKDFPGFIPSLLGDLLEERQKIKKKMKATIDPIERKLLDYRQRAIKILANSYYGYYGYARARWYCKECAESVTAWGREYITMTIKEIEEKYGFKVIYSDTDGFFATIPGADAETVKKKAMEFLKYINAKLPGALELEYEGFYKRGFFVTKKKYAVIDEEGKITTRGLEIVRRDWSEIAKETQARVLEALLKDGDVEKAVRIVKEVTEKLSKYEVPPEKLVIHEQITRDLKDYKATGPHVAVAKRLAARGVKIRPGTVISYIVLKGSGRIGDRAIPFDEFDPTKHKYDAEYYIENQVLPAVERILRAFGYRKEDLRYQKTRQVGLSAWLKPKGT

SEQ ID NO: 2406 - protein, 774 aa, synthetic construct
MILDTDLITEDGKPVMRIFKKENGEFKIEYDRTFEPYFYALLKDDSAIEEVKKITAERHGTVVTVKRVEKVQKKFLGRPVEVWKLYFTHFQDIPAIWDKIREHPAVIDIYEYDIPFAKRYLIDKGLVPMEGDEELKMLAFDIETLYHEGEEFAEGPILMISYADEEGARVITWKNVDLPYVDVVSTEREMIKRFLRVVKEKDPDVLITYNGDNFDFAYLKKRCEKLGINFALGRDGSEPKIQRMGDRFAVEVKGRIHFDLYPVIRRTINLPTYTLEAVYEAVFGQPKEKVYAEEITTAWETGENLERVARYSMEDAKVTYELGKEFLPMEAQLSRLIGQSLWDVSRSSTGNLVEWFLLRKAYERNELAPNKPDEKELARRRQSYEGGYVKEPERGLWENIVYLDFRSLYPSIIITHNVSPDTLNREGCKEYDVAPQVGHRFCKDFPGFIPSLLGDLLEERQKIKKKMKATIDPIERKLLDYRQRAIKILANSYYGYYGYARARWYCKECAESVTAWGREYITMTIKEIEEKYGFKVIYSDTDGFFATIPGADAETVKKKAMEFLKYINAKLPGALELEYEGFYKRGFFVTKKKYAVIDEEGKITTRGLEIVRRDWSEIAKETQARVLEALLKDGDVEKAVRIVKEVTEKLSKYEVPPEKLVIHEQITRDLKDYKATGPHVAVAKRLAARGVKIRPGTVISYIVLKGSGRIGDRAIPFDEFDPTKHKYDAEYYIENQVLPAVERILRAFGYRKEDLRYQKTRQVGLSAWLKPKGT

SEQ ID NO: 2407 - protein, 774 aa, synthetic construct
MILDTDLITEDGKPVMRIFKKENGEFKIEYDRTFEPYFYALLKDDSAIEEVKKITAERHGTVVTVKRVEKVQKKFLGRPVEVWKLYFTHFQDQPAIRDKIREHPAVIDIYEYDIPFAKRYLIDKGLVPMEGDEELKMLAFDIETLYHEGEEFAEGPILMISYADEEGARVITWKNVDLPYVDVVSTEREMIKRFLRVVKEKDPDVLITYNGDNFDFAYLKKRCEKLGINFALGRDGSEPKIQRMGDRFAVEVKGRIHFDLYPVIRRTINLPTYTLEAVYEAVFGQPKEKVYAEEITTAWETGENLERVARYSMEDAKVTYELGKEFLPMEAQLSRLIGQSLWDVSRSSTGNLVEWFLLRKAYERNELAPNKPDEKELARRRQSYEGGYVKEPERGLWENIVYLDFRSLYPSIIITHNVSPDTLNREGCKEYDVAPQVGHRFCKDFPGFIPSLLGDLLEERQKIKKKMKATIDPIERKLLDYRQRAIKILANSYYGYYGYARARWYCKECAESVTAWGREYITMTIKEIEEKYGFKVIYSDTDGFFATIPGADAETVKKKAMEFLKYINAKLPGALELEYEGFYKRGFFVTKKKYAVIDEEGKITTRGLEIVRRDWSEIAKETQARVLEALLKDGDVEKAVRIVKEVTEKLSKYEVPPEKLVIHEQITRDLKDYKATGPHVAVAKRLAARGVKIRPGTVISYIVLKGSGRIGDRAIPFDEFDPTKHKYDAEYYIENQVLPAVERILRAFGYRKEDLRYQKTRQVGLSAWLKPKGT

SEQ ID NO: 2408 - protein, 774 aa, synthetic construct
MILDTDLITEDGKPVMRIFKKENGEFKIEYDRTFEPYFYALLKDDSAIEEVKKITAERHGTVVTVKRVEKVQKKFLGRPVEVWKLYFTHFQDQPAIADKIREHPAVIDIYEYDIPFAKRYLIDKGLVPMEGDEELKMLAFDIETLYHEGEEFAEGPILMISYADEEGARVITWKNVDLPYVDVVSTEREMIKRFLRVVKEKDPDVLITYNGDNFDFAYLKKRCEKLGINFALGRDGSEPKIQRMGDRFAVEVKGRIHFDLYPVIRRTINLPTYTLEAVYEAVFGQPKEKVYAEEITTAWETGENLERVARYSMEDAKVTYELGKEFLPMEAQLSRLIGQSLWDVSRSSTGNLVEWFLLRKAYERNELAPNKPDEKELARRRQSYEGGYVKEPERGLWENIVYLDFRSLYPSIIITHNVSPDTLNREGCKEYDVAPQVGHRFCKDFPGFIPSLLGDLLEERQKIKKKMKATIDPIERKLLDYRQRAIKILANSYYGYYGYARARWYCKECAESVTAWGREYITMTIKEIEEKYGFKVIYSDTDGFFATIPGADAETVKKKAMEFLKYINAKLPGALELEYEGFYKRGFFVTKKKYAVIDEEGKITTRGLEIVRRDWSEIAKETQARVLEALLKDGDVEKAVRIVKEVTEKLSKYEVPPEKLVIHEQITRDLKDYKATGPHVAVAKRLAARGVKIRPGTVISYIVLKGSGRIGDRAIPFDEFDPTKHKYDAEYYIENQVLPAVERILRAFGYRKEDLRYQKTRQVGLSAWLKPKGT

SEQ ID NO: 2409 - protein, 774 aa, synthetic construct
MILDTDLITEDGKPVMRIFKKENGEFKIEYDRTFEPYFYALLKDDSAIEEVKKITAERHGTVVTVKRVEKVQKKFLGRPVEVWKLYFTHFQDRPAIADKIREHPAVIDIYEYDIPFAKRYLIDKGLVPMEGDEELKMLAFDIETLYHEGEEFAEGPILMISYADEEGARVITWKNVDLPYVDVVSTEREMIKRFLRVVKEKDPDVLITYNGDNFDFAYLKKRCEKLGINFALGRDGSEPKIQRMGDRFAVEVKGRIHFDLYPVIRRTINLPTYTLEAVYEAVFGQPKEKVYAEEITTAWETGENLERVARYSMEDAKVTYELGKEFLPMEAQLSRLIGQSLWDVSRSSTGNLVEWFLLRKAYERNELAPNKPDEKELARRRQSYEGGYVKEPERGLWENIVYLDFRSLYPSIIITHNVSPDTLNREGCKEYDVAPQVGHRFCKDFPGFIPSLLGDLLEERQKIKKKMKATIDPIERKLLDYRQRAIKILANSYYGYYGYARARWYCKECAESVTAWGREYITMTIKEIEEKYGFKVIYSDTDGFFATIPGADAETVKKKAMEFLKYINAKLPGALELEYEGFYKRGFFVTKKKYAVIDEEGKITTRGLEIVRRDWSEIAKETQARVLEALLKDGDVEKAVRIVKEVTEKLSKYEVPPEKLVIHEQITRDLKDYKATGPHVAVAKRLAARGVKIRPGTVISYIVLKGSGRIGDRAIPFDEFDPTKHKYDAEYYIENQVLPAVERILRAFGYRKEDLRYQKTRQVGLSAWLKPKGT

SEQ ID NO: 2410 - protein, 774 aa, synthetic construct
MILDTDLITEDGKPVMRIFKKENGEFKIEYDRTFEPYFYALLKDDSAIEEVKKITAERHGTVVTVKRVEKVQKKFLGRPVEVWKLYFTHIQDVPAIRDKIREHPAVIDIYEYDIPFAKRYLIDKGLVPMEGDEELKMLAFDIETLYHEGEEFAEGPILMISYADEEGARVITWKNVDLPYVDVVSTEREMIKRFLRVVKEKDPDVLITYNGDNFDFAYLKKRCEKLGINFALGRDGSEPKIQRMGDRFAVEVKGRIHFDLYPVIRRTINLPTYTLEAVYEAVFGQPKEKVYAEEITTAWETGENLERVARYSMEDAKVTYELGKEFLPMEAQLSRLIGQSLWDVSRSSTGNLVEWFLLRKAYERNELAPNKPDEKELARRRQSYEGGYVKEPERGLWENIVYLDFRSLYPSIIITHNVSPDTLNREGCKEYDVAPQVGHRFCKDFPGFIPSLLGDLLEERQKIKKKMKATIDPIERKLLDYRQRAIKILANSYYGYYGYARARWYCKECAESVTAWGREYITMTIKEIEEKYGFKVIYSDTDGFFATIPGADAETVKKKAMEFLKYINAKLPGALELEYEGFYKRGFFVTKKKYAVIDEEGKITTRGLEIVRRDWSEIAKETQARVLEALLKDGDVEKAVRIVKEVTEKLSKYEVPPEKLVIHEQITRDLKDYKATGPHVAVAKRLAARGVKIRPGTVISYIVLKGSGRIGDRAIPFDEFDPTKHKYDAEYYIENQVLPAVERILRAFGYRKEDLRYQKTRQVGLSAWLKPKGT

SEQ ID NO: 2411 - protein, 774 aa, synthetic construct
MILDTDLITEDGKPVMRIFKKENGEFKIEYDRTFEPYFYALLKDDSAIEEVKKITAERHGTVVTVKRVEKVQKKFLGRPVEVWKLYFTHIQDVPAIADKIREHPAVIDIYEYDIPFAKRYLIDKGLVPMEGDEELKMLAFDIETLYHEGEEFAEGPILMISYADEEGARVITWKNVDLPYVDVVSTEREMIKRFLRVVKEKDPDVLITYNGDNFDFAYLKKRCEKLGINFALGRDGSEPKIQRMGDRFAVEVKGRIHFDLYPVIRRTINLPTYTLEAVYEAVFGQPKEKVYAEEITTAWETGENLERVARYSMEDAKVTYELGKEFLPMEAQLSRLIGQSLWDVSRSSTGNLVEWFLLRKAYERNELAPNKPDEKELARRRQSYEGGYVKEPERGLWENIVYLDFRSLYPSIIITHNVSPDTLNREGCKEYDVAPQVGHRFCKDFPGFIPSLLGDLLEERQKIKKKMKATIDPIERKLLDYRQRAIKILANSYYGYYGYARARWYCKECAESVTAWGREYITMTIKEIEEKYGFKVIYSDTDGFFATIPGADAETVKKKAMEFLKYINAKLPGALELEYEGFYKRGFFVTKKKYAVIDEEGKITTRGLEIVRRDWSEIAKETQARVLEALLKDGDVEKAVRIVKEVTEKLSKYEVPPEKLVIHEQITRDLKDYKATGPHVAVAKRLAARGVKIRPGTVISYIVLKGSGRIGDRAIPFDEFDPTKHKYDAEYYIENQVLPAVERILRAFGYRKEDLRYQKTRQVGLSAWLKPKGT

SEQ ID NO: 2412 - protein, 774 aa, synthetic construct
MILDTDLITEDGKPVMRIFKKENGEFKIEYDRTFEPYFYALLKDDSAIEEVKKITAERHGTVVTVKRVEKVQKKFLGRPVEVWKLYFTHIQDVPAIFDKIREHPAVIDIYEYDIPFAKRYLIDKGLVPMEGDEELKMLAFDIETLYHEGEEFAEGPILMISYADEEGARVITWKNVDLPYVDVVSTEREMIKRFLRVVKEKDPDVLITYNGDNFDFAYLKKRCEKLGINFALGRDGSEPKIQRMGDRFAVEVKGRIHFDLYPVIRRTINLPTYTLEAVYEAVFGQPKEKVYAEEITTAWETGENLERVARYSMEDAKVTYELGKEFLPMEAQLSRLIGQSLWDVSRSSTGNLVEWFLLRKAYERNELAPNKPDEKELARRRQSYEGGYVKEPERGLWENIVYLDFRSLYPSIIITHNVSPDTLNREGCKEYDVAPQVGHRFCKDFPGFIPSLLGDLLEERQKIKKKMKATIDPIERKLLDYRQRAIKILANSYYGYYGYARARWYCKECAESVTAWGREYITMTIKEIEEKYGFKVIYSDTDGFFATIPGADAETVKKKAMEFLKYINAKLPGALELEYEGFYKRGFFVTKKKYAVIDEEGKITTRGLEIVRRDWSEIAKETQARVLEALLKDGDVEKAVRIVKEVTEKLSKYEVPPEKLVIHEQITRDLKDYKATGPHVAVAKRLAARGVKIRPGTVISYIVLKGSGRIGDRAIPFDEFDPTKHKYDAEYYIENQVLPAVERILRAFGYRKEDLRYQKTRQVGLSAWLKPKGT

SEQ ID NO: 2413 - protein, 774 aa, synthetic construct
MILDTDLITEDGKPVMRIFKKENGEFKIEYDRTFEPYFYALLKDDSAIEEVKKITAERHGTVVTVKRVEKVQKKFLGRPVEVWKLYFTHIQDVPAIHDKIREHPAVIDIYEYDIPFAKRYLIDKGLVPMEGDEELKMLAFDIETLYHEGEEFAEGPILMISYADEEGARVITWKNVDLPYVDVVSTEREMIKRFLRVVKEKDPDVLITYNGDNFDFAYLKKRCEKLGINFALGRDGSEPKIQRMGDRFAVEVKGRIHFDLYPVIRRTINLPTYTLEAVYEAVFGQPKEKVYAEEITTAWETGENLERVARYSMEDAKVTYELGKEFLPMEAQLSRLIGQSLWDVSRSSTGNLVEWFLLRKAYERNELAPNKPDEKELARRRQSYEGGYVKEPERGLWENIVYLDFRSLYPSIIITHNVSPDTLNREGCKEYDVAPQVGHRFCKDFPGFIPSLLGDLLEERQKIKKKMKATIDPIERKLLDYRQRAIKILANSYYGYYGYARARWYCKECAESVTAWGREYITMTIKEIEEKYGFKVIYSDTDGFFATIPGADAETVKKKAMEFLKYINAKLPGALELEYEGFYKRGFFVTKKKYAVIDEEGKITTRGLEIVRRDWSEIAKETQARVLEALLKDGDVEKAVRIVKEVTEKLSKYEVPPEKLVIHEQITRDLKDYKATGPHVAVAKRLAARGVKIRPGTVISYIVLKGSGRIGDRAIPFDEFDPTKHKYDAEYYIENQVLPAVERILRAFGYRKEDLRYQKTRQVGLSAWLKPKGT

SEQ ID NO: 2414 - protein, 774 aa, synthetic construct
MILDTDLITEDGKPVMRIFKKENGEFKIEYDRTFEPYFYALLKDDSAIEEVKKITAERHGTVVTVKRVEKVQKKFLGRPVEVWKLYFTHIQDVPAIWDKIREHPAVIDIYEYDIPFAKRYLIDKGLVPMEGDEELKMLAFDIETLYHEGEEFAEGPILMISYADEEGARVITWKNVDLPYVDVVSTEREMIKRFLRVVKEKDPDVLITYNGDNFDFAYLKKRCEKLGINFALGRDGSEPKIQRMGDRFAVEVKGRIHFDLYPVIRRTINLPTYTLEAVYEAVFGQPKEKVYAEEITTAWETGENLERVARYSMEDAKVTYELGKEFLPMEAQLSRLIGQSLWDVSRSSTGNLVEWFLLRKAYERNELAPNKPDEKELARRRQSYEGGYVKEPERGLWENIVYLDFRSLYPSIIITHNVSPDTLNREGCKEYDVAPQVGHRFCKDFPGFIPSLLGDLLEERQKIKKKMKATIDPIERKLLDYRQRAIKILANSYYGYYGYARARWYCKECAESVTAWGREYITMTIKEIEEKYGFKVIYSDTDGFFATIPGADAETVKKKAMEFLKYINAKLPGALELEYEGFYKRGFFVTKKKYAVIDEEGKITTRGLEIVRRDWSEIAKETQARVLEALLKDGDVEKAVRIVKEVTEKLSKYEVPPEKLVIHEQITRDLKDYKATGPHVAVAKRLAARGVKIRPGTVISYIVLKGSGRIGDRAIPFDEFDPTKHKYDAEYYIENQVLPAVERILRAFGYRKEDLRYQKTRQVGLSAWLKPKGT

SEQ ID NO: 2415 - protein, 774 aa, synthetic construct
MILDTDLITEDGKPVMRIFKKENGEFKIEYDRTFEPYFYALLKDDSAIEEVKKITAERHGTVVTVKRVEKVQKKFLGRPVEVWKLYFTHIQDIPAIRDKIREHPAVIDIYEYDIPFAKRYLIDKGLVPMEGDEELKMLAFDIETLYHEGEEFAEGPILMISYADEEGARVITWKNVDLPYVDVVSTEREMIKRFLRVVKEKDPDVLITYNGDNFDFAYLKKRCEKLGINFALGRDGSEPKIQRMGDRFAVEVKGRIHFDLYPVIRRTINLPTYTLEAVYEAVFGQPKEKVYAEEITTAWETGENLERVARYSMEDAKVTYELGKEFLPMEAQLSRLIGQSLWDVSRSSTGNLVEWFLLRKAYERNELAPNKPDEKELARRRQSYEGGYVKEPERGLWENIVYLDFRSLYPSIIITHNVSPDTLNREGCKEYDVAPQVGHRFCKDFPGFIPSLLGDLLEERQKIKKKMKATIDPIERKLLDYRQRAIKILANSYYGYYGYARARWYCKECAESVTAWGREYITMTIKEIEEKYGFKVIYSDTDGFFATIPGADAETVKKKAMEFLKYINAKLPGALELEYEGFYKRGFFVTKKKYAVIDEEGKITTRGLEIVRRDWSEIAKETQARVLEALLKDGDVEKAVRIVKEVTEKLSKYEVPPEKLVIHEQITRDLKDYKATGPHVAVAKRLAARGVKIRPGTVISYIVLKGSGRIGDRAIPFDEFDPTKHKYDAEYYIENQVLPAVERILRAFGYRKEDLRYQKTRQVGLSAWLKPKGT

SEQ ID NO: 2416 - protein, 774 aa, synthetic construct
MILDTDLITEDGKPVMRIFKKENGEFKIEYDRTFEPYFYALLKDDSAIEEVKKITAERHGTVVTVKRVEKVQKKFLGRPVEVWKLYFTHIQDIPAIADKIREHPAVIDIYEYDIPFAKRYLIDKGLVPMEGDEELKMLAFDIETLYHEGEEFAEGPILMISYADEEGARVITWKNVDLPYVDVVSTEREMIKRFLRVVKEKDPDVLITYNGDNFDFAYLKKRCEKLGINFALGRDGSEPKIQRMGDRFAVEVKGRIHFDLYPVIRRTINLPTYTLEAVYEAVFGQPKEKVYAEEITTAWETGENLERVARYSMEDAKVTYELGKEFLPMEAQLSRLIGQSLWDVSRSSTGNLVEWFLLRKAYERNELAPNKPDEKELARRRQSYEGGYVKEPERGLWENIVYLDFRSLYPSIIITHNVSPDTLNREGCKEYDVAPQVGHRFCKDFPGFIPSLLGDLLEERQKIKKKMKATIDPIERKLLDYRQRAIKILANSYYGYYGYARARWYCKECAESVTAWGREYITMTIKEIEEKYGFKVIYSDTDGFFATIPGADAETVKKKAMEFLKYINAKLPGALELEYEGFYKRGFFVTKKKYAVIDEEGKITTRGLEIVRRDWSEIAKETQARVLEALLKDGDVEKAVRIVKEVTEKLSKYEVPPEKLVIHEQITRDLKDYKATGPHVAVAKRLAARGVKIRPGTVISYIVLKGSGRIGDRAIPFDEFDPTKHKYDAEYYIENQVLPAVERILRAFGYRKEDLRYQKTRQVGLSAWLKPKGT

SEQ ID NO: 2417 - protein, 774 aa, synthetic construct
MILDTDLITEDGKPVMRIFKKENGEFKIEYDRTFEPYFYALLKDDSAIEEVKKITAERHGTVVTVKRVEKVQKKFLGRPVEVWKLYFTHIQDIPAIFDKIREHPAVIDIYEYDIPFAKRYLIDKGLVPMEGDEELKMLAFDIETLYHEGEEFAEGPILMISYADEEGARVITWKNVDLPYVDVVSTEREMIKRFLRVVKEKDPDVLITYNGDNFDFAYLKKRCEKLGINFALGRDGSEPKIQRMGDRFAVEVKGRIHFDLYPVIRRTINLPTYTLEAVYEAVFGQPKEKVYAEEITTAWETGENLERVARYSMEDAKVTYELGKEFLPMEAQLSRLIGQSLWDVSRSSTGNLVEWFLLRKAYERNELAPNKPDEKELARRRQSYEGGYVKEPERGLWENIVYLDFRSLYPSIIITHNVSPDTLNREGCKEYDVAPQVGHRFCKDFPGFIPSLLGDLLEERQKIKKKMKATIDPIERKLLDYRQRAIKILANSYYGYYGYARARWYCKECAESVTAWGREYITMTIKEIEEKYGFKVIYSDTDGFFATIPGADAETVKKKAMEFLKYINAKLPGALELEYEGFYKRGFFVTKKKYAVIDEEGKITTRGLEIVRRDWSEIAKETQARVLEALLKDGDVEKAVRIVKEVTEKLSKYEVPPEKLVIHEQITRDLKDYKATGPHVAVAKRLAARGVKIRPGTVISYIVLKGSGRIGDRAIPFDEFDPTKHKYDAEYYIENQVLPAVERILRAFGYRKEDLRYQKTRQVGLSAWLKPKGT

SEQ ID NO: 2418 - protein, 774 aa, synthetic construct
MILDTDLITEDGKPVMRIFKKENGEFKIEYDRTFEPYFYALLKDDSAIEEVKKITAERHGTVVTVKRVEKVQKKFLGRPVEVWKLYFTHIQDIPAIHDKIREHPAVIDIYEYDIPFAKRYLIDKGLVPMEGDEELKMLAFDIETLYHEGEEFAEGPILMISYADEEGARVITWKNVDLPYVDVVSTEREMIKRFLRVVKEKDPDVLITYNGDNFDFAYLKKRCEKLGINFALGRDGSEPKIQRMGDRFAVEVKGRIHFDLYPVIRRTINLPTYTLEAVYEAVFGQPKEKVYAEEITTAWETGENLERVARYSMEDAKVTYELGKEFLPMEAQLSRLIGQSLWDVSRSSTGNLVEWFLLRKAYERNELAPNKPDEKELARRRQSYEGGYVKEPERGLWENIVYLDFRSLYPSIIITHNVSPDTLNREGCKEYDVAPQVGHRFCKDFPGFIPSLLGDLLEERQKIKKKMKATIDPIERKLLDYRQRAIKILANSYYGYYGYARARWYCKECAESVTAWGREYITMTIKEIEEKYGFKVIYSDTDGFFATIPGADAETVKKKAMEFLKYINAKLPGALELEYEGFYKRGFFVTKKKYAVIDEEGKITTRGLEIVRRDWSEIAKETQARVLEALLKDGDVEKAVRIVKEVTEKLSKYEVPPEKLVIHEQITRDLKDYKATGPHVAVAKRLAARGVKIRPGTVISYIVLKGSGRIGDRAIPFDEFDPTKHKYDAEYYIENQVLPAVERILRAFGYRKEDLRYQKTRQVGLSAWLKPKGT

SEQ ID NO: 2419 - protein, 774 aa, synthetic construct
MILDTDLITEDGKPVMRIFKKENGEFKIEYDRTFEPYFYALLKDDSAIEEVKKITAERHGTVVTVKRVEKVQKKFLGRPVEVWKLYFTHIQDIPAIWDKIREHPAVIDIYEYDIPFAKRYLIDKGLVPMEGDEELKMLAFDIETLYHEGEEFAEGPILMISYADEEGARVITWKNVDLPYVDVVSTEREMIKRFLRVVKEKDPDVLITYNGDNFDFAYLKKRCEKLGINFALGRDGSEPKIQRMGDRFAVEVKGRIHFDLYPVIRRTINLPTYTLEAVYEAVFGQPKEKVYAEEITTAWETGENLERVARYSMEDAKVTYELGKEFLPMEAQLSRLIGQSLWDVSRSSTGNLVEWFLLRKAYERNELAPNKPDEKELARRRQSYEGGYVKEPERGLWENIVYLDFRSLYPSIIITHNVSPDTLNREGCKEYDVAPQVGHRFCKDFPGFIPSLLGDLLEERQKIKKKMKATIDPIERKLLDYRQRAIKILANSYYGYYGYARARWYCKECAESVTAWGREYITMTIKEIEEKYGFKVIYSDTDGFFATIPGADAETVKKKAMEFLKYINAKLPGALELEYEGFYKRGFFVTKKKYAVIDEEGKITTRGLEIVRRDWSEIAKETQARVLEALLKDGDVEKAVRIVKEVTEKLSKYEVPPEKLVIHEQITRDLKDYKATGPHVAVAKRLAARGVKIRPGTVISYIVLKGSGRIGDRAIPFDEFDPTKHKYDAEYYIENQVLPAVERILRAFGYRKEDLRYQKTRQVGLSAWLKPKGT

SEQ ID NO: 2420 - protein, 774 aa, synthetic construct
MILDTDLITEDGKPVMRIFKKENGEFKIEYDRTFEPYFYALLKDDSAIEEVKKITAERHGTVVTVKRVEKVQKKFLGRPVEVWKLYFTHIQDQPAIRDKIREHPAVIDIYEYDIPFAKRYLIDKGLVPMEGDEELKMLAFDIETLYHEGEEFAEGPILMISYADEEGARVITWKNVDLPYVDVVSTEREMIKRFLRVVKEKDPDVLITYNGDNFDFAYLKKRCEKLGINFALGRDGSEPKIQRMGDRFAVEVKGRIHFDLYPVIRRTINLPTYTLEAVYEAVFGQPKEKVYAEEITTAWETGENLERVARYSMEDAKVTYELGKEFLPMEAQLSRLIGQSLWDVSRSSTGNLVEWFLLRKAYERNELAPNKPDEKELARRRQSYEGGYVKEPERGLWENIVYLDFRSLYPSIIITHNVSPDTLNREGCKEYDVAPQVGHRFCKDFPGFIPSLLGDLLEERQKIKKKMKATIDPIERKLLDYRQRAIKILANSYYGYYGYARARWYCKECAESVTAWGREYITMTIKEIEEKYGFKVIYSDTDGFFATIPGADAETVKKKAMEFLKYINAKLPGALELEYEGFYKRGFFVTKKKYAVIDEEGKITTRGLEIVRRDWSEIAKETQARVLEALLKDGDVEKAVRIVKEVTEKLSKYEVPPEKLVIHEQITRDLKDYKATGPHVAVAKRLAARGVKIRPGTVISYIVLKGSGRIGDRAIPFDEFDPTKHKYDAEYYIENQVLPAVERILRAFGYRKEDLRYQKTRQVGLSAWLKPKGT

SEQ ID NO: 2421 - protein, 774 aa, synthetic construct
MILDTDLITEDGKPVMRIFKKENGEFKIEYDRTFEPYFYALLKDDSAIEEVKKITAERHGTVVTVKRVEKVQKKFLGRPVEVWKLYFTHIQDRPAIRDKIREHPAVIDIYEYDIPFAKRYLIDKGLVPMEGDEELKMLAFDIETLYHEGEEFAEGPILMISYADEEGARVITWKNVDLPYVDVVSTEREMIKRFLRVVKEKDPDVLITYNGDNFDFAYLKKRCEKLGINFALGRDGSEPKIQRMGDRFAVEVKGRIHFDLYPVIRRTINLPTYTLEAVYEAVFGQPKEKVYAEEITTAWETGENLERVARYSMEDAKVTYELGKEFLPMEAQLSRLIGQSLWDVSRSSTGNLVEWFLLRKAYERNELAPNKPDEKELARRRQSYEGGYVKEPERGLWENIVYLDFRSLYPSIIITHNVSPDTLNREGCKEYDVAPQVGHRFCKDFPGFIPSLLGDLLEERQKIKKKMKATIDPIERKLLDYRQRAIKILANSYYGYYGYARARWYCKECAESVTAWGREYITMTIKEIEEKYGFKVIYSDTDGFFATIPGADAETVKKKAMEFLKYINAKLPGALELEYEGFYKRGFFVTKKKYAVIDEEGKITTRGLEIVRRDWSEIAKETQARVLEALLKDGDVEKAVRIVKEVTEKLSKYEVPPEKLVIHEQITRDLKDYKATGPHVAVAKRLAARGVKIRPGTVISYIVLKGSGRIGDRAIPFDEFDPTKHKYDAEYYIENQVLPAVERILRAFGYRKEDLRYQKTRQVGLSAWLKPKGT

SEQ ID NO: 2422 - protein, 774 aa, synthetic construct
MILDTDLITEDGKPVMRIFKKENGEFKIEYDRTFEPYFYALLKDDSAIEEVKKITAERHGTVVTVKRVEKVQKKFLGRPVEVWKLYFTHIQDRPAIADKIREHPAVIDIYEYDIPFAKRYLIDKGLVPMEGDEELKMLAFDIETLYHEGEEFAEGPILMISYADEEGARVITWKNVDLPYVDVVSTEREMIKRFLRVVKEKDPDVLITYNGDNFDFAYLKKRCEKLGINFALGRDGSEPKIQRMGDRFAVEVKGRIHFDLYPVIRRTINLPTYTLEAVYEAVFGQPKEKVYAEEITTAWETGENLERVARYSMEDAKVTYELGKEFLPMEAQLSRLIGQSLWDVSRSSTGNLVEWFLLRKAYERNELAPNKPDEKELARRRQSYEGGYVKEPERGLWENIVYLDFRSLYPSIIITHNVSPDTLNREGCKEYDVAPQVGHRFCKDFPGFIPSLLGDLLEERQKIKKKMKATIDPIERKLLDYRQRAIKILANSYYGYYGYARARWYCKECAESVTAWGREYITMTIKEIEEKYGFKVIYSDTDGFFATIPGADAETVKKKAMEFLKYINAKLPGALELEYEGFYKRGFFVTKKKYAVIDEEGKITTRGLEIVRRDWSEIAKETQARVLEALLKDGDVEKAVRIVKEVTEKLSKYEVPPEKLVIHEQITRDLKDYKATGPHVAVAKRLAARGVKIRPGTVISYIVLKGSGRIGDRAIPFDEFDPTKHKYDAEYYIENQVLPAVERILRAFGYRKEDLRYQKTRQVGLSAWLKPKGT

SEQ ID NO: 2423 - protein, 774 aa, synthetic construct
MILDTDLITEDGKPVMRIFKKENGEFKIEYDRTFEPYFYALLKDDSAIEEVKKITAERHGTVVTVKRVEKVQKKFLGRPVEVWKLYFTHIQDRPAIFDKIREHPAVIDIYEYDIPFAKRYLIDKGLVPMEGDEELKMLAFDIETLYHEGEEFAEGPILMISYADEEGARVITWKNVDLPYVDVVSTEREMIKRFLRVVKEKDPDVLITYNGDNFDFAYLKKRCEKLGINFALGRDGSEPKIQRMGDRFAVEVKGRIHFDLYPVIRRTINLPTYTLEAVYEAVFGQPKEKVYAEEITTAWETGENLERVARYSMEDAKVTYELGKEFLPMEAQLSRLIGQSLWDVSRSSTGNLVEWFLLRKAYERNELAPNKPDEKELARRRQSYEGGYVKEPERGLWENIVYLDFRSLYPSIIITHNVSPDTLNREGCKEYDVAPQVGHRFCKDFPGFIPSLLGDLLEERQKIKKKMKATIDPIERKLLDYRQRAIKILANSYYGYYGYARARWYCKECAESVTAWGREYITMTIKEIEEKYGFKVIYSDTDGFFATIPGADAETVKKKAMEFLKYINAKLPGALELEYEGFYKRGFFVTKKKYAVIDEEGKITTRGLEIVRRDWSEIAKETQARVLEALLKDGDVEKAVRIVKEVTEKLSKYEVPPEKLVIHEQITRDLKDYKATGPHVAVAKRLAARGVKIRPGTVISYIVLKGSGRIGDRAIPFDEFDPTKHKYDAEYYIENQVLPAVERILRAFGYRKEDLRYQKTRQVGLSAWLKPKGT

SEQ ID NO: 2424 - protein, 774 aa, synthetic construct
MILDTDLITEDGKPVMRIFKKENGEFKIEYDRTFEPYFYALLKDDSAIEEVKKITAERHGTVVTVKRVEKVQKKFLGRPVEVWKLYFTHSQDVPAIFDKIREHPAVIDIYEYDIPFAKRYLIDKGLVPMEGDEELKMLAFDIETLYHEGEEFAEGPILMISYADEEGARVITWKNVDLPYVDVVSTEREMIKRFLRVVKEKDPDVLITYNGDNFDFAYLKKRCEKLGINFALGRDGSEPKIQRMGDRFAVEVKGRIHFDLYPVIRRTINLPTYTLEAVYEAVFGQPKEKVYAEEITTAWETGENLERVARYSMEDAKVTYELGKEFLPMEAQLSRLIGQSLWDVSRSSTGNLVEWFLLRKAYERNELAPNKPDEKELARRRQSYEGGYVKEPERGLWENIVYLDFRSLYPSIIITHNVSPDTLNREGCKEYDVAPQVGHRFCKDFPGFIPSLLGDLLEERQKIKKKMKATIDPIERKLLDYRQRAIKILANSYYGYYGYARARWYCKECAESVTAWGREYITMTIKEIEEKYGFKVIYSDTDGFFATIPGADAETVKKKAMEFLKYINAKLPGALELEYEGFYKRGFFVTKKKYAVIDEEGKITTRGLEIVRRDWSEIAKETQARVLEALLKDGDVEKAVRIVKEVTEKLSKYEVPPEKLVIHEQITRDLKDYKATGPHVAVAKRLAARGVKIRPGTVISYIVLKGSGRIGDRAIPFDEFDPTKHKYDAEYYIENQVLPAVERILRAFGYRKEDLRYQKTRQVGLSAWLKPKGT

SEQ ID NO: 2425 - protein, 774 aa, synthetic construct
MILDTDLITEDGKPVMRIFKKENGEFKIEYDRTFEPYFYALLKDDSAIEEVKKITAERHGTVVTVKRVEKVQKKFLGRPVEVWKLYFTHSQDIPAIRDKIREHPAVIDIYEYDIPFAKRYLIDKGLVPMEGDEELKMLAFDIETLYHEGEEFAEGPILMISYADEEGARVITWKNVDLPYVDVVSTEREMIKRFLRVVKEKDPDVLITYNGDNFDFAYLKKRCEKLGINFALGRDGSEPKIQRMGDRFAVEVKGRIHFDLYPVIRRTINLPTYTLEAVYEAVFGQPKEKVYAEEITTAWETGENLERVARYSMEDAKVTYELGKEFLPMEAQLSRLIGQSLWDVSRSSTGNLVEWFLLRKAYERNELAPNKPDEKELARRRQSYEGGYVKEPERGLWENIVYLDFRSLYPSIIITHNVSPDTLNREGCKEYDVAPQVGHRFCKDFPGFIPSLLGDLLEERQKIKKKMKATIDPIERKLLDYRQRAIKILANSYYGYYGYARARWYCKECAESVTAWGREYITMTIKEIEEKYGFKVIYSDTDGFFATIPGADAETVKKKAMEFLKYINAKLPGALELEYEGFYKRGFFVTKKKYAVIDEEGKITTRGLEIVRRDWSEIAKETQARVLEALLKDGDVEKAVRIVKEVTEKLSKYEVPPEKLVIHEQITRDLKDYKATGPHVAVAKRLAARGVKIRPGTVISYIVLKGSGRIGDRAIPFDEFDPTKHKYDAEYYIENQVLPAVERILRAFGYRKEDLRYQKTRQVGLSAWLKPKGT

SEQ ID NO: 2426 - protein, 774 aa, synthetic construct
MILDTDLITEDGKPVMRIFKKENGEFKIEYDRTFEPYFYALLKDDSAIEEVKKITAERHGTVVTVKRVEKVQKKFLGRPVEVWKLYFTHSQDIPAIADKIREHPAVIDIYEYDIPFAKRYLIDKGLVPMEGDEELKMLAFDIETLYHEGEEFAEGPILMISYADEEGARVITWKNVDLPYVDVVSTEREMIKRFLRVVKEKDPDVLITYNGDNFDFAYLKKRCEKLGINFALGRDGSEPKIQRMGDRFAVEVKGRIHFDLYPVIRRTINLPTYTLEAVYEAVFGQPKEKVYAEEITTAWETGENLERVARYSMEDAKVTYELGKEFLPMEAQLSRLIGQSLWDVSRSSTGNLVEWFLLRKAYERNELAPNKPDEKELARRRQSYEGGYVKEPERGLWENIVYLDFRSLYPSIIITHNVSPDTLNREGCKEYDVAPQVGHRFCKDFPGFIPSLLGDLLEERQKIKKKMKATIDPIERKLLDYRQRAIKILANSYYGYYGYARARWYCKECAESVTAWGREYITMTIKEIEEKYGFKVIYSDTDGFFATIPGADAETVKKKAMEFLKYINAKLPGALELEYEGFYKRGFFVTKKKYAVIDEEGKITTRGLEIVRRDWSEIAKETQARVLEALLKDGDVEKAVRIVKEVTEKLSKYEVPPEKLVIHEQITRDLKDYKATGPHVAVAKRLAARGVKIRPGTVISYIVLKGSGRIGDRAIPFDEFDPTKHKYDAEYYIENQVLPAVERILRAFGYRKEDLRYQKTRQVGLSAWLKPKGT

SEQ ID NO: 2427 - protein, 774 aa, synthetic construct
MILDTDLITEDGKPVMRIFKKENGEFKIEYDRTFEPYFYALLKDDSAIEEVKKITAERHGTVVTVKRVEKVQKKFLGRPVEVWKLYFTHSQDIPAIHDKIREHPAVIDIYEYDIPFAKRYLIDKGLVPMEGDEELKMLAFDIETLYHEGEEFAEGPILMISYADEEGARVITWKNVDLPYVDVVSTEREMIKRFLRVVKEKDPDVLITYNGDNFDFAYLKKRCEKLGINFALGRDGSEPKIQRMGDRFAVEVKGRIHFDLYPVIRRTINLPTYTLEAVYEAVFGQPKEKVYAEEITTAWETGENLERVARYSMEDAKVTYELGKEFLPMEAQLSRLIGQSLWDVSRSSTGNLVEWFLLRKAYERNELAPNKPDEKELARRRQSYEGGYVKEPERGLWENIVYLDFRSLYPSIIITHNVSPDTLNREGCKEYDVAPQVGHRFCKDFPGFIPSLLGDLLEERQKIKKKMKATIDPIERKLLDYRQRAIKILANSYYGYYGYARARWYCKECAESVTAWGREYITMTIKEIEEKYGFKVIYSDTDGFFATIPGADAETVKKKAMEFLKYINAKLPGALELEYEGFYKRGFFVTKKKYAVIDEEGKITTRGLEIVRRDWSEIAKETQARVLEALLKDGDVEKAVRIVKEVTEKLSKYEVPPEKLVIHEQITRDLKDYKATGPHVAVAKRLAARGVKIRPGTVISYIVLKGSGRIGDRAIPFDEFDPTKHKYDAEYYIENQVLPAVERILRAFGYRKEDLRYQKTRQVGLSAWLKPKGT

SEQ ID NO: 2428 - protein, 774 aa, synthetic construct
MILDTDLITEDGKPVMRIFKKENGEFKIEYDRTFEPYFYALLKDDSAIEEVKKITAERHGTVVTVKRVEKVQKKFLGRPVEVWKLYFTHWQDVPAIRDKIREHPAVIDIYEYDIPFAKRYLIDKGLVPMEGDEELKMLAFDIETLYHEGEEFAEGPILMISYADEEGARVITWKNVDLPYVDVVSTEREMIKRFLRVVKEKDPDVLITYNGDNFDFAYLKKRCEKLGINFALGRDGSEPKIQRMGDRFAVEVKGRIHFDLYPVIRRTINLPTYTLEAVYEAVFGQPKEKVYAEEITTAWETGENLERVARYSMEDAKVTYELGKEFLPMEAQLSRLIGQSLWDVSRSSTGNLVEWFLLRKAYERNELAPNKPDEKELARRRQSYEGGYVKEPERGLWENIVYLDFRSLYPSIIITHNVSPDTLNREGCKEYDVAPQVGHRFCKDFPGFIPSLLGDLLEERQKIKKKMKATIDPIERKLLDYRQRAIKILANSYYGYYGYARARWYCKECAESVTAWGREYITMTIKEIEEKYGFKVIYSDTDGFFATIPGADAETVKKKAMEFLKYINAKLPGALELEYEGFYKRGFFVTKKKYAVIDEEGKITTRGLEIVRRDWSEIAKETQARVLEALLKDGDVEKAVRIVKEVTEKLSKYEVPPEKLVIHEQITRDLKDYKATGPHVAVAKRLAARGVKIRPGTVISYIVLKGSGRIGDRAIPFDEFDPTKHKYDAEYYIENQVLPAVERILRAFGYRKEDLRYQKTRQVGLSAWLKPKGT

SEQ ID NO: 2429 - protein, 774 aa, synthetic construct
MILDTDLITEDGKPVMRIFKKENGEFKIEYDRTFEPYFYALLKDDSAIEEVKKITAERHGTVVTVKRVEKVQKKFLGRPVEVWKLYFTHWQDVPAIADKIREHPAVIDIYEYDIPFAKRYLIDKGLVPMEGDEELKMLAFDIETLYHEGEEFAEGPILMISYADEEGARVITWKNVDLPYVDVVSTEREMIKRFLRVVKEKDPDVLITYNGDNFDFAYLKKRCEKLGINFALGRDGSEPKIQRMGDRFAVEVKGRIHFDLYPVIRRTINLPTYTLEAVYEAVFGQPKEKVYAEEITTAWETGENLERVARYSMEDAKVTYELGKEFLPMEAQLSRLIGQSLWDVSRSSTGNLVEWFLLRKAYERNELAPNKPDEKELARRRQSYEGGYVKEPERGLWENIVYLDFRSLYPSIIITHNVSPDTLNREGCKEYDVAPQVGHRFCKDFPGFIPSLLGDLLEERQKIKKKMKATIDPIERKLLDYRQRAIKILANSYYGYYGYARARWYCKECAESVTAWGREYITMTIKEIEEKYGFKVIYSDTDGFFATIPGADAETVKKKAMEFLKYINAKLPGALELEYEGFYKRGFFVTKKKYAVIDEEGKITTRGLEIVRRDWSEIAKETQARVLEALLKDGDVEKAVRIVKEVTEKLSKYEVPPEKLVIHEQITRDLKDYKATGPHVAVAKRLAARGVKIRPGTVISYIVLKGSGRIGDRAIPFDEFDPTKHKYDAEYYIENQVLPAVERILRAFGYRKEDLRYQKTRQVGLSAWLKPKGT

SEQ ID NO: 2430 - protein, 774 aa, synthetic construct
MILDTDLITEDGKPVMRIFKKENGEFKIEYDRTFEPYFYALLKDDSAIEEVKKITAERHGTVVTVKRVEKVQKKFLGRPVEVWKLYFTHWQDVPAIFDKIREHPAVIDIYEYDIPFAKRYLIDKGLVPMEGDEELKMLAFDIETLYHEGEEFAEGPILMISYADEEGARVITWKNVDLPYVDVVSTEREMIKRFLRVVKEKDPDVLITYNGDNFDFAYLKKRCEKLGINFALGRDGSEPKIQRMGDRFAVEVKGRIHFDLYPVIRRTINLPTYTLEAVYEAVFGQPKEKVYAEEITTAWETGENLERVARYSMEDAKVTYELGKEFLPMEAQLSRLIGQSLWDVSRSSTGNLVEWFLLRKAYERNELAPNKPDEKELARRRQSYEGGYVKEPERGLWENIVYLDFRSLYPSIIITHNVSPDTLNREGCKEYDVAPQVGHRFCKDFPGFIPSLLGDLLEERQKIKKKMKATIDPIERKLLDYRQRAIKILANSYYGYYGYARARWYCKECAESVTAWGREYITMTIKEIEEKYGFKVIYSDTDGFFATIPGADAETVKKKAMEFLKYINAKLPGALELEYEGFYKRGFFVTKKKYAVIDEEGKITTRGLEIVRRDWSEIAKETQARVLEALLKDGDVEKAVRIVKEVTEKLSKYEVPPEKLVIHEQITRDLKDYKATGPHVAVAKRLAARGVKIRPGTVISYIVLKGSGRIGDRAIPFDEFDPTKHKYDAEYYIENQVLPAVERILRAFGYRKEDLRYQKTRQVGLSAWLKPKGT

SEQ ID NO: 2431 - protein, 774 aa, synthetic construct
MILDTDLITEDGKPVMRIFKKENGEFKIEYDRTFEPYFYALLKDDSAIEEVKKITAERHGTVVTVKRVEKVQKKFLGRPVEVWKLYFTHWQDVPAIHDKIREHPAVIDIYEYDIPFAKRYLIDKGLVPMEGDEELKMLAFDIETLYHEGEEFAEGPILMISYADEEGARVITWKNVDLPYVDVVSTEREMIKRFLRVVKEKDPDVLITYNGDNFDFAYLKKRCEKLGINFALGRDGSEPKIQRMGDRFAVEVKGRIHFDLYPVIRRTINLPTYTLEAVYEAVFGQPKEKVYAEEITTAWETGENLERVARYSMEDAKVTYELGKEFLPMEAQLSRLIGQSLWDVSRSSTGNLVEWFLLRKAYERNELAPNKPDEKELARRRQSYEGGYVKEPERGLWENIVYLDFRSLYPSIIITHNVSPDTLNREGCKEYDVAPQVGHRFCKDFPGFIPSLLGDLLEERQKIKKKMKATIDPIERKLLDYRQRAIKILANSYYGYYGYARARWYCKECAESVTAWGREYITMTIKEIEEKYGFKVIYSDTDGFFATIPGADAETVKKKAMEFLKYINAKLPGALELEYEGFYKRGFFVTKKKYAVIDEEGKITTRGLEIVRRDWSEIAKETQARVLEALLKDGDVEKAVRIVKEVTEKLSKYEVPPEKLVIHEQITRDLKDYKATGPHVAVAKRLAARGVKIRPGTVISYIVLKGSGRIGDRAIPFDEFDPTKHKYDAEYYIENQVLPAVERILRAFGYRKEDLRYQKTRQVGLSAWLKPKGT

SEQ ID NO: 2432 - protein, 774 aa, synthetic construct
MILDTDLITEDGKPVMRIFKKENGEFKIEYDRTFEPYFYALLKDDSAIEEVKKITAERHGTVVTVKRVEKVQKKFLGRPVEVWKLYFTHWQDIPAIRDKIREHPAVIDIYEYDIPFAKRYLIDKGLVPMEGDEELKMLAFDIETLYHEGEEFAEGPILMISYADEEGARVITWKNVDLPYVDVVSTEREMIKRFLRVVKEKDPDVLITYNGDNFDFAYLKKRCEKLGINFALGRDGSEPKIQRMGDRFAVEVKGRIHFDLYPVIRRTINLPTYTLEAVYEAVFGQPKEKVYAEEITTAWETGENLERVARYSMEDAKVTYELGKEFLPMEAQLSRLIGQSLWDVSRSSTGNLVEWFLLRKAYERNELAPNKPDEKELARRRQSYEGGYVKEPERGLWENIVYLDFRSLYPSIIITHNVSPDTLNREGCKEYDVAPQVGHRFCKDFPGFIPSLLGDLLEERQKIKKKMKATIDPIERKLLDYRQRAIKILANSYYGYYGYARARWYCKECAESVTAWGREYITMTIKEIEEKYGFKVIYSDTDGFFATIPGADAETVKKKAMEFLKYINAKLPGALELEYEGFYKRGFFVTKKKYAVIDEEGKITTRGLEIVRRDWSEIAKETQARVLEALLKDGDVEKAVRIVKEVTEKLSKYEVPPEKLVIHEQITRDLKDYKATGPHVAVAKRLAARGVKIRPGTVISYIVLKGSGRIGDRAIPFDEFDPTKHKYDAEYYIENQVLPAVERILRAFGYRKEDLRYQKTRQVGLSAWLKPKGT

SEQ ID NO: 2433 - protein, 774 aa, synthetic construct
MILDTDLITEDGKPVMRIFKKENGEFKIEYDRTFEPYFYALLKDDSAIEEVKKITAERHGTVVTVKRVEKVQKKFLGRPVEVWKLYFTHWQDIPAIADKIREHPAVIDIYEYDIPFAKRYLIDKGLVPMEGDEELKMLAFDIETLYHEGEEFAEGPILMISYADEEGARVITWKNVDLPYVDVVSTEREMIKRFLRVVKEKDPDVLITYNGDNFDFAYLKKRCEKLGINFALGRDGSEPKIQRMGDRFAVEVKGRIHFDLYPVIRRTINLPTYTLEAVYEAVFGQPKEKVYAEEITTAWETGENLERVARYSMEDAKVTYELGKEFLPMEAQLSRLIGQSLWDVSRSSTGNLVEWFLLRKAYERNELAPNKPDEKELARRRQSYEGGYVKEPERGLWENIVYLDFRSLYPSIIITHNVSPDTLNREGCKEYDVAPQVGHRFCKDFPGFIPSLLGDLLEERQKIKKKMKATIDPIERKLLDYRQRAIKILANSYYGYYGYARARWYCKECAESVTAWGREYITMTIKEIEEKYGFKVIYSDTDGFFATIPGADAETVKKKAMEFLKYINAKLPGALELEYEGFYKRGFFVTKKKYAVIDEEGKITTRGLEIVRRDWSEIAKETQARVLEALLKDGDVEKAVRIVKEVTEKLSKYEVPPEKLVIHEQITRDLKDYKATGPHVAVAKRLAARGVKIRPGTVISYIVLKGSGRIGDRAIPFDEFDPTKHKYDAEYYIENQVLPAVERILRAFGYRKEDLRYQKTRQVGLSAWLKPKGT

SEQ ID NO: 2434 - protein, 774 aa, synthetic construct
MILDTDLITEDGKPVMRIFKKENGEFKIEYDRTFEPYFYALLKDDSAIEEVKKITAERHGTVVTVKRVEKVQKKFLGRPVEVWKLYFTHWQDIPAIFDKIREHPAVIDIYEYDIPFAKRYLIDKGLVPMEGDEELKMLAFDIETLYHEGEEFAEGPILMISYADEEGARVITWKNVDLPYVDVVSTEREMIKRFLRVVKEKDPDVLITYNGDNFDFAYLKKRCEKLGINFALGRDGSEPKIQRMGDRFAVEVKGRIHFDLYPVIRRTINLPTYTLEAVYEAVFGQPKEKVYAEEITTAWETGENLERVARYSMEDAKVTYELGKEFLPMEAQLSRLIGQSLWDVSRSSTGNLVEWFLLRKAYERNELAPNKPDEKELARRRQSYEGGYVKEPERGLWENIVYLDFRSLYPSIIITHNVSPDTLNREGCKEYDVAPQVGHRFCKDFPGFIPSLLGDLLEERQKIKKKMKATIDPIERKLLDYRQRAIKILANSYYGYYGYARARWYCKECAESVTAWGREYITMTIKEIEEKYGFKVIYSDTDGFFATIPGADAETVKKKAMEFLKYINAKLPGALELEYEGFYKRGFFVTKKKYAVIDEEGKITTRGLEIVRRDWSEIAKETQARVLEALLKDGDVEKAVRIVKEVTEKLSKYEVPPEKLVIHEQITRDLKDYKATGPHVAVAKRLAARGVKIRPGTVISYIVLKGSGRIGDRAIPFDEFDPTKHKYDAEYYIENQVLPAVERILRAFGYRKEDLRYQKTRQVGLSAWLKPKGT

SEQ ID NO: 2435 - protein, 774 aa, synthetic construct
MILDTDLITEDGKPVMRIFKKENGEFKIEYDRTFEPYFYALLKDDSAIEEVKKITAERHGTVVTVKRVEKVQKKFLGRPVEVWKLYFTHWQDIPAIHDKIREHPAVIDIYEYDIPFAKRYLIDKGLVPMEGDEELKMLAFDIETLYHEGEEFAEGPILMISYADEEGARVITWKNVDLPYVDVVSTEREMIKRFLRVVKEKDPDVLITYNGDNFDFAYLKKRCEKLGINFALGRDGSEPKIQRMGDRFAVEVKGRIHFDLYPVIRRTINLPTYTLEAVYEAVFGQPKEKVYAEEITTAWETGENLERVARYSMEDAKVTYELGKEFLPMEAQLSRLIGQSLWDVSRSSTGNLVEWFLLRKAYERNELAPNKPDEKELARRRQSYEGGYVKEPERGLWENIVYLDFRSLYPSIIITHNVSPDTLNREGCKEYDVAPQVGHRFCKDFPGFIPSLLGDLLEERQKIKKKMKATIDPIERKLLDYRQRAIKILANSYYGYYGYARARWYCKECAESVTAWGREYITMTIKEIEEKYGFKVIYSDTDGFFATIPGADAETVKKKAMEFLKYINAKLPGALELEYEGFYKRGFFVTKKKYAVIDEEGKITTRGLEIVRRDWSEIAKETQARVLEALLKDGDVEKAVRIVKEVTEKLSKYEVPPEKLVIHEQITRDLKDYKATGPHVAVAKRLAARGVKIRPGTVISYIVLKGSGRIGDRAIPFDEFDPTKHKYDAEYYIENQVLPAVERILRAFGYRKEDLRYQKTRQVGLSAWLKPKGT

SEQ ID NO: 2436 - protein, 774 aa, synthetic construct
MILDTDLITEDGKPVMRIFKKENGEFKIEYDRTFEPYFYALLKDDSAIEEVKKITAERHGTVVTVKRVEKVQKKFLGRPVEVWKLYFTHWQDIPAIWDKIREHPAVIDIYEYDIPFAKRYLIDKGLVPMEGDEELKMLAFDIETLYHEGEEFAEGPILMISYADEEGARVITWKNVDLPYVDVVSTEREMIKRFLRVVKEKDPDVLITYNGDNFDFAYLKKRCEKLGINFALGRDGSEPKIQRMGDRFAVEVKGRIHFDLYPVIRRTINLPTYTLEAVYEAVFGQPKEKVYAEEITTAWETGENLERVARYSMEDAKVTYELGKEFLPMEAQLSRLIGQSLWDVSRSSTGNLVEWFLLRKAYERNELAPNKPDEKELARRRQSYEGGYVKEPERGLWENIVYLDFRSLYPSIIITHNVSPDTLNREGCKEYDVAPQVGHRFCKDFPGFIPSLLGDLLEERQKIKKKMKATIDPIERKLLDYRQRAIKILANSYYGYYGYARARWYCKECAESVTAWGREYITMTIKEIEEKYGFKVIYSDTDGFFATIPGADAETVKKKAMEFLKYINAKLPGALELEYEGFYKRGFFVTKKKYAVIDEEGKITTRGLEIVRRDWSEIAKETQARVLEALLKDGDVEKAVRIVKEVTEKLSKYEVPPEKLVIHEQITRDLKDYKATGPHVAVAKRLAARGVKIRPGTVISYIVLKGSGRIGDRAIPFDEFDPTKHKYDAEYYIENQVLPAVERILRAFGYRKEDLRYQKTRQVGLSAWLKPKGT

SEQ ID NO: 2437 - protein, 774 aa, synthetic construct
MILDTDLITEDGKPVMRIFKKENGEFKIEYDRTFEPYFYALLKDDSAIEEVKKITAERHGTVVTVKRVEKVQKKFLGRPVEVWKLYFTHWQDKPAIRDKIREHPAVIDIYEYDIPFAKRYLIDKGLVPMEGDEELKMLAFDIETLYHEGEEFAEGPILMISYADEEGARVITWKNVDLPYVDVVSTEREMIKRFLRVVKEKDPDVLITYNGDNFDFAYLKKRCEKLGINFALGRDGSEPKIQRMGDRFAVEVKGRIHFDLYPVIRRTINLPTYTLEAVYEAVFGQPKEKVYAEEITTAWETGENLERVARYSMEDAKVTYELGKEFLPMEAQLSRLIGQSLWDVSRSSTGNLVEWFLLRKAYERNELAPNKPDEKELARRRQSYEGGYVKEPERGLWENIVYLDFRSLYPSIIITHNVSPDTLNREGCKEYDVAPQVGHRFCKDFPGFIPSLLGDLLEERQKIKKKMKATIDPIERKLLDYRQRAIKILANSYYGYYGYARARWYCKECAESVTAWGREYITMTIKEIEEKYGFKVIYSDTDGFFATIPGADAETVKKKAMEFLKYINAKLPGALELEYEGFYKRGFFVTKKKYAVIDEEGKITTRGLEIVRRDWSEIAKETQARVLEALLKDGDVEKAVRIVKEVTEKLSKYEVPPEKLVIHEQITRDLKDYKATGPHVAVAKRLAARGVKIRPGTVISYIVLKGSGRIGDRAIPFDEFDPTKHKYDAEYYIENQVLPAVERILRAFGYRKEDLRYQKTRQVGLSAWLKPKGT

SEQ ID NO: 2438 - protein, 774 aa, synthetic construct
MILDTDLITEDGKPVMRIFKKENGEFKIEYDRTFEPYFYALLKDDSAIEEVKKITAERHGTVVTVKRVEKVQKKFLGRPVEVWKLYFTHWQDQPAIADKIREHPAVIDIYEYDIPFAKRYLIDKGLVPMEGDEELKMLAFDIETLYHEGEEFAEGPILMISYADEEGARVITWKNVDLPYVDVVSTEREMIKRFLRVVKEKDPDVLITYNGDNFDFAYLKKRCEKLGINFALGRDGSEPKIQRMGDRFAVEVKGRIHFDLYPVIRRTINLPTYTLEAVYEAVFGQPKEKVYAEEITTAWETGENLERVARYSMEDAKVTYELGKEFLPMEAQLSRLIGQSLWDVSRSSTGNLVEWFLLRKAYERNELAPNKPDEKELARRRQSYEGGYVKEPERGLWENIVYLDFRSLYPSIIITHNVSPDTLNREGCKEYDVAPQVGHRFCKDFPGFIPSLLGDLLEERQKIKKKMKATIDPIERKLLDYRQRAIKILANSYYGYYGYARARWYCKECAESVTAWGREYITMTIKEIEEKYGFKVIYSDTDGFFATIPGADAETVKKKAMEFLKYINAKLPGALELEYEGFYKRGFFVTKKKYAVIDEEGKITTRGLEIVRRDWSEIAKETQARVLEALLKDGDVEKAVRIVKEVTEKLSKYEVPPEKLVIHEQITRDLKDYKATGPHVAVAKRLAARGVKIRPGTVISYIVLKGSGRIGDRAIPFDEFDPTKHKYDAEYYIENQVLPAVERILRAFGYRKEDLRYQKTRQVGLSAWLKPKGT

SEQ ID NO: 2439 - protein, 774 aa, synthetic construct
MILDTDLITEDGKPVMRIFKKENGEFKIEYDRTFEPYFYALLKDDSAIEEVKKITAERHGTVVTVKRVEKVQKKFLGRPVEVWKLYFTHWQDRPAIHDKIREHPAVIDIYEYDIPFAKRYLIDKGLVPMEGDEELKMLAFDIETLYHEGEEFAEGPILMISYADEEGARVITWKNVDLPYVDVVSTEREMIKRFLRVVKEKDPDVLITYNGDNFDFAYLKKRCEKLGINFALGRDGSEPKIQRMGDRFAVEVKGRIHFDLYPVIRRTINLPTYTLEAVYEAVFGQPKEKVYAEEITTAWETGENLERVARYSMEDAKVTYELGKEFLPMEAQLSRLIGQSLWDVSRSSTGNLVEWFLLRKAYERNELAPNKPDEKELARRRQSYEGGYVKEPERGLWENIVYLDFRSLYPSIIITHNVSPDTLNREGCKEYDVAPQVGHRFCKDFPGFIPSLLGDLLEERQKIKKKMKATIDPIERKLLDYRQRAIKILANSYYGYYGYARARWYCKECAESVTAWGREYITMTIKEIEEKYGFKVIYSDTDGFFATIPGADAETVKKKAMEFLKYINAKLPGALELEYEGFYKRGFFVTKKKYAVIDEEGKITTRGLEIVRRDWSEIAKETQARVLEALLKDGDVEKAVRIVKEVTEKLSKYEVPPEKLVIHEQITRDLKDYKATGPHVAVAKRLAARGVKIRPGTVISYIVLKGSGRIGDRAIPFDEFDPTKHKYDAEYYIENQVLPAVERILRAFGYRKEDLRYQKTRQVGLSAWLKPKGT

SEQ ID NO: 2440 - protein, 774 aa, synthetic construct
MILDTDLITEDGKPVMRIFKKENGEFKIEYDRTFEPYFYALLKDDSAIEEVKKITAERHGTVVTVKRVEKVQKKFLGRPVEVWKLYFTHYQDVPAIRDKIREHPAVIDIYEYDIPFAKRYLIDKGLVPMEGDEELKMLAFDIETLYHEGEEFAEGPILMISYADEEGARVITWKNVDLPYVDVVSTEREMIKRFLRVVKEKDPDVLITYNGDNFDFAYLKKRCEKLGINFALGRDGSEPKIQRMGDRFAVEVKGRIHFDLYPVIRRTINLPTYTLEAVYEAVFGQPKEKVYAEEITTAWETGENLERVARYSMEDAKVTYELGKEFLPMEAQLSRLIGQSLWDVSRSSTGNLVEWFLLRKAYERNELAPNKPDEKELARRRQSYEGGYVKEPERGLWENIVYLDFRSLYPSIIITHNVSPDTLNREGCKEYDVAPQVGHRFCKDFPGFIPSLLGDLLEERQKIKKKMKATIDPIERKLLDYRQRAIKILANSYYGYYGYARARWYCKECAESVTAWGREYITMTIKEIEEKYGFKVIYSDTDGFFATIPGADAETVKKKAMEFLKYINAKLPGALELEYEGFYKRGFFVTKKKYAVIDEEGKITTRGLEIVRRDWSEIAKETQARVLEALLKDGDVEKAVRIVKEVTEKLSKYEVPPEKLVIHEQITRDLKDYKATGPHVAVAKRLAARGVKIRPGTVISYIVLKGSGRIGDRAIPFDEFDPTKHKYDAEYYIENQVLPAVERILRAFGYRKEDLRYQKTRQVGLSAWLKPKGT

SEQ ID NO: 2441 - protein, 774 aa, synthetic construct
MILDTDLITEDGKPVMRIFKKENGEFKIEYDRTFEPYFYALLKDDSAIEEVKKITAERHGTVVTVKRVEKVQKKFLGRPVEVWKLYFTHYQDVPAIADKIREHPAVIDIYEYDIPFAKRYLIDKGLVPMEGDEELKMLAFDIETLYHEGEEFAEGPILMISYADEEGARVITWKNVDLPYVDVVSTEREMIKRFLRVVKEKDPDVLITYNGDNFDFAYLKKRCEKLGINFALGRDGSEPKIQRMGDRFAVEVKGRIHFDLYPVIRRTINLPTYTLEAVYEAVFGQPKEKVYAEEITTAWETGENLERVARYSMEDAKVTYELGKEFLPMEAQLSRLIGQSLWDVSRSSTGNLVEWFLLRKAYERNELAPNKPDEKELARRRQSYEGGYVKEPERGLWENIVYLDFRSLYPSIIITHNVSPDTLNREGCKEYDVAPQVGHRFCKDFPGFIPSLLGDLLEERQKIKKKMKATIDPIERKLLDYRQRAIKILANSYYGYYGYARARWYCKECAESVTAWGREYITMTIKEIEEKYGFKVIYSDTDGFFATIPGADAETVKKKAMEFLKYINAKLPGALELEYEGFYKRGFFVTKKKYAVIDEEGKITTRGLEIVRRDWSEIAKETQARVLEALLKDGDVEKAVRIVKEVTEKLSKYEVPPEKLVIHEQITRDLKDYKATGPHVAVAKRLAARGVKIRPGTVISYIVLKGSGRIGDRAIPFDEFDPTKHKYDAEYYIENQVLPAVERILRAFGYRKEDLRYQKTRQVGLSAWLKPKGT

SEQ ID NO: 2442 - protein, 774 aa, synthetic construct
MILDTDLITEDGKPVMRIFKKENGEFKIEYDRTFEPYFYALLKDDSAIEEVKKITAERHGTVVTVKRVEKVQKKFLGRPVEVWKLYFTHYQDVPAIFDKIREHPAVIDIYEYDIPFAKRYLIDKGLVPMEGDEELKMLAFDIETLYHEGEEFAEGPILMISYADEEGARVITWKNVDLPYVDVVSTEREMIKRFLRVVKEKDPDVLITYNGDNFDFAYLKKRCEKLGINFALGRDGSEPKIQRMGDRFAVEVKGRIHFDLYPVIRRTINLPTYTLEAVYEAVFGQPKEKVYAEEITTAWETGENLERVARYSMEDAKVTYELGKEFLPMEAQLSRLIGQSLWDVSRSSTGNLVEWFLLRKAYERNELAPNKPDEKELARRRQSYEGGYVKEPERGLWENIVYLDFRSLYPSIIITHNVSPDTLNREGCKEYDVAPQVGHRFCKDFPGFIPSLLGDLLEERQKIKKKMKATIDPIERKLLDYRQRAIKILANSYYGYYGYARARWYCKECAESVTAWGREYITMTIKEIEEKYGFKVIYSDTDGFFATIPGADAETVKKKAMEFLKYINAKLPGALELEYEGFYKRGFFVTKKKYAVIDEEGKITTRGLEIVRRDWSEIAKETQARVLEALLKDGDVEKAVRIVKEVTEKLSKYEVPPEKLVIHEQITRDLKDYKATGPHVAVAKRLAARGVKIRPGTVISYIVLKGSGRIGDRAIPFDEFDPTKHKYDAEYYIENQVLPAVERILRAFGYRKEDLRYQKTRQVGLSAWLKPKGT

SEQ ID NO: 2443 - protein, 774 aa, synthetic construct
MILDTDLITEDGKPVMRIFKKENGEFKIEYDRTFEPYFYALLKDDSAIEEVKKITAERHGTVVTVKRVEKVQKKFLGRPVEVWKLYFTHYQDVPAIWDKIREHPAVIDIYEYDIPFAKRYLIDKGLVPMEGDEELKMLAFDIETLYHEGEEFAEGPILMISYADEEGARVITWKNVDLPYVDVVSTEREMIKRFLRVVKEKDPDVLITYNGDNFDFAYLKKRCEKLGINFALGRDGSEPKIQRMGDRFAVEVKGRIHFDLYPVIRRTINLPTYTLEAVYEAVFGQPKEKVYAEEITTAWETGENLERVARYSMEDAKVTYELGKEFLPMEAQLSRLIGQSLWDVSRSSTGNLVEWFLLRKAYERNELAPNKPDEKELARRRQSYEGGYVKEPERGLWENIVYLDFRSLYPSIIITHNVSPDTLNREGCKEYDVAPQVGHRFCKDFPGFIPSLLGDLLEERQKIKKKMKATIDPIERKLLDYRQRAIKILANSYYGYYGYARARWYCKECAESVTAWGREYITMTIKEIEEKYGFKVIYSDTDGFFATIPGADAETVKKKAMEFLKYINAKLPGALELEYEGFYKRGFFVTKKKYAVIDEEGKITTRGLEIVRRDWSEIAKETQARVLEALLKDGDVEKAVRIVKEVTEKLSKYEVPPEKLVIHEQITRDLKDYKATGPHVAVAKRLAARGVKIRPGTVISYIVLKGSGRIGDRAIPFDEFDPTKHKYDAEYYIENQVLPAVERILRAFGYRKEDLRYQKTRQVGLSAWLKPKGT

SEQ ID NO: 2444 - protein, 774 aa, synthetic construct
MILDTDLITEDGKPVMRIFKKENGEFKIEYDRTFEPYFYALLKDDSAIEEVKKITAERHGTVVTVKRVEKVQKKFLGRPVEVWKLYFTHYQDIPAIRDKIREHPAVIDIYEYDIPFAKRYLIDKGLVPMEGDEELKMLAFDIETLYHEGEEFAEGPILMISYADEEGARVITWKNVDLPYVDVVSTEREMIKRFLRVVKEKDPDVLITYNGDNFDFAYLKKRCEKLGINFALGRDGSEPKIQRMGDRFAVEVKGRIHFDLYPVIRRTINLPTYTLEAVYEAVFGQPKEKVYAEEITTAWETGENLERVARYSMEDAKVTYELGKEFLPMEAQLSRLIGQSLWDVSRSSTGNLVEWFLLRKAYERNELAPNKPDEKELARRRQSYEGGYVKEPERGLWENIVYLDFRSLYPSIIITHNVSPDTLNREGCKEYDVAPQVGHRFCKDFPGFIPSLLGDLLEERQKIKKKMKATIDPIERKLLDYRQRAIKILANSYYGYYGYARARWYCKECAESVTAWGREYITMTIKEIEEKYGFKVIYSDTDGFFATIPGADAETVKKKAMEFLKYINAKLPGALELEYEGFYKRGFFVTKKKYAVIDEEGKITTRGLEIVRRDWSEIAKETQARVLEALLKDGDVEKAVRIVKEVTEKLSKYEVPPEKLVIHEQITRDLKDYKATGPHVAVAKRLAARGVKIRPGTVISYIVLKGSGRIGDRAIPFDEFDPTKHKYDAEYYIENQVLPAVERILRAFGYRKEDLRYQKTRQVGLSAWLKPKGT

SEQ ID NO: 2445 - protein, 774 aa, synthetic construct
MILDTDLITEDGKPVMRIFKKENGEFKIEYDRTFEPYFYALLKDDSAIEEVKKITAERHGTVVTVKRVEKVQKKFLGRPVEVWKLYFTHYQDIPAIADKIREHPAVIDIYEYDIPFAKRYLIDKGLVPMEGDEELKMLAFDIETLYHEGEEFAEGPILMISYADEEGARVITWKNVDLPYVDVVSTEREMIKRFLRVVKEKDPDVLITYNGDNFDFAYLKKRCEKLGINFALGRDGSEPKIQRMGDRFAVEVKGRIHFDLYPVIRRTINLPTYTLEAVYEAVFGQPKEKVYAEEITTAWETGENLERVARYSMEDAKVTYELGKEFLPMEAQLSRLIGQSLWDVSRSSTGNLVEWFLLRKAYERNELAPNKPDEKELARRRQSYEGGYVKEPERGLWENIVYLDFRSLYPSIIITHNVSPDTLNREGCKEYDVAPQVGHRFCKDFPGFIPSLLGDLLEERQKIKKKMKATIDPIERKLLDYRQRAIKILANSYYGYYGYARARWYCKECAESVTAWGREYITMTIKEIEEKYGFKVIYSDTDGFFATIPGADAETVKKKAMEFLKYINAKLPGALELEYEGFYKRGFFVTKKKYAVIDEEGKITTRGLEIVRRDWSEIAKETQARVLEALLKDGDVEKAVRIVKEVTEKLSKYEVPPEKLVIHEQITRDLKDYKATGPHVAVAKRLAARGVKIRPGTVISYIVLKGSGRIGDRAIPFDEFDPTKHKYDAEYYIENQVLPAVERILRAFGYRKEDLRYQKTRQVGLSAWLKPKGT

SEQ ID NO: 2446 - protein, 774 aa, synthetic construct
MILDTDLITEDGKPVMRIFKKENGEFKIEYDRTFEPYFYALLKDDSAIEEVKKITAERHGTVVTVKRVEKVQKKFLGRPVEVWKLYFTHYQDIPAIFDKIREHPAVIDIYEYDIPFAKRYLIDKGLVPMEGDEELKMLAFDIETLYHEGEEFAEGPILMISYADEEGARVITWKNVDLPYVDVVSTEREMIKRFLRVVKEKDPDVLITYNGDNFDFAYLKKRCEKLGINFALGRDGSEPKIQRMGDRFAVEVKGRIHFDLYPVIRRTINLPTYTLEAVYEAVFGQPKEKVYAEEITTAWETGENLERVARYSMEDAKVTYELGKEFLPMEAQLSRLIGQSLWDVSRSSTGNLVEWFLLRKAYERNELAPNKPDEKELARRRQSYEGGYVKEPERGLWENIVYLDFRSLYPSIIITHNVSPDTLNREGCKEYDVAPQVGHRFCKDFPGFIPSLLGDLLEERQKIKKKMKATIDPIERKLLDYRQRAIKILANSYYGYYGYARARWYCKECAESVTAWGREYITMTIKEIEEKYGFKVIYSDTDGFFATIPGADAETVKKKAMEFLKYINAKLPGALELEYEGFYKRGFFVTKKKYAVIDEEGKITTRGLEIVRRDWSEIAKETQARVLEALLKDGDVEKAVRIVKEVTEKLSKYEVPPEKLVIHEQITRDLKDYKATGPHVAVAKRLAARGVKIRPGTVISYIVLKGSGRIGDRAIPFDEFDPTKHKYDAEYYIENQVLPAVERILRAFGYRKEDLRYQKTRQVGLSAWLKPKGT

SEQ ID NO: 2447 - protein, 774 aa, synthetic construct
MILDTDLITEDGKPVMRIFKKENGEFKIEYDRTFEPYFYALLKDDSAIEEVKKITAERHGTVVTVKRVEKVQKKFLGRPVEVWKLYFTHYQDIPAIHDKIREHPAVIDIYEYDIPFAKRYLIDKGLVPMEGDEELKMLAFDIETLYHEGEEFAEGPILMISYADEEGARVITWKNVDLPYVDVVSTEREMIKRFLRVVKEKDPDVLITYNGDNFDFAYLKKRCEKLGINFALGRDGSEPKIQRMGDRFAVEVKGRIHFDLYPVIRRTINLPTYTLEAVYEAVFGQPKEKVYAEEITTAWETGENLERVARYSMEDAKVTYELGKEFLPMEAQLSRLIGQSLWDVSRSSTGNLVEWFLLRKAYERNELAPNKPDEKELARRRQSYEGGYVKEPERGLWENIVYLDFRSLYPSIIITHNVSPDTLNREGCKEYDVAPQVGHRFCKDFPGFIPSLLGDLLEERQKIKKKMKATIDPIERKLLDYRQRAIKILANSYYGYYGYARARWYCKECAESVTAWGREYITMTIKEIEEKYGFKVIYSDTDGFFATIPGADAETVKKKAMEFLKYINAKLPGALELEYEGFYKRGFFVTKKKYAVIDEEGKITTRGLEIVRRDWSEIAKETQARVLEALLKDGDVEKAVRIVKEVTEKLSKYEVPPEKLVIHEQITRDLKDYKATGPHVAVAKRLAARGVKIRPGTVISYIVLKGSGRIGDRAIPFDEFDPTKHKYDAEYYIENQVLPAVERILRAFGYRKEDLRYQKTRQVGLSAWLKPKGT

SEQ ID NO: 2448 - protein, 774 aa, synthetic construct
MILDTDLITEDGKPVMRIFKKENGEFKIEYDRTFEPYFYALLKDDSAIEEVKKITAERHGTVVTVKRVEKVQKKFLGRPVEVWKLYFTHYQDIPAIWDKIREHPAVIDIYEYDIPFAKRYLIDKGLVPMEGDEELKMLAFDIETLYHEGEEFAEGPILMISYADEEGARVITWKNVDLPYVDVVSTEREMIKRFLRVVKEKDPDVLITYNGDNFDFAYLKKRCEKLGINFALGRDGSEPKIQRMGDRFAVEVKGRIHFDLYPVIRRTINLPTYTLEAVYEAVFGQPKEKVYAEEITTAWETGENLERVARYSMEDAKVTYELGKEFLPMEAQLSRLIGQSLWDVSRSSTGNLVEWFLLRKAYERNELAPNKPDEKELARRRQSYEGGYVKEPERGLWENIVYLDFRSLYPSIIITHNVSPDTLNREGCKEYDVAPQVGHRFCKDFPGFIPSLLGDLLEERQKIKKKMKATIDPIERKLLDYRQRAIKILANSYYGYYGYARARWYCKECAESVTAWGREYITMTIKEIEEKYGFKVIYSDTDGFFATIPGADAETVKKKAMEFLKYINAKLPGALELEYEGFYKRGFFVTKKKYAVIDEEGKITTRGLEIVRRDWSEIAKETQARVLEALLKDGDVEKAVRIVKEVTEKLSKYEVPPEKLVIHEQITRDLKDYKATGPHVAVAKRLAARGVKIRPGTVISYIVLKGSGRIGDRAIPFDEFDPTKHKYDAEYYIENQVLPAVERILRAFGYRKEDLRYQKTRQVGLSAWLKPKGT

SEQ ID NO: 2449 - protein, 774 aa, synthetic construct
MILDTDLITEDGKPVMRIFKKENGEFKIEYDRTFEPYFYALLKDDSAIEEVKKITAERHGTVVTVKRVEKVQKKFLGRPVEVWKLYFTHYQDQPAIRDKIREHPAVIDIYEYDIPFAKRYLIDKGLVPMEGDEELKMLAFDIETLYHEGEEFAEGPILMISYADEEGARVITWKNVDLPYVDVVSTEREMIKRFLRVVKEKDPDVLITYNGDNFDFAYLKKRCEKLGINFALGRDGSEPKIQRMGDRFAVEVKGRIHFDLYPVIRRTINLPTYTLEAVYEAVFGQPKEKVYAEEITTAWETGENLERVARYSMEDAKVTYELGKEFLPMEAQLSRLIGQSLWDVSRSSTGNLVEWFLLRKAYERNELAPNKPDEKELARRRQSYEGGYVKEPERGLWENIVYLDFRSLYPSIIITHNVSPDTLNREGCKEYDVAPQVGHRFCKDFPGFIPSLLGDLLEERQKIKKKMKATIDPIERKLLDYRQRAIKILANSYYGYYGYARARWYCKECAESVTAWGREYITMTIKEIEEKYGFKVIYSDTDGFFATIPGADAETVKKKAMEFLKYINAKLPGALELEYEGFYKRGFFVTKKKYAVIDEEGKITTRGLEIVRRDWSEIAKETQARVLEALLKDGDVEKAVRIVKEVTEKLSKYEVPPEKLVIHEQITRDLKDYKATGPHVAVAKRLAARGVKIRPGTVISYIVLKGSGRIGDRAIPFDEFDPTKHKYDAEYYIENQVLPAVERILRAFGYRKEDLRYQKTRQVGLSAWLKPKGT

SEQ ID NO: 2450 - protein, 774 aa, synthetic construct
MILDTDLITEDGKPVMRIFKKENGEFKIEYDRTFEPYFYALLKDDSAIEEVKKITAERHGTVVTVKRVEKVQKKFLGRPVEVWKLYFTHPQDVPAIADKIREHPAVIDIYEYDIPFAKRYLIDKGLVPMEGDEELKMLAFDIETLYHEGEEFAEGPILMISYADEEGARVITWKNVDLPYVDVVSTEREMIKRFLRVVKEKDPDVLITYNGDNFDFAYLKKRCEKLGINFALGRDGSEPKIQRMGDRFAVEVKGRIHFDLYPVIRRTINLPTYTLEAVYEAVFGQPKEKVYAEEITTAWETGENLERVARYSMEDAKVTYELGKEFLPMEAQLSRLIGQSLWDVSRSSTGNLVEWFLLRKAYERNELAPNKPDEKELARRRQSYEGGYVKEPERGLWENIVYLDFRSLYPSIIITHNVSPDTLNREGCKEYDVAPQVGHRFCKDFPGFIPSLLGDLLEERQKIKKKMKATIDPIERKLLDYRQRAIKILANSYYGYYGYARARWYCKECAESVTAWGREYITMTIKEIEEKYGFKVIYSDTDGFFATIPGADAETVKKKAMEFLKYINAKLPGALELEYEGFYKRGFFVTKKKYAVIDEEGKITTRGLEIVRRDWSEIAKETQARVLEALLKDGDVEKAVRIVKEVTEKLSKYEVPPEKLVIHEQITRDLKDYKATGPHVAVAKRLAARGVKIRPGTVISYIVLKGSGRIGDRAIPFDEFDPTKHKYDAEYYIENQVLPAVERILRAFGYRKEDLRYQKTRQVGLSAWLKPKGT

SEQ ID NO: 2451 - protein, 774 aa, synthetic construct
MILDTDLITEDGKPVMRIFKKENGEFKIEYDRTFEPYFYALLKDDSAIEEVKKITAERHGTVVTVKRVEKVQKKFLGRPVEVWKLYFTHPQDVPAIFDKIREHPAVIDIYEYDIPFAKRYLIDKGLVPMEGDEELKMLAFDIETLYHEGEEFAEGPILMISYADEEGARVITWKNVDLPYVDVVSTEREMIKRFLRVVKEKDPDVLITYNGDNFDFAYLKKRCEKLGINFALGRDGSEPKIQRMGDRFAVEVKGRIHFDLYPVIRRTINLPTYTLEAVYEAVFGQPKEKVYAEEITTAWETGENLERVARYSMEDAKVTYELGKEFLPMEAQLSRLIGQSLWDVSRSSTGNLVEWFLLRKAYERNELAPNKPDEKELARRRQSYEGGYVKEPERGLWENIVYLDFRSLYPSIIITHNVSPDTLNREGCKEYDVAPQVGHRFCKDFPGFIPSLLGDLLEERQKIKKKMKATIDPIERKLLDYRQRAIKILANSYYGYYGYARARWYCKECAESVTAWGREYITMTIKEIEEKYGFKVIYSDTDGFFATIPGADAETVKKKAMEFLKYINAKLPGALELEYEGFYKRGFFVTKKKYAVIDEEGKITTRGLEIVRRDWSEIAKETQARVLEALLKDGDVEKAVRIVKEVTEKLSKYEVPPEKLVIHEQITRDLKDYKATGPHVAVAKRLAARGVKIRPGTVISYIVLKGSGRIGDRAIPFDEFDPTKHKYDAEYYIENQVLPAVERILRAFGYRKEDLRYQKTRQVGLSAWLKPKGT

SEQ ID NO: 2452 - protein, 774 aa, synthetic construct
MILDTDLITEDGKPVMRIFKKENGEFKIEYDRTFEPYFYALLKDDSAIEEVKKITAERHGTVVTVKRVEKVQKKFLGRPVEVWKLYFTHPQDVPAIHDKIREHPAVIDIYEYDIPFAKRYLIDKGLVPMEGDEELKMLAFDIETLYHEGEEFAEGPILMISYADEEGARVITWKNVDLPYVDVVSTEREMIKRFLRVVKEKDPDVLITYNGDNFDFAYLKKRCEKLGINFALGRDGSEPKIQRMGDRFAVEVKGRIHFDLYPVIRRTINLPTYTLEAVYEAVFGQPKEKVYAEEITTAWETGENLERVARYSMEDAKVTYELGKEFLPMEAQLSRLIGQSLWDVSRSSTGNLVEWFLLRKAYERNELAPNKPDEKELARRRQSYEGGYVKEPERGLWENIVYLDFRSLYPSIIITHNVSPDTLNREGCKEYDVAPQVGHRFCKDFPGFIPSLLGDLLEERQKIKKKMKATIDPIERKLLDYRQRAIKILANSYYGYYGYARARWYCKECAESVTAWGREYITMTIKEIEEKYGFKVIYSDTDGFFATIPGADAETVKKKAMEFLKYINAKLPGALELEYEGFYKRGFFVTKKKYAVIDEEGKITTRGLEIVRRDWSEIAKETQARVLEALLKDGDVEKAVRIVKEVTEKLSKYEVPPEKLVIHEQITRDLKDYKATGPHVAVAKRLAARGVKIRPGTVISYIVLKGSGRIGDRAIPFDEFDPTKHKYDAEYYIENQVLPAVERILRAFGYRKEDLRYQKTRQVGLSAWLKPKGT

SEQ ID NO: 2453 - protein, 774 aa, synthetic construct
MILDTDLITEDGKPVMRIFKKENGEFKIEYDRTFEPYFYALLKDDSAIEEVKKITAERHGTVVTVKRVEKVQKKFLGRPVEVWKLYFTHPQDVPAIWDKIREHPAVIDIYEYDIPFAKRYLIDKGLVPMEGDEELKMLAFDIETLYHEGEEFAEGPILMISYADEEGARVITWKNVDLPYVDVVSTEREMIKRFLRVVKEKDPDVLITYNGDNFDFAYLKKRCEKLGINFALGRDGSEPKIQRMGDRFAVEVKGRIHFDLYPVIRRTINLPTYTLEAVYEAVFGQPKEKVYAEEITTAWETGENLERVARYSMEDAKVTYELGKEFLPMEAQLSRLIGQSLWDVSRSSTGNLVEWFLLRKAYERNELAPNKPDEKELARRRQSYEGGYVKEPERGLWENIVYLDFRSLYPSIIITHNVSPDTLNREGCKEYDVAPQVGHRFCKDFPGFIPSLLGDLLEERQKIKKKMKATIDPIERKLLDYRQRAIKILANSYYGYYGYARARWYCKECAESVTAWGREYITMTIKEIEEKYGFKVIYSDTDGFFATIPGADAETVKKKAMEFLKYINAKLPGALELEYEGFYKRGFFVTKKKYAVIDEEGKITTRGLEIVRRDWSEIAKETQARVLEALLKDGDVEKAVRIVKEVTEKLSKYEVPPEKLVIHEQITRDLKDYKATGPHVAVAKRLAARGVKIRPGTVISYIVLKGSGRIGDRAIPFDEFDPTKHKYDAEYYIENQVLPAVERILRAFGYRKEDLRYQKTRQVGLSAWLKPKGT

SEQ ID NO: 2454 - protein, 774 aa, synthetic construct
MILDTDLITEDGKPVMRIFKKENGEFKIEYDRTFEPYFYALLKDDSAIEEVKKITAERHGTVVTVKRVEKVQKKFLGRPVEVWKLYFTHPQDIPAIRDKIREHPAVIDIYEYDIPFAKRYLIDKGLVPMEGDEELKMLAFDIETLYHEGEEFAEGPILMISYADEEGARVITWKNVDLPYVDVVSTEREMIKRFLRVVKEKDPDVLITYNGDNFDFAYLKKRCEKLGINFALGRDGSEPKIQRMGDRFAVEVKGRIHFDLYPVIRRTINLPTYTLEAVYEAVFGQPKEKVYAEEITTAWETGENLERVARYSMEDAKVTYELGKEFLPMEAQLSRLIGQSLWDVSRSSTGNLVEWFLLRKAYERNELAPNKPDEKELARRRQSYEGGYVKEPERGLWENIVYLDFRSLYPSIIITHNVSPDTLNREGCKEYDVAPQVGHRFCKDFPGFIPSLLGDLLEERQKIKKKMKATIDPIERKLLDYRQRAIKILANSYYGYYGYARARWYCKECAESVTAWGREYITMTIKEIEEKYGFKVIYSDTDGFFATIPGADAETVKKKAMEFLKYINAKLPGALELEYEGFYKRGFFVTKKKYAVIDEEGKITTRGLEIVRRDWSEIAKETQARVLEALLKDGDVEKAVRIVKEVTEKLSKYEVPPEKLVIHEQITRDLKDYKATGPHVAVAKRLAARGVKIRPGTVISYIVLKGSGRIGDRAIPFDEFDPTKHKYDAEYYIENQVLPAVERILRAFGYRKEDLRYQKTRQVGLSAWLKPKGT

SEQ ID NO: 2455 - protein, 774 aa, synthetic construct
MILDTDLITEDGKPVMRIFKKENGEFKIEYDRTFEPYFYALLKDDSAIEEVKKITAERHGTVVTVKRVEKVQKKFLGRPVEVWKLYFTHPQDIPAIADKIREHPAVIDIYEYDIPFAKRYLIDKGLVPMEGDEELKMLAFDIETLYHEGEEFAEGPILMISYADEEGARVITWKNVDLPYVDVVSTEREMIKRFLRVVKEKDPDVLITYNGDNFDFAYLKKRCEKLGINFALGRDGSEPKIQRMGDRFAVEVKGRIHFDLYPVIRRTINLPTYTLEAVYEAVFGQPKEKVYAEEITTAWETGENLERVARYSMEDAKVTYELGKEFLPMEAQLSRLIGQSLWDVSRSSTGNLVEWFLLRKAYERNELAPNKPDEKELARRRQSYEGGYVKEPERGLWENIVYLDFRSLYPSIIITHNVSPDTLNREGCKEYDVAPQVGHRFCKDFPGFIPSLLGDLLEERQKIKKKMKATIDPIERKLLDYRQRAIKILANSYYGYYGYARARWYCKECAESVTAWGREYITMTIKEIEEKYGFKVIYSDTDGFFATIPGADAETVKKKAMEFLKYINAKLPGALELEYEGFYKRGFFVTKKKYAVIDEEGKITTRGLEIVRRDWSEIAKETQARVLEALLKDGDVEKAVRIVKEVTEKLSKYEVPPEKLVIHEQITRDLKDYKATGPHVAVAKRLAARGVKIRPGTVISYIVLKGSGRIGDRAIPFDEFDPTKHKYDAEYYIENQVLPAVERILRAFGYRKEDLRYQKTRQVGLSAWLKPKGT

SEQ ID NO: 2456 - protein, 774 aa, synthetic construct
MILDTDLITEDGKPVMRIFKKENGEFKIEYDRTFEPYFYALLKDDSAIEEVKKITAERHGTVVTVKRVEKVQKKFLGRPVEVWKLYFTHPQDIPAIFDKIREHPAVIDIYEYDIPFAKRYLIDKGLVPMEGDEELKMLAFDIETLYHEGEEFAEGPILMISYADEEGARVITWKNVDLPYVDVVSTEREMIKRFLRVVKEKDPDVLITYNGDNFDFAYLKKRCEKLGINFALGRDGSEPKIQRMGDRFAVEVKGRIHFDLYPVIRRTINLPTYTLEAVYEAVFGQPKEKVYAEEITTAWETGENLERVARYSMEDAKVTYELGKEFLPMEAQLSRLIGQSLWDVSRSSTGNLVEWFLLRKAYERNELAPNKPDEKELARRRQSYEGGYVKEPERGLWENIVYLDFRSLYPSIIITHNVSPDTLNREGCKEYDVAPQVGHRFCKDFPGFIPSLLGDLLEERQKIKKKMKATIDPIERKLLDYRQRAIKILANSYYGYYGYARARWYCKECAESVTAWGREYITMTIKEIEEKYGFKVIYSDTDGFFATIPGADAETVKKKAMEFLKYINAKLPGALELEYEGFYKRGFFVTKKKYAVIDEEGKITTRGLEIVRRDWSEIAKETQARVLEALLKDGDVEKAVRIVKEVTEKLSKYEVPPEKLVIHEQITRDLKDYKATGPHVAVAKRLAARGVKIRPGTVISYIVLKGSGRIGDRAIPFDEFDPTKHKYDAEYYIENQVLPAVERILRAFGYRKEDLRYQKTRQVGLSAWLKPKGT

SEQ ID NO: 2457 - protein, 774 aa, synthetic construct
MILDTDLITEDGKPVMRIFKKENGEFKIEYDRTFEPYFYALLKDDSAIEEVKKITAERHGTVVTVKRVEKVQKKFLGRPVEVWKLYFTHPQDIPAIHDKIREHPAVIDIYEYDIPFAKRYLIDKGLVPMEGDEELKMLAFDIETLYHEGEEFAEGPILMISYADEEGARVITWKNVDLPYVDVVSTEREMIKRFLRVVKEKDPDVLITYNGDNFDFAYLKKRCEKLGINFALGRDGSEPKIQRMGDRFAVEVKGRIHFDLYPVIRRTINLPTYTLEAVYEAVFGQPKEKVYAEEITTAWETGENLERVARYSMEDAKVTYELGKEFLPMEAQLSRLIGQSLWDVSRSSTGNLVEWFLLRKAYERNELAPNKPDEKELARRRQSYEGGYVKEPERGLWENIVYLDFRSLYPSIIITHNVSPDTLNREGCKEYDVAPQVGHRFCKDFPGFIPSLLGDLLEERQKIKKKMKATIDPIERKLLDYRQRAIKILANSYYGYYGYARARWYCKECAESVTAWGREYITMTIKEIEEKYGFKVIYSDTDGFFATIPGADAETVKKKAMEFLKYINAKLPGALELEYEGFYKRGFFVTKKKYAVIDEEGKITTRGLEIVRRDWSEIAKETQARVLEALLKDGDVEKAVRIVKEVTEKLSKYEVPPEKLVIHEQITRDLKDYKATGPHVAVAKRLAARGVKIRPGTVISYIVLKGSGRIGDRAIPFDEFDPTKHKYDAEYYIENQVLPAVERILRAFGYRKEDLRYQKTRQVGLSAWLKPKGT

SEQ ID NO: 2458 - protein, 774 aa, synthetic construct
MILDTDLITEDGKPVMRIFKKENGEFKIEYDRTFEPYFYALLKDDSAIEEVKKITAERHGTVVTVKRVEKVQKKFLGRPVEVWKLYFTHPQDIPAIWDKIREHPAVIDIYEYDIPFAKRYLIDKGLVPMEGDEELKMLAFDIETLYHEGEEFAEGPILMISYADEEGARVITWKNVDLPYVDVVSTEREMIKRFLRVVKEKDPDVLITYNGDNFDFAYLKKRCEKLGINFALGRDGSEPKIQRMGDRFAVEVKGRIHFDLYPVIRRTINLPTYTLEAVYEAVFGQPKEKVYAEEITTAWETGENLERVARYSMEDAKVTYELGKEFLPMEAQLSRLIGQSLWDVSRSSTGNLVEWFLLRKAYERNELAPNKPDEKELARRRQSYEGGYVKEPERGLWENIVYLDFRSLYPSIIITHNVSPDTLNREGCKEYDVAPQVGHRFCKDFPGFIPSLLGDLLEERQKIKKKMKATIDPIERKLLDYRQRAIKILANSYYGYYGYARARWYCKECAESVTAWGREYITMTIKEIEEKYGFKVIYSDTDGFFATIPGADAETVKKKAMEFLKYINAKLPGALELEYEGFYKRGFFVTKKKYAVIDEEGKITTRGLEIVRRDWSEIAKETQARVLEALLKDGDVEKAVRIVKEVTEKLSKYEVPPEKLVIHEQITRDLKDYKATGPHVAVAKRLAARGVKIRPGTVISYIVLKGSGRIGDRAIPFDEFDPTKHKYDAEYYIENQVLPAVERILRAFGYRKEDLRYQKTRQVGLSAWLKPKGT

SEQ ID NO: 2459 - protein, 774 aa, synthetic construct
MILDTDLITEDGKPVMRIFKKENGEFKIEYDRTFEPYFYALLKDDSAIEEVKKITAERHGTVVTVKRVEKVQKKFLGRPVEVWKLYFTHPQDKPAIRDKIREHPAVIDIYEYDIPFAKRYLIDKGLVPMEGDEELKMLAFDIETLYHEGEEFAEGPILMISYADEEGARVITWKNVDLPYVDVVSTEREMIKRFLRVVKEKDPDVLITYNGDNFDFAYLKKRCEKLGINFALGRDGSEPKIQRMGDRFAVEVKGRIHFDLYPVIRRTINLPTYTLEAVYEAVFGQPKEKVYAEEITTAWETGENLERVARYSMEDAKVTYELGKEFLPMEAQLSRLIGQSLWDVSRSSTGNLVEWFLLRKAYERNELAPNKPDEKELARRRQSYEGGYVKEPERGLWENIVYLDFRSLYPSIIITHNVSPDTLNREGCKEYDVAPQVGHRFCKDFPGFIPSLLGDLLEERQKIKKKMKATIDPIERKLLDYRQRAIKILANSYYGYYGYARARWYCKECAESVTAWGREYITMTIKEIEEKYGFKVIYSDTDGFFATIPGADAETVKKKAMEFLKYINAKLPGALELEYEGFYKRGFFVTKKKYAVIDEEGKITTRGLEIVRRDWSEIAKETQARVLEALLKDGDVEKAVRIVKEVTEKLSKYEVPPEKLVIHEQITRDLKDYKATGPHVAVAKRLAARGVKIRPGTVISYIVLKGSGRIGDRAIPFDEFDPTKHKYDAEYYIENQVLPAVERILRAFGYRKEDLRYQKTRQVGLSAWLKPKGT

SEQ ID NO: 2460 - protein, 774 aa, synthetic construct
MILDTDLITEDGKPVMRIFKKENGEFKIEYDRTFEPYFYALLKDDSAIEEVKKITAERHGTVVTVKRVEKVQKKFLGRPVEVWKLYFTHPQDKPAIADKIREHPAVIDIYEYDIPFAKRYLIDKGLVPMEGDEELKMLAFDIETLYHEGEEFAEGPILMISYADEEGARVITWKNVDLPYVDVVSTEREMIKRFLRVVKEKDPDVLITYNGDNFDFAYLKKRCEKLGINFALGRDGSEPKIQRMGDRFAVEVKGRIHFDLYPVIRRTINLPTYTLEAVYEAVFGQPKEKVYAEEITTAWETGENLERVARYSMEDAKVTYELGKEFLPMEAQLSRLIGQSLWDVSRSSTGNLVEWFLLRKAYERNELAPNKPDEKELARRRQSYEGGYVKEPERGLWENIVYLDFRSLYPSIIITHNVSPDTLNREGCKEYDVAPQVGHRFCKDFPGFIPSLLGDLLEERQKIKKKMKATIDPIERKLLDYRQRAIKILANSYYGYYGYARARWYCKECAESVTAWGREYITMTIKEIEEKYGFKVIYSDTDGFFATIPGADAETVKKKAMEFLKYINAKLPGALELEYEGFYKRGFFVTKKKYAVIDEEGKITTRGLEIVRRDWSEIAKETQARVLEALLKDGDVEKAVRIVKEVTEKLSKYEVPPEKLVIHEQITRDLKDYKATGPHVAVAKRLAARGVKIRPGTVISYIVLKGSGRIGDRAIPFDEFDPTKHKYDAEYYIENQVLPAVERILRAFGYRKEDLRYQKTRQVGLSAWLKPKGT

SEQ ID NO: 2461 - protein, 774 aa, synthetic construct
MILDTDLITEDGKPVMRIFKKENGEFKIEYDRTFEPYFYALLKDDSAIEEVKKITAERHGTVVTVKRVEKVQKKFLGRPVEVWKLYFTHPQDKPAIWDKIREHPAVIDIYEYDIPFAKRYLIDKGLVPMEGDEELKMLAFDIETLYHEGEEFAEGPILMISYADEEGARVITWKNVDLPYVDVVSTEREMIKRFLRVVKEKDPDVLITYNGDNFDFAYLKKRCEKLGINFALGRDGSEPKIQRMGDRFAVEVKGRIHFDLYPVIRRTINLPTYTLEAVYEAVFGQPKEKVYAEEITTAWETGENLERVARYSMEDAKVTYELGKEFLPMEAQLSRLIGQSLWDVSRSSTGNLVEWFLLRKAYERNELAPNKPDEKELARRRQSYEGGYVKEPERGLWENIVYLDFRSLYPSIIITHNVSPDTLNREGCKEYDVAPQVGHRFCKDFPGFIPSLLGDLLEERQKIKKKMKATIDPIERKLLDYRQRAIKILANSYYGYYGYARARWYCKECAESVTAWGREYITMTIKEIEEKYGFKVIYSDTDGFFATIPGADAETVKKKAMEFLKYINAKLPGALELEYEGFYKRGFFVTKKKYAVIDEEGKITTRGLEIVRRDWSEIAKETQARVLEALLKDGDVEKAVRIVKEVTEKLSKYEVPPEKLVIHEQITRDLKDYKATGPHVAVAKRLAARGVKIRPGTVISYIVLKGSGRIGDRAIPFDEFDPTKHKYDAEYYIENQVLPAVERILRAFGYRKEDLRYQKTRQVGLSAWLKPKGT

SEQ ID NO: 2462 - protein, 774 aa, synthetic construct
MILDTDLITEDGKPVMRIFKKENGEFKIEYDRTFEPYFYALLKDDSAIEEVKKITAERHGTVVTVKRVEKVQKKFLGRPVEVWKLYFTHPQDQPAIRDKIREHPAVIDIYEYDIPFAKRYLIDKGLVPMEGDEELKMLAFDIETLYHEGEEFAEGPILMISYADEEGARVITWKNVDLPYVDVVSTEREMIKRFLRVVKEKDPDVLITYNGDNFDFAYLKKRCEKLGINFALGRDGSEPKIQRMGDRFAVEVKGRIHFDLYPVIRRTINLPTYTLEAVYEAVFGQPKEKVYAEEITTAWETGENLERVARYSMEDAKVTYELGKEFLPMEAQLSRLIGQSLWDVSRSSTGNLVEWFLLRKAYERNELAPNKPDEKELARRRQSYEGGYVKEPERGLWENIVYLDFRSLYPSIIITHNVSPDTLNREGCKEYDVAPQVGHRFCKDFPGFIPSLLGDLLEERQKIKKKMKATIDPIERKLLDYRQRAIKILANSYYGYYGYARARWYCKECAESVTAWGREYITMTIKEIEEKYGFKVIYSDTDGFFATIPGADAETVKKKAMEFLKYINAKLPGALELEYEGFYKRGFFVTKKKYAVIDEEGKITTRGLEIVRRDWSEIAKETQARVLEALLKDGDVEKAVRIVKEVTEKLSKYEVPPEKLVIHEQITRDLKDYKATGPHVAVAKRLAARGVKIRPGTVISYIVLKGSGRIGDRAIPFDEFDPTKHKYDAEYYIENQVLPAVERILRAFGYRKEDLRYQKTRQVGLSAWLKPKGT

SEQ ID NO: 2463 - protein, 774 aa, synthetic construct
MILDTDLITEDGKPVMRIFKKENGEFKIEYDRTFEPYFYALLKDDSAIEEVKKITAERHGTVVTVKRVEKVQKKFLGRPVEVWKLYFTHPQDQPAIADKIREHPAVIDIYEYDIPFAKRYLIDKGLVPMEGDEELKMLAFDIETLYHEGEEFAEGPILMISYADEEGARVITWKNVDLPYVDVVSTEREMIKRFLRVVKEKDPDVLITYNGDNFDFAYLKKRCEKLGINFALGRDGSEPKIQRMGDRFAVEVKGRIHFDLYPVIRRTINLPTYTLEAVYEAVFGQPKEKVYAEEITTAWETGENLERVARYSMEDAKVTYELGKEFLPMEAQLSRLIGQSLWDVSRSSTGNLVEWFLLRKAYERNELAPNKPDEKELARRRQSYEGGYVKEPERGLWENIVYLDFRSLYPSIIITHNVSPDTLNREGCKEYDVAPQVGHRFCKDFPGFIPSLLGDLLEERQKIKKKMKATIDPIERKLLDYRQRAIKILANSYYGYYGYARARWYCKECAESVTAWGREYITMTIKEIEEKYGFKVIYSDTDGFFATIPGADAETVKKKAMEFLKYINAKLPGALELEYEGFYKRGFFVTKKKYAVIDEEGKITTRGLEIVRRDWSEIAKETQARVLEALLKDGDVEKAVRIVKEVTEKLSKYEVPPEKLVIHEQITRDLKDYKATGPHVAVAKRLAARGVKIRPGTVISYIVLKGSGRIGDRAIPFDEFDPTKHKYDAEYYIENQVLPAVERILRAFGYRKEDLRYQKTRQVGLSAWLKPKGT

SEQ ID NO: 2464 - protein, 774 aa, synthetic construct
MILDTDLITEDGKPVMRIFKKENGEFKIEYDRTFEPYFYALLKDDSAIEEVKKITAERHGTVVTVKRVEKVQKKFLGRPVEVWKLYFTHPQDQPAIFDKIREHPAVIDIYEYDIPFAKRYLIDKGLVPMEGDEELKMLAFDIETLYHEGEEFAEGPILMISYADEEGARVITWKNVDLPYVDVVSTEREMIKRFLRVVKEKDPDVLITYNGDNFDFAYLKKRCEKLGINFALGRDGSEPKIQRMGDRFAVEVKGRIHFDLYPVIRRTINLPTYTLEAVYEAVFGQPKEKVYAEEITTAWETGENLERVARYSMEDAKVTYELGKEFLPMEAQLSRLIGQSLWDVSRSSTGNLVEWFLLRKAYERNELAPNKPDEKELARRRQSYEGGYVKEPERGLWENIVYLDFRSLYPSIIITHNVSPDTLNREGCKEYDVAPQVGHRFCKDFPGFIPSLLGDLLEERQKIKKKMKATIDPIERKLLDYRQRAIKILANSYYGYYGYARARWYCKECAESVTAWGREYITMTIKEIEEKYGFKVIYSDTDGFFATIPGADAETVKKKAMEFLKYINAKLPGALELEYEGFYKRGFFVTKKKYAVIDEEGKITTRGLEIVRRDWSEIAKETQARVLEALLKDGDVEKAVRIVKEVTEKLSKYEVPPEKLVIHEQITRDLKDYKATGPHVAVAKRLAARGVKIRPGTVISYIVLKGSGRIGDRAIPFDEFDPTKHKYDAEYYIENQVLPAVERILRAFGYRKEDLRYQKTRQVGLSAWLKPKGT

SEQ ID NO: 2465 - protein, 774 aa, synthetic construct
MILDTDLITEDGKPVMRIFKKENGEFKIEYDRTFEPYFYALLKDDSAIEEVKKITAERHGTVVTVKRVEKVQKKFLGRPVEVWKLYFTHPQDQPAIHDKIREHPAVIDIYEYDIPFAKRYLIDKGLVPMEGDEELKMLAFDIETLYHEGEEFAEGPILMISYADEEGARVITWKNVDLPYVDVVSTEREMIKRFLRVVKEKDPDVLITYNGDNFDFAYLKKRCEKLGINFALGRDGSEPKIQRMGDRFAVEVKGRIHFDLYPVIRRTINLPTYTLEAVYEAVFGQPKEKVYAEEITTAWETGENLERVARYSMEDAKVTYELGKEFLPMEAQLSRLIGQSLWDVSRSSTGNLVEWFLLRKAYERNELAPNKPDEKELARRRQSYEGGYVKEPERGLWENIVYLDFRSLYPSIIITHNVSPDTLNREGCKEYDVAPQVGHRFCKDFPGFIPSLLGDLLEERQKIKKKMKATIDPIERKLLDYRQRAIKILANSYYGYYGYARARWYCKECAESVTAWGREYITMTIKEIEEKYGFKVIYSDTDGFFATIPGADAETVKKKAMEFLKYINAKLPGALELEYEGFYKRGFFVTKKKYAVIDEEGKITTRGLEIVRRDWSEIAKETQARVLEALLKDGDVEKAVRIVKEVTEKLSKYEVPPEKLVIHEQITRDLKDYKATGPHVAVAKRLAARGVKIRPGTVISYIVLKGSGRIGDRAIPFDEFDPTKHKYDAEYYIENQVLPAVERILRAFGYRKEDLRYQKTRQVGLSAWLKPKGT

SEQ ID NO: 2466 - protein, 774 aa, synthetic construct
MILDTDLITEDGKPVMRIFKKENGEFKIEYDRTFEPYFYALLKDDSAIEEVKKITAERHGTVVTVKRVEKVQKKFLGRPVEVWKLYFTHPQDRPAIRDKIREHPAVIDIYEYDIPFAKRYLIDKGLVPMEGDEELKMLAFDIETLYHEGEEFAEGPILMISYADEEGARVITWKNVDLPYVDVVSTEREMIKRFLRVVKEKDPDVLITYNGDNFDFAYLKKRCEKLGINFALGRDGSEPKIQRMGDRFAVEVKGRIHFDLYPVIRRTINLPTYTLEAVYEAVFGQPKEKVYAEEITTAWETGENLERVARYSMEDAKVTYELGKEFLPMEAQLSRLIGQSLWDVSRSSTGNLVEWFLLRKAYERNELAPNKPDEKELARRRQSYEGGYVKEPERGLWENIVYLDFRSLYPSIIITHNVSPDTLNREGCKEYDVAPQVGHRFCKDFPGFIPSLLGDLLEERQKIKKKMKATIDPIERKLLDYRQRAIKILANSYYGYYGYARARWYCKECAESVTAWGREYITMTIKEIEEKYGFKVIYSDTDGFFATIPGADAETVKKKAMEFLKYINAKLPGALELEYEGFYKRGFFVTKKKYAVIDEEGKITTRGLEIVRRDWSEIAKETQARVLEALLKDGDVEKAVRIVKEVTEKLSKYEVPPEKLVIHEQITRDLKDYKATGPHVAVAKRLAARGVKIRPGTVISYIVLKGSGRIGDRAIPFDEFDPTKHKYDAEYYIENQVLPAVERILRAFGYRKEDLRYQKTRQVGLSAWLKPKGT

SEQ ID NO: 2467 - protein, 774 aa, synthetic construct
MILDTDLITEDGKPVMRIFKKENGEFKIEYDRTFEPYFYALLKDDSAIEEVKKITAERHGTVVTVKRVEKVQKKFLGRPVEVWKLYFTHPQDRPAIADKIREHPAVIDIYEYDIPFAKRYLIDKGLVPMEGDEELKMLAFDIETLYHEGEEFAEGPILMISYADEEGARVITWKNVDLPYVDVVSTEREMIKRFLRVVKEKDPDVLITYNGDNFDFAYLKKRCEKLGINFALGRDGSEPKIQRMGDRFAVEVKGRIHFDLYPVIRRTINLPTYTLEAVYEAVFGQPKEKVYAEEITTAWETGENLERVARYSMEDAKVTYELGKEFLPMEAQLSRLIGQSLWDVSRSSTGNLVEWFLLRKAYERNELAPNKPDEKELARRRQSYEGGYVKEPERGLWENIVYLDFRSLYPSIIITHNVSPDTLNREGCKEYDVAPQVGHRFCKDFPGFIPSLLGDLLEERQKIKKKMKATIDPIERKLLDYRQRAIKILANSYYGYYGYARARWYCKECAESVTAWGREYITMTIKEIEEKYGFKVIYSDTDGFFATIPGADAETVKKKAMEFLKYINAKLPGALELEYEGFYKRGFFVTKKKYAVIDEEGKITTRGLEIVRRDWSEIAKETQARVLEALLKDGDVEKAVRIVKEVTEKLSKYEVPPEKLVIHEQITRDLKDYKATGPHVAVAKRLAARGVKIRPGTVISYIVLKGSGRIGDRAIPFDEFDPTKHKYDAEYYIENQVLPAVERILRAFGYRKEDLRYQKTRQVGLSAWLKPKGT

SEQ ID NO: 2468 - protein, 774 aa, synthetic construct
MILDTDLITEDGKPVWRIFKKENGEFKIEYDRTFEPYFYALLKDDSAIEEVKKITAERHGTVVTVKRVEKVQKKFLGRPVEVWKLYFTHPQDVPAIRDKIREHPAVIDIYEYDIPFAKRYLIDKGLVPMEGDEELKMLAFDIETLYHEGEEFAEGPILMISYADEEGARVITWKNVDLPYVDVVSTEREMIKRFLRVVKEKDPDVLITYNGDNFDFAYLKKRCEKLGINFALGRDGSEPKIQRMGDRFAVEVKGRIHFDLYPVIRRTINLPTYTLEAVYEAVFGQPKEKVYAEEITTAWETGENLERVARYSMEDAKVTYELGKEFLPMEAQLSRLIGQSLWDVSRSSTGNLVEWFLLRKAYERNELAPNKPDEKELARRRQSYEGGYVKEPERGLWENIVYLDFRSLYPSIIITHNVSPDTLNREGCKEYDVAPQVGHRFCKDFPGFIPSLLGDLLEERQKIKKKMKATIDPIERKLLDYRQRAIKILANSYYGYYGYARARWYCKECAESVTAWGREYITMTIKEIEEKYGFKVIYSDTDGFFATIPGADAETVKKKAMEFLKYINAKLPGALELEYEGFYKRGFFVTKKKYAVIDEEGKITTRGLEIVRRDWSEIAKETQARVLEALLKDGDVEKAVRIVKEVTEKLSKYEVPPEKLVIHEQITRDLKDYKATGPHVAVAKRLAARGVKIRPGTVISYIVLKGSGRIGDRAIPFDEFDPTKHKYDAEYYIENQVLPAVERILRAFGYRKEDLRYQKTRQVGLSAWLKPKGT

SEQ ID NO: 2469 - protein, 774 aa, synthetic construct
MILDTDLITEDGKPVWRIFKKENGEFKIEYDRTFEAYFYALLKDDSAIEEVKKITAERHGTVVTVKRVEKVQKKFLGRPVEVWKLYFTHPQDVPAIRDKIREHPAVIDIYEYDIPFAKRYLIDKGLVPMEGDEELKMLAFDIETLYHEGEEFAEGPILMISYADEEGARVITWKNVDLPYVDVVSTEREMIKRFLRVVKEKDPDVLITYNGDNFDFAYLKKRCEKLGINFALGRDGSEPKIQRMGDRFAVEVKGRIHFDLYPVIRRTINLPTYTLEAVYEAVFGQPKEKVYAEEITTAWETGENLERVARYSMEDAKVTYELGKEFLPMEAQLSRLIGQSLWDVSRSSTGNLVEWFLLRKAYERNELAPNKPDEKELARRRQSYEGGYVKEPERGLWENIVYLDFRSLYPSIIITHNVSPDTLNREGCKEYDVAPQVGHRFCKDFPGFIPSLLGDLLEERQKIKKKMKATIDPIERKLLDYRQRAIKILANSYYGYYGYARARWYCKECAESVTAWGREYITMTIKEIEEKYGFKVIYSDTDGFFATIPGADAETVKKKAMEFLKYINAKLPGALELEYEGFYKRGFFVTKKKYAVIDEEGKITTRGLEIVRRDWSEIAKETQARVLEALLKDGDVEKAVRIVKEVTEKLSKYEVPPEKLVIHEQITRDLKDYKATGPHVAVAKRLAARGVKIRPGTVISYIVLKGSGRIGDRAIPFDEFDPTKHKYDAEYYIENQVLPAVERILRAFGYRKEDLRYQKTRQVGLSAWLKPKGT

SEQ ID NO: 2470 - protein, 774 aa, synthetic construct
MILDTDLITEDGKPVWRIFKKENGEFKIEYDRTFEAYFYALLKDDSAIEEVKKITAERHGTVVTVKRVEKVQKKFLGRPVEVWKLYFTHPQDVPAIADKIREHPAVIDIYEYDIPFAKRYLIDKGLVPMEGDEELKMLAFDIETLYHEGEEFAEGPILMISYADEEGARVITWKNVDLPYVDVVSTEREMIKRFLRVVKEKDPDVLITYNGDNFDFAYLKKRCEKLGINFALGRDGSEPKIQRMGDRFAVEVKGRIHFDLYPVIRRTINLPTYTLEAVYEAVFGQPKEKVYAEEITTAWETGENLERVARYSMEDAKVTYELGKEFLPMEAQLSRLIGQSLWDVSRSSTGNLVEWFLLRKAYERNELAPNKPDEKELARRRQSYEGGYVKEPERGLWENIVYLDFRSLYPSIIITHNVSPDTLNREGCKEYDVAPQVGHRFCKDFPGFIPSLLGDLLEERQKIKKKMKATIDPIERKLLDYRQRAIKILANSYYGYYGYARARWYCKECAESVTAWGREYITMTIKEIEEKYGFKVIYSDTDGFFATIPGADAETVKKKAMEFLKYINAKLPGALELEYEGFYKRGFFVTKKKYAVIDEEGKITTRGLEIVRRDWSEIAKETQARVLEALLKDGDVEKAVRIVKEVTEKLSKYEVPPEKLVIHEQITRDLKDYKATGPHVAVAKRLAARGVKIRPGTVISYIVLKGSGRIGDRAIPFDEFDPTKHKYDAEYYIENQVLPAVERILRAFGYRKEDLRYQKTRQVGLSAWLKPKGT

SEQ ID NO: 2471 - protein, 774 aa, synthetic construct
MILDTDLITEDGKPVWRIFKKENGEFKIEYDRTFEAYFYALLKDDSAIEEVKKITAERHGTVVTVKRVEKVQKKFLGRPVEVWKLYFTHPQDIPAIRDKIREHPAVIDIYEYDIPFAKRYLIDKGLVPMEGDEELKMLAFDIETLYHEGEEFAEGPILMISYADEEGARVITWKNVDLPYVDVVSTEREMIKRFLRVVKEKDPDVLITYNGDNFDFAYLKKRCEKLGINFALGRDGSEPKIQRMGDRFAVEVKGRIHFDLYPVIRRTINLPTYTLEAVYEAVFGQPKEKVYAEEITTAWETGENLERVARYSMEDAKVTYELGKEFLPMEAQLSRLIGQSLWDVSRSSTGNLVEWFLLRKAYERNELAPNKPDEKELARRRQSYEGGYVKEPERGLWENIVYLDFRSLYPSIIITHNVSPDTLNREGCKEYDVAPQVGHRFCKDFPGFIPSLLGDLLEERQKIKKKMKATIDPIERKLLDYRQRAIKILANSYYGYYGYARARWYCKECAESVTAWGREYITMTIKEIEEKYGFKVIYSDTDGFFATIPGADAETVKKKAMEFLKYINAKLPGALELEYEGFYKRGFFVTKKKYAVIDEEGKITTRGLEIVRRDWSEIAKETQARVLEALLKDGDVEKAVRIVKEVTEKLSKYEVPPEKLVIHEQITRDLKDYKATGPHVAVAKRLAARGVKIRPGTVISYIVLKGSGRIGDRAIPFDEFDPTKHKYDAEYYIENQVLPAVERILRAFGYRKEDLRYQKTRQVGLSAWLKPKGT

SEQ ID NO: 2472 - protein, 774 aa, synthetic construct
MILDTDLITEDGKPVWRIFKKENGEFKIEYDRTFEAYFYALLKDDSAIEEVKKITAERHGTVVTVKRVEKVQKKFLGRPVEVWKLYFTHPQDIPAIADKIREHPAVIDIYEYDIPFAKRYLIDKGLVPMEGDEELKMLAFDIETLYHEGEEFAEGPILMISYADEEGARVITWKNVDLPYVDVVSTEREMIKRFLRVVKEKDPDVLITYNGDNFDFAYLKKRCEKLGINFALGRDGSEPKIQRMGDRFAVEVKGRIHFDLYPVIRRTINLPTYTLEAVYEAVFGQPKEKVYAEEITTAWETGENLERVARYSMEDAKVTYELGKEFLPMEAQLSRLIGQSLWDVSRSSTGNLVEWFLLRKAYERNELAPNKPDEKELARRRQSYEGGYVKEPERGLWENIVYLDFRSLYPSIIITHNVSPDTLNREGCKEYDVAPQVGHRFCKDFPGFIPSLLGDLLEERQKIKKKMKATIDPIERKLLDYRQRAIKILANSYYGYYGYARARWYCKECAESVTAWGREYITMTIKEIEEKYGFKVIYSDTDGFFATIPGADAETVKKKAMEFLKYINAKLPGALELEYEGFYKRGFFVTKKKYAVIDEEGKITTRGLEIVRRDWSEIAKETQARVLEALLKDGDVEKAVRIVKEVTEKLSKYEVPPEKLVIHEQITRDLKDYKATGPHVAVAKRLAARGVKIRPGTVISYIVLKGSGRIGDRAIPFDEFDPTKHKYDAEYYIENQVLPAVERILRAFGYRKEDLRYQKTRQVGLSAWLKPKGT

SEQ ID NO: 2473 - protein, 774 aa, synthetic construct
MILDTDLITEDGKPVWRIFKKENGEFKIEYDRTFEAYFYALLKDDSAIEEVKKITAERHGTVVTVKRVEKVQKKFLGRPVEVWKLYFTHPQDIPAIFDKIREHPAVIDIYEYDIPFAKRYLIDKGLVPMEGDEELKMLAFDIETLYHEGEEFAEGPILMISYADEEGARVITWKNVDLPYVDVVSTEREMIKRFLRVVKEKDPDVLITYNGDNFDFAYLKKRCEKLGINFALGRDGSEPKIQRMGDRFAVEVKGRIHFDLYPVIRRTINLPTYTLEAVYEAVFGQPKEKVYAEEITTAWETGENLERVARYSMEDAKVTYELGKEFLPMEAQLSRLIGQSLWDVSRSSTGNLVEWFLLRKAYERNELAPNKPDEKELARRRQSYEGGYVKEPERGLWENIVYLDFRSLYPSIIITHNVSPDTLNREGCKEYDVAPQVGHRFCKDFPGFIPSLLGDLLEERQKIKKKMKATIDPIERKLLDYRQRAIKILANSYYGYYGYARARWYCKECAESVTAWGREYITMTIKEIEEKYGFKVIYSDTDGFFATIPGADAETVKKKAMEFLKYINAKLPGALELEYEGFYKRGFFVTKKKYAVIDEEGKITTRGLEIVRRDWSEIAKETQARVLEALLKDGDVEKAVRIVKEVTEKLSKYEVPPEKLVIHEQITRDLKDYKATGPHVAVAKRLAARGVKIRPGTVISYIVLKGSGRIGDRAIPFDEFDPTKHKYDAEYYIENQVLPAVERILRAFGYRKEDLRYQKTRQVGLSAWLKPKGT

SEQ ID NO: 2474 - protein, 774 aa, synthetic construct
MILDTDLITEDGKPVWRIFKKENGEFKIEYDRTFEAYFYALLKDDSAIEEVKKITAERHGTVVTVKRVEKVQKKFLGRPVEVWKLYFTHPQDIPAIHDKIREHPAVIDIYEYDIPFAKRYLIDKGLVPMEGDEELKMLAFDIETLYHEGEEFAEGPILMISYADEEGARVITWKNVDLPYVDVVSTEREMIKRFLRVVKEKDPDVLITYNGDNFDFAYLKKRCEKLGINFALGRDGSEPKIQRMGDRFAVEVKGRIHFDLYPVIRRTINLPTYTLEAVYEAVFGQPKEKVYAEEITTAWETGENLERVARYSMEDAKVTYELGKEFLPMEAQLSRLIGQSLWDVSRSSTGNLVEWFLLRKAYERNELAPNKPDEKELARRRQSYEGGYVKEPERGLWENIVYLDFRSLYPSIIITHNVSPDTLNREGCKEYDVAPQVGHRFCKDFPGFIPSLLGDLLEERQKIKKKMKATIDPIERKLLDYRQRAIKILANSYYGYYGYARARWYCKECAESVTAWGREYITMTIKEIEEKYGFKVIYSDTDGFFATIPGADAETVKKKAMEFLKYINAKLPGALELEYEGFYKRGFFVTKKKYAVIDEEGKITTRGLEIVRRDWSEIAKETQARVLEALLKDGDVEKAVRIVKEVTEKLSKYEVPPEKLVIHEQITRDLKDYKATGPHVAVAKRLAARGVKIRPGTVISYIVLKGSGRIGDRAIPFDEFDPTKHKYDAEYYIENQVLPAVERILRAFGYRKEDLRYQKTRQVGLSAWLKPKGT

SEQ ID NO: 2475 - protein, 774 aa, synthetic construct
MILDTDLITEDGKPVWRIFKKENGEFKIEYDRTFEAYFYALLKDDSAIEEVKKITAERHGTVVTVKRVEKVQKKFLGRPVEVWKLYFTHPQDIPAIWDKIREHPAVIDIYEYDIPFAKRYLIDKGLVPMEGDEELKMLAFDIETLYHEGEEFAEGPILMISYADEEGARVITWKNVDLPYVDVVSTEREMIKRFLRVVKEKDPDVLITYNGDNFDFAYLKKRCEKLGINFALGRDGSEPKIQRMGDRFAVEVKGRIHFDLYPVIRRTINLPTYTLEAVYEAVFGQPKEKVYAEEITTAWETGENLERVARYSMEDAKVTYELGKEFLPMEAQLSRLIGQSLWDVSRSSTGNLVEWFLLRKAYERNELAPNKPDEKELARRRQSYEGGYVKEPERGLWENIVYLDFRSLYPSIIITHNVSPDTLNREGCKEYDVAPQVGHRFCKDFPGFIPSLLGDLLEERQKIKKKMKATIDPIERKLLDYRQRAIKILANSYYGYYGYARARWYCKECAESVTAWGREYITMTIKEIEEKYGFKVIYSDTDGFFATIPGADAETVKKKAMEFLKYINAKLPGALELEYEGFYKRGFFVTKKKYAVIDEEGKITTRGLEIVRRDWSEIAKETQARVLEALLKDGDVEKAVRIVKEVTEKLSKYEVPPEKLVIHEQITRDLKDYKATGPHVAVAKRLAARGVKIRPGTVISYIVLKGSGRIGDRAIPFDEFDPTKHKYDAEYYIENQVLPAVERILRAFGYRKEDLRYQKTRQVGLSAWLKPKGT

SEQ ID NO: 2476 - protein, 774 aa, synthetic construct
MILDTDLITEDGKPVWRIFKKENGEFKIEYDRTFEAYFYALLKDDSAIEEVKKITAERHGTVVTVKRVEKVQKKFLGRPVEVWKLYFTHPQDRPAIRDKIREHPAVIDIYEYDIPFAKRYLIDKGLVPMEGDEELKMLAFDIETLYHEGEEFAEGPILMISYADEEGARVITWKNVDLPYVDVVSTEREMIKRFLRVVKEKDPDVLITYNGDNFDFAYLKKRCEKLGINFALGRDGSEPKIQRMGDRFAVEVKGRIHFDLYPVIRRTINLPTYTLEAVYEAVFGQPKEKVYAEEITTAWETGENLERVARYSMEDAKVTYELGKEFLPMEAQLSRLIGQSLWDVSRSSTGNLVEWFLLRKAYERNELAPNKPDEKELARRRQSYEGGYVKEPERGLWENIVYLDFRSLYPSIIITHNVSPDTLNREGCKEYDVAPQVGHRFCKDFPGFIPSLLGDLLEERQKIKKKMKATIDPIERKLLDYRQRAIKILANSYYGYYGYARARWYCKECAESVTAWGREYITMTIKEIEEKYGFKVIYSDTDGFFATIPGADAETVKKKAMEFLKYINAKLPGALELEYEGFYKRGFFVTKKKYAVIDEEGKITTRGLEIVRRDWSEIAKETQARVLEALLKDGDVEKAVRIVKEVTEKLSKYEVPPEKLVIHEQITRDLKDYKATGPHVAVAKRLAARGVKIRPGTVISYIVLKGSGRIGDRAIPFDEFDPTKHKYDAEYYIENQVLPAVERILRAFGYRKEDLRYQKTRQVGLSAWLKPKGT

SEQ ID NO: 2477 - protein, 774 aa, synthetic construct
MILDTDLITEDGKPVWRIFKKENGEFKIEYDRTFEHYFYALLKDDSAIEEVKKITAERHGTVVTVKRVEKVQKKFLGRPVEVWKLYFTHPQDVPAIRDKIREHPAVIDIYEYDIPFAKRYLIDKGLVPMEGDEELKMLAFDIETLYHEGEEFAEGPILMISYADEEGARVITWKNVDLPYVDVVSTEREMIKRFLRVVKEKDPDVLITYNGDNFDFAYLKKRCEKLGINFALGRDGSEPKIQRMGDRFAVEVKGRIHFDLYPVIRRTINLPTYTLEAVYEAVFGQPKEKVYAEEITTAWETGENLERVARYSMEDAKVTYELGKEFLPMEAQLSRLIGQSLWDVSRSSTGNLVEWFLLRKAYERNELAPNKPDEKELARRRQSYEGGYVKEPERGLWENIVYLDFRSLYPSIIITHNVSPDTLNREGCKEYDVAPQVGHRFCKDFPGFIPSLLGDLLEERQKIKKKMKATIDPIERKLLDYRQRAIKILANSYYGYYGYARARWYCKECAESVTAWGREYITMTIKEIEEKYGFKVIYSDTDGFFATIPGADAETVKKKAMEFLKYINAKLPGALELEYEGFYKRGFFVTKKKYAVIDEEGKITTRGLEIVRRDWSEIAKETQARVLEALLKDGDVEKAVRIVKEVTEKLSKYEVPPEKLVIHEQITRDLKDYKATGPHVAVAKRLAARGVKIRPGTVISYIVLKGSGRIGDRAIPFDEFDPTKHKYDAEYYIENQVLPAVERILRAFGYRKEDLRYQKTRQVGLSAWLKPKGT

SEQ ID NO: 2478 - protein, 774 aa, synthetic construct
MILDTDLITEDGKPVWRIFKKENGEFKIEYDRTFEHYFYALLKDDSAIEEVKKITAERHGTVVTVKRVEKVQKKFLGRPVEVWKLYFTHPQDIPAIRDKIREHPAVIDIYEYDIPFAKRYLIDKGLVPMEGDEELKMLAFDIETLYHEGEEFAEGPILMISYADEEGARVITWKNVDLPYVDVVSTEREMIKRFLRVVKEKDPDVLITYNGDNFDFAYLKKRCEKLGINFALGRDGSEPKIQRMGDRFAVEVKGRIHFDLYPVIRRTINLPTYTLEAVYEAVFGQPKEKVYAEEITTAWETGENLERVARYSMEDAKVTYELGKEFLPMEAQLSRLIGQSLWDVSRSSTGNLVEWFLLRKAYERNELAPNKPDEKELARRRQSYEGGYVKEPERGLWENIVYLDFRSLYPSIIITHNVSPDTLNREGCKEYDVAPQVGHRFCKDFPGFIPSLLGDLLEERQKIKKKMKATIDPIERKLLDYRQRAIKILANSYYGYYGYARARWYCKECAESVTAWGREYITMTIKEIEEKYGFKVIYSDTDGFFATIPGADAETVKKKAMEFLKYINAKLPGALELEYEGFYKRGFFVTKKKYAVIDEEGKITTRGLEIVRRDWSEIAKETQARVLEALLKDGDVEKAVRIVKEVTEKLSKYEVPPEKLVIHEQITRDLKDYKATGPHVAVAKRLAARGVKIRPGTVISYIVLKGSGRIGDRAIPFDEFDPTKHKYDAEYYIENQVLPAVERILRAFGYRKEDLRYQKTRQVGLSAWLKPKGT

SEQ ID NO: 2479 - protein, 774 aa, synthetic construct
MILDTDLITEDGKPVWRIFKKENGEFKIEYDRTFESYFYALLKDDSAIEEVKKITAERHGTVVTVKRVEKVQKKFLGRPVEVWKLYFTHPQDIPAIRDKIREHPAVIDIYEYDIPFAKRYLIDKGLVPMEGDEELKMLAFDIETLYHEGEEFAEGPILMISYADEEGARVITWKNVDLPYVDVVSTEREMIKRFLRVVKEKDPDVLITYNGDNFDFAYLKKRCEKLGINFALGRDGSEPKIQRMGDRFAVEVKGRIHFDLYPVIRRTINLPTYTLEAVYEAVFGQPKEKVYAEEITTAWETGENLERVARYSMEDAKVTYELGKEFLPMEAQLSRLIGQSLWDVSRSSTGNLVEWFLLRKAYERNELAPNKPDEKELARRRQSYEGGYVKEPERGLWENIVYLDFRSLYPSIIITHNVSPDTLNREGCKEYDVAPQVGHRFCKDFPGFIPSLLGDLLEERQKIKKKMKATIDPIERKLLDYRQRAIKILANSYYGYYGYARARWYCKECAESVTAWGREYITMTIKEIEEKYGFKVIYSDTDGFFATIPGADAETVKKKAMEFLKYINAKLPGALELEYEGFYKRGFFVTKKKYAVIDEEGKITTRGLEIVRRDWSEIAKETQARVLEALLKDGDVEKAVRIVKEVTEKLSKYEVPPEKLVIHEQITRDLKDYKATGPHVAVAKRLAARGVKIRPGTVISYIVLKGSGRIGDRAIPFDEFDPTKHKYDAEYYIENQVLPAVERILRAFGYRKEDLRYQKTRQVGLSAWLKPKGT

SEQ ID NO: 2480 - protein, 774 aa, synthetic construct
MILDTDLITEDGKPVWRIFKKENGEFKIEYDRTFEWYFYALLKDDSAIEEVKKITAERHGTVVTVKRVEKVQKKFLGRPVEVWKLYFTHYQDIPAIRDKIREHPAVIDIYEYDIPFAKRYLIDKGLVPMEGDEELKMLAFDIETLYHEGEEFAEGPILMISYADEEGARVITWKNVDLPYVDVVSTEREMIKRFLRVVKEKDPDVLITYNGDNFDFAYLKKRCEKLGINFALGRDGSEPKIQRMGDRFAVEVKGRIHFDLYPVIRRTINLPTYTLEAVYEAVFGQPKEKVYAEEITTAWETGENLERVARYSMEDAKVTYELGKEFLPMEAQLSRLIGQSLWDVSRSSTGNLVEWFLLRKAYERNELAPNKPDEKELARRRQSYEGGYVKEPERGLWENIVYLDFRSLYPSIIITHNVSPDTLNREGCKEYDVAPQVGHRFCKDFPGFIPSLLGDLLEERQKIKKKMKATIDPIERKLLDYRQRAIKILANSYYGYYGYARARWYCKECAESVTAWGREYITMTIKEIEEKYGFKVIYSDTDGFFATIPGADAETVKKKAMEFLKYINAKLPGALELEYEGFYKRGFFVTKKKYAVIDEEGKITTRGLEIVRRDWSEIAKETQARVLEALLKDGDVEKAVRIVKEVTEKLSKYEVPPEKLVIHEQITRDLKDYKATGPHVAVAKRLAARGVKIRPGTVISYIVLKGSGRIGDRAIPFDEFDPTKHKYDAEYYIENQVLPAVERILRAFGYRKEDLRYQKTRQVGLSAWLKPKGT

SEQ ID NO: 2481 - protein, 774 aa, synthetic construct
MILDTDLITEDGKPVWRIFKKENGEFKIEYDRTFEWYFYALLKDDSAIEEVKKITAERHGTVVTVKRVEKVQKKFLGRPVEVWKLYFTHPQDVPAIADKIREHPAVIDIYEYDIPFAKRYLIDKGLVPMEGDEELKMLAFDIETLYHEGEEFAEGPILMISYADEEGARVITWKNVDLPYVDVVSTEREMIKRFLRVVKEKDPDVLITYNGDNFDFAYLKKRCEKLGINFALGRDGSEPKIQRMGDRFAVEVKGRIHFDLYPVIRRTINLPTYTLEAVYEAVFGQPKEKVYAEEITTAWETGENLERVARYSMEDAKVTYELGKEFLPMEAQLSRLIGQSLWDVSRSSTGNLVEWFLLRKAYERNELAPNKPDEKELARRRQSYEGGYVKEPERGLWENIVYLDFRSLYPSIIITHNVSPDTLNREGCKEYDVAPQVGHRFCKDFPGFIPSLLGDLLEERQKIKKKMKATIDPIERKLLDYRQRAIKILANSYYGYYGYARARWYCKECAESVTAWGREYITMTIKEIEEKYGFKVIYSDTDGFFATIPGADAETVKKKAMEFLKYINAKLPGALELEYEGFYKRGFFVTKKKYAVIDEEGKITTRGLEIVRRDWSEIAKETQARVLEALLKDGDVEKAVRIVKEVTEKLSKYEVPPEKLVIHEQITRDLKDYKATGPHVAVAKRLAARGVKIRPGTVISYIVLKGSGRIGDRAIPFDEFDPTKHKYDAEYYIENQVLPAVERILRAFGYRKEDLRYQKTRQVGLSAWLKPKGT

SEQ ID NO: 2482 - protein, 774 aa, synthetic construct
MILDTDLITEDGKPVWRIFKKENGEFKIEYDRTFEWYFYALLKDDSAIEEVKKITAERHGTVVTVKRVEKVQKKFLGRPVEVWKLYFTHPQDIPAIRDKIREHPAVIDIYEYDIPFAKRYLIDKGLVPMEGDEELKMLAFDIETLYHEGEEFAEGPILMISYADEEGARVITWKNVDLPYVDVVSTEREMIKRFLRVVKEKDPDVLITYNGDNFDFAYLKKRCEKLGINFALGRDGSEPKIQRMGDRFAVEVKGRIHFDLYPVIRRTINLPTYTLEAVYEAVFGQPKEKVYAEEITTAWETGENLERVARYSMEDAKVTYELGKEFLPMEAQLSRLIGQSLWDVSRSSTGNLVEWFLLRKAYERNELAPNKPDEKELARRRQSYEGGYVKEPERGLWENIVYLDFRSLYPSIIITHNVSPDTLNREGCKEYDVAPQVGHRFCKDFPGFIPSLLGDLLEERQKIKKKMKATIDPIERKLLDYRQRAIKILANSYYGYYGYARARWYCKECAESVTAWGREYITMTIKEIEEKYGFKVIYSDTDGFFATIPGADAETVKKKAMEFLKYINAKLPGALELEYEGFYKRGFFVTKKKYAVIDEEGKITTRGLEIVRRDWSEIAKETQARVLEALLKDGDVEKAVRIVKEVTEKLSKYEVPPEKLVIHEQITRDLKDYKATGPHVAVAKRLAARGVKIRPGTVISYIVLKGSGRIGDRAIPFDEFDPTKHKYDAEYYIENQVLPAVERILRAFGYRKEDLRYQKTRQVGLSAWLKPKGT

SEQ ID NO: 2483 - protein, 774 aa, synthetic construct
MILDTDLITEDGKPVWRIFKKENGEFKIEYDRTFEPYFYALLKDDSAIEEVKKITAERHGTVVTVKRVEKVQKKFLGRPVEVWKLYFTHFQDVPAIRDKIREHPAVIDIYEYDIPFAKRYLIDKGLVPMEGDEELKMLAFDIETLYHEGEEFAEGPILMISYADEEGARVITWKNVDLPYVDVVSTEREMIKRFLRVVKEKDPDVLITYNGDNFDFAYLKKRCEKLGINFALGRDGSEPKIQRMGDRFAVEVKGRIHFDLYPVIRRTINLPTYTLEAVYEAVFGQPKEKVYAEEITTAWETGENLERVARYSMEDAKVTYELGKEFLPMEAQLSRLIGQSLWDVSRSSTGNLVEWFLLRKAYERNELAPNKPDEKELARRRQSYEGGYVKEPERGLWENIVYLDFRSLYPSIIITHNVSPDTLNREGCKEYDVAPQVGHRFCKDFPGFIPSLLGDLLEERQKIKKKMKATIDPIERKLLDYRQRAIKILANSYYGYYGYARARWYCKECAESVTAWGREYITMTIKEIEEKYGFKVIYSDTDGFFATIPGADAETVKKKAMEFLKYINAKLPGALELEYEGFYKRGFFVTKKKYAVIDEEGKITTRGLEIVRRDWSEIAKETQARVLEALLKDGDVEKAVRIVKEVTEKLSKYEVPPEKLVIHEQITRDLKDYKATGPHVAVAKRLAARGVKIRPGTVISYIVLKGSGRIGDRAIPFDEFDPTKHKYDAEYYIENQVLPAVERILRAFGYRKEDLRYQKTRQVGLSAWLKPKGT

SEQ ID NO: 2484 - protein, 774 aa, synthetic construct
MILDTDLITEDGKPVWRIFKKENGEFKIEYDRTFEPYFYALLKDDSAIEEVKKITAERHGTVVTVKRVEKVQKKFLGRPVEVWKLYFTHFQDVPAIADKIREHPAVIDIYEYDIPFAKRYLIDKGLVPMEGDEELKMLAFDIETLYHEGEEFAEGPILMISYADEEGARVITWKNVDLPYVDVVSTEREMIKRFLRVVKEKDPDVLITYNGDNFDFAYLKKRCEKLGINFALGRDGSEPKIQRMGDRFAVEVKGRIHFDLYPVIRRTINLPTYTLEAVYEAVFGQPKEKVYAEEITTAWETGENLERVARYSMEDAKVTYELGKEFLPMEAQLSRLIGQSLWDVSRSSTGNLVEWFLLRKAYERNELAPNKPDEKELARRRQSYEGGYVKEPERGLWENIVYLDFRSLYPSIIITHNVSPDTLNREGCKEYDVAPQVGHRFCKDFPGFIPSLLGDLLEERQKIKKKMKATIDPIERKLLDYRQRAIKILANSYYGYYGYARARWYCKECAESVTAWGREYITMTIKEIEEKYGFKVIYSDTDGFFATIPGADAETVKKKAMEFLKYINAKLPGALELEYEGFYKRGFFVTKKKYAVIDEEGKITTRGLEIVRRDWSEIAKETQARVLEALLKDGDVEKAVRIVKEVTEKLSKYEVPPEKLVIHEQITRDLKDYKATGPHVAVAKRLAARGVKIRPGTVISYIVLKGSGRIGDRAIPFDEFDPTKHKYDAEYYIENQVLPAVERILRAFGYRKEDLRYQKTRQVGLSAWLKPKGT

SEQ ID NO: 2485 - protein, 774 aa, synthetic construct
MILDTDLITEDGKPVWRIFKKENGEFKIEYDRTFEPYFYALLKDDSAIEEVKKITAERHGTVVTVKRVEKVQKKFLGRPVEVWKLYFTHFQDIPAIRDKIREHPAVIDIYEYDIPFAKRYLIDKGLVPMEGDEELKMLAFDIETLYHEGEEFAEGPILMISYADEEGARVITWKNVDLPYVDVVSTEREMIKRFLRVVKEKDPDVLITYNGDNFDFAYLKKRCEKLGINFALGRDGSEPKIQRMGDRFAVEVKGRIHFDLYPVIRRTINLPTYTLEAVYEAVFGQPKEKVYAEEITTAWETGENLERVARYSMEDAKVTYELGKEFLPMEAQLSRLIGQSLWDVSRSSTGNLVEWFLLRKAYERNELAPNKPDEKELARRRQSYEGGYVKEPERGLWENIVYLDFRSLYPSIIITHNVSPDTLNREGCKEYDVAPQVGHRFCKDFPGFIPSLLGDLLEERQKIKKKMKATIDPIERKLLDYRQRAIKILANSYYGYYGYARARWYCKECAESVTAWGREYITMTIKEIEEKYGFKVIYSDTDGFFATIPGADAETVKKKAMEFLKYINAKLPGALELEYEGFYKRGFFVTKKKYAVIDEEGKITTRGLEIVRRDWSEIAKETQARVLEALLKDGDVEKAVRIVKEVTEKLSKYEVPPEKLVIHEQITRDLKDYKATGPHVAVAKRLAARGVKIRPGTVISYIVLKGSGRIGDRAIPFDEFDPTKHKYDAEYYIENQVLPAVERILRAFGYRKEDLRYQKTRQVGLSAWLKPKGT

SEQ ID NO: 2486 - protein, 774 aa, synthetic construct
MILDTDLITEDGKPVWRIFKKENGEFKIEYDRTFEPYFYALLKDDSAIEEVKKITAERHGTVVTVKRVEKVQKKFLGRPVEVWKLYFTHFQDIPAIADKIREHPAVIDIYEYDIPFAKRYLIDKGLVPMEGDEELKMLAFDIETLYHEGEEFAEGPILMISYADEEGARVITWKNVDLPYVDVVSTEREMIKRFLRVVKEKDPDVLITYNGDNFDFAYLKKRCEKLGINFALGRDGSEPKIQRMGDRFAVEVKGRIHFDLYPVIRRTINLPTYTLEAVYEAVFGQPKEKVYAEEITTAWETGENLERVARYSMEDAKVTYELGKEFLPMEAQLSRLIGQSLWDVSRSSTGNLVEWFLLRKAYERNELAPNKPDEKELARRRQSYEGGYVKEPERGLWENIVYLDFRSLYPSIIITHNVSPDTLNREGCKEYDVAPQVGHRFCKDFPGFIPSLLGDLLEERQKIKKKMKATIDPIERKLLDYRQRAIKILANSYYGYYGYARARWYCKECAESVTAWGREYITMTIKEIEEKYGFKVIYSDTDGFFATIPGADAETVKKKAMEFLKYINAKLPGALELEYEGFYKRGFFVTKKKYAVIDEEGKITTRGLEIVRRDWSEIAKETQARVLEALLKDGDVEKAVRIVKEVTEKLSKYEVPPEKLVIHEQITRDLKDYKATGPHVAVAKRLAARGVKIRPGTVISYIVLKGSGRIGDRAIPFDEFDPTKHKYDAEYYIENQVLPAVERILRAFGYRKEDLRYQKTRQVGLSAWLKPKGT

SEQ ID NO: 2487 - protein, 774 aa, synthetic construct
MILDTDLITEDGKPVWRIFKKENGEFKIEYDRTFEPYFYALLKDDSAIEEVKKITAERHGTVVTVKRVEKVQKKFLGRPVEVWKLYFTHFQDIPAIHDKIREHPAVIDIYEYDIPFAKRYLIDKGLVPMEGDEELKMLAFDIETLYHEGEEFAEGPILMISYADEEGARVITWKNVDLPYVDVVSTEREMIKRFLRVVKEKDPDVLITYNGDNFDFAYLKKRCEKLGINFALGRDGSEPKIQRMGDRFAVEVKGRIHFDLYPVIRRTINLPTYTLEAVYEAVFGQPKEKVYAEEITTAWETGENLERVARYSMEDAKVTYELGKEFLPMEAQLSRLIGQSLWDVSRSSTGNLVEWFLLRKAYERNELAPNKPDEKELARRRQSYEGGYVKEPERGLWENIVYLDFRSLYPSIIITHNVSPDTLNREGCKEYDVAPQVGHRFCKDFPGFIPSLLGDLLEERQKIKKKMKATIDPIERKLLDYRQRAIKILANSYYGYYGYARARWYCKECAESVTAWGREYITMTIKEIEEKYGFKVIYSDTDGFFATIPGADAETVKKKAMEFLKYINAKLPGALELEYEGFYKRGFFVTKKKYAVIDEEGKITTRGLEIVRRDWSEIAKETQARVLEALLKDGDVEKAVRIVKEVTEKLSKYEVPPEKLVIHEQITRDLKDYKATGPHVAVAKRLAARGVKIRPGTVISYIVLKGSGRIGDRAIPFDEFDPTKHKYDAEYYIENQVLPAVERILRAFGYRKEDLRYQKTRQVGLSAWLKPKGT

SEQ ID NO: 2488 - protein, 774 aa, synthetic construct
MILDTDLITEDGKPVWRIFKKENGEFKIEYDRTFEPYFYALLKDDSAIEEVKKITAERHGTVVTVKRVEKVQKKFLGRPVEVWKLYFTHIQDVPAIRDKIREHPAVIDIYEYDIPFAKRYLIDKGLVPMEGDEELKMLAFDIETLYHEGEEFAEGPILMISYADEEGARVITWKNVDLPYVDVVSTEREMIKRFLRVVKEKDPDVLITYNGDNFDFAYLKKRCEKLGINFALGRDGSEPKIQRMGDRFAVEVKGRIHFDLYPVIRRTINLPTYTLEAVYEAVFGQPKEKVYAEEITTAWETGENLERVARYSMEDAKVTYELGKEFLPMEAQLSRLIGQSLWDVSRSSTGNLVEWFLLRKAYERNELAPNKPDEKELARRRQSYEGGYVKEPERGLWENIVYLDFRSLYPSIIITHNVSPDTLNREGCKEYDVAPQVGHRFCKDFPGFIPSLLGDLLEERQKIKKKMKATIDPIERKLLDYRQRAIKILANSYYGYYGYARARWYCKECAESVTAWGREYITMTIKEIEEKYGFKVIYSDTDGFFATIPGADAETVKKKAMEFLKYINAKLPGALELEYEGFYKRGFFVTKKKYAVIDEEGKITTRGLEIVRRDWSEIAKETQARVLEALLKDGDVEKAVRIVKEVTEKLSKYEVPPEKLVIHEQITRDLKDYKATGPHVAVAKRLAARGVKIRPGTVISYIVLKGSGRIGDRAIPFDEFDPTKHKYDAEYYIENQVLPAVERILRAFGYRKEDLRYQKTRQVGLSAWLKPKGT

SEQ ID NO: 2489 - protein, 774 aa, synthetic construct
MILDTDLITEDGKPVWRIFKKENGEFKIEYDRTFEPYFYALLKDDSAIEEVKKITAERHGTVVTVKRVEKVQKKFLGRPVEVWKLYFTHIQDIPAIRDKIREHPAVIDIYEYDIPFAKRYLIDKGLVPMEGDEELKMLAFDIETLYHEGEEFAEGPILMISYADEEGARVITWKNVDLPYVDVVSTEREMIKRFLRVVKEKDPDVLITYNGDNFDFAYLKKRCEKLGINFALGRDGSEPKIQRMGDRFAVEVKGRIHFDLYPVIRRTINLPTYTLEAVYEAVFGQPKEKVYAEEITTAWETGENLERVARYSMEDAKVTYELGKEFLPMEAQLSRLIGQSLWDVSRSSTGNLVEWFLLRKAYERNELAPNKPDEKELARRRQSYEGGYVKEPERGLWENIVYLDFRSLYPSIIITHNVSPDTLNREGCKEYDVAPQVGHRFCKDFPGFIPSLLGDLLEERQKIKKKMKATIDPIERKLLDYRQRAIKILANSYYGYYGYARARWYCKECAESVTAWGREYITMTIKEIEEKYGFKVIYSDTDGFFATIPGADAETVKKKAMEFLKYINAKLPGALELEYEGFYKRGFFVTKKKYAVIDEEGKITTRGLEIVRRDWSEIAKETQARVLEALLKDGDVEKAVRIVKEVTEKLSKYEVPPEKLVIHEQITRDLKDYKATGPHVAVAKRLAARGVKIRPGTVISYIVLKGSGRIGDRAIPFDEFDPTKHKYDAEYYIENQVLPAVERILRAFGYRKEDLRYQKTRQVGLSAWLKPKGT

SEQ ID NO: 2490 - protein, 774 aa, synthetic construct
MILDTDLITEDGKPVWRIFKKENGEFKIEYDRTFEPYFYALLKDDSAIEEVKKITAERHGTVVTVKRVEKVQKKFLGRPVEVWKLYFTHWQDVPAIRDKIREHPAVIDIYEYDIPFAKRYLIDKGLVPMEGDEELKMLAFDIETLYHEGEEFAEGPILMISYADEEGARVITWKNVDLPYVDVVSTEREMIKRFLRVVKEKDPDVLITYNGDNFDFAYLKKRCEKLGINFALGRDGSEPKIQRMGDRFAVEVKGRIHFDLYPVIRRTINLPTYTLEAVYEAVFGQPKEKVYAEEITTAWETGENLERVARYSMEDAKVTYELGKEFLPMEAQLSRLIGQSLWDVSRSSTGNLVEWFLLRKAYERNELAPNKPDEKELARRRQSYEGGYVKEPERGLWENIVYLDFRSLYPSIIITHNVSPDTLNREGCKEYDVAPQVGHRFCKDFPGFIPSLLGDLLEERQKIKKKMKATIDPIERKLLDYRQRAIKILANSYYGYYGYARARWYCKECAESVTAWGREYITMTIKEIEEKYGFKVIYSDTDGFFATIPGADAETVKKKAMEFLKYINAKLPGALELEYEGFYKRGFFVTKKKYAVIDEEGKITTRGLEIVRRDWSEIAKETQARVLEALLKDGDVEKAVRIVKEVTEKLSKYEVPPEKLVIHEQITRDLKDYKATGPHVAVAKRLAARGVKIRPGTVISYIVLKGSGRIGDRAIPFDEFDPTKHKYDAEYYIENQVLPAVERILRAFGYRKEDLRYQKTRQVGLSAWLKPKGT

SEQ ID NO: 2491 - protein, 774 aa, synthetic construct
MILDTDLITEDGKPVWRIFKKENGEFKIEYDRTFEPYFYALLKDDSAIEEVKKITAERHGTVVTVKRVEKVQKKFLGRPVEVWKLYFTHWQDIPAIRDKIREHPAVIDIYEYDIPFAKRYLIDKGLVPMEGDEELKMLAFDIETLYHEGEEFAEGPILMISYADEEGARVITWKNVDLPYVDVVSTEREMIKRFLRVVKEKDPDVLITYNGDNFDFAYLKKRCEKLGINFALGRDGSEPKIQRMGDRFAVEVKGRIHFDLYPVIRRTINLPTYTLEAVYEAVFGQPKEKVYAEEITTAWETGENLERVARYSMEDAKVTYELGKEFLPMEAQLSRLIGQSLWDVSRSSTGNLVEWFLLRKAYERNELAPNKPDEKELARRRQSYEGGYVKEPERGLWENIVYLDFRSLYPSIIITHNVSPDTLNREGCKEYDVAPQVGHRFCKDFPGFIPSLLGDLLEERQKIKKKMKATIDPIERKLLDYRQRAIKILANSYYGYYGYARARWYCKECAESVTAWGREYITMTIKEIEEKYGFKVIYSDTDGFFATIPGADAETVKKKAMEFLKYINAKLPGALELEYEGFYKRGFFVTKKKYAVIDEEGKITTRGLEIVRRDWSEIAKETQARVLEALLKDGDVEKAVRIVKEVTEKLSKYEVPPEKLVIHEQITRDLKDYKATGPHVAVAKRLAARGVKIRPGTVISYIVLKGSGRIGDRAIPFDEFDPTKHKYDAEYYIENQVLPAVERILRAFGYRKEDLRYQKTRQVGLSAWLKPKGT

SEQ ID NO: 2492 - protein, 774 aa, synthetic construct
MILDTDLITEDGKPVWRIFKKENGEFKIEYDRTFEPYFYALLKDDSAIEEVKKITAERHGTVVTVKRVEKVQKKFLGRPVEVWKLYFTHWQDIPAIADKIREHPAVIDIYEYDIPFAKRYLIDKGLVPMEGDEELKMLAFDIETLYHEGEEFAEGPILMISYADEEGARVITWKNVDLPYVDVVSTEREMIKRFLRVVKEKDPDVLITYNGDNFDFAYLKKRCEKLGINFALGRDGSEPKIQRMGDRFAVEVKGRIHFDLYPVIRRTINLPTYTLEAVYEAVFGQPKEKVYAEEITTAWETGENLERVARYSMEDAKVTYELGKEFLPMEAQLSRLIGQSLWDVSRSSTGNLVEWFLLRKAYERNELAPNKPDEKELARRRQSYEGGYVKEPERGLWENIVYLDFRSLYPSIIITHNVSPDTLNREGCKEYDVAPQVGHRFCKDFPGFIPSLLGDLLEERQKIKKKMKATIDPIERKLLDYRQRAIKILANSYYGYYGYARARWYCKECAESVTAWGREYITMTIKEIEEKYGFKVIYSDTDGFFATIPGADAETVKKKAMEFLKYINAKLPGALELEYEGFYKRGFFVTKKKYAVIDEEGKITTRGLEIVRRDWSEIAKETQARVLEALLKDGDVEKAVRIVKEVTEKLSKYEVPPEKLVIHEQITRDLKDYKATGPHVAVAKRLAARGVKIRPGTVISYIVLKGSGRIGDRAIPFDEFDPTKHKYDAEYYIENQVLPAVERILRAFGYRKEDLRYQKTRQVGLSAWLKPKGT

SEQ ID NO: 2493 - protein, 774 aa, synthetic construct
MILDTDLITEDGKPVWRIFKKENGEFKIEYDRTFEPYFYALLKDDSAIEEVKKITAERHGTVVTVKRVEKVQKKFLGRPVEVWKLYFTHWQDIPAIWDKIREHPAVIDIYEYDIPFAKRYLIDKGLVPMEGDEELKMLAFDIETLYHEGEEFAEGPILMISYADEEGARVITWKNVDLPYVDVVSTEREMIKRFLRVVKEKDPDVLITYNGDNFDFAYLKKRCEKLGINFALGRDGSEPKIQRMGDRFAVEVKGRIHFDLYPVIRRTINLPTYTLEAVYEAVFGQPKEKVYAEEITTAWETGENLERVARYSMEDAKVTYELGKEFLPMEAQLSRLIGQSLWDVSRSSTGNLVEWFLLRKAYERNELAPNKPDEKELARRRQSYEGGYVKEPERGLWENIVYLDFRSLYPSIIITHNVSPDTLNREGCKEYDVAPQVGHRFCKDFPGFIPSLLGDLLEERQKIKKKMKATIDPIERKLLDYRQRAIKILANSYYGYYGYARARWYCKECAESVTAWGREYITMTIKEIEEKYGFKVIYSDTDGFFATIPGADAETVKKKAMEFLKYINAKLPGALELEYEGFYKRGFFVTKKKYAVIDEEGKITTRGLEIVRRDWSEIAKETQARVLEALLKDGDVEKAVRIVKEVTEKLSKYEVPPEKLVIHEQITRDLKDYKATGPHVAVAKRLAARGVKIRPGTVISYIVLKGSGRIGDRAIPFDEFDPTKHKYDAEYYIENQVLPAVERILRAFGYRKEDLRYQKTRQVGLSAWLKPKGT

SEQ ID NO: 2494 - protein, 774 aa, synthetic construct
MILDTDLITEDGKPVWRIFKKENGEFKIEYDRTFEPYFYALLKDDSAIEEVKKITAERHGTVVTVKRVEKVQKKFLGRPVEVWKLYFTHYQDIPAIRDKIREHPAVIDIYEYDIPFAKRYLIDKGLVPMEGDEELKMLAFDIETLYHEGEEFAEGPILMISYADEEGARVITWKNVDLPYVDVVSTEREMIKRFLRVVKEKDPDVLITYNGDNFDFAYLKKRCEKLGINFALGRDGSEPKIQRMGDRFAVEVKGRIHFDLYPVIRRTINLPTYTLEAVYEAVFGQPKEKVYAEEITTAWETGENLERVARYSMEDAKVTYELGKEFLPMEAQLSRLIGQSLWDVSRSSTGNLVEWFLLRKAYERNELAPNKPDEKELARRRQSYEGGYVKEPERGLWENIVYLDFRSLYPSIIITHNVSPDTLNREGCKEYDVAPQVGHRFCKDFPGFIPSLLGDLLEERQKIKKKMKATIDPIERKLLDYRQRAIKILANSYYGYYGYARARWYCKECAESVTAWGREYITMTIKEIEEKYGFKVIYSDTDGFFATIPGADAETVKKKAMEFLKYINAKLPGALELEYEGFYKRGFFVTKKKYAVIDEEGKITTRGLEIVRRDWSEIAKETQARVLEALLKDGDVEKAVRIVKEVTEKLSKYEVPPEKLVIHEQITRDLKDYKATGPHVAVAKRLAARGVKIRPGTVISYIVLKGSGRIGDRAIPFDEFDPTKHKYDAEYYIENQVLPAVERILRAFGYRKEDLRYQKTRQVGLSAWLKPKGT

SEQ ID NO: 2495 - protein, 774 aa, synthetic construct
MILDTDLITEDGKPVWRIFKKENGEFKIEYDRTFEPYFYALLKDDSAIEEVKKITAERHGTVVTVKRVEKVQKKFLGRPVEVWKLYFTHPQDVPAIADKIREHPAVIDIYEYDIPFAKRYLIDKGLVPMEGDEELKMLAFDIETLYHEGEEFAEGPILMISYADEEGARVITWKNVDLPYVDVVSTEREMIKRFLRVVKEKDPDVLITYNGDNFDFAYLKKRCEKLGINFALGRDGSEPKIQRMGDRFAVEVKGRIHFDLYPVIRRTINLPTYTLEAVYEAVFGQPKEKVYAEEITTAWETGENLERVARYSMEDAKVTYELGKEFLPMEAQLSRLIGQSLWDVSRSSTGNLVEWFLLRKAYERNELAPNKPDEKELARRRQSYEGGYVKEPERGLWENIVYLDFRSLYPSIIITHNVSPDTLNREGCKEYDVAPQVGHRFCKDFPGFIPSLLGDLLEERQKIKKKMKATIDPIERKLLDYRQRAIKILANSYYGYYGYARARWYCKECAESVTAWGREYITMTIKEIEEKYGFKVIYSDTDGFFATIPGADAETVKKKAMEFLKYINAKLPGALELEYEGFYKRGFFVTKKKYAVIDEEGKITTRGLEIVRRDWSEIAKETQARVLEALLKDGDVEKAVRIVKEVTEKLSKYEVPPEKLVIHEQITRDLKDYKATGPHVAVAKRLAARGVKIRPGTVISYIVLKGSGRIGDRAIPFDEFDPTKHKYDAEYYIENQVLPAVERILRAFGYRKEDLRYQKTRQVGLSAWLKPKGT

SEQ ID NO: 2496 - protein, 774 aa, synthetic construct
MILDTDLITEDGKPVWRIFKKENGEFKIEYDRTFEPYFYALLKDDSAIEEVKKITAERHGTVVTVKRVEKVQKKFLGRPVEVWKLYFTHPQDVPAIFDKIREHPAVIDIYEYDIPFAKRYLIDKGLVPMEGDEELKMLAFDIETLYHEGEEFAEGPILMISYADEEGARVITWKNVDLPYVDVVSTEREMIKRFLRVVKEKDPDVLITYNGDNFDFAYLKKRCEKLGINFALGRDGSEPKIQRMGDRFAVEVKGRIHFDLYPVIRRTINLPTYTLEAVYEAVFGQPKEKVYAEEITTAWETGENLERVARYSMEDAKVTYELGKEFLPMEAQLSRLIGQSLWDVSRSSTGNLVEWFLLRKAYERNELAPNKPDEKELARRRQSYEGGYVKEPERGLWENIVYLDFRSLYPSIIITHNVSPDTLNREGCKEYDVAPQVGHRFCKDFPGFIPSLLGDLLEERQKIKKKMKATIDPIERKLLDYRQRAIKILANSYYGYYGYARARWYCKECAESVTAWGREYITMTIKEIEEKYGFKVIYSDTDGFFATIPGADAETVKKKAMEFLKYINAKLPGALELEYEGFYKRGFFVTKKKYAVIDEEGKITTRGLEIVRRDWSEIAKETQARVLEALLKDGDVEKAVRIVKEVTEKLSKYEVPPEKLVIHEQITRDLKDYKATGPHVAVAKRLAARGVKIRPGTVISYIVLKGSGRIGDRAIPFDEFDPTKHKYDAEYYIENQVLPAVERILRAFGYRKEDLRYQKTRQVGLSAWLKPKGT

SEQ ID NO: 2497 - protein, 774 aa, synthetic construct
MILDTDLITEDGKPVWRIFKKENGEFKIEYDRTFEPYFYALLKDDSAIEEVKKITAERHGTVVTVKRVEKVQKKFLGRPVEVWKLYFTHPQDVPAIHDKIREHPAVIDIYEYDIPFAKRYLIDKGLVPMEGDEELKMLAFDIETLYHEGEEFAEGPILMISYADEEGARVITWKNVDLPYVDVVSTEREMIKRFLRVVKEKDPDVLITYNGDNFDFAYLKKRCEKLGINFALGRDGSEPKIQRMGDRFAVEVKGRIHFDLYPVIRRTINLPTYTLEAVYEAVFGQPKEKVYAEEITTAWETGENLERVARYSMEDAKVTYELGKEFLPMEAQLSRLIGQSLWDVSRSSTGNLVEWFLLRKAYERNELAPNKPDEKELARRRQSYEGGYVKEPERGLWENIVYLDFRSLYPSIIITHNVSPDTLNREGCKEYDVAPQVGHRFCKDFPGFIPSLLGDLLEERQKIKKKMKATIDPIERKLLDYRQRAIKILANSYYGYYGYARARWYCKECAESVTAWGREYITMTIKEIEEKYGFKVIYSDTDGFFATIPGADAETVKKKAMEFLKYINAKLPGALELEYEGFYKRGFFVTKKKYAVIDEEGKITTRGLEIVRRDWSEIAKETQARVLEALLKDGDVEKAVRIVKEVTEKLSKYEVPPEKLVIHEQITRDLKDYKATGPHVAVAKRLAARGVKIRPGTVISYIVLKGSGRIGDRAIPFDEFDPTKHKYDAEYYIENQVLPAVERILRAFGYRKEDLRYQKTRQVGLSAWLKPKGT

SEQ ID NO: 2498 - protein, 774 aa, synthetic construct
MILDTDLITEDGKPVWRIFKKENGEFKIEYDRTFEPYFYALLKDDSAIEEVKKITAERHGTVVTVKRVEKVQKKFLGRPVEVWKLYFTHPQDVPAIWDKIREHPAVIDIYEYDIPFAKRYLIDKGLVPMEGDEELKMLAFDIETLYHEGEEFAEGPILMISYADEEGARVITWKNVDLPYVDVVSTEREMIKRFLRVVKEKDPDVLITYNGDNFDFAYLKKRCEKLGINFALGRDGSEPKIQRMGDRFAVEVKGRIHFDLYPVIRRTINLPTYTLEAVYEAVFGQPKEKVYAEEITTAWETGENLERVARYSMEDAKVTYELGKEFLPMEAQLSRLIGQSLWDVSRSSTGNLVEWFLLRKAYERNELAPNKPDEKELARRRQSYEGGYVKEPERGLWENIVYLDFRSLYPSIIITHNVSPDTLNREGCKEYDVAPQVGHRFCKDFPGFIPSLLGDLLEERQKIKKKMKATIDPIERKLLDYRQRAIKILANSYYGYYGYARARWYCKECAESVTAWGREYITMTIKEIEEKYGFKVIYSDTDGFFATIPGADAETVKKKAMEFLKYINAKLPGALELEYEGFYKRGFFVTKKKYAVIDEEGKITTRGLEIVRRDWSEIAKETQARVLEALLKDGDVEKAVRIVKEVTEKLSKYEVPPEKLVIHEQITRDLKDYKATGPHVAVAKRLAARGVKIRPGTVISYIVLKGSGRIGDRAIPFDEFDPTKHKYDAEYYIENQVLPAVERILRAFGYRKEDLRYQKTRQVGLSAWLKPKGT

SEQ ID NO: 2499 - protein, 774 aa, synthetic construct
MILDTDLITEDGKPVWRIFKKENGEFKIEYDRTFEPYFYALLKDDSAIEEVKKITAERHGTVVTVKRVEKVQKKFLGRPVEVWKLYFTHPQDIPAIRDKIREHPAVIDIYEYDIPFAKRYLIDKGLVPMEGDEELKMLAFDIETLYHEGEEFAEGPILMISYADEEGARVITWKNVDLPYVDVVSTEREMIKRFLRVVKEKDPDVLITYNGDNFDFAYLKKRCEKLGINFALGRDGSEPKIQRMGDRFAVEVKGRIHFDLYPVIRRTINLPTYTLEAVYEAVFGQPKEKVYAEEITTAWETGENLERVARYSMEDAKVTYELGKEFLPMEAQLSRLIGQSLWDVSRSSTGNLVEWFLLRKAYERNELAPNKPDEKELARRRQSYEGGYVKEPERGLWENIVYLDFRSLYPSIIITHNVSPDTLNREGCKEYDVAPQVGHRFCKDFPGFIPSLLGDLLEERQKIKKKMKATIDPIERKLLDYRQRAIKILANSYYGYYGYARARWYCKECAESVTAWGREYITMTIKEIEEKYGFKVIYSDTDGFFATIPGADAETVKKKAMEFLKYINAKLPGALELEYEGFYKRGFFVTKKKYAVIDEEGKITTRGLEIVRRDWSEIAKETQARVLEALLKDGDVEKAVRIVKEVTEKLSKYEVPPEKLVIHEQITRDLKDYKATGPHVAVAKRLAARGVKIRPGTVISYIVLKGSGRIGDRAIPFDEFDPTKHKYDAEYYIENQVLPAVERILRAFGYRKEDLRYQKTRQVGLSAWLKPKGT

SEQ ID NO: 2500 - protein, 774 aa, synthetic construct
MILDTDLITEDGKPVWRIFKKENGEFKIEYDRTFEPYFYALLKDDSAIEEVKKITAERHGTVVTVKRVEKVQKKFLGRPVEVWKLYFTHPQDIPAIFDKIREHPAVIDIYEYDIPFAKRYLIDKGLVPMEGDEELKMLAFDIETLYHEGEEFAEGPILMISYADEEGARVITWKNVDLPYVDVVSTEREMIKRFLRVVKEKDPDVLITYNGDNFDFAYLKKRCEKLGINFALGRDGSEPKIQRMGDRFAVEVKGRIHFDLYPVIRRTINLPTYTLEAVYEAVFGQPKEKVYAEEITTAWETGENLERVARYSMEDAKVTYELGKEFLPMEAQLSRLIGQSLWDVSRSSTGNLVEWFLLRKAYERNELAPNKPDEKELARRRQSYEGGYVKEPERGLWENIVYLDFRSLYPSIIITHNVSPDTLNREGCKEYDVAPQVGHRFCKDFPGFIPSLLGDLLEERQKIKKKMKATIDPIERKLLDYRQRAIKILANSYYGYYGYARARWYCKECAESVTAWGREYITMTIKEIEEKYGFKVIYSDTDGFFATIPGADAETVKKKAMEFLKYINAKLPGALELEYEGFYKRGFFVTKKKYAVIDEEGKITTRGLEIVRRDWSEIAKETQARVLEALLKDGDVEKAVRIVKEVTEKLSKYEVPPEKLVIHEQITRDLKDYKATGPHVAVAKRLAARGVKIRPGTVISYIVLKGSGRIGDRAIPFDEFDPTKHKYDAEYYIENQVLPAVERILRAFGYRKEDLRYQKTRQVGLSAWLKPKGT

SEQ ID NO: 2501 - protein, 774 aa, synthetic construct
MILDTDLITEDGKPVWRIFKKENGEFKIEYDRTFEPYFYALLKDDSAIEEVKKITAERHGTVVTVKRVEKVQKKFLGRPVEVWKLYFTHPQDIPAIHDKIREHPAVIDIYEYDIPFAKRYLIDKGLVPMEGDEELKMLAFDIETLYHEGEEFAEGPILMISYADEEGARVITWKNVDLPYVDVVSTEREMIKRFLRVVKEKDPDVLITYNGDNFDFAYLKKRCEKLGINFALGRDGSEPKIQRMGDRFAVEVKGRIHFDLYPVIRRTINLPTYTLEAVYEAVFGQPKEKVYAEEITTAWETGENLERVARYSMEDAKVTYELGKEFLPMEAQLSRLIGQSLWDVSRSSTGNLVEWFLLRKAYERNELAPNKPDEKELARRRQSYEGGYVKEPERGLWENIVYLDFRSLYPSIIITHNVSPDTLNREGCKEYDVAPQVGHRFCKDFPGFIPSLLGDLLEERQKIKKKMKATIDPIERKLLDYRQRAIKILANSYYGYYGYARARWYCKECAESVTAWGREYITMTIKEIEEKYGFKVIYSDTDGFFATIPGADAETVKKKAMEFLKYINAKLPGALELEYEGFYKRGFFVTKKKYAVIDEEGKITTRGLEIVRRDWSEIAKETQARVLEALLKDGDVEKAVRIVKEVTEKLSKYEVPPEKLVIHEQITRDLKDYKATGPHVAVAKRLAARGVKIRPGTVISYIVLKGSGRIGDRAIPFDEFDPTKHKYDAEYYIENQVLPAVERILRAFGYRKEDLRYQKTRQVGLSAWLKPKGT

SEQ ID NO: 2502 - protein, 774 aa, synthetic construct
MILDTDLITEDGKPVWRIFKKENGEFKIEYDRTFEPYFYALLKDDSAIEEVKKITAERHGTVVTVKRVEKVQKKFLGRPVEVWKLYFTHPQDIPAIWDKIREHPAVIDIYEYDIPFAKRYLIDKGLVPMEGDEELKMLAFDIETLYHEGEEFAEGPILMISYADEEGARVITWKNVDLPYVDVVSTEREMIKRFLRVVKEKDPDVLITYNGDNFDFAYLKKRCEKLGINFALGRDGSEPKIQRMGDRFAVEVKGRIHFDLYPVIRRTINLPTYTLEAVYEAVFGQPKEKVYAEEITTAWETGENLERVARYSMEDAKVTYELGKEFLPMEAQLSRLIGQSLWDVSRSSTGNLVEWFLLRKAYERNELAPNKPDEKELARRRQSYEGGYVKEPERGLWENIVYLDFRSLYPSIIITHNVSPDTLNREGCKEYDVAPQVGHRFCKDFPGFIPSLLGDLLEERQKIKKKMKATIDPIERKLLDYRQRAIKILANSYYGYYGYARARWYCKECAESVTAWGREYITMTIKEIEEKYGFKVIYSDTDGFFATIPGADAETVKKKAMEFLKYINAKLPGALELEYEGFYKRGFFVTKKKYAVIDEEGKITTRGLEIVRRDWSEIAKETQARVLEALLKDGDVEKAVRIVKEVTEKLSKYEVPPEKLVIHEQITRDLKDYKATGPHVAVAKRLAARGVKIRPGTVISYIVLKGSGRIGDRAIPFDEFDPTKHKYDAEYYIENQVLPAVERILRAFGYRKEDLRYQKTRQVGLSAWLKPKGT

SEQ ID NO: 2503 - protein, 774 aa, synthetic construct
MILDTDLITEDGKPVWRIFKKENGEFKIEYDRTFEPYFYALLKDDSAIEEVKKITAERHGTVVTVKRVEKVQKKFLGRPVEVWKLYFTHPQDQPAIRDKIREHPAVIDIYEYDIPFAKRYLIDKGLVPMEGDEELKMLAFDIETLYHEGEEFAEGPILMISYADEEGARVITWKNVDLPYVDVVSTEREMIKRFLRVVKEKDPDVLITYNGDNFDFAYLKKRCEKLGINFALGRDGSEPKIQRMGDRFAVEVKGRIHFDLYPVIRRTINLPTYTLEAVYEAVFGQPKEKVYAEEITTAWETGENLERVARYSMEDAKVTYELGKEFLPMEAQLSRLIGQSLWDVSRSSTGNLVEWFLLRKAYERNELAPNKPDEKELARRRQSYEGGYVKEPERGLWENIVYLDFRSLYPSIIITHNVSPDTLNREGCKEYDVAPQVGHRFCKDFPGFIPSLLGDLLEERQKIKKKMKATIDPIERKLLDYRQRAIKILANSYYGYYGYARARWYCKECAESVTAWGREYITMTIKEIEEKYGFKVIYSDTDGFFATIPGADAETVKKKAMEFLKYINAKLPGALELEYEGFYKRGFFVTKKKYAVIDEEGKITTRGLEIVRRDWSEIAKETQARVLEALLKDGDVEKAVRIVKEVTEKLSKYEVPPEKLVIHEQITRDLKDYKATGPHVAVAKRLAARGVKIRPGTVISYIVLKGSGRIGDRAIPFDEFDPTKHKYDAEYYIENQVLPAVERILRAFGYRKEDLRYQKTRQVGLSAWLKPKGT

SEQ ID NO: 2504 - protein, 774 aa, synthetic construct
MILDTDLITEDGKPVWRIFKKENGEFKIEYDRTFEPYFYALLKDDSAIEEVKKITAERHGTVVTVKRVEKVQKKFLGRPVEVWKLYFTHPQDRPAIRDKIREHPAVIDIYEYDIPFAKRYLIDKGLVPMEGDEELKMLAFDIETLYHEGEEFAEGPILMISYADEEGARVITWKNVDLPYVDVVSTEREMIKRFLRVVKEKDPDVLITYNGDNFDFAYLKKRCEKLGINFALGRDGSEPKIQRMGDRFAVEVKGRIHFDLYPVIRRTINLPTYTLEAVYEAVFGQPKEKVYAEEITTAWETGENLERVARYSMEDAKVTYELGKEFLPMEAQLSRLIGQSLWDVSRSSTGNLVEWFLLRKAYERNELAPNKPDEKELARRRQSYEGGYVKEPERGLWENIVYLDFRSLYPSIIITHNVSPDTLNREGCKEYDVAPQVGHRFCKDFPGFIPSLLGDLLEERQKIKKKMKATIDPIERKLLDYRQRAIKILANSYYGYYGYARARWYCKECAESVTAWGREYITMTIKEIEEKYGFKVIYSDTDGFFATIPGADAETVKKKAMEFLKYINAKLPGALELEYEGFYKRGFFVTKKKYAVIDEEGKITTRGLEIVRRDWSEIAKETQARVLEALLKDGDVEKAVRIVKEVTEKLSKYEVPPEKLVIHEQITRDLKDYKATGPHVAVAKRLAARGVKIRPGTVISYIVLKGSGRIGDRAIPFDEFDPTKHKYDAEYYIENQVLPAVERILRAFGYRKEDLRYQKTRQVGLSAWLKPKGT

SEQ ID NO: 2505 - protein, 774 aa, synthetic construct
MILDTDLITEDGKPVIRIFKKENGEFKIEYDRTFEAYFYALLKDDSAIEEVKKITAERHGTVVTVKRVEKVQKKFLGRPVEVWKLYFTHPQDVPAIRDKIREHPAVIDIYEYDIPFAKRYLIDKGLVPMEGDEELKMLAFDIETLYHEGEEFAEGPILMISYADEEGARVITWKNVDLPYVDVVSTEREMIKRFLRVVKEKDPDVLITYNGDNFDFAYLKKRCEKLGINFALGRDGSEPKIQRMGDRFAVEVKGRIHFDLYPVIRRTINLPTYTLEAVYEAVFGQPKEKVYAEEITTAWETGENLERVARYSMEDAKVTYELGKEFLPMEAQLSRLIGQSLWDVSRSSTGNLVEWFLLRKAYERNELAPNKPDEKELARRRQSYEGGYVKEPERGLWENIVYLDFRSLYPSIIITHNVSPDTLNREGCKEYDVAPQVGHRFCKDFPGFIPSLLGDLLEERQKIKKKMKATIDPIERKLLDYRQRAIKILANSYYGYYGYARARWYCKECAESVTAWGREYITMTIKEIEEKYGFKVIYSDTDGFFATIPGADAETVKKKAMEFLKYINAKLPGALELEYEGFYKRGFFVTKKKYAVIDEEGKITTRGLEIVRRDWSEIAKETQARVLEALLKDGDVEKAVRIVKEVTEKLSKYEVPPEKLVIHEQITRDLKDYKATGPHVAVAKRLAARGVKIRPGTVISYIVLKGSGRIGDRAIPFDEFDPTKHKYDAEYYIENQVLPAVERILRAFGYRKEDLRYQKTRQVGLSAWLKPKGT

SEQ ID NO: 2506 - protein, 774 aa, synthetic construct
MILDTDLITEDGKPVIRIFKKENGEFKIEYDRTFEAYFYALLKDDSAIEEVKKITAERHGTVVTVKRVEKVQKKFLGRPVEVWKLYFTHFQDVPAIRDKIREHPAVIDIYEYDIPFAKRYLIDKGLVPMEGDEELKMLAFDIETLYHEGEEFAEGPILMISYADEEGARVITWKNVDLPYVDVVSTEREMIKRFLRVVKEKDPDVLITYNGDNFDFAYLKKRCEKLGINFALGRDGSEPKIQRMGDRFAVEVKGRIHFDLYPVIRRTINLPTYTLEAVYEAVFGQPKEKVYAEEITTAWETGENLERVARYSMEDAKVTYELGKEFLPMEAQLSRLIGQSLWDVSRSSTGNLVEWFLLRKAYERNELAPNKPDEKELARRRQSYEGGYVKEPERGLWENIVYLDFRSLYPSIIITHNVSPDTLNREGCKEYDVAPQVGHRFCKDFPGFIPSLLGDLLEERQKIKKKMKATIDPIERKLLDYRQRAIKILANSYYGYYGYARARWYCKECAESVTAWGREYITMTIKEIEEKYGFKVIYSDTDGFFATIPGADAETVKKKAMEFLKYINAKLPGALELEYEGFYKRGFFVTKKKYAVIDEEGKITTRGLEIVRRDWSEIAKETQARVLEALLKDGDVEKAVRIVKEVTEKLSKYEVPPEKLVIHEQITRDLKDYKATGPHVAVAKRLAARGVKIRPGTVISYIVLKGSGRIGDRAIPFDEFDPTKHKYDAEYYIENQVLPAVERILRAFGYRKEDLRYQKTRQVGLSAWLKPKGT

SEQ ID NO: 2507 - protein, 774 aa, synthetic construct
MILDTDLITEDGKPVIRIFKKENGEFKIEYDRTFEAYFYALLKDDSAIEEVKKITAERHGTVVTVKRVEKVQKKFLGRPVEVWKLYFTHFQDVPAIADKIREHPAVIDIYEYDIPFAKRYLIDKGLVPMEGDEELKMLAFDIETLYHEGEEFAEGPILMISYADEEGARVITWKNVDLPYVDVVSTEREMIKRFLRVVKEKDPDVLITYNGDNFDFAYLKKRCEKLGINFALGRDGSEPKIQRMGDRFAVEVKGRIHFDLYPVIRRTINLPTYTLEAVYEAVFGQPKEKVYAEEITTAWETGENLERVARYSMEDAKVTYELGKEFLPMEAQLSRLIGQSLWDVSRSSTGNLVEWFLLRKAYERNELAPNKPDEKELARRRQSYEGGYVKEPERGLWENIVYLDFRSLYPSIIITHNVSPDTLNREGCKEYDVAPQVGHRFCKDFPGFIPSLLGDLLEERQKIKKKMKATIDPIERKLLDYRQRAIKILANSYYGYYGYARARWYCKECAESVTAWGREYITMTIKEIEEKYGFKVIYSDTDGFFATIPGADAETVKKKAMEFLKYINAKLPGALELEYEGFYKRGFFVTKKKYAVIDEEGKITTRGLEIVRRDWSEIAKETQARVLEALLKDGDVEKAVRIVKEVTEKLSKYEVPPEKLVIHEQITRDLKDYKATGPHVAVAKRLAARGVKIRPGTVISYIVLKGSGRIGDRAIPFDEFDPTKHKYDAEYYIENQVLPAVERILRAFGYRKEDLRYQKTRQVGLSAWLKPKGT

SEQ ID NO: 2508 - protein, 774 aa, synthetic construct
MILDTDLITEDGKPVIRIFKKENGEFKIEYDRTFEAYFYALLKDDSAIEEVKKITAERHGTVVTVKRVEKVQKKFLGRPVEVWKLYFTHFQDVPAIFDKIREHPAVIDIYEYDIPFAKRYLIDKGLVPMEGDEELKMLAFDIETLYHEGEEFAEGPILMISYADEEGARVITWKNVDLPYVDVVSTEREMIKRFLRVVKEKDPDVLITYNGDNFDFAYLKKRCEKLGINFALGRDGSEPKIQRMGDRFAVEVKGRIHFDLYPVIRRTINLPTYTLEAVYEAVFGQPKEKVYAEEITTAWETGENLERVARYSMEDAKVTYELGKEFLPMEAQLSRLIGQSLWDVSRSSTGNLVEWFLLRKAYERNELAPNKPDEKELARRRQSYEGGYVKEPERGLWENIVYLDFRSLYPSIIITHNVSPDTLNREGCKEYDVAPQVGHRFCKDFPGFIPSLLGDLLEERQKIKKKMKATIDPIERKLLDYRQRAIKILANSYYGYYGYARARWYCKECAESVTAWGREYITMTIKEIEEKYGFKVIYSDTDGFFATIPGADAETVKKKAMEFLKYINAKLPGALELEYEGFYKRGFFVTKKKYAVIDEEGKITTRGLEIVRRDWSEIAKETQARVLEALLKDGDVEKAVRIVKEVTEKLSKYEVPPEKLVIHEQITRDLKDYKATGPHVAVAKRLAARGVKIRPGTVISYIVLKGSGRIGDRAIPFDEFDPTKHKYDAEYYIENQVLPAVERILRAFGYRKEDLRYQKTRQVGLSAWLKPKGT

SEQ ID NO: 2509 - protein, 774 aa, synthetic construct
MILDTDLITEDGKPVIRIFKKENGEFKIEYDRTFEAYFYALLKDDSAIEEVKKITAERHGTVVTVKRVEKVQKKFLGRPVEVWKLYFTHFQDIPAIRDKIREHPAVIDIYEYDIPFAKRYLIDKGLVPMEGDEELKMLAFDIETLYHEGEEFAEGPILMISYADEEGARVITWKNVDLPYVDVVSTEREMIKRFLRVVKEKDPDVLITYNGDNFDFAYLKKRCEKLGINFALGRDGSEPKIQRMGDRFAVEVKGRIHFDLYPVIRRTINLPTYTLEAVYEAVFGQPKEKVYAEEITTAWETGENLERVARYSMEDAKVTYELGKEFLPMEAQLSRLIGQSLWDVSRSSTGNLVEWFLLRKAYERNELAPNKPDEKELARRRQSYEGGYVKEPERGLWENIVYLDFRSLYPSIIITHNVSPDTLNREGCKEYDVAPQVGHRFCKDFPGFIPSLLGDLLEERQKIKKKMKATIDPIERKLLDYRQRAIKILANSYYGYYGYARARWYCKECAESVTAWGREYITMTIKEIEEKYGFKVIYSDTDGFFATIPGADAETVKKKAMEFLKYINAKLPGALELEYEGFYKRGFFVTKKKYAVIDEEGKITTRGLEIVRRDWSEIAKETQARVLEALLKDGDVEKAVRIVKEVTEKLSKYEVPPEKLVIHEQITRDLKDYKATGPHVAVAKRLAARGVKIRPGTVISYIVLKGSGRIGDRAIPFDEFDPTKHKYDAEYYIENQVLPAVERILRAFGYRKEDLRYQKTRQVGLSAWLKPKGT

SEQ ID NO: 2510 - protein, 774 aa, synthetic construct
MILDTDLITEDGKPVIRIFKKENGEFKIEYDRTFEAYFYALLKDDSAIEEVKKITAERHGTVVTVKRVEKVQKKFLGRPVEVWKLYFTHFQDIPAIFDKIREHPAVIDIYEYDIPFAKRYLIDKGLVPMEGDEELKMLAFDIETLYHEGEEFAEGPILMISYADEEGARVITWKNVDLPYVDVVSTEREMIKRFLRVVKEKDPDVLITYNGDNFDFAYLKKRCEKLGINFALGRDGSEPKIQRMGDRFAVEVKGRIHFDLYPVIRRTINLPTYTLEAVYEAVFGQPKEKVYAEEITTAWETGENLERVARYSMEDAKVTYELGKEFLPMEAQLSRLIGQSLWDVSRSSTGNLVEWFLLRKAYERNELAPNKPDEKELARRRQSYEGGYVKEPERGLWENIVYLDFRSLYPSIIITHNVSPDTLNREGCKEYDVAPQVGHRFCKDFPGFIPSLLGDLLEERQKIKKKMKATIDPIERKLLDYRQRAIKILANSYYGYYGYARARWYCKECAESVTAWGREYITMTIKEIEEKYGFKVIYSDTDGFFATIPGADAETVKKKAMEFLKYINAKLPGALELEYEGFYKRGFFVTKKKYAVIDEEGKITTRGLEIVRRDWSEIAKETQARVLEALLKDGDVEKAVRIVKEVTEKLSKYEVPPEKLVIHEQITRDLKDYKATGPHVAVAKRLAARGVKIRPGTVISYIVLKGSGRIGDRAIPFDEFDPTKHKYDAEYYIENQVLPAVERILRAFGYRKEDLRYQKTRQVGLSAWLKPKGT

SEQ ID NO: 2511 - protein, 774 aa, synthetic construct
MILDTDLITEDGKPVIRIFKKENGEFKIEYDRTFEAYFYALLKDDSAIEEVKKITAERHGTVVTVKRVEKVQKKFLGRPVEVWKLYFTHFQDIPAIHDKIREHPAVIDIYEYDIPFAKRYLIDKGLVPMEGDEELKMLAFDIETLYHEGEEFAEGPILMISYADEEGARVITWKNVDLPYVDVVSTEREMIKRFLRVVKEKDPDVLITYNGDNFDFAYLKKRCEKLGINFALGRDGSEPKIQRMGDRFAVEVKGRIHFDLYPVIRRTINLPTYTLEAVYEAVFGQPKEKVYAEEITTAWETGENLERVARYSMEDAKVTYELGKEFLPMEAQLSRLIGQSLWDVSRSSTGNLVEWFLLRKAYERNELAPNKPDEKELARRRQSYEGGYVKEPERGLWENIVYLDFRSLYPSIIITHNVSPDTLNREGCKEYDVAPQVGHRFCKDFPGFIPSLLGDLLEERQKIKKKMKATIDPIERKLLDYRQRAIKILANSYYGYYGYARARWYCKECAESVTAWGREYITMTIKEIEEKYGFKVIYSDTDGFFATIPGADAETVKKKAMEFLKYINAKLPGALELEYEGFYKRGFFVTKKKYAVIDEEGKITTRGLEIVRRDWSEIAKETQARVLEALLKDGDVEKAVRIVKEVTEKLSKYEVPPEKLVIHEQITRDLKDYKATGPHVAVAKRLAARGVKIRPGTVISYIVLKGSGRIGDRAIPFDEFDPTKHKYDAEYYIENQVLPAVERILRAFGYRKEDLRYQKTRQVGLSAWLKPKGT

SEQ ID NO: 2512 - protein, 774 aa, synthetic construct
MILDTDLITEDGKPVIRIFKKENGEFKIEYDRTFEAYFYALLKDDSAIEEVKKITAERHGTVVTVKRVEKVQKKFLGRPVEVWKLYFTHFQDIPAIWDKIREHPAVIDIYEYDIPFAKRYLIDKGLVPMEGDEELKMLAFDIETLYHEGEEFAEGPILMISYADEEGARVITWKNVDLPYVDVVSTEREMIKRFLRVVKEKDPDVLITYNGDNFDFAYLKKRCEKLGINFALGRDGSEPKIQRMGDRFAVEVKGRIHFDLYPVIRRTINLPTYTLEAVYEAVFGQPKEKVYAEEITTAWETGENLERVARYSMEDAKVTYELGKEFLPMEAQLSRLIGQSLWDVSRSSTGNLVEWFLLRKAYERNELAPNKPDEKELARRRQSYEGGYVKEPERGLWENIVYLDFRSLYPSIIITHNVSPDTLNREGCKEYDVAPQVGHRFCKDFPGFIPSLLGDLLEERQKIKKKMKATIDPIERKLLDYRQRAIKILANSYYGYYGYARARWYCKECAESVTAWGREYITMTIKEIEEKYGFKVIYSDTDGFFATIPGADAETVKKKAMEFLKYINAKLPGALELEYEGFYKRGFFVTKKKYAVIDEEGKITTRGLEIVRRDWSEIAKETQARVLEALLKDGDVEKAVRIVKEVTEKLSKYEVPPEKLVIHEQITRDLKDYKATGPHVAVAKRLAARGVKIRPGTVISYIVLKGSGRIGDRAIPFDEFDPTKHKYDAEYYIENQVLPAVERILRAFGYRKEDLRYQKTRQVGLSAWLKPKGT

SEQ ID NO: 2513 - protein, 774 aa, synthetic construct
MILDTDLITEDGKPVIRIFKKENGEFKIEYDRTFEAYFYALLKDDSAIEEVKKITAERHGTVVTVKRVEKVQKKFLGRPVEVWKLYFTHFQDRPAIRDKIREHPAVIDIYEYDIPFAKRYLIDKGLVPMEGDEELKMLAFDIETLYHEGEEFAEGPILMISYADEEGARVITWKNVDLPYVDVVSTEREMIKRFLRVVKEKDPDVLITYNGDNFDFAYLKKRCEKLGINFALGRDGSEPKIQRMGDRFAVEVKGRIHFDLYPVIRRTINLPTYTLEAVYEAVFGQPKEKVYAEEITTAWETGENLERVARYSMEDAKVTYELGKEFLPMEAQLSRLIGQSLWDVSRSSTGNLVEWFLLRKAYERNELAPNKPDEKELARRRQSYEGGYVKEPERGLWENIVYLDFRSLYPSIIITHNVSPDTLNREGCKEYDVAPQVGHRFCKDFPGFIPSLLGDLLEERQKIKKKMKATIDPIERKLLDYRQRAIKILANSYYGYYGYARARWYCKECAESVTAWGREYITMTIKEIEEKYGFKVIYSDTDGFFATIPGADAETVKKKAMEFLKYINAKLPGALELEYEGFYKRGFFVTKKKYAVIDEEGKITTRGLEIVRRDWSEIAKETQARVLEALLKDGDVEKAVRIVKEVTEKLSKYEVPPEKLVIHEQITRDLKDYKATGPHVAVAKRLAARGVKIRPGTVISYIVLKGSGRIGDRAIPFDEFDPTKHKYDAEYYIENQVLPAVERILRAFGYRKEDLRYQKTRQVGLSAWLKPKGT

SEQ ID NO: 2514 - protein, 774 aa, synthetic construct
MILDTDLITEDGKPVIRIFKKENGEFKIEYDRTFEAYFYALLKDDSAIEEVKKITAERHGTVVTVKRVEKVQKKFLGRPVEVWKLYFTHIQDVPAIRDKIREHPAVIDIYEYDIPFAKRYLIDKGLVPMEGDEELKMLAFDIETLYHEGEEFAEGPILMISYADEEGARVITWKNVDLPYVDVVSTEREMIKRFLRVVKEKDPDVLITYNGDNFDFAYLKKRCEKLGINFALGRDGSEPKIQRMGDRFAVEVKGRIHFDLYPVIRRTINLPTYTLEAVYEAVFGQPKEKVYAEEITTAWETGENLERVARYSMEDAKVTYELGKEFLPMEAQLSRLIGQSLWDVSRSSTGNLVEWFLLRKAYERNELAPNKPDEKELARRRQSYEGGYVKEPERGLWENIVYLDFRSLYPSIIITHNVSPDTLNREGCKEYDVAPQVGHRFCKDFPGFIPSLLGDLLEERQKIKKKMKATIDPIERKLLDYRQRAIKILANSYYGYYGYARARWYCKECAESVTAWGREYITMTIKEIEEKYGFKVIYSDTDGFFATIPGADAETVKKKAMEFLKYINAKLPGALELEYEGFYKRGFFVTKKKYAVIDEEGKITTRGLEIVRRDWSEIAKETQARVLEALLKDGDVEKAVRIVKEVTEKLSKYEVPPEKLVIHEQITRDLKDYKATGPHVAVAKRLAARGVKIRPGTVISYIVLKGSGRIGDRAIPFDEFDPTKHKYDAEYYIENQVLPAVERILRAFGYRKEDLRYQKTRQVGLSAWLKPKGT

SEQ ID NO: 2515 - protein, 774 aa, synthetic construct
MILDTDLITEDGKPVIRIFKKENGEFKIEYDRTFEAYFYALLKDDSAIEEVKKITAERHGTVVTVKRVEKVQKKFLGRPVEVWKLYFTHIQDVPAIFDKIREHPAVIDIYEYDIPFAKRYLIDKGLVPMEGDEELKMLAFDIETLYHEGEEFAEGPILMISYADEEGARVITWKNVDLPYVDVVSTEREMIKRFLRVVKEKDPDVLITYNGDNFDFAYLKKRCEKLGINFALGRDGSEPKIQRMGDRFAVEVKGRIHFDLYPVIRRTINLPTYTLEAVYEAVFGQPKEKVYAEEITTAWETGENLERVARYSMEDAKVTYELGKEFLPMEAQLSRLIGQSLWDVSRSSTGNLVEWFLLRKAYERNELAPNKPDEKELARRRQSYEGGYVKEPERGLWENIVYLDFRSLYPSIIITHNVSPDTLNREGCKEYDVAPQVGHRFCKDFPGFIPSLLGDLLEERQKIKKKMKATIDPIERKLLDYRQRAIKILANSYYGYYGYARARWYCKECAESVTAWGREYITMTIKEIEEKYGFKVIYSDTDGFFATIPGADAETVKKKAMEFLKYINAKLPGALELEYEGFYKRGFFVTKKKYAVIDEEGKITTRGLEIVRRDWSEIAKETQARVLEALLKDGDVEKAVRIVKEVTEKLSKYEVPPEKLVIHEQITRDLKDYKATGPHVAVAKRLAARGVKIRPGTVISYIVLKGSGRIGDRAIPFDEFDPTKHKYDAEYYIENQVLPAVERILRAFGYRKEDLRYQKTRQVGLSAWLKPKGT

SEQ ID NO: 2516 - protein, 774 aa, synthetic construct
MILDTDLITEDGKPVIRIFKKENGEFKIEYDRTFEAYFYALLKDDSAIEEVKKITAERHGTVVTVKRVEKVQKKFLGRPVEVWKLYFTHIQDIPAIRDKIREHPAVIDIYEYDIPFAKRYLIDKGLVPMEGDEELKMLAFDIETLYHEGEEFAEGPILMISYADEEGARVITWKNVDLPYVDVVSTEREMIKRFLRVVKEKDPDVLITYNGDNFDFAYLKKRCEKLGINFALGRDGSEPKIQRMGDRFAVEVKGRIHFDLYPVIRRTINLPTYTLEAVYEAVFGQPKEKVYAEEITTAWETGENLERVARYSMEDAKVTYELGKEFLPMEAQLSRLIGQSLWDVSRSSTGNLVEWFLLRKAYERNELAPNKPDEKELARRRQSYEGGYVKEPERGLWENIVYLDFRSLYPSIIITHNVSPDTLNREGCKEYDVAPQVGHRFCKDFPGFIPSLLGDLLEERQKIKKKMKATIDPIERKLLDYRQRAIKILANSYYGYYGYARARWYCKECAESVTAWGREYITMTIKEIEEKYGFKVIYSDTDGFFATIPGADAETVKKKAMEFLKYINAKLPGALELEYEGFYKRGFFVTKKKYAVIDEEGKITTRGLEIVRRDWSEIAKETQARVLEALLKDGDVEKAVRIVKEVTEKLSKYEVPPEKLVIHEQITRDLKDYKATGPHVAVAKRLAARGVKIRPGTVISYIVLKGSGRIGDRAIPFDEFDPTKHKYDAEYYIENQVLPAVERILRAFGYRKEDLRYQKTRQVGLSAWLKPKGT

SEQ ID NO: 2517 - protein, 774 aa, synthetic construct
MILDTDLITEDGKPVIRIFKKENGEFKIEYDRTFEAYFYALLKDDSAIEEVKKITAERHGTVVTVKRVEKVQKKFLGRPVEVWKLYFTHWQDVPAIRDKIREHPAVIDIYEYDIPFAKRYLIDKGLVPMEGDEELKMLAFDIETLYHEGEEFAEGPILMISYADEEGARVITWKNVDLPYVDVVSTEREMIKRFLRVVKEKDPDVLITYNGDNFDFAYLKKRCEKLGINFALGRDGSEPKIQRMGDRFAVEVKGRIHFDLYPVIRRTINLPTYTLEAVYEAVFGQPKEKVYAEEITTAWETGENLERVARYSMEDAKVTYELGKEFLPMEAQLSRLIGQSLWDVSRSSTGNLVEWFLLRKAYERNELAPNKPDEKELARRRQSYEGGYVKEPERGLWENIVYLDFRSLYPSIIITHNVSPDTLNREGCKEYDVAPQVGHRFCKDFPGFIPSLLGDLLEERQKIKKKMKATIDPIERKLLDYRQRAIKILANSYYGYYGYARARWYCKECAESVTAWGREYITMTIKEIEEKYGFKVIYSDTDGFFATIPGADAETVKKKAMEFLKYINAKLPGALELEYEGFYKRGFFVTKKKYAVIDEEGKITTRGLEIVRRDWSEIAKETQARVLEALLKDGDVEKAVRIVKEVTEKLSKYEVPPEKLVIHEQITRDLKDYKATGPHVAVAKRLAARGVKIRPGTVISYIVLKGSGRIGDRAIPFDEFDPTKHKYDAEYYIENQVLPAVERILRAFGYRKEDLRYQKTRQVGLSAWLKPKGT

SEQ ID NO: 2518 - protein, 774 aa, synthetic construct
MILDTDLITEDGKPVIRIFKKENGEFKIEYDRTFEAYFYALLKDDSAIEEVKKITAERHGTVVTVKRVEKVQKKFLGRPVEVWKLYFTHWQDVPAIADKIREHPAVIDIYEYDIPFAKRYLIDKGLVPMEGDEELKMLAFDIETLYHEGEEFAEGPILMISYADEEGARVITWKNVDLPYVDVVSTEREMIKRFLRVVKEKDPDVLITYNGDNFDFAYLKKRCEKLGINFALGRDGSEPKIQRMGDRFAVEVKGRIHFDLYPVIRRTINLPTYTLEAVYEAVFGQPKEKVYAEEITTAWETGENLERVARYSMEDAKVTYELGKEFLPMEAQLSRLIGQSLWDVSRSSTGNLVEWFLLRKAYERNELAPNKPDEKELARRRQSYEGGYVKEPERGLWENIVYLDFRSLYPSIIITHNVSPDTLNREGCKEYDVAPQVGHRFCKDFPGFIPSLLGDLLEERQKIKKKMKATIDPIERKLLDYRQRAIKILANSYYGYYGYARARWYCKECAESVTAWGREYITMTIKEIEEKYGFKVIYSDTDGFFATIPGADAETVKKKAMEFLKYINAKLPGALELEYEGFYKRGFFVTKKKYAVIDEEGKITTRGLEIVRRDWSEIAKETQARVLEALLKDGDVEKAVRIVKEVTEKLSKYEVPPEKLVIHEQITRDLKDYKATGPHVAVAKRLAARGVKIRPGTVISYIVLKGSGRIGDRAIPFDEFDPTKHKYDAEYYIENQVLPAVERILRAFGYRKEDLRYQKTRQVGLSAWLKPKGT

SEQ ID NO: 2519 - protein, 774 aa, synthetic construct
MILDTDLITEDGKPVIRIFKKENGEFKIEYDRTFEAYFYALLKDDSAIEEVKKITAERHGTVVTVKRVEKVQKKFLGRPVEVWKLYFTHWQDIPAIRDKIREHPAVIDIYEYDIPFAKRYLIDKGLVPMEGDEELKMLAFDIETLYHEGEEFAEGPILMISYADEEGARVITWKNVDLPYVDVVSTEREMIKRFLRVVKEKDPDVLITYNGDNFDFAYLKKRCEKLGINFALGRDGSEPKIQRMGDRFAVEVKGRIHFDLYPVIRRTINLPTYTLEAVYEAVFGQPKEKVYAEEITTAWETGENLERVARYSMEDAKVTYELGKEFLPMEAQLSRLIGQSLWDVSRSSTGNLVEWFLLRKAYERNELAPNKPDEKELARRRQSYEGGYVKEPERGLWENIVYLDFRSLYPSIIITHNVSPDTLNREGCKEYDVAPQVGHRFCKDFPGFIPSLLGDLLEERQKIKKKMKATIDPIERKLLDYRQRAIKILANSYYGYYGYARARWYCKECAESVTAWGREYITMTIKEIEEKYGFKVIYSDTDGFFATIPGADAETVKKKAMEFLKYINAKLPGALELEYEGFYKRGFFVTKKKYAVIDEEGKITTRGLEIVRRDWSEIAKETQARVLEALLKDGDVEKAVRIVKEVTEKLSKYEVPPEKLVIHEQITRDLKDYKATGPHVAVAKRLAARGVKIRPGTVISYIVLKGSGRIGDRAIPFDEFDPTKHKYDAEYYIENQVLPAVERILRAFGYRKEDLRYQKTRQVGLSAWLKPKGT

SEQ ID NO: 2520 - protein, 774 aa, synthetic construct
MILDTDLITEDGKPVIRIFKKENGEFKIEYDRTFEAYFYALLKDDSAIEEVKKITAERHGTVVTVKRVEKVQKKFLGRPVEVWKLYFTHWQDIPAIADKIREHPAVIDIYEYDIPFAKRYLIDKGLVPMEGDEELKMLAFDIETLYHEGEEFAEGPILMISYADEEGARVITWKNVDLPYVDVVSTEREMIKRFLRVVKEKDPDVLITYNGDNFDFAYLKKRCEKLGINFALGRDGSEPKIQRMGDRFAVEVKGRIHFDLYPVIRRTINLPTYTLEAVYEAVFGQPKEKVYAEEITTAWETGENLERVARYSMEDAKVTYELGKEFLPMEAQLSRLIGQSLWDVSRSSTGNLVEWFLLRKAYERNELAPNKPDEKELARRRQSYEGGYVKEPERGLWENIVYLDFRSLYPSIIITHNVSPDTLNREGCKEYDVAPQVGHRFCKDFPGFIPSLLGDLLEERQKIKKKMKATIDPIERKLLDYRQRAIKILANSYYGYYGYARARWYCKECAESVTAWGREYITMTIKEIEEKYGFKVIYSDTDGFFATIPGADAETVKKKAMEFLKYINAKLPGALELEYEGFYKRGFFVTKKKYAVIDEEGKITTRGLEIVRRDWSEIAKETQARVLEALLKDGDVEKAVRIVKEVTEKLSKYEVPPEKLVIHEQITRDLKDYKATGPHVAVAKRLAARGVKIRPGTVISYIVLKGSGRIGDRAIPFDEFDPTKHKYDAEYYIENQVLPAVERILRAFGYRKEDLRYQKTRQVGLSAWLKPKGT

SEQ ID NO: 2521 - protein, 774 aa, synthetic construct
MILDTDLITEDGKPVIRIFKKENGEFKIEYDRTFEAYFYALLKDDSAIEEVKKITAERHGTVVTVKRVEKVQKKFLGRPVEVWKLYFTHWQDIPAIHDKIREHPAVIDIYEYDIPFAKRYLIDKGLVPMEGDEELKMLAFDIETLYHEGEEFAEGPILMISYADEEGARVITWKNVDLPYVDVVSTEREMIKRFLRVVKEKDPDVLITYNGDNFDFAYLKKRCEKLGINFALGRDGSEPKIQRMGDRFAVEVKGRIHFDLYPVIRRTINLPTYTLEAVYEAVFGQPKEKVYAEEITTAWETGENLERVARYSMEDAKVTYELGKEFLPMEAQLSRLIGQSLWDVSRSSTGNLVEWFLLRKAYERNELAPNKPDEKELARRRQSYEGGYVKEPERGLWENIVYLDFRSLYPSIIITHNVSPDTLNREGCKEYDVAPQVGHRFCKDFPGFIPSLLGDLLEERQKIKKKMKATIDPIERKLLDYRQRAIKILANSYYGYYGYARARWYCKECAESVTAWGREYITMTIKEIEEKYGFKVIYSDTDGFFATIPGADAETVKKKAMEFLKYINAKLPGALELEYEGFYKRGFFVTKKKYAVIDEEGKITTRGLEIVRRDWSEIAKETQARVLEALLKDGDVEKAVRIVKEVTEKLSKYEVPPEKLVIHEQITRDLKDYKATGPHVAVAKRLAARGVKIRPGTVISYIVLKGSGRIGDRAIPFDEFDPTKHKYDAEYYIENQVLPAVERILRAFGYRKEDLRYQKTRQVGLSAWLKPKGT

SEQ ID NO: 2522 - protein, 774 aa, synthetic construct
MILDTDLITEDGKPVIRIFKKENGEFKIEYDRTFEAYFYALLKDDSAIEEVKKITAERHGTVVTVKRVEKVQKKFLGRPVEVWKLYFTHWQDIPAIWDKIREHPAVIDIYEYDIPFAKRYLIDKGLVPMEGDEELKMLAFDIETLYHEGEEFAEGPILMISYADEEGARVITWKNVDLPYVDVVSTEREMIKRFLRVVKEKDPDVLITYNGDNFDFAYLKKRCEKLGINFALGRDGSEPKIQRMGDRFAVEVKGRIHFDLYPVIRRTINLPTYTLEAVYEAVFGQPKEKVYAEEITTAWETGENLERVARYSMEDAKVTYELGKEFLPMEAQLSRLIGQSLWDVSRSSTGNLVEWFLLRKAYERNELAPNKPDEKELARRRQSYEGGYVKEPERGLWENIVYLDFRSLYPSIIITHNVSPDTLNREGCKEYDVAPQVGHRFCKDFPGFIPSLLGDLLEERQKIKKKMKATIDPIERKLLDYRQRAIKILANSYYGYYGYARARWYCKECAESVTAWGREYITMTIKEIEEKYGFKVIYSDTDGFFATIPGADAETVKKKAMEFLKYINAKLPGALELEYEGFYKRGFFVTKKKYAVIDEEGKITTRGLEIVRRDWSEIAKETQARVLEALLKDGDVEKAVRIVKEVTEKLSKYEVPPEKLVIHEQITRDLKDYKATGPHVAVAKRLAARGVKIRPGTVISYIVLKGSGRIGDRAIPFDEFDPTKHKYDAEYYIENQVLPAVERILRAFGYRKEDLRYQKTRQVGLSAWLKPKGT

SEQ ID NO: 2523 - protein, 774 aa, synthetic construct
MILDTDLITEDGKPVIRIFKKENGEFKIEYDRTFEAYFYALLKDDSAIEEVKKITAERHGTVVTVKRVEKVQKKFLGRPVEVWKLYFTHYQDIPAIRDKIREHPAVIDIYEYDIPFAKRYLIDKGLVPMEGDEELKMLAFDIETLYHEGEEFAEGPILMISYADEEGARVITWKNVDLPYVDVVSTEREMIKRFLRVVKEKDPDVLITYNGDNFDFAYLKKRCEKLGINFALGRDGSEPKIQRMGDRFAVEVKGRIHFDLYPVIRRTINLPTYTLEAVYEAVFGQPKEKVYAEEITTAWETGENLERVARYSMEDAKVTYELGKEFLPMEAQLSRLIGQSLWDVSRSSTGNLVEWFLLRKAYERNELAPNKPDEKELARRRQSYEGGYVKEPERGLWENIVYLDFRSLYPSIIITHNVSPDTLNREGCKEYDVAPQVGHRFCKDFPGFIPSLLGDLLEERQKIKKKMKATIDPIERKLLDYRQRAIKILANSYYGYYGYARARWYCKECAESVTAWGREYITMTIKEIEEKYGFKVIYSDTDGFFATIPGADAETVKKKAMEFLKYINAKLPGALELEYEGFYKRGFFVTKKKYAVIDEEGKITTRGLEIVRRDWSEIAKETQARVLEALLKDGDVEKAVRIVKEVTEKLSKYEVPPEKLVIHEQITRDLKDYKATGPHVAVAKRLAARGVKIRPGTVISYIVLKGSGRIGDRAIPFDEFDPTKHKYDAEYYIENQVLPAVERILRAFGYRKEDLRYQKTRQVGLSAWLKPKGT

SEQ ID NO: 2524 - protein, 774 aa, synthetic construct
MILDTDLITEDGKPVIRIFKKENGEFKIEYDRTFEAYFYALLKDDSAIEEVKKITAERHGTVVTVKRVEKVQKKFLGRPVEVWKLYFTHYQDIPAIADKIREHPAVIDIYEYDIPFAKRYLIDKGLVPMEGDEELKMLAFDIETLYHEGEEFAEGPILMISYADEEGARVITWKNVDLPYVDVVSTEREMIKRFLRVVKEKDPDVLITYNGDNFDFAYLKKRCEKLGINFALGRDGSEPKIQRMGDRFAVEVKGRIHFDLYPVIRRTINLPTYTLEAVYEAVFGQPKEKVYAEEITTAWETGENLERVARYSMEDAKVTYELGKEFLPMEAQLSRLIGQSLWDVSRSSTGNLVEWFLLRKAYERNELAPNKPDEKELARRRQSYEGGYVKEPERGLWENIVYLDFRSLYPSIIITHNVSPDTLNREGCKEYDVAPQVGHRFCKDFPGFIPSLLGDLLEERQKIKKKMKATIDPIERKLLDYRQRAIKILANSYYGYYGYARARWYCKECAESVTAWGREYITMTIKEIEEKYGFKVIYSDTDGFFATIPGADAETVKKKAMEFLKYINAKLPGALELEYEGFYKRGFFVTKKKYAVIDEEGKITTRGLEIVRRDWSEIAKETQARVLEALLKDGDVEKAVRIVKEVTEKLSKYEVPPEKLVIHEQITRDLKDYKATGPHVAVAKRLAARGVKIRPGTVISYIVLKGSGRIGDRAIPFDEFDPTKHKYDAEYYIENQVLPAVERILRAFGYRKEDLRYQKTRQVGLSAWLKPKGT

SEQ ID NO: 2525 - protein, 774 aa, synthetic construct
MILDTDLITEDGKPVIRIFKKENGEFKIEYDRTFEAYFYALLKDDSAIEEVKKITAERHGTVVTVKRVEKVQKKFLGRPVEVWKLYFTHYQDIPAIFDKIREHPAVIDIYEYDIPFAKRYLIDKGLVPMEGDEELKMLAFDIETLYHEGEEFAEGPILMISYADEEGARVITWKNVDLPYVDVVSTEREMIKRFLRVVKEKDPDVLITYNGDNFDFAYLKKRCEKLGINFALGRDGSEPKIQRMGDRFAVEVKGRIHFDLYPVIRRTINLPTYTLEAVYEAVFGQPKEKVYAEEITTAWETGENLERVARYSMEDAKVTYELGKEFLPMEAQLSRLIGQSLWDVSRSSTGNLVEWFLLRKAYERNELAPNKPDEKELARRRQSYEGGYVKEPERGLWENIVYLDFRSLYPSIIITHNVSPDTLNREGCKEYDVAPQVGHRFCKDFPGFIPSLLGDLLEERQKIKKKMKATIDPIERKLLDYRQRAIKILANSYYGYYGYARARWYCKECAESVTAWGREYITMTIKEIEEKYGFKVIYSDTDGFFATIPGADAETVKKKAMEFLKYINAKLPGALELEYEGFYKRGFFVTKKKYAVIDEEGKITTRGLEIVRRDWSEIAKETQARVLEALLKDGDVEKAVRIVKEVTEKLSKYEVPPEKLVIHEQITRDLKDYKATGPHVAVAKRLAARGVKIRPGTVISYIVLKGSGRIGDRAIPFDEFDPTKHKYDAEYYIENQVLPAVERILRAFGYRKEDLRYQKTRQVGLSAWLKPKGT

SEQ ID NO: 2526 - protein, 774 aa, synthetic construct
MILDTDLITEDGKPVIRIFKKENGEFKIEYDRTFEAYFYALLKDDSAIEEVKKITAERHGTVVTVKRVEKVQKKFLGRPVEVWKLYFTHPQDVPAIADKIREHPAVIDIYEYDIPFAKRYLIDKGLVPMEGDEELKMLAFDIETLYHEGEEFAEGPILMISYADEEGARVITWKNVDLPYVDVVSTEREMIKRFLRVVKEKDPDVLITYNGDNFDFAYLKKRCEKLGINFALGRDGSEPKIQRMGDRFAVEVKGRIHFDLYPVIRRTINLPTYTLEAVYEAVFGQPKEKVYAEEITTAWETGENLERVARYSMEDAKVTYELGKEFLPMEAQLSRLIGQSLWDVSRSSTGNLVEWFLLRKAYERNELAPNKPDEKELARRRQSYEGGYVKEPERGLWENIVYLDFRSLYPSIIITHNVSPDTLNREGCKEYDVAPQVGHRFCKDFPGFIPSLLGDLLEERQKIKKKMKATIDPIERKLLDYRQRAIKILANSYYGYYGYARARWYCKECAESVTAWGREYITMTIKEIEEKYGFKVIYSDTDGFFATIPGADAETVKKKAMEFLKYINAKLPGALELEYEGFYKRGFFVTKKKYAVIDEEGKITTRGLEIVRRDWSEIAKETQARVLEALLKDGDVEKAVRIVKEVTEKLSKYEVPPEKLVIHEQITRDLKDYKATGPHVAVAKRLAARGVKIRPGTVISYIVLKGSGRIGDRAIPFDEFDPTKHKYDAEYYIENQVLPAVERILRAFGYRKEDLRYQKTRQVGLSAWLKPKGT

SEQ ID NO: 2527 - protein, 774 aa, synthetic construct
MILDTDLITEDGKPVIRIFKKENGEFKIEYDRTFEAYFYALLKDDSAIEEVKKITAERHGTVVTVKRVEKVQKKFLGRPVEVWKLYFTHPQDVPAIHDKIREHPAVIDIYEYDIPFAKRYLIDKGLVPMEGDEELKMLAFDIETLYHEGEEFAEGPILMISYADEEGARVITWKNVDLPYVDVVSTEREMIKRFLRVVKEKDPDVLITYNGDNFDFAYLKKRCEKLGINFALGRDGSEPKIQRMGDRFAVEVKGRIHFDLYPVIRRTINLPTYTLEAVYEAVFGQPKEKVYAEEITTAWETGENLERVARYSMEDAKVTYELGKEFLPMEAQLSRLIGQSLWDVSRSSTGNLVEWFLLRKAYERNELAPNKPDEKELARRRQSYEGGYVKEPERGLWENIVYLDFRSLYPSIIITHNVSPDTLNREGCKEYDVAPQVGHRFCKDFPGFIPSLLGDLLEERQKIKKKMKATIDPIERKLLDYRQRAIKILANSYYGYYGYARARWYCKECAESVTAWGREYITMTIKEIEEKYGFKVIYSDTDGFFATIPGADAETVKKKAMEFLKYINAKLPGALELEYEGFYKRGFFVTKKKYAVIDEEGKITTRGLEIVRRDWSEIAKETQARVLEALLKDGDVEKAVRIVKEVTEKLSKYEVPPEKLVIHEQITRDLKDYKATGPHVAVAKRLAARGVKIRPGTVISYIVLKGSGRIGDRAIPFDEFDPTKHKYDAEYYIENQVLPAVERILRAFGYRKEDLRYQKTRQVGLSAWLKPKGT

SEQ ID NO: 2528 - protein, 774 aa, synthetic construct
MILDTDLITEDGKPVIRIFKKENGEFKIEYDRTFEAYFYALLKDDSAIEEVKKITAERHGTVVTVKRVEKVQKKFLGRPVEVWKLYFTHPQDIPAIRDKIREHPAVIDIYEYDIPFAKRYLIDKGLVPMEGDEELKMLAFDIETLYHEGEEFAEGPILMISYADEEGARVITWKNVDLPYVDVVSTEREMIKRFLRVVKEKDPDVLITYNGDNFDFAYLKKRCEKLGINFALGRDGSEPKIQRMGDRFAVEVKGRIHFDLYPVIRRTINLPTYTLEAVYEAVFGQPKEKVYAEEITTAWETGENLERVARYSMEDAKVTYELGKEFLPMEAQLSRLIGQSLWDVSRSSTGNLVEWFLLRKAYERNELAPNKPDEKELARRRQSYEGGYVKEPERGLWENIVYLDFRSLYPSIIITHNVSPDTLNREGCKEYDVAPQVGHRFCKDFPGFIPSLLGDLLEERQKIKKKMKATIDPIERKLLDYRQRAIKILANSYYGYYGYARARWYCKECAESVTAWGREYITMTIKEIEEKYGFKVIYSDTDGFFATIPGADAETVKKKAMEFLKYINAKLPGALELEYEGFYKRGFFVTKKKYAVIDEEGKITTRGLEIVRRDWSEIAKETQARVLEALLKDGDVEKAVRIVKEVTEKLSKYEVPPEKLVIHEQITRDLKDYKATGPHVAVAKRLAARGVKIRPGTVISYIVLKGSGRIGDRAIPFDEFDPTKHKYDAEYYIENQVLPAVERILRAFGYRKEDLRYQKTRQVGLSAWLKPKGT

SEQ ID NO: 2529 - protein, 774 aa, synthetic construct
MILDTDLITEDGKPVIRIFKKENGEFKIEYDRTFEAYFYALLKDDSAIEEVKKITAERHGTVVTVKRVEKVQKKFLGRPVEVWKLYFTHPQDIPAIADKIREHPAVIDIYEYDIPFAKRYLIDKGLVPMEGDEELKMLAFDIETLYHEGEEFAEGPILMISYADEEGARVITWKNVDLPYVDVVSTEREMIKRFLRVVKEKDPDVLITYNGDNFDFAYLKKRCEKLGINFALGRDGSEPKIQRMGDRFAVEVKGRIHFDLYPVIRRTINLPTYTLEAVYEAVFGQPKEKVYAEEITTAWETGENLERVARYSMEDAKVTYELGKEFLPMEAQLSRLIGQSLWDVSRSSTGNLVEWFLLRKAYERNELAPNKPDEKELARRRQSYEGGYVKEPERGLWENIVYLDFRSLYPSIIITHNVSPDTLNREGCKEYDVAPQVGHRFCKDFPGFIPSLLGDLLEERQKIKKKMKATIDPIERKLLDYRQRAIKILANSYYGYYGYARARWYCKECAESVTAWGREYITMTIKEIEEKYGFKVIYSDTDGFFATIPGADAETVKKKAMEFLKYINAKLPGALELEYEGFYKRGFFVTKKKYAVIDEEGKITTRGLEIVRRDWSEIAKETQARVLEALLKDGDVEKAVRIVKEVTEKLSKYEVPPEKLVIHEQITRDLKDYKATGPHVAVAKRLAARGVKIRPGTVISYIVLKGSGRIGDRAIPFDEFDPTKHKYDAEYYIENQVLPAVERILRAFGYRKEDLRYQKTRQVGLSAWLKPKGT

SEQ ID NO: 2530 - protein, 774 aa, synthetic construct
MILDTDLITEDGKPVIRIFKKENGEFKIEYDRTFEAYFYALLKDDSAIEEVKKITAERHGTVVTVKRVEKVQKKFLGRPVEVWKLYFTHPQDIPAIFDKIREHPAVIDIYEYDIPFAKRYLIDKGLVPMEGDEELKMLAFDIETLYHEGEEFAEGPILMISYADEEGARVITWKNVDLPYVDVVSTEREMIKRFLRVVKEKDPDVLITYNGDNFDFAYLKKRCEKLGINFALGRDGSEPKIQRMGDRFAVEVKGRIHFDLYPVIRRTINLPTYTLEAVYEAVFGQPKEKVYAEEITTAWETGENLERVARYSMEDAKVTYELGKEFLPMEAQLSRLIGQSLWDVSRSSTGNLVEWFLLRKAYERNELAPNKPDEKELARRRQSYEGGYVKEPERGLWENIVYLDFRSLYPSIIITHNVSPDTLNREGCKEYDVAPQVGHRFCKDFPGFIPSLLGDLLEERQKIKKKMKATIDPIERKLLDYRQRAIKILANSYYGYYGYARARWYCKECAESVTAWGREYITMTIKEIEEKYGFKVIYSDTDGFFATIPGADAETVKKKAMEFLKYINAKLPGALELEYEGFYKRGFFVTKKKYAVIDEEGKITTRGLEIVRRDWSEIAKETQARVLEALLKDGDVEKAVRIVKEVTEKLSKYEVPPEKLVIHEQITRDLKDYKATGPHVAVAKRLAARGVKIRPGTVISYIVLKGSGRIGDRAIPFDEFDPTKHKYDAEYYIENQVLPAVERILRAFGYRKEDLRYQKTRQVGLSAWLKPKGT

SEQ ID NO: 2531 - protein, 774 aa, synthetic construct
MILDTDLITEDGKPVIRIFKKENGEFKIEYDRTFEAYFYALLKDDSAIEEVKKITAERHGTVVTVKRVEKVQKKFLGRPVEVWKLYFTHPQDIPAIHDKIREHPAVIDIYEYDIPFAKRYLIDKGLVPMEGDEELKMLAFDIETLYHEGEEFAEGPILMISYADEEGARVITWKNVDLPYVDVVSTEREMIKRFLRVVKEKDPDVLITYNGDNFDFAYLKKRCEKLGINFALGRDGSEPKIQRMGDRFAVEVKGRIHFDLYPVIRRTINLPTYTLEAVYEAVFGQPKEKVYAEEITTAWETGENLERVARYSMEDAKVTYELGKEFLPMEAQLSRLIGQSLWDVSRSSTGNLVEWFLLRKAYERNELAPNKPDEKELARRRQSYEGGYVKEPERGLWENIVYLDFRSLYPSIIITHNVSPDTLNREGCKEYDVAPQVGHRFCKDFPGFIPSLLGDLLEERQKIKKKMKATIDPIERKLLDYRQRAIKILANSYYGYYGYARARWYCKECAESVTAWGREYITMTIKEIEEKYGFKVIYSDTDGFFATIPGADAETVKKKAMEFLKYINAKLPGALELEYEGFYKRGFFVTKKKYAVIDEEGKITTRGLEIVRRDWSEIAKETQARVLEALLKDGDVEKAVRIVKEVTEKLSKYEVPPEKLVIHEQITRDLKDYKATGPHVAVAKRLAARGVKIRPGTVISYIVLKGSGRIGDRAIPFDEFDPTKHKYDAEYYIENQVLPAVERILRAFGYRKEDLRYQKTRQVGLSAWLKPKGT

SEQ ID NO: 2532 - protein, 774 aa, synthetic construct
MILDTDLITEDGKPVIRIFKKENGEFKIEYDRTFEAYFYALLKDDSAIEEVKKITAERHGTVVTVKRVEKVQKKFLGRPVEVWKLYFTHPQDQPAIRDKIREHPAVIDIYEYDIPFAKRYLIDKGLVPMEGDEELKMLAFDIETLYHEGEEFAEGPILMISYADEEGARVITWKNVDLPYVDVVSTEREMIKRFLRVVKEKDPDVLITYNGDNFDFAYLKKRCEKLGINFALGRDGSEPKIQRMGDRFAVEVKGRIHFDLYPVIRRTINLPTYTLEAVYEAVFGQPKEKVYAEEITTAWETGENLERVARYSMEDAKVTYELGKEFLPMEAQLSRLIGQSLWDVSRSSTGNLVEWFLLRKAYERNELAPNKPDEKELARRRQSYEGGYVKEPERGLWENIVYLDFRSLYPSIIITHNVSPDTLNREGCKEYDVAPQVGHRFCKDFPGFIPSLLGDLLEERQKIKKKMKATIDPIERKLLDYRQRAIKILANSYYGYYGYARARWYCKECAESVTAWGREYITMTIKEIEEKYGFKVIYSDTDGFFATIPGADAETVKKKAMEFLKYINAKLPGALELEYEGFYKRGFFVTKKKYAVIDEEGKITTRGLEIVRRDWSEIAKETQARVLEALLKDGDVEKAVRIVKEVTEKLSKYEVPPEKLVIHEQITRDLKDYKATGPHVAVAKRLAARGVKIRPGTVISYIVLKGSGRIGDRAIPFDEFDPTKHKYDAEYYIENQVLPAVERILRAFGYRKEDLRYQKTRQVGLSAWLKPKGT

SEQ ID NO: 2533 - protein, 774 aa, synthetic construct
MILDTDLITEDGKPVIRIFKKENGEFKIEYDRTFEAYFYALLKDDSAIEEVKKITAERHGTVVTVKRVEKVQKKFLGRPVEVWKLYFTHPQDQPAIADKIREHPAVIDIYEYDIPFAKRYLIDKGLVPMEGDEELKMLAFDIETLYHEGEEFAEGPILMISYADEEGARVITWKNVDLPYVDVVSTEREMIKRFLRVVKEKDPDVLITYNGDNFDFAYLKKRCEKLGINFALGRDGSEPKIQRMGDRFAVEVKGRIHFDLYPVIRRTINLPTYTLEAVYEAVFGQPKEKVYAEEITTAWETGENLERVARYSMEDAKVTYELGKEFLPMEAQLSRLIGQSLWDVSRSSTGNLVEWFLLRKAYERNELAPNKPDEKELARRRQSYEGGYVKEPERGLWENIVYLDFRSLYPSIIITHNVSPDTLNREGCKEYDVAPQVGHRFCKDFPGFIPSLLGDLLEERQKIKKKMKATIDPIERKLLDYRQRAIKILANSYYGYYGYARARWYCKECAESVTAWGREYITMTIKEIEEKYGFKVIYSDTDGFFATIPGADAETVKKKAMEFLKYINAKLPGALELEYEGFYKRGFFVTKKKYAVIDEEGKITTRGLEIVRRDWSEIAKETQARVLEALLKDGDVEKAVRIVKEVTEKLSKYEVPPEKLVIHEQITRDLKDYKATGPHVAVAKRLAARGVKIRPGTVISYIVLKGSGRIGDRAIPFDEFDPTKHKYDAEYYIENQVLPAVERILRAFGYRKEDLRYQKTRQVGLSAWLKPKGT

SEQ ID NO: 2534 - protein, 774 aa, synthetic construct
MILDTDLITEDGKPVIRIFKKENGEFKIEYDRTFEAYFYALLKDDSAIEEVKKITAERHGTVVTVKRVEKVQKKFLGRPVEVWKLYFTHPQDRPAIRDKIREHPAVIDIYEYDIPFAKRYLIDKGLVPMEGDEELKMLAFDIETLYHEGEEFAEGPILMISYADEEGARVITWKNVDLPYVDVVSTEREMIKRFLRVVKEKDPDVLITYNGDNFDFAYLKKRCEKLGINFALGRDGSEPKIQRMGDRFAVEVKGRIHFDLYPVIRRTINLPTYTLEAVYEAVFGQPKEKVYAEEITTAWETGENLERVARYSMEDAKVTYELGKEFLPMEAQLSRLIGQSLWDVSRSSTGNLVEWFLLRKAYERNELAPNKPDEKELARRRQSYEGGYVKEPERGLWENIVYLDFRSLYPSIIITHNVSPDTLNREGCKEYDVAPQVGHRFCKDFPGFIPSLLGDLLEERQKIKKKMKATIDPIERKLLDYRQRAIKILANSYYGYYGYARARWYCKECAESVTAWGREYITMTIKEIEEKYGFKVIYSDTDGFFATIPGADAETVKKKAMEFLKYINAKLPGALELEYEGFYKRGFFVTKKKYAVIDEEGKITTRGLEIVRRDWSEIAKETQARVLEALLKDGDVEKAVRIVKEVTEKLSKYEVPPEKLVIHEQITRDLKDYKATGPHVAVAKRLAARGVKIRPGTVISYIVLKGSGRIGDRAIPFDEFDPTKHKYDAEYYIENQVLPAVERILRAFGYRKEDLRYQKTRQVGLSAWLKPKGT

SEQ ID NO: 2535 - protein, 774 aa, synthetic construct
MILDTDLITEDGKPVIRIFKKENGEFKIEYDRTFEHYFYALLKDDSAIEEVKKITAERHGTVVTVKRVEKVQKKFLGRPVEVWKLYFTHPQDVPAIRDKIREHPAVIDIYEYDIPFAKRYLIDKGLVPMEGDEELKMLAFDIETLYHEGEEFAEGPILMISYADEEGARVITWKNVDLPYVDVVSTEREMIKRFLRVVKEKDPDVLITYNGDNFDFAYLKKRCEKLGINFALGRDGSEPKIQRMGDRFAVEVKGRIHFDLYPVIRRTINLPTYTLEAVYEAVFGQPKEKVYAEEITTAWETGENLERVARYSMEDAKVTYELGKEFLPMEAQLSRLIGQSLWDVSRSSTGNLVEWFLLRKAYERNELAPNKPDEKELARRRQSYEGGYVKEPERGLWENIVYLDFRSLYPSIIITHNVSPDTLNREGCKEYDVAPQVGHRFCKDFPGFIPSLLGDLLEERQKIKKKMKATIDPIERKLLDYRQRAIKILANSYYGYYGYARARWYCKECAESVTAWGREYITMTIKEIEEKYGFKVIYSDTDGFFATIPGADAETVKKKAMEFLKYINAKLPGALELEYEGFYKRGFFVTKKKYAVIDEEGKITTRGLEIVRRDWSEIAKETQARVLEALLKDGDVEKAVRIVKEVTEKLSKYEVPPEKLVIHEQITRDLKDYKATGPHVAVAKRLAARGVKIRPGTVISYIVLKGSGRIGDRAIPFDEFDPTKHKYDAEYYIENQVLPAVERILRAFGYRKEDLRYQKTRQVGLSAWLKPKGT

SEQ ID NO: 2536 - protein, 774 aa, synthetic construct
MILDTDLITEDGKPVIRIFKKENGEFKIEYDRTFEHYFYALLKDDSAIEEVKKITAERHGTVVTVKRVEKVQKKFLGRPVEVWKLYFTHFQDVPAIRDKIREHPAVIDIYEYDIPFAKRYLIDKGLVPMEGDEELKMLAFDIETLYHEGEEFAEGPILMISYADEEGARVITWKNVDLPYVDVVSTEREMIKRFLRVVKEKDPDVLITYNGDNFDFAYLKKRCEKLGINFALGRDGSEPKIQRMGDRFAVEVKGRIHFDLYPVIRRTINLPTYTLEAVYEAVFGQPKEKVYAEEITTAWETGENLERVARYSMEDAKVTYELGKEFLPMEAQLSRLIGQSLWDVSRSSTGNLVEWFLLRKAYERNELAPNKPDEKELARRRQSYEGGYVKEPERGLWENIVYLDFRSLYPSIIITHNVSPDTLNREGCKEYDVAPQVGHRFCKDFPGFIPSLLGDLLEERQKIKKKMKATIDPIERKLLDYRQRAIKILANSYYGYYGYARARWYCKECAESVTAWGREYITMTIKEIEEKYGFKVIYSDTDGFFATIPGADAETVKKKAMEFLKYINAKLPGALELEYEGFYKRGFFVTKKKYAVIDEEGKITTRGLEIVRRDWSEIAKETQARVLEALLKDGDVEKAVRIVKEVTEKLSKYEVPPEKLVIHEQITRDLKDYKATGPHVAVAKRLAARGVKIRPGTVISYIVLKGSGRIGDRAIPFDEFDPTKHKYDAEYYIENQVLPAVERILRAFGYRKEDLRYQKTRQVGLSAWLKPKGT

SEQ ID NO: 2537 - protein, 774 aa, synthetic construct
MILDTDLITEDGKPVIRIFKKENGEFKIEYDRTFEHYFYALLKDDSAIEEVKKITAERHGTVVTVKRVEKVQKKFLGRPVEVWKLYFTHFQDVPAIHDKIREHPAVIDIYEYDIPFAKRYLIDKGLVPMEGDEELKMLAFDIETLYHEGEEFAEGPILMISYADEEGARVITWKNVDLPYVDVVSTEREMIKRFLRVVKEKDPDVLITYNGDNFDFAYLKKRCEKLGINFALGRDGSEPKIQRMGDRFAVEVKGRIHFDLYPVIRRTINLPTYTLEAVYEAVFGQPKEKVYAEEITTAWETGENLERVARYSMEDAKVTYELGKEFLPMEAQLSRLIGQSLWDVSRSSTGNLVEWFLLRKAYERNELAPNKPDEKELARRRQSYEGGYVKEPERGLWENIVYLDFRSLYPSIIITHNVSPDTLNREGCKEYDVAPQVGHRFCKDFPGFIPSLLGDLLEERQKIKKKMKATIDPIERKLLDYRQRAIKILANSYYGYYGYARARWYCKECAESVTAWGREYITMTIKEIEEKYGFKVIYSDTDGFFATIPGADAETVKKKAMEFLKYINAKLPGALELEYEGFYKRGFFVTKKKYAVIDEEGKITTRGLEIVRRDWSEIAKETQARVLEALLKDGDVEKAVRIVKEVTEKLSKYEVPPEKLVIHEQITRDLKDYKATGPHVAVAKRLAARGVKIRPGTVISYIVLKGSGRIGDRAIPFDEFDPTKHKYDAEYYIENQVLPAVERILRAFGYRKEDLRYQKTRQVGLSAWLKPKGT

SEQ ID NO: 2538 - protein, 774 aa, synthetic construct
MILDTDLITEDGKPVIRIFKKENGEFKIEYDRTFEHYFYALLKDDSAIEEVKKITAERHGTVVTVKRVEKVQKKFLGRPVEVWKLYFTHFQDIPAIRDKIREHPAVIDIYEYDIPFAKRYLIDKGLVPMEGDEELKMLAFDIETLYHEGEEFAEGPILMISYADEEGARVITWKNVDLPYVDVVSTEREMIKRFLRVVKEKDPDVLITYNGDNFDFAYLKKRCEKLGINFALGRDGSEPKIQRMGDRFAVEVKGRIHFDLYPVIRRTINLPTYTLEAVYEAVFGQPKEKVYAEEITTAWETGENLERVARYSMEDAKVTYELGKEFLPMEAQLSRLIGQSLWDVSRSSTGNLVEWFLLRKAYERNELAPNKPDEKELARRRQSYEGGYVKEPERGLWENIVYLDFRSLYPSIIITHNVSPDTLNREGCKEYDVAPQVGHRFCKDFPGFIPSLLGDLLEERQKIKKKMKATIDPIERKLLDYRQRAIKILANSYYGYYGYARARWYCKECAESVTAWGREYITMTIKEIEEKYGFKVIYSDTDGFFATIPGADAETVKKKAMEFLKYINAKLPGALELEYEGFYKRGFFVTKKKYAVIDEEGKITTRGLEIVRRDWSEIAKETQARVLEALLKDGDVEKAVRIVKEVTEKLSKYEVPPEKLVIHEQITRDLKDYKATGPHVAVAKRLAARGVKIRPGTVISYIVLKGSGRIGDRAIPFDEFDPTKHKYDAEYYIENQVLPAVERILRAFGYRKEDLRYQKTRQVGLSAWLKPKGT

SEQ ID NO: 2539 - protein, 774 aa, synthetic construct
MILDTDLITEDGKPVIRIFKKENGEFKIEYDRTFEHYFYALLKDDSAIEEVKKITAERHGTVVTVKRVEKVQKKFLGRPVEVWKLYFTHWQDVPAIRDKIREHPAVIDIYEYDIPFAKRYLIDKGLVPMEGDEELKMLAFDIETLYHEGEEFAEGPILMISYADEEGARVITWKNVDLPYVDVVSTEREMIKRFLRVVKEKDPDVLITYNGDNFDFAYLKKRCEKLGINFALGRDGSEPKIQRMGDRFAVEVKGRIHFDLYPVIRRTINLPTYTLEAVYEAVFGQPKEKVYAEEITTAWETGENLERVARYSMEDAKVTYELGKEFLPMEAQLSRLIGQSLWDVSRSSTGNLVEWFLLRKAYERNELAPNKPDEKELARRRQSYEGGYVKEPERGLWENIVYLDFRSLYPSIIITHNVSPDTLNREGCKEYDVAPQVGHRFCKDFPGFIPSLLGDLLEERQKIKKKMKATIDPIERKLLDYRQRAIKILANSYYGYYGYARARWYCKECAESVTAWGREYITMTIKEIEEKYGFKVIYSDTDGFFATIPGADAETVKKKAMEFLKYINAKLPGALELEYEGFYKRGFFVTKKKYAVIDEEGKITTRGLEIVRRDWSEIAKETQARVLEALLKDGDVEKAVRIVKEVTEKLSKYEVPPEKLVIHEQITRDLKDYKATGPHVAVAKRLAARGVKIRPGTVISYIVLKGSGRIGDRAIPFDEFDPTKHKYDAEYYIENQVLPAVERILRAFGYRKEDLRYQKTRQVGLSAWLKPKGT

SEQ ID NO: 2540 - protein, 774 aa, synthetic construct
MILDTDLITEDGKPVIRIFKKENGEFKIEYDRTFEHYFYALLKDDSAIEEVKKITAERHGTVVTVKRVEKVQKKFLGRPVEVWKLYFTHWQDVPAIADKIREHPAVIDIYEYDIPFAKRYLIDKGLVPMEGDEELKMLAFDIETLYHEGEEFAEGPILMISYADEEGARVITWKNVDLPYVDVVSTEREMIKRFLRVVKEKDPDVLITYNGDNFDFAYLKKRCEKLGINFALGRDGSEPKIQRMGDRFAVEVKGRIHFDLYPVIRRTINLPTYTLEAVYEAVFGQPKEKVYAEEITTAWETGENLERVARYSMEDAKVTYELGKEFLPMEAQLSRLIGQSLWDVSRSSTGNLVEWFLLRKAYERNELAPNKPDEKELARRRQSYEGGYVKEPERGLWENIVYLDFRSLYPSIIITHNVSPDTLNREGCKEYDVAPQVGHRFCKDFPGFIPSLLGDLLEERQKIKKKMKATIDPIERKLLDYRQRAIKILANSYYGYYGYARARWYCKECAESVTAWGREYITMTIKEIEEKYGFKVIYSDTDGFFATIPGADAETVKKKAMEFLKYINAKLPGALELEYEGFYKRGFFVTKKKYAVIDEEGKITTRGLEIVRRDWSEIAKETQARVLEALLKDGDVEKAVRIVKEVTEKLSKYEVPPEKLVIHEQITRDLKDYKATGPHVAVAKRLAARGVKIRPGTVISYIVLKGSGRIGDRAIPFDEFDPTKHKYDAEYYIENQVLPAVERILRAFGYRKEDLRYQKTRQVGLSAWLKPKGT

SEQ ID NO: 2541 - protein, 774 aa, synthetic construct
MILDTDLITEDGKPVIRIFKKENGEFKIEYDRTFEHYFYALLKDDSAIEEVKKITAERHGTVVTVKRVEKVQKKFLGRPVEVWKLYFTHWQDIPAIRDKIREHPAVIDIYEYDIPFAKRYLIDKGLVPMEGDEELKMLAFDIETLYHEGEEFAEGPILMISYADEEGARVITWKNVDLPYVDVVSTEREMIKRFLRVVKEKDPDVLITYNGDNFDFAYLKKRCEKLGINFALGRDGSEPKIQRMGDRFAVEVKGRIHFDLYPVIRRTINLPTYTLEAVYEAVFGQPKEKVYAEEITTAWETGENLERVARYSMEDAKVTYELGKEFLPMEAQLSRLIGQSLWDVSRSSTGNLVEWFLLRKAYERNELAPNKPDEKELARRRQSYEGGYVKEPERGLWENIVYLDFRSLYPSIIITHNVSPDTLNREGCKEYDVAPQVGHRFCKDFPGFIPSLLGDLLEERQKIKKKMKATIDPIERKLLDYRQRAIKILANSYYGYYGYARARWYCKECAESVTAWGREYITMTIKEIEEKYGFKVIYSDTDGFFATIPGADAETVKKKAMEFLKYINAKLPGALELEYEGFYKRGFFVTKKKYAVIDEEGKITTRGLEIVRRDWSEIAKETQARVLEALLKDGDVEKAVRIVKEVTEKLSKYEVPPEKLVIHEQITRDLKDYKATGPHVAVAKRLAARGVKIRPGTVISYIVLKGSGRIGDRAIPFDEFDPTKHKYDAEYYIENQVLPAVERILRAFGYRKEDLRYQKTRQVGLSAWLKPKGT

SEQ ID NO: 2542 - protein, 774 aa, synthetic construct
MILDTDLITEDGKPVIRIFKKENGEFKIEYDRTFEHYFYALLKDDSAIEEVKKITAERHGTVVTVKRVEKVQKKFLGRPVEVWKLYFTHYQDIPAIRDKIREHPAVIDIYEYDIPFAKRYLIDKGLVPMEGDEELKMLAFDIETLYHEGEEFAEGPILMISYADEEGARVITWKNVDLPYVDVVSTEREMIKRFLRVVKEKDPDVLITYNGDNFDFAYLKKRCEKLGINFALGRDGSEPKIQRMGDRFAVEVKGRIHFDLYPVIRRTINLPTYTLEAVYEAVFGQPKEKVYAEEITTAWETGENLERVARYSMEDAKVTYELGKEFLPMEAQLSRLIGQSLWDVSRSSTGNLVEWFLLRKAYERNELAPNKPDEKELARRRQSYEGGYVKEPERGLWENIVYLDFRSLYPSIIITHNVSPDTLNREGCKEYDVAPQVGHRFCKDFPGFIPSLLGDLLEERQKIKKKMKATIDPIERKLLDYRQRAIKILANSYYGYYGYARARWYCKECAESVTAWGREYITMTIKEIEEKYGFKVIYSDTDGFFATIPGADAETVKKKAMEFLKYINAKLPGALELEYEGFYKRGFFVTKKKYAVIDEEGKITTRGLEIVRRDWSEIAKETQARVLEALLKDGDVEKAVRIVKEVTEKLSKYEVPPEKLVIHEQITRDLKDYKATGPHVAVAKRLAARGVKIRPGTVISYIVLKGSGRIGDRAIPFDEFDPTKHKYDAEYYIENQVLPAVERILRAFGYRKEDLRYQKTRQVGLSAWLKPKGT

SEQ ID NO: 2543 - protein, 774 aa, synthetic construct
MILDTDLITEDGKPVIRIFKKENGEFKIEYDRTFEHYFYALLKDDSAIEEVKKITAERHGTVVTVKRVEKVQKKFLGRPVEVWKLYFTHPQDIPAIRDKIREHPAVIDIYEYDIPFAKRYLIDKGLVPMEGDEELKMLAFDIETLYHEGEEFAEGPILMISYADEEGARVITWKNVDLPYVDVVSTEREMIKRFLRVVKEKDPDVLITYNGDNFDFAYLKKRCEKLGINFALGRDGSEPKIQRMGDRFAVEVKGRIHFDLYPVIRRTINLPTYTLEAVYEAVFGQPKEKVYAEEITTAWETGENLERVARYSMEDAKVTYELGKEFLPMEAQLSRLIGQSLWDVSRSSTGNLVEWFLLRKAYERNELAPNKPDEKELARRRQSYEGGYVKEPERGLWENIVYLDFRSLYPSIIITHNVSPDTLNREGCKEYDVAPQVGHRFCKDFPGFIPSLLGDLLEERQKIKKKMKATIDPIERKLLDYRQRAIKILANSYYGYYGYARARWYCKECAESVTAWGREYITMTIKEIEEKYGFKVIYSDTDGFFATIPGADAETVKKKAMEFLKYINAKLPGALELEYEGFYKRGFFVTKKKYAVIDEEGKITTRGLEIVRRDWSEIAKETQARVLEALLKDGDVEKAVRIVKEVTEKLSKYEVPPEKLVIHEQITRDLKDYKATGPHVAVAKRLAARGVKIRPGTVISYIVLKGSGRIGDRAIPFDEFDPTKHKYDAEYYIENQVLPAVERILRAFGYRKEDLRYQKTRQVGLSAWLKPKGT

SEQ ID NO: 2544 - protein, 774 aa, synthetic construct
MILDTDLITEDGKPVIRIFKKENGEFKIEYDRTFEHYFYALLKDDSAIEEVKKITAERHGTVVTVKRVEKVQKKFLGRPVEVWKLYFTHPQDIPAIFDKIREHPAVIDIYEYDIPFAKRYLIDKGLVPMEGDEELKMLAFDIETLYHEGEEFAEGPILMISYADEEGARVITWKNVDLPYVDVVSTEREMIKRFLRVVKEKDPDVLITYNGDNFDFAYLKKRCEKLGINFALGRDGSEPKIQRMGDRFAVEVKGRIHFDLYPVIRRTINLPTYTLEAVYEAVFGQPKEKVYAEEITTAWETGENLERVARYSMEDAKVTYELGKEFLPMEAQLSRLIGQSLWDVSRSSTGNLVEWFLLRKAYERNELAPNKPDEKELARRRQSYEGGYVKEPERGLWENIVYLDFRSLYPSIIITHNVSPDTLNREGCKEYDVAPQVGHRFCKDFPGFIPSLLGDLLEERQKIKKKMKATIDPIERKLLDYRQRAIKILANSYYGYYGYARARWYCKECAESVTAWGREYITMTIKEIEEKYGFKVIYSDTDGFFATIPGADAETVKKKAMEFLKYINAKLPGALELEYEGFYKRGFFVTKKKYAVIDEEGKITTRGLEIVRRDWSEIAKETQARVLEALLKDGDVEKAVRIVKEVTEKLSKYEVPPEKLVIHEQITRDLKDYKATGPHVAVAKRLAARGVKIRPGTVISYIVLKGSGRIGDRAIPFDEFDPTKHKYDAEYYIENQVLPAVERILRAFGYRKEDLRYQKTRQVGLSAWLKPKGT

SEQ ID NO: 2545 - protein, 774 aa, synthetic construct
MILDTDLITEDGKPVIRIFKKENGEFKIEYDRTFERYFYALLKDDSAIEEVKKITAERHGTVVTVKRVEKVQKKFLGRPVEVWKLYFTHPQDVPAIRDKIREHPAVIDIYEYDIPFAKRYLIDKGLVPMEGDEELKMLAFDIETLYHEGEEFAEGPILMISYADEEGARVITWKNVDLPYVDVVSTEREMIKRFLRVVKEKDPDVLITYNGDNFDFAYLKKRCEKLGINFALGRDGSEPKIQRMGDRFAVEVKGRIHFDLYPVIRRTINLPTYTLEAVYEAVFGQPKEKVYAEEITTAWETGENLERVARYSMEDAKVTYELGKEFLPMEAQLSRLIGQSLWDVSRSSTGNLVEWFLLRKAYERNELAPNKPDEKELARRRQSYEGGYVKEPERGLWENIVYLDFRSLYPSIIITHNVSPDTLNREGCKEYDVAPQVGHRFCKDFPGFIPSLLGDLLEERQKIKKKMKATIDPIERKLLDYRQRAIKILANSYYGYYGYARARWYCKECAESVTAWGREYITMTIKEIEEKYGFKVIYSDTDGFFATIPGADAETVKKKAMEFLKYINAKLPGALELEYEGFYKRGFFVTKKKYAVIDEEGKITTRGLEIVRRDWSEIAKETQARVLEALLKDGDVEKAVRIVKEVTEKLSKYEVPPEKLVIHEQITRDLKDYKATGPHVAVAKRLAARGVKIRPGTVISYIVLKGSGRIGDRAIPFDEFDPTKHKYDAEYYIENQVLPAVERILRAFGYRKEDLRYQKTRQVGLSAWLKPKGT

SEQ ID NO: 2546 - protein, 774 aa, synthetic construct
MILDTDLITEDGKPVIRIFKKENGEFKIEYDRTFERYFYALLKDDSAIEEVKKITAERHGTVVTVKRVEKVQKKFLGRPVEVWKLYFTHPQDVPAIADKIREHPAVIDIYEYDIPFAKRYLIDKGLVPMEGDEELKMLAFDIETLYHEGEEFAEGPILMISYADEEGARVITWKNVDLPYVDVVSTEREMIKRFLRVVKEKDPDVLITYNGDNFDFAYLKKRCEKLGINFALGRDGSEPKIQRMGDRFAVEVKGRIHFDLYPVIRRTINLPTYTLEAVYEAVFGQPKEKVYAEEITTAWETGENLERVARYSMEDAKVTYELGKEFLPMEAQLSRLIGQSLWDVSRSSTGNLVEWFLLRKAYERNELAPNKPDEKELARRRQSYEGGYVKEPERGLWENIVYLDFRSLYPSIIITHNVSPDTLNREGCKEYDVAPQVGHRFCKDFPGFIPSLLGDLLEERQKIKKKMKATIDPIERKLLDYRQRAIKILANSYYGYYGYARARWYCKECAESVTAWGREYITMTIKEIEEKYGFKVIYSDTDGFFATIPGADAETVKKKAMEFLKYINAKLPGALELEYEGFYKRGFFVTKKKYAVIDEEGKITTRGLEIVRRDWSEIAKETQARVLEALLKDGDVEKAVRIVKEVTEKLSKYEVPPEKLVIHEQITRDLKDYKATGPHVAVAKRLAARGVKIRPGTVISYIVLKGSGRIGDRAIPFDEFDPTKHKYDAEYYIENQVLPAVERILRAFGYRKEDLRYQKTRQVGLSAWLKPKGT

SEQ ID NO: 2547 - protein, 774 aa, synthetic construct
MILDTDLITEDGKPVIRIFKKENGEFKIEYDRTFESYFYALLKDDSAIEEVKKITAERHGTVVTVKRVEKVQKKFLGRPVEVWKLYFTHPQDVPAIRDKIREHPAVIDIYEYDIPFAKRYLIDKGLVPMEGDEELKMLAFDIETLYHEGEEFAEGPILMISYADEEGARVITWKNVDLPYVDVVSTEREMIKRFLRVVKEKDPDVLITYNGDNFDFAYLKKRCEKLGINFALGRDGSEPKIQRMGDRFAVEVKGRIHFDLYPVIRRTINLPTYTLEAVYEAVFGQPKEKVYAEEITTAWETGENLERVARYSMEDAKVTYELGKEFLPMEAQLSRLIGQSLWDVSRSSTGNLVEWFLLRKAYERNELAPNKPDEKELARRRQSYEGGYVKEPERGLWENIVYLDFRSLYPSIIITHNVSPDTLNREGCKEYDVAPQVGHRFCKDFPGFIPSLLGDLLEERQKIKKKMKATIDPIERKLLDYRQRAIKILANSYYGYYGYARARWYCKECAESVTAWGREYITMTIKEIEEKYGFKVIYSDTDGFFATIPGADAETVKKKAMEFLKYINAKLPGALELEYEGFYKRGFFVTKKKYAVIDEEGKITTRGLEIVRRDWSEIAKETQARVLEALLKDGDVEKAVRIVKEVTEKLSKYEVPPEKLVIHEQITRDLKDYKATGPHVAVAKRLAARGVKIRPGTVISYIVLKGSGRIGDRAIPFDEFDPTKHKYDAEYYIENQVLPAVERILRAFGYRKEDLRYQKTRQVGLSAWLKPKGT

SEQ ID NO: 2548 - protein, 774 aa, synthetic construct
MILDTDLITEDGKPVIRIFKKENGEFKIEYDRTFESYFYALLKDDSAIEEVKKITAERHGTVVTVKRVEKVQKKFLGRPVEVWKLYFTHFQDIPAIRDKIREHPAVIDIYEYDIPFAKRYLIDKGLVPMEGDEELKMLAFDIETLYHEGEEFAEGPILMISYADEEGARVITWKNVDLPYVDVVSTEREMIKRFLRVVKEKDPDVLITYNGDNFDFAYLKKRCEKLGINFALGRDGSEPKIQRMGDRFAVEVKGRIHFDLYPVIRRTINLPTYTLEAVYEAVFGQPKEKVYAEEITTAWETGENLERVARYSMEDAKVTYELGKEFLPMEAQLSRLIGQSLWDVSRSSTGNLVEWFLLRKAYERNELAPNKPDEKELARRRQSYEGGYVKEPERGLWENIVYLDFRSLYPSIIITHNVSPDTLNREGCKEYDVAPQVGHRFCKDFPGFIPSLLGDLLEERQKIKKKMKATIDPIERKLLDYRQRAIKILANSYYGYYGYARARWYCKECAESVTAWGREYITMTIKEIEEKYGFKVIYSDTDGFFATIPGADAETVKKKAMEFLKYINAKLPGALELEYEGFYKRGFFVTKKKYAVIDEEGKITTRGLEIVRRDWSEIAKETQARVLEALLKDGDVEKAVRIVKEVTEKLSKYEVPPEKLVIHEQITRDLKDYKATGPHVAVAKRLAARGVKIRPGTVISYIVLKGSGRIGDRAIPFDEFDPTKHKYDAEYYIENQVLPAVERILRAFGYRKEDLRYQKTRQVGLSAWLKPKGT

SEQ ID NO: 2549 - protein, 774 aa, synthetic construct
MILDTDLITEDGKPVIRIFKKENGEFKIEYDRTFESYFYALLKDDSAIEEVKKITAERHGTVVTVKRVEKVQKKFLGRPVEVWKLYFTHIQDIPAIFDKIREHPAVIDIYEYDIPFAKRYLIDKGLVPMEGDEELKMLAFDIETLYHEGEEFAEGPILMISYADEEGARVITWKNVDLPYVDVVSTEREMIKRFLRVVKEKDPDVLITYNGDNFDFAYLKKRCEKLGINFALGRDGSEPKIQRMGDRFAVEVKGRIHFDLYPVIRRTINLPTYTLEAVYEAVFGQPKEKVYAEEITTAWETGENLERVARYSMEDAKVTYELGKEFLPMEAQLSRLIGQSLWDVSRSSTGNLVEWFLLRKAYERNELAPNKPDEKELARRRQSYEGGYVKEPERGLWENIVYLDFRSLYPSIIITHNVSPDTLNREGCKEYDVAPQVGHRFCKDFPGFIPSLLGDLLEERQKIKKKMKATIDPIERKLLDYRQRAIKILANSYYGYYGYARARWYCKECAESVTAWGREYITMTIKEIEEKYGFKVIYSDTDGFFATIPGADAETVKKKAMEFLKYINAKLPGALELEYEGFYKRGFFVTKKKYAVIDEEGKITTRGLEIVRRDWSEIAKETQARVLEALLKDGDVEKAVRIVKEVTEKLSKYEVPPEKLVIHEQITRDLKDYKATGPHVAVAKRLAARGVKIRPGTVISYIVLKGSGRIGDRAIPFDEFDPTKHKYDAEYYIENQVLPAVERILRAFGYRKEDLRYQKTRQVGLSAWLKPKGT

SEQ ID NO: 2550 - protein, 774 aa, synthetic construct
MILDTDLITEDGKPVIRIFKKENGEFKIEYDRTFESYFYALLKDDSAIEEVKKITAERHGTVVTVKRVEKVQKKFLGRPVEVWKLYFTHWQDVPAIADKIREHPAVIDIYEYDIPFAKRYLIDKGLVPMEGDEELKMLAFDIETLYHEGEEFAEGPILMISYADEEGARVITWKNVDLPYVDVVSTEREMIKRFLRVVKEKDPDVLITYNGDNFDFAYLKKRCEKLGINFALGRDGSEPKIQRMGDRFAVEVKGRIHFDLYPVIRRTINLPTYTLEAVYEAVFGQPKEKVYAEEITTAWETGENLERVARYSMEDAKVTYELGKEFLPMEAQLSRLIGQSLWDVSRSSTGNLVEWFLLRKAYERNELAPNKPDEKELARRRQSYEGGYVKEPERGLWENIVYLDFRSLYPSIIITHNVSPDTLNREGCKEYDVAPQVGHRFCKDFPGFIPSLLGDLLEERQKIKKKMKATIDPIERKLLDYRQRAIKILANSYYGYYGYARARWYCKECAESVTAWGREYITMTIKEIEEKYGFKVIYSDTDGFFATIPGADAETVKKKAMEFLKYINAKLPGALELEYEGFYKRGFFVTKKKYAVIDEEGKITTRGLEIVRRDWSEIAKETQARVLEALLKDGDVEKAVRIVKEVTEKLSKYEVPPEKLVIHEQITRDLKDYKATGPHVAVAKRLAARGVKIRPGTVISYIVLKGSGRIGDRAIPFDEFDPTKHKYDAEYYIENQVLPAVERILRAFGYRKEDLRYQKTRQVGLSAWLKPKGT

SEQ ID NO: 2551 - protein, 774 aa, synthetic construct
MILDTDLITEDGKPVIRIFKKENGEFKIEYDRTFESYFYALLKDDSAIEEVKKITAERHGTVVTVKRVEKVQKKFLGRPVEVWKLYFTHWQDVPAIFDKIREHPAVIDIYEYDIPFAKRYLIDKGLVPMEGDEELKMLAFDIETLYHEGEEFAEGPILMISYADEEGARVITWKNVDLPYVDVVSTEREMIKRFLRVVKEKDPDVLITYNGDNFDFAYLKKRCEKLGINFALGRDGSEPKIQRMGDRFAVEVKGRIHFDLYPVIRRTINLPTYTLEAVYEAVFGQPKEKVYAEEITTAWETGENLERVARYSMEDAKVTYELGKEFLPMEAQLSRLIGQSLWDVSRSSTGNLVEWFLLRKAYERNELAPNKPDEKELARRRQSYEGGYVKEPERGLWENIVYLDFRSLYPSIIITHNVSPDTLNREGCKEYDVAPQVGHRFCKDFPGFIPSLLGDLLEERQKIKKKMKATIDPIERKLLDYRQRAIKILANSYYGYYGYARARWYCKECAESVTAWGREYITMTIKEIEEKYGFKVIYSDTDGFFATIPGADAETVKKKAMEFLKYINAKLPGALELEYEGFYKRGFFVTKKKYAVIDEEGKITTRGLEIVRRDWSEIAKETQARVLEALLKDGDVEKAVRIVKEVTEKLSKYEVPPEKLVIHEQITRDLKDYKATGPHVAVAKRLAARGVKIRPGTVISYIVLKGSGRIGDRAIPFDEFDPTKHKYDAEYYIENQVLPAVERILRAFGYRKEDLRYQKTRQVGLSAWLKPKGT

SEQ ID NO: 2552 - protein, 774 aa, synthetic construct
MILDTDLITEDGKPVIRIFKKENGEFKIEYDRTFESYFYALLKDDSAIEEVKKITAERHGTVVTVKRVEKVQKKFLGRPVEVWKLYFTHWQDIPAIRDKIREHPAVIDIYEYDIPFAKRYLIDKGLVPMEGDEELKMLAFDIETLYHEGEEFAEGPILMISYADEEGARVITWKNVDLPYVDVVSTEREMIKRFLRVVKEKDPDVLITYNGDNFDFAYLKKRCEKLGINFALGRDGSEPKIQRMGDRFAVEVKGRIHFDLYPVIRRTINLPTYTLEAVYEAVFGQPKEKVYAEEITTAWETGENLERVARYSMEDAKVTYELGKEFLPMEAQLSRLIGQSLWDVSRSSTGNLVEWFLLRKAYERNELAPNKPDEKELARRRQSYEGGYVKEPERGLWENIVYLDFRSLYPSIIITHNVSPDTLNREGCKEYDVAPQVGHRFCKDFPGFIPSLLGDLLEERQKIKKKMKATIDPIERKLLDYRQRAIKILANSYYGYYGYARARWYCKECAESVTAWGREYITMTIKEIEEKYGFKVIYSDTDGFFATIPGADAETVKKKAMEFLKYINAKLPGALELEYEGFYKRGFFVTKKKYAVIDEEGKITTRGLEIVRRDWSEIAKETQARVLEALLKDGDVEKAVRIVKEVTEKLSKYEVPPEKLVIHEQITRDLKDYKATGPHVAVAKRLAARGVKIRPGTVISYIVLKGSGRIGDRAIPFDEFDPTKHKYDAEYYIENQVLPAVERILRAFGYRKEDLRYQKTRQVGLSAWLKPKGT

SEQ ID NO: 2553 - protein, 774 aa, synthetic construct
MILDTDLITEDGKPVIRIFKKENGEFKIEYDRTFESYFYALLKDDSAIEEVKKITAERHGTVVTVKRVEKVQKKFLGRPVEVWKLYFTHWQDIPAIADKIREHPAVIDIYEYDIPFAKRYLIDKGLVPMEGDEELKMLAFDIETLYHEGEEFAEGPILMISYADEEGARVITWKNVDLPYVDVVSTEREMIKRFLRVVKEKDPDVLITYNGDNFDFAYLKKRCEKLGINFALGRDGSEPKIQRMGDRFAVEVKGRIHFDLYPVIRRTINLPTYTLEAVYEAVFGQPKEKVYAEEITTAWETGENLERVARYSMEDAKVTYELGKEFLPMEAQLSRLIGQSLWDVSRSSTGNLVEWFLLRKAYERNELAPNKPDEKELARRRQSYEGGYVKEPERGLWENIVYLDFRSLYPSIIITHNVSPDTLNREGCKEYDVAPQVGHRFCKDFPGFIPSLLGDLLEERQKIKKKMKATIDPIERKLLDYRQRAIKILANSYYGYYGYARARWYCKECAESVTAWGREYITMTIKEIEEKYGFKVIYSDTDGFFATIPGADAETVKKKAMEFLKYINAKLPGALELEYEGFYKRGFFVTKKKYAVIDEEGKITTRGLEIVRRDWSEIAKETQARVLEALLKDGDVEKAVRIVKEVTEKLSKYEVPPEKLVIHEQITRDLKDYKATGPHVAVAKRLAARGVKIRPGTVISYIVLKGSGRIGDRAIPFDEFDPTKHKYDAEYYIENQVLPAVERILRAFGYRKEDLRYQKTRQVGLSAWLKPKGT

SEQ ID NO: 2554 - protein, 774 aa, synthetic construct
MILDTDLITEDGKPVIRIFKKENGEFKIEYDRTFESYFYALLKDDSAIEEVKKITAERHGTVVTVKRVEKVQKKFLGRPVEVWKLYFTHWQDRPAIADKIREHPAVIDIYEYDIPFAKRYLIDKGLVPMEGDEELKMLAFDIETLYHEGEEFAEGPILMISYADEEGARVITWKNVDLPYVDVVSTEREMIKRFLRVVKEKDPDVLITYNGDNFDFAYLKKRCEKLGINFALGRDGSEPKIQRMGDRFAVEVKGRIHFDLYPVIRRTINLPTYTLEAVYEAVFGQPKEKVYAEEITTAWETGENLERVARYSMEDAKVTYELGKEFLPMEAQLSRLIGQSLWDVSRSSTGNLVEWFLLRKAYERNELAPNKPDEKELARRRQSYEGGYVKEPERGLWENIVYLDFRSLYPSIIITHNVSPDTLNREGCKEYDVAPQVGHRFCKDFPGFIPSLLGDLLEERQKIKKKMKATIDPIERKLLDYRQRAIKILANSYYGYYGYARARWYCKECAESVTAWGREYITMTIKEIEEKYGFKVIYSDTDGFFATIPGADAETVKKKAMEFLKYINAKLPGALELEYEGFYKRGFFVTKKKYAVIDEEGKITTRGLEIVRRDWSEIAKETQARVLEALLKDGDVEKAVRIVKEVTEKLSKYEVPPEKLVIHEQITRDLKDYKATGPHVAVAKRLAARGVKIRPGTVISYIVLKGSGRIGDRAIPFDEFDPTKHKYDAEYYIENQVLPAVERILRAFGYRKEDLRYQKTRQVGLSAWLKPKGT

SEQ ID NO: 2555 - protein, 774 aa, synthetic construct
MILDTDLITEDGKPVIRIFKKENGEFKIEYDRTFESYFYALLKDDSAIEEVKKITAERHGTVVTVKRVEKVQKKFLGRPVEVWKLYFTHYQDVPAIRDKIREHPAVIDIYEYDIPFAKRYLIDKGLVPMEGDEELKMLAFDIETLYHEGEEFAEGPILMISYADEEGARVITWKNVDLPYVDVVSTEREMIKRFLRVVKEKDPDVLITYNGDNFDFAYLKKRCEKLGINFALGRDGSEPKIQRMGDRFAVEVKGRIHFDLYPVIRRTINLPTYTLEAVYEAVFGQPKEKVYAEEITTAWETGENLERVARYSMEDAKVTYELGKEFLPMEAQLSRLIGQSLWDVSRSSTGNLVEWFLLRKAYERNELAPNKPDEKELARRRQSYEGGYVKEPERGLWENIVYLDFRSLYPSIIITHNVSPDTLNREGCKEYDVAPQVGHRFCKDFPGFIPSLLGDLLEERQKIKKKMKATIDPIERKLLDYRQRAIKILANSYYGYYGYARARWYCKECAESVTAWGREYITMTIKEIEEKYGFKVIYSDTDGFFATIPGADAETVKKKAMEFLKYINAKLPGALELEYEGFYKRGFFVTKKKYAVIDEEGKITTRGLEIVRRDWSEIAKETQARVLEALLKDGDVEKAVRIVKEVTEKLSKYEVPPEKLVIHEQITRDLKDYKATGPHVAVAKRLAARGVKIRPGTVISYIVLKGSGRIGDRAIPFDEFDPTKHKYDAEYYIENQVLPAVERILRAFGYRKEDLRYQKTRQVGLSAWLKPKGT

SEQ ID NO: 2556 - protein, 774 aa, synthetic construct
MILDTDLITEDGKPVIRIFKKENGEFKIEYDRTFESYFYALLKDDSAIEEVKKITAERHGTVVTVKRVEKVQKKFLGRPVEVWKLYFTHYQDIPAIRDKIREHPAVIDIYEYDIPFAKRYLIDKGLVPMEGDEELKMLAFDIETLYHEGEEFAEGPILMISYADEEGARVITWKNVDLPYVDVVSTEREMIKRFLRVVKEKDPDVLITYNGDNFDFAYLKKRCEKLGINFALGRDGSEPKIQRMGDRFAVEVKGRIHFDLYPVIRRTINLPTYTLEAVYEAVFGQPKEKVYAEEITTAWETGENLERVARYSMEDAKVTYELGKEFLPMEAQLSRLIGQSLWDVSRSSTGNLVEWFLLRKAYERNELAPNKPDEKELARRRQSYEGGYVKEPERGLWENIVYLDFRSLYPSIIITHNVSPDTLNREGCKEYDVAPQVGHRFCKDFPGFIPSLLGDLLEERQKIKKKMKATIDPIERKLLDYRQRAIKILANSYYGYYGYARARWYCKECAESVTAWGREYITMTIKEIEEKYGFKVIYSDTDGFFATIPGADAETVKKKAMEFLKYINAKLPGALELEYEGFYKRGFFVTKKKYAVIDEEGKITTRGLEIVRRDWSEIAKETQARVLEALLKDGDVEKAVRIVKEVTEKLSKYEVPPEKLVIHEQITRDLKDYKATGPHVAVAKRLAARGVKIRPGTVISYIVLKGSGRIGDRAIPFDEFDPTKHKYDAEYYIENQVLPAVERILRAFGYRKEDLRYQKTRQVGLSAWLKPKGT

SEQ ID NO: 2557 - protein, 774 aa, synthetic construct
MILDTDLITEDGKPVIRIFKKENGEFKIEYDRTFESYFYALLKDDSAIEEVKKITAERHGTVVTVKRVEKVQKKFLGRPVEVWKLYFTHYQDIPAIADKIREHPAVIDIYEYDIPFAKRYLIDKGLVPMEGDEELKMLAFDIETLYHEGEEFAEGPILMISYADEEGARVITWKNVDLPYVDVVSTEREMIKRFLRVVKEKDPDVLITYNGDNFDFAYLKKRCEKLGINFALGRDGSEPKIQRMGDRFAVEVKGRIHFDLYPVIRRTINLPTYTLEAVYEAVFGQPKEKVYAEEITTAWETGENLERVARYSMEDAKVTYELGKEFLPMEAQLSRLIGQSLWDVSRSSTGNLVEWFLLRKAYERNELAPNKPDEKELARRRQSYEGGYVKEPERGLWENIVYLDFRSLYPSIIITHNVSPDTLNREGCKEYDVAPQVGHRFCKDFPGFIPSLLGDLLEERQKIKKKMKATIDPIERKLLDYRQRAIKILANSYYGYYGYARARWYCKECAESVTAWGREYITMTIKEIEEKYGFKVIYSDTDGFFATIPGADAETVKKKAMEFLKYINAKLPGALELEYEGFYKRGFFVTKKKYAVIDEEGKITTRGLEIVRRDWSEIAKETQARVLEALLKDGDVEKAVRIVKEVTEKLSKYEVPPEKLVIHEQITRDLKDYKATGPHVAVAKRLAARGVKIRPGTVISYIVLKGSGRIGDRAIPFDEFDPTKHKYDAEYYIENQVLPAVERILRAFGYRKEDLRYQKTRQVGLSAWLKPKGT

SEQ ID NO: 2558 - protein, 774 aa, synthetic construct
MILDTDLITEDGKPVIRIFKKENGEFKIEYDRTFESYFYALLKDDSAIEEVKKITAERHGTVVTVKRVEKVQKKFLGRPVEVWKLYFTHPQDIPAIRDKIREHPAVIDIYEYDIPFAKRYLIDKGLVPMEGDEELKMLAFDIETLYHEGEEFAEGPILMISYADEEGARVITWKNVDLPYVDVVSTEREMIKRFLRVVKEKDPDVLITYNGDNFDFAYLKKRCEKLGINFALGRDGSEPKIQRMGDRFAVEVKGRIHFDLYPVIRRTINLPTYTLEAVYEAVFGQPKEKVYAEEITTAWETGENLERVARYSMEDAKVTYELGKEFLPMEAQLSRLIGQSLWDVSRSSTGNLVEWFLLRKAYERNELAPNKPDEKELARRRQSYEGGYVKEPERGLWENIVYLDFRSLYPSIIITHNVSPDTLNREGCKEYDVAPQVGHRFCKDFPGFIPSLLGDLLEERQKIKKKMKATIDPIERKLLDYRQRAIKILANSYYGYYGYARARWYCKECAESVTAWGREYITMTIKEIEEKYGFKVIYSDTDGFFATIPGADAETVKKKAMEFLKYINAKLPGALELEYEGFYKRGFFVTKKKYAVIDEEGKITTRGLEIVRRDWSEIAKETQARVLEALLKDGDVEKAVRIVKEVTEKLSKYEVPPEKLVIHEQITRDLKDYKATGPHVAVAKRLAARGVKIRPGTVISYIVLKGSGRIGDRAIPFDEFDPTKHKYDAEYYIENQVLPAVERILRAFGYRKEDLRYQKTRQVGLSAWLKPKGT

SEQ ID NO: 2559 - protein, 774 aa, synthetic construct
MILDTDLITEDGKPVIRIFKKENGEFKIEYDRTFESYFYALLKDDSAIEEVKKITAERHGTVVTVKRVEKVQKKFLGRPVEVWKLYFTHPQDIPAIWDKIREHPAVIDIYEYDIPFAKRYLIDKGLVPMEGDEELKMLAFDIETLYHEGEEFAEGPILMISYADEEGARVITWKNVDLPYVDVVSTEREMIKRFLRVVKEKDPDVLITYNGDNFDFAYLKKRCEKLGINFALGRDGSEPKIQRMGDRFAVEVKGRIHFDLYPVIRRTINLPTYTLEAVYEAVFGQPKEKVYAEEITTAWETGENLERVARYSMEDAKVTYELGKEFLPMEAQLSRLIGQSLWDVSRSSTGNLVEWFLLRKAYERNELAPNKPDEKELARRRQSYEGGYVKEPERGLWENIVYLDFRSLYPSIIITHNVSPDTLNREGCKEYDVAPQVGHRFCKDFPGFIPSLLGDLLEERQKIKKKMKATIDPIERKLLDYRQRAIKILANSYYGYYGYARARWYCKECAESVTAWGREYITMTIKEIEEKYGFKVIYSDTDGFFATIPGADAETVKKKAMEFLKYINAKLPGALELEYEGFYKRGFFVTKKKYAVIDEEGKITTRGLEIVRRDWSEIAKETQARVLEALLKDGDVEKAVRIVKEVTEKLSKYEVPPEKLVIHEQITRDLKDYKATGPHVAVAKRLAARGVKIRPGTVISYIVLKGSGRIGDRAIPFDEFDPTKHKYDAEYYIENQVLPAVERILRAFGYRKEDLRYQKTRQVGLSAWLKPKGT

SEQ ID NO: 2560 - protein, 774 aa, synthetic construct
MILDTDLITEDGKPVIRIFKKENGEFKIEYDRTFESYFYALLKDDSAIEEVKKITAERHGTVVTVKRVEKVQKKFLGRPVEVWKLYFTHPQDQPAIADKIREHPAVIDIYEYDIPFAKRYLIDKGLVPMEGDEELKMLAFDIETLYHEGEEFAEGPILMISYADEEGARVITWKNVDLPYVDVVSTEREMIKRFLRVVKEKDPDVLITYNGDNFDFAYLKKRCEKLGINFALGRDGSEPKIQRMGDRFAVEVKGRIHFDLYPVIRRTINLPTYTLEAVYEAVFGQPKEKVYAEEITTAWETGENLERVARYSMEDAKVTYELGKEFLPMEAQLSRLIGQSLWDVSRSSTGNLVEWFLLRKAYERNELAPNKPDEKELARRRQSYEGGYVKEPERGLWENIVYLDFRSLYPSIIITHNVSPDTLNREGCKEYDVAPQVGHRFCKDFPGFIPSLLGDLLEERQKIKKKMKATIDPIERKLLDYRQRAIKILANSYYGYYGYARARWYCKECAESVTAWGREYITMTIKEIEEKYGFKVIYSDTDGFFATIPGADAETVKKKAMEFLKYINAKLPGALELEYEGFYKRGFFVTKKKYAVIDEEGKITTRGLEIVRRDWSEIAKETQARVLEALLKDGDVEKAVRIVKEVTEKLSKYEVPPEKLVIHEQITRDLKDYKATGPHVAVAKRLAARGVKIRPGTVISYIVLKGSGRIGDRAIPFDEFDPTKHKYDAEYYIENQVLPAVERILRAFGYRKEDLRYQKTRQVGLSAWLKPKGT

SEQ ID NO: 2561 - protein, 774 aa, synthetic construct
MILDTDLITEDGKPVIRIFKKENGEFKIEYDRTFEWYFYALLKDDSAIEEVKKITAERHGTVVTVKRVEKVQKKFLGRPVEVWKLYFTHPQDVPAIRDKIREHPAVIDIYEYDIPFAKRYLIDKGLVPMEGDEELKMLAFDIETLYHEGEEFAEGPILMISYADEEGARVITWKNVDLPYVDVVSTEREMIKRFLRVVKEKDPDVLITYNGDNFDFAYLKKRCEKLGINFALGRDGSEPKIQRMGDRFAVEVKGRIHFDLYPVIRRTINLPTYTLEAVYEAVFGQPKEKVYAEEITTAWETGENLERVARYSMEDAKVTYELGKEFLPMEAQLSRLIGQSLWDVSRSSTGNLVEWFLLRKAYERNELAPNKPDEKELARRRQSYEGGYVKEPERGLWENIVYLDFRSLYPSIIITHNVSPDTLNREGCKEYDVAPQVGHRFCKDFPGFIPSLLGDLLEERQKIKKKMKATIDPIERKLLDYRQRAIKILANSYYGYYGYARARWYCKECAESVTAWGREYITMTIKEIEEKYGFKVIYSDTDGFFATIPGADAETVKKKAMEFLKYINAKLPGALELEYEGFYKRGFFVTKKKYAVIDEEGKITTRGLEIVRRDWSEIAKETQARVLEALLKDGDVEKAVRIVKEVTEKLSKYEVPPEKLVIHEQITRDLKDYKATGPHVAVAKRLAARGVKIRPGTVISYIVLKGSGRIGDRAIPFDEFDPTKHKYDAEYYIENQVLPAVERILRAFGYRKEDLRYQKTRQVGLSAWLKPKGT

SEQ ID NO: 2562 - protein, 774 aa, synthetic construct
MILDTDLITEDGKPVIRIFKKENGEFKIEYDRTFEWYFYALLKDDSAIEEVKKITAERHGTVVTVKRVEKVQKKFLGRPVEVWKLYFTHFQDVPAIRDKIREHPAVIDIYEYDIPFAKRYLIDKGLVPMEGDEELKMLAFDIETLYHEGEEFAEGPILMISYADEEGARVITWKNVDLPYVDVVSTEREMIKRFLRVVKEKDPDVLITYNGDNFDFAYLKKRCEKLGINFALGRDGSEPKIQRMGDRFAVEVKGRIHFDLYPVIRRTINLPTYTLEAVYEAVFGQPKEKVYAEEITTAWETGENLERVARYSMEDAKVTYELGKEFLPMEAQLSRLIGQSLWDVSRSSTGNLVEWFLLRKAYERNELAPNKPDEKELARRRQSYEGGYVKEPERGLWENIVYLDFRSLYPSIIITHNVSPDTLNREGCKEYDVAPQVGHRFCKDFPGFIPSLLGDLLEERQKIKKKMKATIDPIERKLLDYRQRAIKILANSYYGYYGYARARWYCKECAESVTAWGREYITMTIKEIEEKYGFKVIYSDTDGFFATIPGADAETVKKKAMEFLKYINAKLPGALELEYEGFYKRGFFVTKKKYAVIDEEGKITTRGLEIVRRDWSEIAKETQARVLEALLKDGDVEKAVRIVKEVTEKLSKYEVPPEKLVIHEQITRDLKDYKATGPHVAVAKRLAARGVKIRPGTVISYIVLKGSGRIGDRAIPFDEFDPTKHKYDAEYYIENQVLPAVERILRAFGYRKEDLRYQKTRQVGLSAWLKPKGT

SEQ ID NO: 2563 - protein, 774 aa, synthetic construct
MILDTDLITEDGKPVIRIFKKENGEFKIEYDRTFEWYFYALLKDDSAIEEVKKITAERHGTVVTVKRVEKVQKKFLGRPVEVWKLYFTHFQDVPAIADKIREHPAVIDIYEYDIPFAKRYLIDKGLVPMEGDEELKMLAFDIETLYHEGEEFAEGPILMISYADEEGARVITWKNVDLPYVDVVSTEREMIKRFLRVVKEKDPDVLITYNGDNFDFAYLKKRCEKLGINFALGRDGSEPKIQRMGDRFAVEVKGRIHFDLYPVIRRTINLPTYTLEAVYEAVFGQPKEKVYAEEITTAWETGENLERVARYSMEDAKVTYELGKEFLPMEAQLSRLIGQSLWDVSRSSTGNLVEWFLLRKAYERNELAPNKPDEKELARRRQSYEGGYVKEPERGLWENIVYLDFRSLYPSIIITHNVSPDTLNREGCKEYDVAPQVGHRFCKDFPGFIPSLLGDLLEERQKIKKKMKATIDPIERKLLDYRQRAIKILANSYYGYYGYARARWYCKECAESVTAWGREYITMTIKEIEEKYGFKVIYSDTDGFFATIPGADAETVKKKAMEFLKYINAKLPGALELEYEGFYKRGFFVTKKKYAVIDEEGKITTRGLEIVRRDWSEIAKETQARVLEALLKDGDVEKAVRIVKEVTEKLSKYEVPPEKLVIHEQITRDLKDYKATGPHVAVAKRLAARGVKIRPGTVISYIVLKGSGRIGDRAIPFDEFDPTKHKYDAEYYIENQVLPAVERILRAFGYRKEDLRYQKTRQVGLSAWLKPKGT

SEQ ID NO: 2564 - protein, 774 aa, synthetic construct
MILDTDLITEDGKPVIRIFKKENGEFKIEYDRTFEWYFYALLKDDSAIEEVKKITAERHGTVVTVKRVEKVQKKFLGRPVEVWKLYFTHFQDIPAIRDKIREHPAVIDIYEYDIPFAKRYLIDKGLVPMEGDEELKMLAFDIETLYHEGEEFAEGPILMISYADEEGARVITWKNVDLPYVDVVSTEREMIKRFLRVVKEKDPDVLITYNGDNFDFAYLKKRCEKLGINFALGRDGSEPKIQRMGDRFAVEVKGRIHFDLYPVIRRTINLPTYTLEAVYEAVFGQPKEKVYAEEITTAWETGENLERVARYSMEDAKVTYELGKEFLPMEAQLSRLIGQSLWDVSRSSTGNLVEWFLLRKAYERNELAPNKPDEKELARRRQSYEGGYVKEPERGLWENIVYLDFRSLYPSIIITHNVSPDTLNREGCKEYDVAPQVGHRFCKDFPGFIPSLLGDLLEERQKIKKKMKATIDPIERKLLDYRQRAIKILANSYYGYYGYARARWYCKECAESVTAWGREYITMTIKEIEEKYGFKVIYSDTDGFFATIPGADAETVKKKAMEFLKYINAKLPGALELEYEGFYKRGFFVTKKKYAVIDEEGKITTRGLEIVRRDWSEIAKETQARVLEALLKDGDVEKAVRIVKEVTEKLSKYEVPPEKLVIHEQITRDLKDYKATGPHVAVAKRLAARGVKIRPGTVISYIVLKGSGRIGDRAIPFDEFDPTKHKYDAEYYIENQVLPAVERILRAFGYRKEDLRYQKTRQVGLSAWLKPKGT

SEQ ID NO: 2565 - protein, 774 aa, synthetic construct
MILDTDLITEDGKPVIRIFKKENGEFKIEYDRTFEWYFYALLKDDSAIEEVKKITAERHGTVVTVKRVEKVQKKFLGRPVEVWKLYFTHFQDIPAIADKIREHPAVIDIYEYDIPFAKRYLIDKGLVPMEGDEELKMLAFDIETLYHEGEEFAEGPILMISYADEEGARVITWKNVDLPYVDVVSTEREMIKRFLRVVKEKDPDVLITYNGDNFDFAYLKKRCEKLGINFALGRDGSEPKIQRMGDRFAVEVKGRIHFDLYPVIRRTINLPTYTLEAVYEAVFGQPKEKVYAEEITTAWETGENLERVARYSMEDAKVTYELGKEFLPMEAQLSRLIGQSLWDVSRSSTGNLVEWFLLRKAYERNELAPNKPDEKELARRRQSYEGGYVKEPERGLWENIVYLDFRSLYPSIIITHNVSPDTLNREGCKEYDVAPQVGHRFCKDFPGFIPSLLGDLLEERQKIKKKMKATIDPIERKLLDYRQRAIKILANSYYGYYGYARARWYCKECAESVTAWGREYITMTIKEIEEKYGFKVIYSDTDGFFATIPGADAETVKKKAMEFLKYINAKLPGALELEYEGFYKRGFFVTKKKYAVIDEEGKITTRGLEIVRRDWSEIAKETQARVLEALLKDGDVEKAVRIVKEVTEKLSKYEVPPEKLVIHEQITRDLKDYKATGPHVAVAKRLAARGVKIRPGTVISYIVLKGSGRIGDRAIPFDEFDPTKHKYDAEYYIENQVLPAVERILRAFGYRKEDLRYQKTRQVGLSAWLKPKGT

SEQ ID NO: 2566 - protein, 774 aa, synthetic construct
MILDTDLITEDGKPVIRIFKKENGEFKIEYDRTFEWYFYALLKDDSAIEEVKKITAERHGTVVTVKRVEKVQKKFLGRPVEVWKLYFTHFQDIPAIFDKIREHPAVIDIYEYDIPFAKRYLIDKGLVPMEGDEELKMLAFDIETLYHEGEEFAEGPILMISYADEEGARVITWKNVDLPYVDVVSTEREMIKRFLRVVKEKDPDVLITYNGDNFDFAYLKKRCEKLGINFALGRDGSEPKIQRMGDRFAVEVKGRIHFDLYPVIRRTINLPTYTLEAVYEAVFGQPKEKVYAEEITTAWETGENLERVARYSMEDAKVTYELGKEFLPMEAQLSRLIGQSLWDVSRSSTGNLVEWFLLRKAYERNELAPNKPDEKELARRRQSYEGGYVKEPERGLWENIVYLDFRSLYPSIIITHNVSPDTLNREGCKEYDVAPQVGHRFCKDFPGFIPSLLGDLLEERQKIKKKMKATIDPIERKLLDYRQRAIKILANSYYGYYGYARARWYCKECAESVTAWGREYITMTIKEIEEKYGFKVIYSDTDGFFATIPGADAETVKKKAMEFLKYINAKLPGALELEYEGFYKRGFFVTKKKYAVIDEEGKITTRGLEIVRRDWSEIAKETQARVLEALLKDGDVEKAVRIVKEVTEKLSKYEVPPEKLVIHEQITRDLKDYKATGPHVAVAKRLAARGVKIRPGTVISYIVLKGSGRIGDRAIPFDEFDPTKHKYDAEYYIENQVLPAVERILRAFGYRKEDLRYQKTRQVGLSAWLKPKGT

SEQ ID NO: 2567 - protein, 774 aa, synthetic construct
MILDTDLITEDGKPVIRIFKKENGEFKIEYDRTFEWYFYALLKDDSAIEEVKKITAERHGTVVTVKRVEKVQKKFLGRPVEVWKLYFTHFQDIPAIWDKIREHPAVIDIYEYDIPFAKRYLIDKGLVPMEGDEELKMLAFDIETLYHEGEEFAEGPILMISYADEEGARVITWKNVDLPYVDVVSTEREMIKRFLRVVKEKDPDVLITYNGDNFDFAYLKKRCEKLGINFALGRDGSEPKIQRMGDRFAVEVKGRIHFDLYPVIRRTINLPTYTLEAVYEAVFGQPKEKVYAEEITTAWETGENLERVARYSMEDAKVTYELGKEFLPMEAQLSRLIGQSLWDVSRSSTGNLVEWFLLRKAYERNELAPNKPDEKELARRRQSYEGGYVKEPERGLWENIVYLDFRSLYPSIIITHNVSPDTLNREGCKEYDVAPQVGHRFCKDFPGFIPSLLGDLLEERQKIKKKMKATIDPIERKLLDYRQRAIKILANSYYGYYGYARARWYCKECAESVTAWGREYITMTIKEIEEKYGFKVIYSDTDGFFATIPGADAETVKKKAMEFLKYINAKLPGALELEYEGFYKRGFFVTKKKYAVIDEEGKITTRGLEIVRRDWSEIAKETQARVLEALLKDGDVEKAVRIVKEVTEKLSKYEVPPEKLVIHEQITRDLKDYKATGPHVAVAKRLAARGVKIRPGTVISYIVLKGSGRIGDRAIPFDEFDPTKHKYDAEYYIENQVLPAVERILRAFGYRKEDLRYQKTRQVGLSAWLKPKGT

SEQ ID NO: 2568 - protein, 774 aa, synthetic construct
MILDTDLITEDGKPVIRIFKKENGEFKIEYDRTFEWYFYALLKDDSAIEEVKKITAERHGTVVTVKRVEKVQKKFLGRPVEVWKLYFTHFQDRPAIADKIREHPAVIDIYEYDIPFAKRYLIDKGLVPMEGDEELKMLAFDIETLYHEGEEFAEGPILMISYADEEGARVITWKNVDLPYVDVVSTEREMIKRFLRVVKEKDPDVLITYNGDNFDFAYLKKRCEKLGINFALGRDGSEPKIQRMGDRFAVEVKGRIHFDLYPVIRRTINLPTYTLEAVYEAVFGQPKEKVYAEEITTAWETGENLERVARYSMEDAKVTYELGKEFLPMEAQLSRLIGQSLWDVSRSSTGNLVEWFLLRKAYERNELAPNKPDEKELARRRQSYEGGYVKEPERGLWENIVYLDFRSLYPSIIITHNVSPDTLNREGCKEYDVAPQVGHRFCKDFPGFIPSLLGDLLEERQKIKKKMKATIDPIERKLLDYRQRAIKILANSYYGYYGYARARWYCKECAESVTAWGREYITMTIKEIEEKYGFKVIYSDTDGFFATIPGADAETVKKKAMEFLKYINAKLPGALELEYEGFYKRGFFVTKKKYAVIDEEGKITTRGLEIVRRDWSEIAKETQARVLEALLKDGDVEKAVRIVKEVTEKLSKYEVPPEKLVIHEQITRDLKDYKATGPHVAVAKRLAARGVKIRPGTVISYIVLKGSGRIGDRAIPFDEFDPTKHKYDAEYYIENQVLPAVERILRAFGYRKEDLRYQKTRQVGLSAWLKPKGT

SEQ ID NO: 2569 - protein, 774 aa, synthetic construct
MILDTDLITEDGKPVIRIFKKENGEFKIEYDRTFEWYFYALLKDDSAIEEVKKITAERHGTVVTVKRVEKVQKKFLGRPVEVWKLYFTHIQDVPAIRDKIREHPAVIDIYEYDIPFAKRYLIDKGLVPMEGDEELKMLAFDIETLYHEGEEFAEGPILMISYADEEGARVITWKNVDLPYVDVVSTEREMIKRFLRVVKEKDPDVLITYNGDNFDFAYLKKRCEKLGINFALGRDGSEPKIQRMGDRFAVEVKGRIHFDLYPVIRRTINLPTYTLEAVYEAVFGQPKEKVYAEEITTAWETGENLERVARYSMEDAKVTYELGKEFLPMEAQLSRLIGQSLWDVSRSSTGNLVEWFLLRKAYERNELAPNKPDEKELARRRQSYEGGYVKEPERGLWENIVYLDFRSLYPSIIITHNVSPDTLNREGCKEYDVAPQVGHRFCKDFPGFIPSLLGDLLEERQKIKKKMKATIDPIERKLLDYRQRAIKILANSYYGYYGYARARWYCKECAESVTAWGREYITMTIKEIEEKYGFKVIYSDTDGFFATIPGADAETVKKKAMEFLKYINAKLPGALELEYEGFYKRGFFVTKKKYAVIDEEGKITTRGLEIVRRDWSEIAKETQARVLEALLKDGDVEKAVRIVKEVTEKLSKYEVPPEKLVIHEQITRDLKDYKATGPHVAVAKRLAARGVKIRPGTVISYIVLKGSGRIGDRAIPFDEFDPTKHKYDAEYYIENQVLPAVERILRAFGYRKEDLRYQKTRQVGLSAWLKPKGT

SEQ ID NO: 2570 - protein, 774 aa, synthetic construct
MILDTDLITEDGKPVIRIFKKENGEFKIEYDRTFEWYFYALLKDDSAIEEVKKITAERHGTVVTVKRVEKVQKKFLGRPVEVWKLYFTHIQDVPAIADKIREHPAVIDIYEYDIPFAKRYLIDKGLVPMEGDEELKMLAFDIETLYHEGEEFAEGPILMISYADEEGARVITWKNVDLPYVDVVSTEREMIKRFLRVVKEKDPDVLITYNGDNFDFAYLKKRCEKLGINFALGRDGSEPKIQRMGDRFAVEVKGRIHFDLYPVIRRTINLPTYTLEAVYEAVFGQPKEKVYAEEITTAWETGENLERVARYSMEDAKVTYELGKEFLPMEAQLSRLIGQSLWDVSRSSTGNLVEWFLLRKAYERNELAPNKPDEKELARRRQSYEGGYVKEPERGLWENIVYLDFRSLYPSIIITHNVSPDTLNREGCKEYDVAPQVGHRFCKDFPGFIPSLLGDLLEERQKIKKKMKATIDPIERKLLDYRQRAIKILANSYYGYYGYARARWYCKECAESVTAWGREYITMTIKEIEEKYGFKVIYSDTDGFFATIPGADAETVKKKAMEFLKYINAKLPGALELEYEGFYKRGFFVTKKKYAVIDEEGKITTRGLEIVRRDWSEIAKETQARVLEALLKDGDVEKAVRIVKEVTEKLSKYEVPPEKLVIHEQITRDLKDYKATGPHVAVAKRLAARGVKIRPGTVISYIVLKGSGRIGDRAIPFDEFDPTKHKYDAEYYIENQVLPAVERILRAFGYRKEDLRYQKTRQVGLSAWLKPKGT

SEQ ID NO: 2571 - protein, 774 aa, synthetic construct
MILDTDLITEDGKPVIRIFKKENGEFKIEYDRTFEWYFYALLKDDSAIEEVKKITAERHGTVVTVKRVEKVQKKFLGRPVEVWKLYFTHIQDIPAIRDKIREHPAVIDIYEYDIPFAKRYLIDKGLVPMEGDEELKMLAFDIETLYHEGEEFAEGPILMISYADEEGARVITWKNVDLPYVDVVSTEREMIKRFLRVVKEKDPDVLITYNGDNFDFAYLKKRCEKLGINFALGRDGSEPKIQRMGDRFAVEVKGRIHFDLYPVIRRTINLPTYTLEAVYEAVFGQPKEKVYAEEITTAWETGENLERVARYSMEDAKVTYELGKEFLPMEAQLSRLIGQSLWDVSRSSTGNLVEWFLLRKAYERNELAPNKPDEKELARRRQSYEGGYVKEPERGLWENIVYLDFRSLYPSIIITHNVSPDTLNREGCKEYDVAPQVGHRFCKDFPGFIPSLLGDLLEERQKIKKKMKATIDPIERKLLDYRQRAIKILANSYYGYYGYARARWYCKECAESVTAWGREYITMTIKEIEEKYGFKVIYSDTDGFFATIPGADAETVKKKAMEFLKYINAKLPGALELEYEGFYKRGFFVTKKKYAVIDEEGKITTRGLEIVRRDWSEIAKETQARVLEALLKDGDVEKAVRIVKEVTEKLSKYEVPPEKLVIHEQITRDLKDYKATGPHVAVAKRLAARGVKIRPGTVISYIVLKGSGRIGDRAIPFDEFDPTKHKYDAEYYIENQVLPAVERILRAFGYRKEDLRYQKTRQVGLSAWLKPKGT

SEQ ID NO: 2572 - protein, 774 aa, synthetic construct
MILDTDLITEDGKPVIRIFKKENGEFKIEYDRTFEWYFYALLKDDSAIEEVKKITAERHGTVVTVKRVEKVQKKFLGRPVEVWKLYFTHSQDIPAIRDKIREHPAVIDIYEYDIPFAKRYLIDKGLVPMEGDEELKMLAFDIETLYHEGEEFAEGPILMISYADEEGARVITWKNVDLPYVDVVSTEREMIKRFLRVVKEKDPDVLITYNGDNFDFAYLKKRCEKLGINFALGRDGSEPKIQRMGDRFAVEVKGRIHFDLYPVIRRTINLPTYTLEAVYEAVFGQPKEKVYAEEITTAWETGENLERVARYSMEDAKVTYELGKEFLPMEAQLSRLIGQSLWDVSRSSTGNLVEWFLLRKAYERNELAPNKPDEKELARRRQSYEGGYVKEPERGLWENIVYLDFRSLYPSIIITHNVSPDTLNREGCKEYDVAPQVGHRFCKDFPGFIPSLLGDLLEERQKIKKKMKATIDPIERKLLDYRQRAIKILANSYYGYYGYARARWYCKECAESVTAWGREYITMTIKEIEEKYGFKVIYSDTDGFFATIPGADAETVKKKAMEFLKYINAKLPGALELEYEGFYKRGFFVTKKKYAVIDEEGKITTRGLEIVRRDWSEIAKETQARVLEALLKDGDVEKAVRIVKEVTEKLSKYEVPPEKLVIHEQITRDLKDYKATGPHVAVAKRLAARGVKIRPGTVISYIVLKGSGRIGDRAIPFDEFDPTKHKYDAEYYIENQVLPAVERILRAFGYRKEDLRYQKTRQVGLSAWLKPKGT

SEQ ID NO: 2573 - protein, 774 aa, synthetic construct
MILDTDLITEDGKPVIRIFKKENGEFKIEYDRTFEWYFYALLKDDSAIEEVKKITAERHGTVVTVKRVEKVQKKFLGRPVEVWKLYFTHWQDVPAIRDKIREHPAVIDIYEYDIPFAKRYLIDKGLVPMEGDEELKMLAFDIETLYHEGEEFAEGPILMISYADEEGARVITWKNVDLPYVDVVSTEREMIKRFLRVVKEKDPDVLITYNGDNFDFAYLKKRCEKLGINFALGRDGSEPKIQRMGDRFAVEVKGRIHFDLYPVIRRTINLPTYTLEAVYEAVFGQPKEKVYAEEITTAWETGENLERVARYSMEDAKVTYELGKEFLPMEAQLSRLIGQSLWDVSRSSTGNLVEWFLLRKAYERNELAPNKPDEKELARRRQSYEGGYVKEPERGLWENIVYLDFRSLYPSIIITHNVSPDTLNREGCKEYDVAPQVGHRFCKDFPGFIPSLLGDLLEERQKIKKKMKATIDPIERKLLDYRQRAIKILANSYYGYYGYARARWYCKECAESVTAWGREYITMTIKEIEEKYGFKVIYSDTDGFFATIPGADAETVKKKAMEFLKYINAKLPGALELEYEGFYKRGFFVTKKKYAVIDEEGKITTRGLEIVRRDWSEIAKETQARVLEALLKDGDVEKAVRIVKEVTEKLSKYEVPPEKLVIHEQITRDLKDYKATGPHVAVAKRLAARGVKIRPGTVISYIVLKGSGRIGDRAIPFDEFDPTKHKYDAEYYIENQVLPAVERILRAFGYRKEDLRYQKTRQVGLSAWLKPKGT

SEQ ID NO: 2574 - protein, 774 aa, synthetic construct
MILDTDLITEDGKPVIRIFKKENGEFKIEYDRTFEWYFYALLKDDSAIEEVKKITAERHGTVVTVKRVEKVQKKFLGRPVEVWKLYFTHWQDVPAIADKIREHPAVIDIYEYDIPFAKRYLIDKGLVPMEGDEELKMLAFDIETLYHEGEEFAEGPILMISYADEEGARVITWKNVDLPYVDVVSTEREMIKRFLRVVKEKDPDVLITYNGDNFDFAYLKKRCEKLGINFALGRDGSEPKIQRMGDRFAVEVKGRIHFDLYPVIRRTINLPTYTLEAVYEAVFGQPKEKVYAEEITTAWETGENLERVARYSMEDAKVTYELGKEFLPMEAQLSRLIGQSLWDVSRSSTGNLVEWFLLRKAYERNELAPNKPDEKELARRRQSYEGGYVKEPERGLWENIVYLDFRSLYPSIIITHNVSPDTLNREGCKEYDVAPQVGHRFCKDFPGFIPSLLGDLLEERQKIKKKMKATIDPIERKLLDYRQRAIKILANSYYGYYGYARARWYCKECAESVTAWGREYITMTIKEIEEKYGFKVIYSDTDGFFATIPGADAETVKKKAMEFLKYINAKLPGALELEYEGFYKRGFFVTKKKYAVIDEEGKITTRGLEIVRRDWSEIAKETQARVLEALLKDGDVEKAVRIVKEVTEKLSKYEVPPEKLVIHEQITRDLKDYKATGPHVAVAKRLAARGVKIRPGTVISYIVLKGSGRIGDRAIPFDEFDPTKHKYDAEYYIENQVLPAVERILRAFGYRKEDLRYQKTRQVGLSAWLKPKGT

SEQ ID NO: 2575 - protein, 774 aa, synthetic construct
MILDTDLITEDGKPVIRIFKKENGEFKIEYDRTFEWYFYALLKDDSAIEEVKKITAERHGTVVTVKRVEKVQKKFLGRPVEVWKLYFTHWQDVPAIFDKIREHPAVIDIYEYDIPFAKRYLIDKGLVPMEGDEELKMLAFDIETLYHEGEEFAEGPILMISYADEEGARVITWKNVDLPYVDVVSTEREMIKRFLRVVKEKDPDVLITYNGDNFDFAYLKKRCEKLGINFALGRDGSEPKIQRMGDRFAVEVKGRIHFDLYPVIRRTINLPTYTLEAVYEAVFGQPKEKVYAEEITTAWETGENLERVARYSMEDAKVTYELGKEFLPMEAQLSRLIGQSLWDVSRSSTGNLVEWFLLRKAYERNELAPNKPDEKELARRRQSYEGGYVKEPERGLWENIVYLDFRSLYPSIIITHNVSPDTLNREGCKEYDVAPQVGHRFCKDFPGFIPSLLGDLLEERQKIKKKMKATIDPIERKLLDYRQRAIKILANSYYGYYGYARARWYCKECAESVTAWGREYITMTIKEIEEKYGFKVIYSDTDGFFATIPGADAETVKKKAMEFLKYINAKLPGALELEYEGFYKRGFFVTKKKYAVIDEEGKITTRGLEIVRRDWSEIAKETQARVLEALLKDGDVEKAVRIVKEVTEKLSKYEVPPEKLVIHEQITRDLKDYKATGPHVAVAKRLAARGVKIRPGTVISYIVLKGSGRIGDRAIPFDEFDPTKHKYDAEYYIENQVLPAVERILRAFGYRKEDLRYQKTRQVGLSAWLKPKGT

SEQ ID NO: 2576 - protein, 774 aa, synthetic construct
MILDTDLITEDGKPVIRIFKKENGEFKIEYDRTFEWYFYALLKDDSAIEEVKKITAERHGTVVTVKRVEKVQKKFLGRPVEVWKLYFTHWQDIPAIRDKIREHPAVIDIYEYDIPFAKRYLIDKGLVPMEGDEELKMLAFDIETLYHEGEEFAEGPILMISYADEEGARVITWKNVDLPYVDVVSTEREMIKRFLRVVKEKDPDVLITYNGDNFDFAYLKKRCEKLGINFALGRDGSEPKIQRMGDRFAVEVKGRIHFDLYPVIRRTINLPTYTLEAVYEAVFGQPKEKVYAEEITTAWETGENLERVARYSMEDAKVTYELGKEFLPMEAQLSRLIGQSLWDVSRSSTGNLVEWFLLRKAYERNELAPNKPDEKELARRRQSYEGGYVKEPERGLWENIVYLDFRSLYPSIIITHNVSPDTLNREGCKEYDVAPQVGHRFCKDFPGFIPSLLGDLLEERQKIKKKMKATIDPIERKLLDYRQRAIKILANSYYGYYGYARARWYCKECAESVTAWGREYITMTIKEIEEKYGFKVIYSDTDGFFATIPGADAETVKKKAMEFLKYINAKLPGALELEYEGFYKRGFFVTKKKYAVIDEEGKITTRGLEIVRRDWSEIAKETQARVLEALLKDGDVEKAVRIVKEVTEKLSKYEVPPEKLVIHEQITRDLKDYKATGPHVAVAKRLAARGVKIRPGTVISYIVLKGSGRIGDRAIPFDEFDPTKHKYDAEYYIENQVLPAVERILRAFGYRKEDLRYQKTRQVGLSAWLKPKGT

SEQ ID NO: 2577 - protein, 774 aa, synthetic construct
MILDTDLITEDGKPVIRIFKKENGEFKIEYDRTFEWYFYALLKDDSAIEEVKKITAERHGTVVTVKRVEKVQKKFLGRPVEVWKLYFTHWQDIPAIADKIREHPAVIDIYEYDIPFAKRYLIDKGLVPMEGDEELKMLAFDIETLYHEGEEFAEGPILMISYADEEGARVITWKNVDLPYVDVVSTEREMIKRFLRVVKEKDPDVLITYNGDNFDFAYLKKRCEKLGINFALGRDGSEPKIQRMGDRFAVEVKGRIHFDLYPVIRRTINLPTYTLEAVYEAVFGQPKEKVYAEEITTAWETGENLERVARYSMEDAKVTYELGKEFLPMEAQLSRLIGQSLWDVSRSSTGNLVEWFLLRKAYERNELAPNKPDEKELARRRQSYEGGYVKEPERGLWENIVYLDFRSLYPSIIITHNVSPDTLNREGCKEYDVAPQVGHRFCKDFPGFIPSLLGDLLEERQKIKKKMKATIDPIERKLLDYRQRAIKILANSYYGYYGYARARWYCKECAESVTAWGREYITMTIKEIEEKYGFKVIYSDTDGFFATIPGADAETVKKKAMEFLKYINAKLPGALELEYEGFYKRGFFVTKKKYAVIDEEGKITTRGLEIVRRDWSEIAKETQARVLEALLKDGDVEKAVRIVKEVTEKLSKYEVPPEKLVIHEQITRDLKDYKATGPHVAVAKRLAARGVKIRPGTVISYIVLKGSGRIGDRAIPFDEFDPTKHKYDAEYYIENQVLPAVERILRAFGYRKEDLRYQKTRQVGLSAWLKPKGT

SEQ ID NO: 2578 - protein, 774 aa, synthetic construct
MILDTDLITEDGKPVIRIFKKENGEFKIEYDRTFEWYFYALLKDDSAIEEVKKITAERHGTVVTVKRVEKVQKKFLGRPVEVWKLYFTHWQDIPAIFDKIREHPAVIDIYEYDIPFAKRYLIDKGLVPMEGDEELKMLAFDIETLYHEGEEFAEGPILMISYADEEGARVITWKNVDLPYVDVVSTEREMIKRFLRVVKEKDPDVLITYNGDNFDFAYLKKRCEKLGINFALGRDGSEPKIQRMGDRFAVEVKGRIHFDLYPVIRRTINLPTYTLEAVYEAVFGQPKEKVYAEEITTAWETGENLERVARYSMEDAKVTYELGKEFLPMEAQLSRLIGQSLWDVSRSSTGNLVEWFLLRKAYERNELAPNKPDEKELARRRQSYEGGYVKEPERGLWENIVYLDFRSLYPSIIITHNVSPDTLNREGCKEYDVAPQVGHRFCKDFPGFIPSLLGDLLEERQKIKKKMKATIDPIERKLLDYRQRAIKILANSYYGYYGYARARWYCKECAESVTAWGREYITMTIKEIEEKYGFKVIYSDTDGFFATIPGADAETVKKKAMEFLKYINAKLPGALELEYEGFYKRGFFVTKKKYAVIDEEGKITTRGLEIVRRDWSEIAKETQARVLEALLKDGDVEKAVRIVKEVTEKLSKYEVPPEKLVIHEQITRDLKDYKATGPHVAVAKRLAARGVKIRPGTVISYIVLKGSGRIGDRAIPFDEFDPTKHKYDAEYYIENQVLPAVERILRAFGYRKEDLRYQKTRQVGLSAWLKPKGT

SEQ ID NO: 2579 - protein, 774 aa, synthetic construct
MILDTDLITEDGKPVIRIFKKENGEFKIEYDRTFEWYFYALLKDDSAIEEVKKITAERHGTVVTVKRVEKVQKKFLGRPVEVWKLYFTHWQDIPAIHDKIREHPAVIDIYEYDIPFAKRYLIDKGLVPMEGDEELKMLAFDIETLYHEGEEFAEGPILMISYADEEGARVITWKNVDLPYVDVVSTEREMIKRFLRVVKEKDPDVLITYNGDNFDFAYLKKRCEKLGINFALGRDGSEPKIQRMGDRFAVEVKGRIHFDLYPVIRRTINLPTYTLEAVYEAVFGQPKEKVYAEEITTAWETGENLERVARYSMEDAKVTYELGKEFLPMEAQLSRLIGQSLWDVSRSSTGNLVEWFLLRKAYERNELAPNKPDEKELARRRQSYEGGYVKEPERGLWENIVYLDFRSLYPSIIITHNVSPDTLNREGCKEYDVAPQVGHRFCKDFPGFIPSLLGDLLEERQKIKKKMKATIDPIERKLLDYRQRAIKILANSYYGYYGYARARWYCKECAESVTAWGREYITMTIKEIEEKYGFKVIYSDTDGFFATIPGADAETVKKKAMEFLKYINAKLPGALELEYEGFYKRGFFVTKKKYAVIDEEGKITTRGLEIVRRDWSEIAKETQARVLEALLKDGDVEKAVRIVKEVTEKLSKYEVPPEKLVIHEQITRDLKDYKATGPHVAVAKRLAARGVKIRPGTVISYIVLKGSGRIGDRAIPFDEFDPTKHKYDAEYYIENQVLPAVERILRAFGYRKEDLRYQKTRQVGLSAWLKPKGT

SEQ ID NO: 2580 - protein, 774 aa, synthetic construct
MILDTDLITEDGKPVIRIFKKENGEFKIEYDRTFEWYFYALLKDDSAIEEVKKITAERHGTVVTVKRVEKVQKKFLGRPVEVWKLYFTHWQDIPAIWDKIREHPAVIDIYEYDIPFAKRYLIDKGLVPMEGDEELKMLAFDIETLYHEGEEFAEGPILMISYADEEGARVITWKNVDLPYVDVVSTEREMIKRFLRVVKEKDPDVLITYNGDNFDFAYLKKRCEKLGINFALGRDGSEPKIQRMGDRFAVEVKGRIHFDLYPVIRRTINLPTYTLEAVYEAVFGQPKEKVYAEEITTAWETGENLERVARYSMEDAKVTYELGKEFLPMEAQLSRLIGQSLWDVSRSSTGNLVEWFLLRKAYERNELAPNKPDEKELARRRQSYEGGYVKEPERGLWENIVYLDFRSLYPSIIITHNVSPDTLNREGCKEYDVAPQVGHRFCKDFPGFIPSLLGDLLEERQKIKKKMKATIDPIERKLLDYRQRAIKILANSYYGYYGYARARWYCKECAESVTAWGREYITMTIKEIEEKYGFKVIYSDTDGFFATIPGADAETVKKKAMEFLKYINAKLPGALELEYEGFYKRGFFVTKKKYAVIDEEGKITTRGLEIVRRDWSEIAKETQARVLEALLKDGDVEKAVRIVKEVTEKLSKYEVPPEKLVIHEQITRDLKDYKATGPHVAVAKRLAARGVKIRPGTVISYIVLKGSGRIGDRAIPFDEFDPTKHKYDAEYYIENQVLPAVERILRAFGYRKEDLRYQKTRQVGLSAWLKPKGT

SEQ ID NO: 2581 - protein, 774 aa, synthetic construct
MILDTDLITEDGKPVIRIFKKENGEFKIEYDRTFEWYFYALLKDDSAIEEVKKITAERHGTVVTVKRVEKVQKKFLGRPVEVWKLYFTHYQDVPAIRDKIREHPAVIDIYEYDIPFAKRYLIDKGLVPMEGDEELKMLAFDIETLYHEGEEFAEGPILMISYADEEGARVITWKNVDLPYVDVVSTEREMIKRFLRVVKEKDPDVLITYNGDNFDFAYLKKRCEKLGINFALGRDGSEPKIQRMGDRFAVEVKGRIHFDLYPVIRRTINLPTYTLEAVYEAVFGQPKEKVYAEEITTAWETGENLERVARYSMEDAKVTYELGKEFLPMEAQLSRLIGQSLWDVSRSSTGNLVEWFLLRKAYERNELAPNKPDEKELARRRQSYEGGYVKEPERGLWENIVYLDFRSLYPSIIITHNVSPDTLNREGCKEYDVAPQVGHRFCKDFPGFIPSLLGDLLEERQKIKKKMKATIDPIERKLLDYRQRAIKILANSYYGYYGYARARWYCKECAESVTAWGREYITMTIKEIEEKYGFKVIYSDTDGFFATIPGADAETVKKKAMEFLKYINAKLPGALELEYEGFYKRGFFVTKKKYAVIDEEGKITTRGLEIVRRDWSEIAKETQARVLEALLKDGDVEKAVRIVKEVTEKLSKYEVPPEKLVIHEQITRDLKDYKATGPHVAVAKRLAARGVKIRPGTVISYIVLKGSGRIGDRAIPFDEFDPTKHKYDAEYYIENQVLPAVERILRAFGYRKEDLRYQKTRQVGLSAWLKPKGT

SEQ ID NO: 2582 - protein, 774 aa, synthetic construct
MILDTDLITEDGKPVIRIFKKENGEFKIEYDRTFEWYFYALLKDDSAIEEVKKITAERHGTVVTVKRVEKVQKKFLGRPVEVWKLYFTHYQDVPAIADKIREHPAVIDIYEYDIPFAKRYLIDKGLVPMEGDEELKMLAFDIETLYHEGEEFAEGPILMISYADEEGARVITWKNVDLPYVDVVSTEREMIKRFLRVVKEKDPDVLITYNGDNFDFAYLKKRCEKLGINFALGRDGSEPKIQRMGDRFAVEVKGRIHFDLYPVIRRTINLPTYTLEAVYEAVFGQPKEKVYAEEITTAWETGENLERVARYSMEDAKVTYELGKEFLPMEAQLSRLIGQSLWDVSRSSTGNLVEWFLLRKAYERNELAPNKPDEKELARRRQSYEGGYVKEPERGLWENIVYLDFRSLYPSIIITHNVSPDTLNREGCKEYDVAPQVGHRFCKDFPGFIPSLLGDLLEERQKIKKKMKATIDPIERKLLDYRQRAIKILANSYYGYYGYARARWYCKECAESVTAWGREYITMTIKEIEEKYGFKVIYSDTDGFFATIPGADAETVKKKAMEFLKYINAKLPGALELEYEGFYKRGFFVTKKKYAVIDEEGKITTRGLEIVRRDWSEIAKETQARVLEALLKDGDVEKAVRIVKEVTEKLSKYEVPPEKLVIHEQITRDLKDYKATGPHVAVAKRLAARGVKIRPGTVISYIVLKGSGRIGDRAIPFDEFDPTKHKYDAEYYIENQVLPAVERILRAFGYRKEDLRYQKTRQVGLSAWLKPKGT

SEQ ID NO: 2583 - protein, 774 aa, synthetic construct
MILDTDLITEDGKPVIRIFKKENGEFKIEYDRTFEWYFYALLKDDSAIEEVKKITAERHGTVVTVKRVEKVQKKFLGRPVEVWKLYFTHYQDVPAIFDKIREHPAVIDIYEYDIPFAKRYLIDKGLVPMEGDEELKMLAFDIETLYHEGEEFAEGPILMISYADEEGARVITWKNVDLPYVDVVSTEREMIKRFLRVVKEKDPDVLITYNGDNFDFAYLKKRCEKLGINFALGRDGSEPKIQRMGDRFAVEVKGRIHFDLYPVIRRTINLPTYTLEAVYEAVFGQPKEKVYAEEITTAWETGENLERVARYSMEDAKVTYELGKEFLPMEAQLSRLIGQSLWDVSRSSTGNLVEWFLLRKAYERNELAPNKPDEKELARRRQSYEGGYVKEPERGLWENIVYLDFRSLYPSIIITHNVSPDTLNREGCKEYDVAPQVGHRFCKDFPGFIPSLLGDLLEERQKIKKKMKATIDPIERKLLDYRQRAIKILANSYYGYYGYARARWYCKECAESVTAWGREYITMTIKEIEEKYGFKVIYSDTDGFFATIPGADAETVKKKAMEFLKYINAKLPGALELEYEGFYKRGFFVTKKKYAVIDEEGKITTRGLEIVRRDWSEIAKETQARVLEALLKDGDVEKAVRIVKEVTEKLSKYEVPPEKLVIHEQITRDLKDYKATGPHVAVAKRLAARGVKIRPGTVISYIVLKGSGRIGDRAIPFDEFDPTKHKYDAEYYIENQVLPAVERILRAFGYRKEDLRYQKTRQVGLSAWLKPKGT

SEQ ID NO: 2584 - protein, 774 aa, synthetic construct
MILDTDLITEDGKPVIRIFKKENGEFKIEYDRTFEWYFYALLKDDSAIEEVKKITAERHGTVVTVKRVEKVQKKFLGRPVEVWKLYFTHYQDVPAIHDKIREHPAVIDIYEYDIPFAKRYLIDKGLVPMEGDEELKMLAFDIETLYHEGEEFAEGPILMISYADEEGARVITWKNVDLPYVDVVSTEREMIKRFLRVVKEKDPDVLITYNGDNFDFAYLKKRCEKLGINFALGRDGSEPKIQRMGDRFAVEVKGRIHFDLYPVIRRTINLPTYTLEAVYEAVFGQPKEKVYAEEITTAWETGENLERVARYSMEDAKVTYELGKEFLPMEAQLSRLIGQSLWDVSRSSTGNLVEWFLLRKAYERNELAPNKPDEKELARRRQSYEGGYVKEPERGLWENIVYLDFRSLYPSIIITHNVSPDTLNREGCKEYDVAPQVGHRFCKDFPGFIPSLLGDLLEERQKIKKKMKATIDPIERKLLDYRQRAIKILANSYYGYYGYARARWYCKECAESVTAWGREYITMTIKEIEEKYGFKVIYSDTDGFFATIPGADAETVKKKAMEFLKYINAKLPGALELEYEGFYKRGFFVTKKKYAVIDEEGKITTRGLEIVRRDWSEIAKETQARVLEALLKDGDVEKAVRIVKEVTEKLSKYEVPPEKLVIHEQITRDLKDYKATGPHVAVAKRLAARGVKIRPGTVISYIVLKGSGRIGDRAIPFDEFDPTKHKYDAEYYIENQVLPAVERILRAFGYRKEDLRYQKTRQVGLSAWLKPKGT

SEQ ID NO: 2585 - protein, 774 aa, synthetic construct
MILDTDLITEDGKPVIRIFKKENGEFKIEYDRTFEWYFYALLKDDSAIEEVKKITAERHGTVVTVKRVEKVQKKFLGRPVEVWKLYFTHYQDVPAIWDKIREHPAVIDIYEYDIPFAKRYLIDKGLVPMEGDEELKMLAFDIETLYHEGEEFAEGPILMISYADEEGARVITWKNVDLPYVDVVSTEREMIKRFLRVVKEKDPDVLITYNGDNFDFAYLKKRCEKLGINFALGRDGSEPKIQRMGDRFAVEVKGRIHFDLYPVIRRTINLPTYTLEAVYEAVFGQPKEKVYAEEITTAWETGENLERVARYSMEDAKVTYELGKEFLPMEAQLSRLIGQSLWDVSRSSTGNLVEWFLLRKAYERNELAPNKPDEKELARRRQSYEGGYVKEPERGLWENIVYLDFRSLYPSIIITHNVSPDTLNREGCKEYDVAPQVGHRFCKDFPGFIPSLLGDLLEERQKIKKKMKATIDPIERKLLDYRQRAIKILANSYYGYYGYARARWYCKECAESVTAWGREYITMTIKEIEEKYGFKVIYSDTDGFFATIPGADAETVKKKAMEFLKYINAKLPGALELEYEGFYKRGFFVTKKKYAVIDEEGKITTRGLEIVRRDWSEIAKETQARVLEALLKDGDVEKAVRIVKEVTEKLSKYEVPPEKLVIHEQITRDLKDYKATGPHVAVAKRLAARGVKIRPGTVISYIVLKGSGRIGDRAIPFDEFDPTKHKYDAEYYIENQVLPAVERILRAFGYRKEDLRYQKTRQVGLSAWLKPKGT

SEQ ID NO: 2586 - protein, 774 aa, synthetic construct
MILDTDLITEDGKPVIRIFKKENGEFKIEYDRTFEWYFYALLKDDSAIEEVKKITAERHGTVVTVKRVEKVQKKFLGRPVEVWKLYFTHYQDIPAIRDKIREHPAVIDIYEYDIPFAKRYLIDKGLVPMEGDEELKMLAFDIETLYHEGEEFAEGPILMISYADEEGARVITWKNVDLPYVDVVSTEREMIKRFLRVVKEKDPDVLITYNGDNFDFAYLKKRCEKLGINFALGRDGSEPKIQRMGDRFAVEVKGRIHFDLYPVIRRTINLPTYTLEAVYEAVFGQPKEKVYAEEITTAWETGENLERVARYSMEDAKVTYELGKEFLPMEAQLSRLIGQSLWDVSRSSTGNLVEWFLLRKAYERNELAPNKPDEKELARRRQSYEGGYVKEPERGLWENIVYLDFRSLYPSIIITHNVSPDTLNREGCKEYDVAPQVGHRFCKDFPGFIPSLLGDLLEERQKIKKKMKATIDPIERKLLDYRQRAIKILANSYYGYYGYARARWYCKECAESVTAWGREYITMTIKEIEEKYGFKVIYSDTDGFFATIPGADAETVKKKAMEFLKYINAKLPGALELEYEGFYKRGFFVTKKKYAVIDEEGKITTRGLEIVRRDWSEIAKETQARVLEALLKDGDVEKAVRIVKEVTEKLSKYEVPPEKLVIHEQITRDLKDYKATGPHVAVAKRLAARGVKIRPGTVISYIVLKGSGRIGDRAIPFDEFDPTKHKYDAEYYIENQVLPAVERILRAFGYRKEDLRYQKTRQVGLSAWLKPKGT

SEQ ID NO: 2587 - protein, 774 aa, synthetic construct
MILDTDLITEDGKPVIRIFKKENGEFKIEYDRTFEWYFYALLKDDSAIEEVKKITAERHGTVVTVKRVEKVQKKFLGRPVEVWKLYFTHYQDIPAIFDKIREHPAVIDIYEYDIPFAKRYLIDKGLVPMEGDEELKMLAFDIETLYHEGEEFAEGPILMISYADEEGARVITWKNVDLPYVDVVSTEREMIKRFLRVVKEKDPDVLITYNGDNFDFAYLKKRCEKLGINFALGRDGSEPKIQRMGDRFAVEVKGRIHFDLYPVIRRTINLPTYTLEAVYEAVFGQPKEKVYAEEITTAWETGENLERVARYSMEDAKVTYELGKEFLPMEAQLSRLIGQSLWDVSRSSTGNLVEWFLLRKAYERNELAPNKPDEKELARRRQSYEGGYVKEPERGLWENIVYLDFRSLYPSIIITHNVSPDTLNREGCKEYDVAPQVGHRFCKDFPGFIPSLLGDLLEERQKIKKKMKATIDPIERKLLDYRQRAIKILANSYYGYYGYARARWYCKECAESVTAWGREYITMTIKEIEEKYGFKVIYSDTDGFFATIPGADAETVKKKAMEFLKYINAKLPGALELEYEGFYKRGFFVTKKKYAVIDEEGKITTRGLEIVRRDWSEIAKETQARVLEALLKDGDVEKAVRIVKEVTEKLSKYEVPPEKLVIHEQITRDLKDYKATGPHVAVAKRLAARGVKIRPGTVISYIVLKGSGRIGDRAIPFDEFDPTKHKYDAEYYIENQVLPAVERILRAFGYRKEDLRYQKTRQVGLSAWLKPKGT

SEQ ID NO: 2588 - protein, 774 aa, synthetic construct
MILDTDLITEDGKPVIRIFKKENGEFKIEYDRTFEWYFYALLKDDSAIEEVKKITAERHGTVVTVKRVEKVQKKFLGRPVEVWKLYFTHYQDIPAIHDKIREHPAVIDIYEYDIPFAKRYLIDKGLVPMEGDEELKMLAFDIETLYHEGEEFAEGPILMISYADEEGARVITWKNVDLPYVDVVSTEREMIKRFLRVVKEKDPDVLITYNGDNFDFAYLKKRCEKLGINFALGRDGSEPKIQRMGDRFAVEVKGRIHFDLYPVIRRTINLPTYTLEAVYEAVFGQPKEKVYAEEITTAWETGENLERVARYSMEDAKVTYELGKEFLPMEAQLSRLIGQSLWDVSRSSTGNLVEWFLLRKAYERNELAPNKPDEKELARRRQSYEGGYVKEPERGLWENIVYLDFRSLYPSIIITHNVSPDTLNREGCKEYDVAPQVGHRFCKDFPGFIPSLLGDLLEERQKIKKKMKATIDPIERKLLDYRQRAIKILANSYYGYYGYARARWYCKECAESVTAWGREYITMTIKEIEEKYGFKVIYSDTDGFFATIPGADAETVKKKAMEFLKYINAKLPGALELEYEGFYKRGFFVTKKKYAVIDEEGKITTRGLEIVRRDWSEIAKETQARVLEALLKDGDVEKAVRIVKEVTEKLSKYEVPPEKLVIHEQITRDLKDYKATGPHVAVAKRLAARGVKIRPGTVISYIVLKGSGRIGDRAIPFDEFDPTKHKYDAEYYIENQVLPAVERILRAFGYRKEDLRYQKTRQVGLSAWLKPKGT

SEQ ID NO: 2589 - protein, 774 aa, synthetic construct
MILDTDLITEDGKPVIRIFKKENGEFKIEYDRTFEWYFYALLKDDSAIEEVKKITAERHGTVVTVKRVEKVQKKFLGRPVEVWKLYFTHYQDIPAIWDKIREHPAVIDIYEYDIPFAKRYLIDKGLVPMEGDEELKMLAFDIETLYHEGEEFAEGPILMISYADEEGARVITWKNVDLPYVDVVSTEREMIKRFLRVVKEKDPDVLITYNGDNFDFAYLKKRCEKLGINFALGRDGSEPKIQRMGDRFAVEVKGRIHFDLYPVIRRTINLPTYTLEAVYEAVFGQPKEKVYAEEITTAWETGENLERVARYSMEDAKVTYELGKEFLPMEAQLSRLIGQSLWDVSRSSTGNLVEWFLLRKAYERNELAPNKPDEKELARRRQSYEGGYVKEPERGLWENIVYLDFRSLYPSIIITHNVSPDTLNREGCKEYDVAPQVGHRFCKDFPGFIPSLLGDLLEERQKIKKKMKATIDPIERKLLDYRQRAIKILANSYYGYYGYARARWYCKECAESVTAWGREYITMTIKEIEEKYGFKVIYSDTDGFFATIPGADAETVKKKAMEFLKYINAKLPGALELEYEGFYKRGFFVTKKKYAVIDEEGKITTRGLEIVRRDWSEIAKETQARVLEALLKDGDVEKAVRIVKEVTEKLSKYEVPPEKLVIHEQITRDLKDYKATGPHVAVAKRLAARGVKIRPGTVISYIVLKGSGRIGDRAIPFDEFDPTKHKYDAEYYIENQVLPAVERILRAFGYRKEDLRYQKTRQVGLSAWLKPKGT

SEQ ID NO: 2590 - protein, 774 aa, synthetic construct
MILDTDLITEDGKPVIRIFKKENGEFKIEYDRTFEWYFYALLKDDSAIEEVKKITAERHGTVVTVKRVEKVQKKFLGRPVEVWKLYFTHYQDRPAIADKIREHPAVIDIYEYDIPFAKRYLIDKGLVPMEGDEELKMLAFDIETLYHEGEEFAEGPILMISYADEEGARVITWKNVDLPYVDVVSTEREMIKRFLRVVKEKDPDVLITYNGDNFDFAYLKKRCEKLGINFALGRDGSEPKIQRMGDRFAVEVKGRIHFDLYPVIRRTINLPTYTLEAVYEAVFGQPKEKVYAEEITTAWETGENLERVARYSMEDAKVTYELGKEFLPMEAQLSRLIGQSLWDVSRSSTGNLVEWFLLRKAYERNELAPNKPDEKELARRRQSYEGGYVKEPERGLWENIVYLDFRSLYPSIIITHNVSPDTLNREGCKEYDVAPQVGHRFCKDFPGFIPSLLGDLLEERQKIKKKMKATIDPIERKLLDYRQRAIKILANSYYGYYGYARARWYCKECAESVTAWGREYITMTIKEIEEKYGFKVIYSDTDGFFATIPGADAETVKKKAMEFLKYINAKLPGALELEYEGFYKRGFFVTKKKYAVIDEEGKITTRGLEIVRRDWSEIAKETQARVLEALLKDGDVEKAVRIVKEVTEKLSKYEVPPEKLVIHEQITRDLKDYKATGPHVAVAKRLAARGVKIRPGTVISYIVLKGSGRIGDRAIPFDEFDPTKHKYDAEYYIENQVLPAVERILRAFGYRKEDLRYQKTRQVGLSAWLKPKGT

SEQ ID NO: 2591 - protein, 774 aa, synthetic construct
MILDTDLITEDGKPVIRIFKKENGEFKIEYDRTFEWYFYALLKDDSAIEEVKKITAERHGTVVTVKRVEKVQKKFLGRPVEVWKLYFTHPQDVPAIADKIREHPAVIDIYEYDIPFAKRYLIDKGLVPMEGDEELKMLAFDIETLYHEGEEFAEGPILMISYADEEGARVITWKNVDLPYVDVVSTEREMIKRFLRVVKEKDPDVLITYNGDNFDFAYLKKRCEKLGINFALGRDGSEPKIQRMGDRFAVEVKGRIHFDLYPVIRRTINLPTYTLEAVYEAVFGQPKEKVYAEEITTAWETGENLERVARYSMEDAKVTYELGKEFLPMEAQLSRLIGQSLWDVSRSSTGNLVEWFLLRKAYERNELAPNKPDEKELARRRQSYEGGYVKEPERGLWENIVYLDFRSLYPSIIITHNVSPDTLNREGCKEYDVAPQVGHRFCKDFPGFIPSLLGDLLEERQKIKKKMKATIDPIERKLLDYRQRAIKILANSYYGYYGYARARWYCKECAESVTAWGREYITMTIKEIEEKYGFKVIYSDTDGFFATIPGADAETVKKKAMEFLKYINAKLPGALELEYEGFYKRGFFVTKKKYAVIDEEGKITTRGLEIVRRDWSEIAKETQARVLEALLKDGDVEKAVRIVKEVTEKLSKYEVPPEKLVIHEQITRDLKDYKATGPHVAVAKRLAARGVKIRPGTVISYIVLKGSGRIGDRAIPFDEFDPTKHKYDAEYYIENQVLPAVERILRAFGYRKEDLRYQKTRQVGLSAWLKPKGT

SEQ ID NO: 2592 - protein, 774 aa, synthetic construct
MILDTDLITEDGKPVIRIFKKENGEFKIEYDRTFEWYFYALLKDDSAIEEVKKITAERHGTVVTVKRVEKVQKKFLGRPVEVWKLYFTHPQDVPAIHDKIREHPAVIDIYEYDIPFAKRYLIDKGLVPMEGDEELKMLAFDIETLYHEGEEFAEGPILMISYADEEGARVITWKNVDLPYVDVVSTEREMIKRFLRVVKEKDPDVLITYNGDNFDFAYLKKRCEKLGINFALGRDGSEPKIQRMGDRFAVEVKGRIHFDLYPVIRRTINLPTYTLEAVYEAVFGQPKEKVYAEEITTAWETGENLERVARYSMEDAKVTYELGKEFLPMEAQLSRLIGQSLWDVSRSSTGNLVEWFLLRKAYERNELAPNKPDEKELARRRQSYEGGYVKEPERGLWENIVYLDFRSLYPSIIITHNVSPDTLNREGCKEYDVAPQVGHRFCKDFPGFIPSLLGDLLEERQKIKKKMKATIDPIERKLLDYRQRAIKILANSYYGYYGYARARWYCKECAESVTAWGREYITMTIKEIEEKYGFKVIYSDTDGFFATIPGADAETVKKKAMEFLKYINAKLPGALELEYEGFYKRGFFVTKKKYAVIDEEGKITTRGLEIVRRDWSEIAKETQARVLEALLKDGDVEKAVRIVKEVTEKLSKYEVPPEKLVIHEQITRDLKDYKATGPHVAVAKRLAARGVKIRPGTVISYIVLKGSGRIGDRAIPFDEFDPTKHKYDAEYYIENQVLPAVERILRAFGYRKEDLRYQKTRQVGLSAWLKPKGT

SEQ ID NO: 2593 - protein, 774 aa, synthetic construct
MILDTDLITEDGKPVIRIFKKENGEFKIEYDRTFEWYFYALLKDDSAIEEVKKITAERHGTVVTVKRVEKVQKKFLGRPVEVWKLYFTHPQDIPAIRDKIREHPAVIDIYEYDIPFAKRYLIDKGLVPMEGDEELKMLAFDIETLYHEGEEFAEGPILMISYADEEGARVITWKNVDLPYVDVVSTEREMIKRFLRVVKEKDPDVLITYNGDNFDFAYLKKRCEKLGINFALGRDGSEPKIQRMGDRFAVEVKGRIHFDLYPVIRRTINLPTYTLEAVYEAVFGQPKEKVYAEEITTAWETGENLERVARYSMEDAKVTYELGKEFLPMEAQLSRLIGQSLWDVSRSSTGNLVEWFLLRKAYERNELAPNKPDEKELARRRQSYEGGYVKEPERGLWENIVYLDFRSLYPSIIITHNVSPDTLNREGCKEYDVAPQVGHRFCKDFPGFIPSLLGDLLEERQKIKKKMKATIDPIERKLLDYRQRAIKILANSYYGYYGYARARWYCKECAESVTAWGREYITMTIKEIEEKYGFKVIYSDTDGFFATIPGADAETVKKKAMEFLKYINAKLPGALELEYEGFYKRGFFVTKKKYAVIDEEGKITTRGLEIVRRDWSEIAKETQARVLEALLKDGDVEKAVRIVKEVTEKLSKYEVPPEKLVIHEQITRDLKDYKATGPHVAVAKRLAARGVKIRPGTVISYIVLKGSGRIGDRAIPFDEFDPTKHKYDAEYYIENQVLPAVERILRAFGYRKEDLRYQKTRQVGLSAWLKPKGT

SEQ ID NO: 2594 - protein, 774 aa, synthetic construct
MILDTDLITEDGKPVIRIFKKENGEFKIEYDRTFEWYFYALLKDDSAIEEVKKITAERHGTVVTVKRVEKVQKKFLGRPVEVWKLYFTHPQDIPAIADKIREHPAVIDIYEYDIPFAKRYLIDKGLVPMEGDEELKMLAFDIETLYHEGEEFAEGPILMISYADEEGARVITWKNVDLPYVDVVSTEREMIKRFLRVVKEKDPDVLITYNGDNFDFAYLKKRCEKLGINFALGRDGSEPKIQRMGDRFAVEVKGRIHFDLYPVIRRTINLPTYTLEAVYEAVFGQPKEKVYAEEITTAWETGENLERVARYSMEDAKVTYELGKEFLPMEAQLSRLIGQSLWDVSRSSTGNLVEWFLLRKAYERNELAPNKPDEKELARRRQSYEGGYVKEPERGLWENIVYLDFRSLYPSIIITHNVSPDTLNREGCKEYDVAPQVGHRFCKDFPGFIPSLLGDLLEERQKIKKKMKATIDPIERKLLDYRQRAIKILANSYYGYYGYARARWYCKECAESVTAWGREYITMTIKEIEEKYGFKVIYSDTDGFFATIPGADAETVKKKAMEFLKYINAKLPGALELEYEGFYKRGFFVTKKKYAVIDEEGKITTRGLEIVRRDWSEIAKETQARVLEALLKDGDVEKAVRIVKEVTEKLSKYEVPPEKLVIHEQITRDLKDYKATGPHVAVAKRLAARGVKIRPGTVISYIVLKGSGRIGDRAIPFDEFDPTKHKYDAEYYIENQVLPAVERILRAFGYRKEDLRYQKTRQVGLSAWLKPKGT

SEQ ID NO: 2595 - protein, 774 aa, synthetic construct
MILDTDLITEDGKPVIRIFKKENGEFKIEYDRTFEWYFYALLKDDSAIEEVKKITAERHGTVVTVKRVEKVQKKFLGRPVEVWKLYFTHPQDIPAIFDKIREHPAVIDIYEYDIPFAKRYLIDKGLVPMEGDEELKMLAFDIETLYHEGEEFAEGPILMISYADEEGARVITWKNVDLPYVDVVSTEREMIKRFLRVVKEKDPDVLITYNGDNFDFAYLKKRCEKLGINFALGRDGSEPKIQRMGDRFAVEVKGRIHFDLYPVIRRTINLPTYTLEAVYEAVFGQPKEKVYAEEITTAWETGENLERVARYSMEDAKVTYELGKEFLPMEAQLSRLIGQSLWDVSRSSTGNLVEWFLLRKAYERNELAPNKPDEKELARRRQSYEGGYVKEPERGLWENIVYLDFRSLYPSIIITHNVSPDTLNREGCKEYDVAPQVGHRFCKDFPGFIPSLLGDLLEERQKIKKKMKATIDPIERKLLDYRQRAIKILANSYYGYYGYARARWYCKECAESVTAWGREYITMTIKEIEEKYGFKVIYSDTDGFFATIPGADAETVKKKAMEFLKYINAKLPGALELEYEGFYKRGFFVTKKKYAVIDEEGKITTRGLEIVRRDWSEIAKETQARVLEALLKDGDVEKAVRIVKEVTEKLSKYEVPPEKLVIHEQITRDLKDYKATGPHVAVAKRLAARGVKIRPGTVISYIVLKGSGRIGDRAIPFDEFDPTKHKYDAEYYIENQVLPAVERILRAFGYRKEDLRYQKTRQVGLSAWLKPKGT

(The sequence listing continues in the following parts.)